United States Patent Application Publication US 2007/0161031 A1 - sequence listing, part 4

SEQ ID NO: 3882 - DNA, 2300 bp, Homo sapien
gcattcaattatttttttatcatttatactctgccttgtttcagaaaggttttaagggccagaagtttgaactaatgtttttttcaataatagggagctaatggaggtttcttaattggaaaacacttggtcagctaattgtttgtttgtttgtttgtttgtttgtttgttgagatagggtctggccctgtcacccaggctggagtacactggtacgatctggactgtctgtaatctctgcctcctaggctcaagagattctcctacctcagcctcttgagtagctgggactataggtgtgcaccaccacactcggctaatttttgtattttttttgtagagacagggttttgccatgttgtccaggctggtctcatgagctcaagccatctgcctgcctcagccgcccaaagcggtttgtttgtttttcttttttaaagcaagacagttggtaatagcatggcaattgataagagtgaaggctctggagccagaatgcttgggtttgcagccaggctgcacactagccatatgagtttggacaaactacctcatttctgtcatccccagtttcctcatttgtaaatggggttgtggtgatggtaaaaagggataatatagttaagctagtagtacaatgcctaacacataataagtacttcaatagtaggtggaagcaagatgctggaggtggtggtggtgatggtgaaggctcaaccaagtccatgtcagtggactggaaagagagagagtatcaagaggccttctgaggttgtaaatgacatgcagaaagctgagtagggaggggacatggtaatgatattaaccaagatgggcactacaaaactggagcatgttagaggtgagggtgcagagagagacaaggagtttgcttttggtcaggcaggtaggtggaagtcagctctaggggtctaaataaaggattccagggccagagatcaaatgattgtctcagccatttgtgcattcattcataaaatatgtatcaaatgccctctctgtgccaggcactgtcctaggctctaaggataaagaaataaatgagatgtagtctcaagatacaatttaatggagaagaccaaaacaacaacaaaaagcaagttataagcatgataatgatgatttatacactagaatatggacagggtatcatggaacttgagaggtggtctcggcgggtggtgcaagtaaggaaatatttccaagaggatgtacccatgagtggaggcttaaaaagtggtagtttttagatgaagagagaggtgtctgagagggcagagcctgacaaaataggagttgtgtggtcttgctgggcaggatgcatgtggaatgtgaatgggtttgaggctgaaagtgtagccaggggcaggtcacgtagggcccagtgtcacctgtaaaagcaagccactagaaatgtttatgcagggaaggctcaagaccagatttgtctcttaatattattctggtcacagtaaggagtacaaattgaaggagaacaagactaaagccagggagagcattcatgctgttcattcatttaacaaatatttattaagcacctactggtaccaggcaccagtccagttgctggggtcatagtggactgtgaggttcatggcagttccagctcccatggaacttatgttctggtgtgtgctgggggtagaatgggtagagcaggaccagttagaaagctgctgttgcagcccaagagagaaataatgaagactgaaactagtgctgaaatgagaaatggatttaagtctttttgtttctgttgtcatgttaaaagttaaaattggcaactgttgcagattgaatggatatgggaataagagaagagctgtctaggatcagctttaggtatctgtttctttcaagtagattataaaatctgtcaatatgctacccacgcattttgcctatcacttgctggcttgtatgctggatgggttacttaaactctctacctctgtttcctcatctgaaaaatgagtctaatattcgtgcaactcatagggttctttgaggcatacaagagctaatgaatataagggtatgatagacagtcagcaagtttttgtcattattacttttgctactgtgcatgtaacatttaatgtggtatggtgatcagtactctttggtggtagttttattttgttttaagagacaaggtgtcactatgttgcccaggctagactcaatctcctggactcaagtgatcctccccatcagcttcccaggtacctgagattacaggggcctggcttctgtgg

SEQ ID NO: 3883 - DNA, 2300 bp, Homo sapien
atgacagataccaaattcaatgaagtagttaatttcagagaggaagagagggagaatgagattgcaggcagtttcacaaggagctctaactgaatgttaaaatctgaagcaaataagagaaaatgttaaaatgggataaagctagatggttggtatacaagtgttcattatattattttctgtaactgtacattctggtaatatttcatattaaacattttaaaggaaagttaagcttccaagattctataaaaagaacaaaataaacccaaagagataagaagaaattaatgaaggcatacattaatgaaagagaaattacttttaagacagattttatctataaaaccaaaagctggtttgataaatatgatcaagaaaaagactccaatacaatatataagaatatatatataagaatatataagaatggttgagaacaatatgagatttttttaaatgttagaaaatatagctgaaatactttttttttaaagatggagtctcgctctgtcccccaggctggagtgcagtagcaaaatctcagctcactgcaagctccgcctcccgggttcaagccattctcctgcttcagcctcctgagtagctgggactacaggcgcccgccaccatgcccggctaatttttcattgtcgtatttttagtagagacggagtttcaccgtgttagccaggatggtctcgatctcctgacctcgtgatccgccctcctcggcctcccaatgtgctgggatcacaggcgtgagtcaccgcacccggccaatacttttctagaaaaaactaattttctcaagaagcaaaagaaaaaattctaggtatcaataacgatggacgctatataaaaaacaaaactatccattaagatggcaccacacccagaaggctttaaagatgagttcttcaaaacctaagaaatgtatcattcacacatgctatgtctattccaggtcatacaaaaataagttaacctgtctgactcctagcacaacctgataccaaaactagacaaggacagcaaaagaaaaccataagccaatctaacttaggtgcatacatgaaaatccaaaattaactacacagcaaattgcatccagcaatatattgaaaaaataagataccaggattctaagtttggctcaccattagaaaatctattattgtagttattttattgtagagtaatggaaaaaaggccatacaatcatctcaaagactgatactgaaaatacttggtaaaacttagtcatttgctgattaaaaaaaaaaccgatatggtaaactacgaaaagaacataatttgcctatacacccacacacacacacaccataaacctgcagaagatatcttgaatgaaacctaagatgcaatccaaaataactcctggtaagaaataagtacctccggctactattcagtgttgcactggattcttgggaaaagccaaaattgttctttacagataaattcttacctacaaatcaaagaggactgcctgtcaaatttttagaatacgaacgtttagtgaagtgtccagatagatcaacaatcaaaagccattcttatacaaggatactaatggattaatagtctattagtaaaaacaaactacaataacaaaaatagctatgaaaaaatgttaaatgcgcacaacaccaagcgaactgcaacgctttacctgaaaaacaaagggagaactgaattaatttaaaaaaatagccacattgctggacgggaattctcaatattgtactagtatccaatctcggcaaatctacaaaaatatggaatcccaaacaaatccctggaaatctttgccatttgggcgccaatctactaaagaaatcggccccagggtgtgaggtttctcacatgtgcgtgaaaacgcttcgagaggggtgcagccgcggacacaaaaaccgtggcttgagtccccgcgcccctcccctcccctcccctccctccctccagtccagcagctcttgcctaaggctcccgcgaccggaagagtcgcttccgctcccgccccgctctgtggcgtaggccggacatttctagtcgactgttgcgcgtgcgcgcgctgtgacgttccctacgcggtcgggcgttgggtttcgcggcgctcgccgcactggttgttcagcaccttcggtccggttgaggttgtcaagtcggaccaaacaggttgtttctctgcagtttccagtaagtgaccgttccagccggggctgtggctagagtgtgaaggcaaaccggtagaagccgcgccgccattttcttcc

SEQ ID NO: 3884 - DNA, 2300 bp, Homo sapien
ttacggtatcaaggcagctgtcagggagggtcgtgggttagggagtgcctccctcttctaatcacaggcaccatttgaaaaatgcaggagaggggccagctgcgtctgccagggagactgctataagtcgtctgtgtgcttgttccctggcatcccagggtcaggagtcctgaagctcatctggcagctgctgcgacaaaatctttctgatggctcaagacattggcctctatgatctcatttacattcattgtgtgtgcattagaaggggagatattaatacaaaagcatggctatagaaaagggatgaattgtttttattcaaacacagaatggtcagtagcagacccaaggttgtactacttggagataaaagtctttaactctgggccctaatgctgtccctgctccccacctgcctgccagacttccacctcctcctcatctgatccagcaatccagcacacacaggcttggctgggatgtgtgcagagaggagagccaggctcagccagctcctagcttggtgcccctgtagaatggtgctttagaaatacgtgctgcacagatgagcatgtgacttagtccatgccctcctctcctcattgcctccagcaactttcctaaagggaaggtaaagtcttgtcatccccctgctcccttccctacagtgtggaaatgcctgggaatttctgcccttggacctccaagccacgccccttgggaaagtgccaggatagtggtggggtgctcagaggtggggactcccagttacctgctttgggtgactctggccttagctggccctgaggtggaggccgcctgggaactgtgggtcagaggaagtcagcttcagctccctcaaatgtggggatcttccatccccaagtgacccactcaatctttggggctgtcgtgctgtgaactggtcaagagaagtatatgatccaactcctgactcaagaatcttgcctgcttgatggatgaagagggaaggcggatggaaccagctgagtggaaccagccacagagcaagcacgaagtgacaaatcacccagggacgaaatcatgcaggcaggcaggtgggcaacctgagtccatttcatcagccattgtttaatttattcttggttgtactttctgctttatttccaacacaatcaaaaccagatgtgtgcaaaagtcacgctatcacccagcacaggattacctaagatctattataatgcagcttcatgcccattacagtattcccatgcccctcacagggcagtgtgcatctgttttagtgctacctaatgtctgttaggtgcaagctggcccacacatggcttctaggcagaacagtctacaagtgacagcgtgaccagagagcagagacaggaaggaggcccagacatgagtgtgggatgctgcagaacagcaacaggatgcttctgctatccccaaatgttatctcaaatacctcaacgtcaatgctttctgttccatgttcctcttctccctggacagcccctccttctgaaagtcagaactgtctgctcttgagcttgccttgagggaaggaaataatttagataagcagagaggaagacaggcaagggatgtggtggggcaaaggcggagatgtatcttcacaggtccctgtcctcagcacccagaatcaccccttccctgtaggagggagctgatagaaagaggggatctccatccaggagccacccaccaggcagctggaaacatttgccaacagcaggtacacctagggctcagcagagggttgggtgagaatggtcttgcccagtttgtgccacactgagcaccggctggaggaggaagcggacagaatgccatctggacacaagtgctccctcactgcctgggcctgggtcgcctcaggcttttgtgtcagatcagccactccctctacagataatgctgctccaggcaaagaggcttaggtgggtctccagggcaaccgcagctcaggagctggcccgcctccatggttcatcagggaagctgtggctccagcctcgcgggatacatacacgcatacacacacacacacacacacacacacacacacacacacacacacctacacaccccacaaacaatagtccaggctggatctctcctcctgtctcttctcttggtaaaacttctcagagaaccaaagagaggcaaaatttgaggccagccggcagcagcagagaagctgagggagacttgaggatgtagactgccctgccctgctgtggctgctcaactttctttttttttcctgaaaatatcca

SEQ ID NO: 3885 - DNA, 2300 bp, Homo sapien
agctctggaggctgggaagtccaagatcaaggtgccagtagattcagtgtctgctgaaagcccacttcctagttgatggaggcatcttctcacagtgtcctcacgtggtagaagggccaaaaagctccctgagaccatttcacaagggcagtaatctcattcctgagggctcccctcttacgacctaatcacatccgaaaggtcccacctcctaaccatcaccttgggagattcaagattgaattttggggaggacacaacattcagtccgtagcacctggagaggaaatgtgaccacaggaatagaaagagggatgcccagagagaagaggtctaagtaactgcaaatctggtctgtacctatgaatattctgtccatttaattcaacttctttgggattagggctacacagaccttctgcaggatttggaaaacccaacgcatgactgagtggttagaaatggtttgaaatagcctggaaagactccagggaggagagaacggagcgcgcgcgtgcacacacacacacacacacacacacacacacgcagagccggggcttatctctaatctccatgcggattttaatccagccttgcatgtaatcgcctcataactccacatttccaatttattaatcaaatgccatctatgaggcaatgttgcgggccccaccggtgtttctgcatttgatggttgctgaatatctatgcttcagcaacttccatccacgccaaacaagagaaaaacaaccgccaccttttctccccagagcaaattcacactcagcaaggataatcacaaatcctccacaggtgaacaaatcagaataaatgaggagtcaacacacccaccaaggcctgtgagttacggtatcaaggcagctgtcagggagggtcgtgggttagggagtgcctccctcttctaatcacaggcaccatttgaaaaatgcaggagaggggccagctgcgtctgccagggagactgctataagtcgtctgtgtgcttgttccctggcatcccagggtcaggagtcctgaagctcatctggcagctgctgcgacaaaatctttctgatggctcaagacattggcctctatgatctcatttacattcattgtgtgtgcattagaaggggagatattaatacaaaagcatggctatagaaaagggatgaattgtttttattcaaacacagaatggtcagtagcagacccaaggttgtactacttggagataaaagtctttaactctgggccctaatgctgtccctgctccccacctgcctgccagacttccacctcctcctcatctgatccagcaatccagcacacacaggcttggctgggatgtgtgcagagaggagagccaggctcagccagctcctagcttggtgcccctgtagaatggtgctttagaaatacgtgctgcacagatgagcatgtgacttagtccatgccctcctctcctcattgcctccagcaactttcctaaagggaaggtaaagtcttgtcatccccctgctcccttccctacagtgtggaaatgcctgggaatttctgcccttggacctccaagccacgccccttgggaaagtgccaggatagtggtggggtgctcagaggtggggactcccagttacctgctttgggtgactctggccttagctggccctgaggtggaggccgcctgggaactgtgggtcagaggaagtcagcttcagctccctcaaatgtggggatcttccatccccaagtgacccactcaatctttggggctgtcgtgctgtgaactggtcaagagaagtatatgatccaactcctgactcaagaatcttgcctgcttgatggatgaagagggaaggcggatggaaccagctgagtggaaccagccacagagcaagcacgaagtgacaaatcacccagggacgaaatcatgcaggcaggcaggtgggcaacctgagtccatttcatcagccattgtttaatttattcttggttgtactttctgctttatttccaacacaatcaaaaccagatgtgtgcaaaagtcacgctatcacccagcacaggattacctaagatctattataatgcagcttcatgcccattacagtattcccatgcccctcacagggcagtgtgcatctgttttagtgctacctaatgtctgttaggtgcaagctggcccacacatggcttctaggcagaacagtctacaagtgacagcgtgaccagagagcagagacaggaaggaggcccagacatgagtgtgggatgctgcagaacagcaacaggat

SEQ ID NO: 3886 - DNA, 2300 bp, Homo sapien
ttttctcctaaaaatcagcttcttggcctcccttcccaacttcctcacctgtttaaggcagtattttccttgtcaggttagaaacattataactatctttgttctcctacctagcttcctccttcccaatacccaattaatcatcaaattctatcattttttccttaataatgtcttgaaaattttcctccattctttatattccagcaaaacagaaacagaaggtgaggatccagctctccagtctggatggggagactagaaacacactacatacaagtgaaaaaaatttcataggaattacaagaataccaaaacaatgcaaaataacagctccaaacaagccttgtatacacatctccaggcaatagctggcactgcatttgtccagtagtaatctagggcagtgggtggggaggtccttctgctgcgcaggggctgtggtgaggcctttcaggtccagcttaagccactctgattccagccaccaccccaccttagatgggcaagctgttcctttccagatcaactcatctccacccacaacacagtgcttatgtattcagtctaaaatagcacaatttatcaagagtattccatcgtaattttaaaatgtcgtgtttatattttacctccacctggacagaaactcgttcctttgtattcttactgcccctccacctccccatagcaaccagcacaagattccaccgtgtgtagtctataaataaatgttaaatcatagagccttagaattttggagtcagacggggatcttcagagttgcatttgtccagtcctttatagatggggaaacaggtctagagagattaggtgacttgctcaaagccacacagctggctattgacaaggcaaggagcagagcccaggtttctcctgcctgaagtctgtaccctgaactgtccttagataatcagtgacagacacctgagttcacacaaggtctccaggggttgatggtgataggagaaactggctttcccaaaacatgtacaaagattcggtccacgcccctagcagaccttcgggaggactaactcctcagctcggcgtccagcagagtcccaagttacagtcgcacttgtttatgcgtctgtcggcctcctccgacaggaccgagtactcgagggccccgcgctcaggggctcccctccggcccctcccccgccgccgagctgtcacacagccgccgcgcggcccgcccccacgtggactgggctcggaggatcaaagtctgtttgcagactttgcagcccggcccccgcaggtgtgctgggagttgcgatggtccgcaggccaggactccgccacacccgaggggacccggccagcccctccccctcccgctgcacgcggcccgcgcccccaattcgcccgccgctgcacccggccacggccccccggcccacgcccggctccgggaggaaaaggccccgcccctatctgttggagccgcgaccccgcccccttcccgcccctccgaggctccatccaatagtgagcgtggctgggcgggacgccgaggctgtcgtgagggggtcctgaccaatggggaagcgtgccgggcctggtgggcggggcggcaaggccttgtcacgctcgggtccgtgtgaaaacgggggttccgagtgcaaagcaaagtttttttgtaaaccgtctgcaaaggcgggggggcgaagaaggcgcccgagaccgggccgagtgcagctgccgtggccgccgcctctctagctcctcagccatccgctcctcagtccagccgccgcagaggagaccagcaagcagagccctcagatgctcggagctttctcggcgcgaagctgcccgtcgccctctcctgccgccctcgcccgccgccctcctgctcctgctccggctgcggctcttggtaccccggctccgggagcccagctccccgccaccgccgccgcctgggtgtgggggctgctgaggctgagccgggcctcggcgccggctctgaggacggacgcctgaggagctgcgcggcgcggcgccgccggctggcggagaacgcccacaggcgcggggctcggcggcttgacccgggcttgtccccgtgcggccgcgggggcccctcagcggtttcccgaacggcccgactcgggcgctcctccgtgtcgcggtcgccgaccctccgcgtcccgccaacgccgccgctgcaccagtctccgggccgggctcggcgggccccgcagccgcagccatggggtgttggggtcggaaccggggccggctgctgtgcatgctggcgctgacct

SEQ ID NO: 3887 - DNA, 2300 bp, Homo sapien
gccctttacagaaagtttgctggtccctgccctacatcagtattggatctctttgttaccacagcctagccctcccttggctaatgcagtacacaaccaacactgctaacaagaggagatacatcgaagtggttttgtcttcttttttctttcttttttttttttttaagatggagtcttgctttgtcacccaggctggagcacagtggcacaatctcggctcactacaacctccatctcctgggttcaagtgattctccagcctcagcctccccagtagctaggactacaggcatgcaccactgcgtcgggctaatttttgtatttttagtagagacggggtttcaccatgctggccagactggtctccggctcctgacctcaggtgatccgcccgccttagcctcccaaaatgccgggattacaggcgtgagccactgtgcccggccttaattttttttttttagaggcagagtctcgctctgtcacccagcattcaccaatggtgcaatcatagctcatggcagtctccaattcctggactcgagcgatcctcctgcctcaccctcctgaggagctgggagtacaggtgcatgtcaccatgcccggctattttttttttgtagagacagagtgcatagtgaaagctctctctgtgttttttgtcaactgtcacaccacaacaatcatcaacacagaagacttctgtgaccaaatatggagggttttcccccacacaccaagcagtagaccccagccagtgtcctctaattcagtcccaacacaatctatccggagacagtgtcaggccccacaggttgagggctcagacccccaagactgccccctcgccccaccacacaaactagttgcaaggccaggcctccagagcttttgactgaccagcttcaagtttgggttcccatggccccctctttgggtttgattaatttgctggagcggctcacagaactcagggaaacacttattacatttactggtttattacaaaggatatcgcagaggatacaaacgaagaggcatgtaaggcggggtatcagggaaggagtgtggagctgccatgccctccctgggcgctacactccaggaacctccctgtgttcagctatccggataaaagctccctgaaccctgtcctcttgagcttttatggaagcttcttgacatcagcattctttcccccagggcatagggtgggacccttgcatgggagagtcttaaaatccacaatcagaaaggcgagggaatgttagagtgaaaagagctagggagaaggtcagaggctgcccctgaggcctaatgcacccaacattctaacaaaagactgaaacaagggctatgggagttatgagccaggaaccctcttggacgaaaaccaatctatttcataacaccacactgggtgtccctatgttgcccaggctggtctcaaactggcctcaagcaatcctcccgccttggtgtcccaaagtgtggggattacaggcattagccacggaactcaacccatcaaagtgtttgtttttgttttgttttgttttcgagacatagtctcactctgtcactcaggctggagtgcagtggtgcgatctcggctcacagcaacctctgcctcccgggttcaagagattctcctgcctcaacctcctgagtagctggaattacaggcatgcaccaccatgcctggctaaattttgtatttttagtagagatggggcttcaccatattggtcagactggtctcgaactcctgacctcgtgatccatccacctcggcctcccaaagtgctgggattacaggcgtgagccaccacacccagcctctcaaagtgttttaaattcagttaataaaccacttattccctggaaacagctcctgtcatggcacagcccacttcaggaaaagttgtaccaggcagcctgtgagaacattttcaatagaaatgagtggaccaggaacaaattttattcctactcaatggctgtgttttctttggcagaagctagaccaagtttcacatcacagttgagaggagacgtgcataggaactgcgtcatctggttccacactcgctccagtgatgtttgagccccagcatagatcagcatgccaggaagcagcccaccggacccacccctgatcatggcactggacattgttttccgtgcttttctcaggctggtttctgcctgtcccaaccctggccatggctgacaaggggcccagggacactggagcagagagacctgctggtccttggggtttcttgcaaggtagg

SEQ ID NO: 3888 - DNA, 2300 bp, Homo sapien
cactctgtcgcctaggctggagtgcagtggtgtgatctccactcactgcaacctctgccacctgggttcaagcgattcttctgcctcagcctcccgagtagctgggattacaggtgcctgccattgtgtctaatttttgtatttttagtagagacggggttcaccatgttggccgggctgatcttgaactcctgacctcgtaatccacccgccttgacctcccaacgtgctgggattacaggtgtgagccaccgtgcccggccagggctctgtcttatacagtttcatgttgctataataggatgccacagactggacaatttataaacaatagtttatttggctcacggttctggaagctaggaagtccaagatcaaggggtagcatctggcagcagccttttctctgggtcataaaatagcagaaggcatcacatggtaagagaaacagcaagggaaagccaaactcatttttataaccaaccgactctcaagataacccactcctgtgattacgttaatccattcgtgaggggtagccctcataacccaatcaatttaaaggtctcacctcttaacacttttgcattaagaatagtttccaacacatgaactttgggggatacattcaaaccacagcaagctctatggataccaatctgtaagaggcacaaaaataaaaaaatgatgctaattaacacagccacttgcagtgccttacataacttttgaaacctaaattggtcctattcccctgaggtaagacagtgcccttgaatgttaatttaaaaattctcctggttggcaattccaattatcttatgttatattcagggcatgtaataagtcccttatttttacataaagagcttttaaattcttattaatagaaaatcaggtgtcttttaatcctttgctgaacagatatttaaagaaaactggcctgttcatgcatttccaaattattagctttctggtaatttacatattcctctaacaagccctggatggaggcctctaagtcctccttccctggtaaacatggggctgttcatttggctgggtaagctgagaacgttggtgtgtgggtgcgtaaaagagaatctgtgttcaatgaagtattgtcgatagggttaattgtgtatttggcacacataaacgggacaagacgtgtaaagtacttggtaggagagcgacagtatttctccttttttttttttttttggagactgggtgtcactctgtcgcccaggctggagtgcagtggcgcacggctcactgtaacctctgcctcccaggttcaagcaattcctcatgcctcagcctcccaagaagctgggattacaggcctgcaaccccatgctctgttacttttttttttttttttttcatttttagtagagacggggtttcgccatgttggccaggctggtcttgaactcttggcctcgagcaatccgcccgcctcggcctcccaaagtgctaggattataggcgtgagccacagcgcccggcctaattttcgtattttcagtagagacgaggtttgccctgttgcccaggctggtctgaactcctgggctcaagcgacccacccacctcggcttcccaaagtgctagggttacgggcgagcgtgagtcaccgcgcccacccgggagtctgtatttctaatttgtattcagctctcagcatatcctcaacgtgaccccacccaggttcagggtactggaacctgagcgaggaatgcgtgtgccggggagagtaggtagtgtgaggggccagagtgcaaaggtcagaaggcatctggtggaagcggtgtgcaaagaagcctgaggggaggaccttagatctcggttaccttggcgatctctatcagagggttagagttgccgagaggcgccagctgccgcttcctctctcccgccctccgtttggcttagctcgccgggttctcccacaggttaaaagcagacgccgacgcggttgcctagtgacacttttcccaaaatgcctagggtattgttgtgttcttcttagccaatgagagaggcgaagcggcccaccgcctgccaatagactgcgagatcagggcccgcgacggttaaacggggcccaaggcaggggtggcgggtcagtgctgctcgggggcttctccatccaggtccctggagttcctggtccctggagctccgcacttggcggcgcaacctgcgtgaggcagcgcgactctggcgactggccggccatgccttcccgggctgaggactatgaagtgttgtacaccattggcacaggctcc

SEQ ID NO: 3889 - DNA, 2300 bp, Homo sapien
actgtgacaaattgtggcaagaattaagaagaaaacaaacgaagaactgagatgattccatttaaacagagaaagaagatgagcaactctataagagtggggccaacccttgaacttctcgataaccactctccccacacccatggtctaattcactgtcttcacacttttcttgctaactgtgctcatgttgtcagttttcatttaaatttggtgaaatctcaaataagagagtatttgcacttgcattttctcccacaggcactctgtacatgtccatagagacactgattgctattattattattttttgagacagggtatcactctatggcccaggctggagtgcagtggcacgatcacagctcactgcagtctcaacctcctgggcttaaagcaatcctcccacttcagcctcctgagttagctgggatcaccggtgcacatcaccatgcctagccaattgttttaactttttgtagggatgaggtctcactaagttgcctaggcttatcttgaactcccgggctcaagcctctcagcctcccaaaatgctgagatttcaggcgtgagccaccacgcctggcctgattaattttaattttaattttctttttctttttttttttttttttttgtgatagagtctcactctgtcacccaggctggagtgcagtggcgccatctcggctcactgcaacctccgcctcgcgagttcaacagattctcctgcctcagcctcccgagtagttggcactataggtgcaggccaccatgcctggctaatttttgtatttttagtagagacagggtttcaccatattgaccaggctggtctcaaactcctgacctcaagtgaaccacccgcctcggcctcccaaagtactgggattacaggtgtgagccactgcatccggcacctaattaatgtttaaaagaagctacttgaagattaatgagcatcccagacttaatgtgccaaaaatcaagttcctgatcttcatcccaaatttgttctcctctccatcttcttagtctccagtaactaatgtatctgattttgttgctgtttgtttgatttactgcagtattcccagcacctaaaatgtgcctggaacaaagcaggaacccagcacttgtacatcaaatgaatggatgaatgaacaaagccatatttcattgccctcagcttcgtttttttatgttgcattaaagacccactagagggctgtacatcactgcataataaacgaggagctggcgcctgcgcggcagcactactccgcctgtccctacaggaaatccccagatttgcatgtgtagaatttaaaatcagacaagacatttgtgtataagtcttatctccacaattacttgaagcaatttgaagtcagggattatggcaattctttcgagtgattaaaaaagatttctagaaagaaaaaaggagagattctttgtttataacaatcagaagctaagagatgcttttaaaaaaaagatgcatgacatactatatgctcaacaaataaccacgttctagaacaaagaatgaggtgttaggcagactgttcttaacagccacataccacgtgagataaacaggacaagatgtagactgagagacagcttcagctaaatggcaggcagctggaggatatgatgagaagaaagttatctttgaaaccaaacagtgtttagttaagagctccatcacattttaaaaggcaatagttttgaatttatacccaagggtacaaattagggaaaaacatttcttttcaatataaggataaactttcagacaaagacagacattcataattttccatgttttttcctgttacttgtaaattcaggatatttgttatctctaagaatattcatcacctaaatgtgataagacaaatgttaaaactaattatggacggtgaggcctgctagagtctgaatgcttgtgacctccctaaattcgtatgttgaaacctaacccccaaggtaatggtattaagaggtggagcctctgggggagtgattagtgcccttatattaatacaaaaggccccagggagtttgtttgccatgtgtttgccctaccatgatgtgaggacacatagagcatgccatctatgagaaacgggctctcatcagacactgaatctgctggcacgttgaccttggactttccagcctccagaactgcaagcgataagtttctgttattcataaattacccagtctaaagtattttattatagcagcctgaaccaccttgcacaggaccataatgtgtttctaag

SEQ ID NO: 3890 - DNA, 2300 bp, Homo sapien
ctggacctagattattaaaatgttctggtatgatgctgaagaatctgtctctttggtagacacttcaagtgttgtttttgtacactaaagagccagaggtcctgcccaacctctggctcttttctgagcctgaaaatgaattctgggcctggtactaattgcatttcatcaagtgctgctgtgtctggtcctctggcagatggtccctgatccaggaatcacgtgtaaatcccattgtaggttatctctctccaggtgtcagccaacgtttacgcagcatgtgggaaagctgaattgcatggaccagatggaatccttagagtttattcttgattgtggaaataaatatgtacctcacctatcttactgaagaatataatgacatattttgaataataaagtatatatattatctctctcatgagatttatttaaagatcttactaccttgtcaataaagagagaatgcaaggaatagaatggggcatatctttccttcacctgtggacctaagaggaactgaaattagagaaagttgagagtccagagcaaacgctgtgatgaacattttcaaaataggcagaataggtggcattctgattcaaatatggcagttccctagggagtgtgaaatctgccctgccccatcccctccatttacaaatgtgcttaagggacataaggttttataaacaggatttttaaaaactaaaatttaggcagatcatttaagaatgctcaagggggtaggtcaatggactatttctctattttccttcaggtggtccagcctttgaaccagaatgcagctatagtatcccaagtgacggggtctgtctaggagttcccatggccactgttttttgtcttttcggtttttctttttatggcgggcgggggagggcgggcgggtgagtacttacttaatgccaggcacttggttgttttttccttcttgactaaccagatttcagtttctctgtgtagaccattcattcccactgagtttcttggtggggtggtgggggcgggggcgatgaatgggaaagtggaattgccattaatgttccagctgctttcctgaaacaagacttttgaccgtaaaaagaatgaatttgaaactctagacaataatacactgcagaggttaagaagaaaagccatgagtgcaaccgggtttcattaagaatgaaaagtggacatttagccgtcaaggagacaggttcctagtttgggcagagaagagagccctaacaatgaaaggcggccgtgttggctgaaagggggctctcaactgaaaccaaggcactcctggggtgtgaggatgggtgttcattcctagatctttccgagcggccctttccctcagtatgttctggactcactgaggtcctggccgagcgtccaggtagccccgagggccccgactcgctggcgcaggggtagggggagcgggccaggcggggcaagcgggccaggcagcggcggcggcgctttcattagagggcgctgtgggagcggctccgccgcagtcccgactcccgccgcttcctcccgccgcccctccccgccagtccgggcgaacgcggccgggcccttggggaccgagtctcggcgccgccggggaacgggcgcgggccgcgccacagccggagcggggcagggccccgccaccgccttcttccgccggccccgccgccggccatgcattcttccggctcctctgactcccaaagccccggctggggcccggccagcccgaggtaacctccggctccgcggtcgcaggccccagagcggcagcggagccgggccaggggaggcgctgggggcggggaagggggtgtcgtcgtcgcgtggcccggggaggcggcagcggcctgagggacgagggcgcggtaggccccggggaggaggcgggggcgcggggcatccgcccgcctccccgggacccgcccgggtgacaggtccggcctctgagtccccgccgtccctctgtccgcaggcagccgcgaggggagtagggcgccagcgcgcccgctcgcgcagcgcctcgggccgcttgggccgccaccgcgtccatgaccgcgacccctcggcgggggacacccgcccccgctctccgcagccgcccgccgtccgcgcccgccgaggtgagcccggcgcgcgggccgcgcccgccgccacgacccttccacatccgcggaaaccgctgcaggctccaccggctccccgcgctgcggtcgcctcttctctgcccctttcatcatcccctgcttccttgccctctggtcggaaat

SEQ ID NO: 3891 - DNA, 2300 bp, Homo sapien
agaagataacccctctcctacactcttggcacaaaaccagggcatatctatacctggaacataatgtgttgtactgttggttgagtttcaagaaaagtccaatgaggttggaagcagttaatatgaggatatctgaaaagatcaaggagattaggtattccctactccttccataaggaggtactgaaatggcagaattctgcaatgagagatggtgatcagcaagccgaggggacaggcctcagaagaaaccagacctccccacactttgatctctgatcttggccttcagaacttcgagaaaataagtttctgttgtttaagccacccagtttgcagtattttgttatggcagctctagctgactaacacacatgagaacacatatgatcaaatgatttaaaattatgaagggtctagaagagaatgtgatcatctcagaatacctctaagtcagggtttcttaaagcaaggtctgcatactacttgcatcagaatcacctatgacgctttttaaaaagcaggttctcaggtccactggacctagattattaaaatgttctggtatgatgctgaagaatctgtctctttggtagacacttcaagtgttgtttttgtacactaaagagccagaggtcctgcccaacctctggctcttttctgagcctgaaaatgaattctgggcctggtactaattgcatttcatcaagtgctgctgtgtctggtcctctggcagatggtccctgatccaggaatcacgtgtaaatcccattgtaggttatctctctccaggtgtcagccaacgtttacgcagcatgtgggaaagctgaattgcatggaccagatggaatccttagagtttattcttgattgtggaaataaatatgtacctcacctatcttactgaagaatataatgacatattttgaataataaagtatatatattatctctctcatgagatttatttaaagatcttactaccttgtcaataaagagagaatgcaaggaatagaatggggcatatctttccttcacctgtggacctaagaggaactgaaattagagaaagttgagagtccagagcaaacgctgtgatgaacattttcaaaataggcagaataggtggcattctgattcaaatatggcagttccctagggagtgtgaaatctgccctgccccatcccctccatttacaaatgtgcttaagggacataaggttttataaacaggatttttaaaaactaaaatttaggcagatcatttaagaatgctcaagggggtaggtcaatggactatttctctattttccttcaggtggtccagcctttgaaccagaatgcagctatagtatcccaagtgacggggtctgtctaggagttcccatggccactgttttttgtcttttcggtttttctttttatggcgggcgggggagggcgggcgggtgagtacttacttaatgccaggcacttggttgttttttccttcttgactaaccagatttcagtttctctgtgtagaccattcattcccactgagtttcttggtggggtggtgggggcgggggcgatgaatgggaaagtggaattgccattaatgttccagctgctttcctgaaacaagacttttgaccgtaaaaagaatgaatttgaaactctagacaataatacactgcagaggttaagaagaaaagccatgagtgcaaccgggtttcattaagaatgaaaagtggacatttagccgtcaaggagacaggttcctagtttgggcagagaagagagccctaacaatgaaaggcggccgtgttggctgaaagggggctctcaactgaaaccaaggcactcctggggtgtgaggatgggtgttcattcctagatctttccgagcggccctttccctcagtatgttctggactcactgaggtcctggccgagcgtccaggtagccccgagggccccgactcgctggcgcaggggtagggggagcgggccaggcggggcaagcgggccaggcagcggcggcggcgctttcattagagggcgctgtgggagcggctccgccgcagtcccgactcccgccgcttcctcccgccgcccctccccgccagtccgggcgaacgcggccgggcccttggggaccgagtctcggcgccgccggggaacgggcgcgggccgcgccacagccggagcggggcagggccccgccaccgccttcttccgccggccccgccgccggccatgcattcttccggctcctctgactcccaaagccccggctggggcccggccagcccgag

SEQ ID NO: 3892 - DNA, 2300 bp, Homo sapien
gtgaaaaggaaaaagaaagaaaggaataaatgtgcttgtaaatttatggactctggaatgatacacaagaagctgataacattgggtgggggaggaaaacttttctctcactagccttttaccattttctactctttgttgtaccttgtaagccttgtgagtttatcttagaaaatcattactaaataaataaaaattaaattaaaaataatcttattcctagaaaacataggaaaaggctcagaaatattagattttaaaagcagaatattggccagtatctacatatcctgattatatgtgagtttttaaattgtactgttgtacatagggggaaaaagatttaaaagaaatatttcagaaaattaacagtaaggtcatgctggtttgtgaaatttggtatgatttttgtattgttctttggatttttctgggttttttttctgagttttctatggtgagtgttggtaggaataaaacaaagaaaaaacaagttataaaacatgtttgtaaatttatagatgactccgcattgtccatatcacatggacaaaaagaatagaggaaatacaatttccacagttttgaaaaaataaagatatagtttcatctttctaatgttttgcctaacttaaaaacactgaaggggccaggcatggtggcttacactttgggaggctaagatgggaggatcttttgaagccaagagtttgagaccagcctgagcaacaaagcaagacccatctctacaaaaaaaaataacaaaattagccaggtatggtggcatgcacctgtattctcagctacttggaagctgaggtgggaggatcgctggagtcctggagtttgagactatagtgagctgtgatctgtagtaggccatgatcgcaccactgcactccagcctgggcaacagagtgagactctgtctcaaaaaaaaaacaaaacaaaacaaacaaaaacccaaaaaacactgaggctctctcttaaacttgtattatattaaaccagaaatcaacaaagtgaccataggtcccatgtcaccacagatattcatggtttatgtctattgtaattcttagtagcgtctctttcagcctcaaaaaatacggtcacccttggtatgagaaacaaagttgaagttgacgagaatcatggaaaaataagcagaggaaaagaagacaggaatgggagactcttttaagtagttgaacaagccctaatctccttgttttcttgaagcttattcagttataactgagggcttctctactgtaaattacaatagttacaacatgaaccttgcattccagaatttcaaatgtgaattttaaaaattgctgcaatctatagcatggaatttaaggtataaagcagaagagtataataacaggggcattagaacatgactgataagttttatgaacttaatggcaagattcttaaaattttggggctttgggctttgattccacctgtaaaaatagggtgtgttaaatcagatgatcccaaaattctttccagctctacaatcacgaattcatatgaggtataaatgtgtgtcagcaatctgagatggaaaaaaaaagcaaatttaaatttttttctcttttctctcctatcttgaaagtatggttttgtctgacaagaggcctataatgatacctgttttaatcagaattcatttgaactcttaggatagttgttttggcttttgtactgttagtcaatttttattaatattttttaagaaattatacgttgattttagatcttagtcattacgaaactgttggcacatacctatttcaagtaccttaatggagagaaatgctgatatgtattgatagtgggattgtggtaggaaattttgttgaagtttattgttagagacttttctcaaaaattaagaaaattgaacctatgagctgaactgcttttgaactatttgaattacaatttctactacttttctctgcttttttaggaaatgtgagttcttctcccagatcttctgatttagtcaaattagcccaagagtgctgttaccataataacaggggcattgcagctcatggagttagagtcctaactaatataactgtttcttgtcaagaaaagggtaagtttgatcaggactgatattacgtataaactttggtttagaccttggacagaattctgtttgatttttttttaatcccttatttttagcctgtgtgccttgatctacaaattgactcctttcaaagtgttcttagagcatgtgttcttaagactactttatccttgtgaaaaat

SEQ ID NO: 3893 - DNA, 2300 bp, Homo sapien
tcctattgtcagcatgagacaagctcagctgcaccagaatggtagaaaatgtccttagaactcgtagggatattagatattatcctgacctgtaactttcactgaggaataagaaagaaatgtatcagaatgaggaggaaagtgtttgaaaaacacatttaaggccgggcgcggtggctcatgcctgtaaatcccagcactttggaaggccgaggcggacggatcacctgaggtcaggagttggagaccagcctggccaacatggtgaaaccccgtctatactaaaaatacaaaaattagccgggcgtggtggcgggcgcctgtaattccagctactcgggaggctgaggcaggagaaccgtttgaactcgggaggcggaggttgcagtgagccgagatggcgccactgcactctagcctgggcaacagagcaacactctgtctccaaaaaaaaagagaaaaacacatttagtattatacttttttttttcagaggagaaaacccctaaagatttggtaagagaaggaaaagttcaacataattttcttggttgatgggggtgcactaaagatactgagactcaaccaaaggaatatcccattagggggctgtgaaatttttgtgtttatcaaaataaggtaaaagcttttttaagagcctgagaaactcttatttagactaacccactaaaaatattcacagtttaaaaaataaacagaaaaagagtcccaaaaaagttaatagacatgtccaactcagaaaactgggaagtggctcaaacccttctgagttctagtccagttctccaacattatatattggctacgattaatcaagatttaattgtataccagctgccgaaatgtttcccgtacaataaaaatcctcaatatgaaataaaggtttcatattactagtcgagttctttactaacaaatttccgaccttgcctcccatatccacatctaagaagggaggtatatctcttcagcatttactaaatgcttcttttgcataccattaagtcacttaatacaattctgccggctcaatggtactgtacccactttgcagacgacaagccgaggctagatgaagttaatcataaaatcagcggcattgaaacttaactcagtgtaaccccaaagctccctctacaccaagctgctccctgtacggcaacagaactcctggaacttgtccgcagagaatgagcagggcccttgcttttttatggtcttggccaggtttagcctgccttgtaacccgcaggtaacagagctatggaaatcaaatgaatcgctgtcaagtcggtgcaagattactattcagcacatttcatgaagacctggtctcaactgaacagactgaaaaccaatttcacaatttctttgcagtgtctcttagaaactagccactgtcactgcttagaaaatcgggggactgctccctcaagtggtcaaaacgggcctctcactagagctcgctacttgtttagccggtataaggccagtcacacaatcctgcaaatttcccgcaacctcccgaaggggtcaaagcccacgccccagcaaaagcacaggcgctccccgcccagcgaagacatgcgcatgcgcctatccgtcttctcccaaagcaaccaccacctggtggcgccacttccccccacgcctgtttcacccattcagccctctctttcgaatacctttgtccaattccataagggcagagttggcatccagttcctgttcgccatagccggcatctgccaggaaagacttagttgagtttgacgccatgacccgaatagttactcgactagcctagtcagaaagcttgcaaactctaccccaggaccgccatcttcccccgccgccttcttgctggtttttcttccgcgcgctgtcaagccctgttacgcatgcgccctggtcaccccgcggtttgtccgcgcctctgctaccccctgcgcaggcgctcaaggagctcttggactccaggttcccgcggctgggagaaaaggaggcggggatccgaagggggaaatgactctgaggcgcccggacgtcgctcggaagccaatcagagagcgtgacgtcagtttggcgcggagtttggcggccggggcttacagtggcgggagttggaggcgataacgatttgtgttgtgagaggcgcaagctgcgatttctgctgaacttggaggcatttctacgacttttctctcagctgaggcttttcctccgaccctgatgctcttcaattcggtgctccgccagccccagcttggcgtcctgag

SEQ ID NO: 3894 - DNA, 2300 bp, Homo sapien
aagtactttgagtctttctttagaagttcggtggtgtttgtgtgaccaaaatatgccactgaaacaattcttatttatatcaagtagcctatggtagagttagtttagttatacactgttttccctaaagtcacagtttccaagagcctatctagacattaagtgaggacttactatataagtaacagaaggttgtatgtatgtagaagtggaagaagccctggttgtggctgtgatcatccaaaggagtaggtagaagaagaaaaggggtcaaggatggaacaccaacactgaagaggaaaggagatgattctatagatttcatataataacgaatgaatttcagtgactattatgtaacaacgaatgagtacttgagaataggaaagagggaagggaaaggtaaacacatggagaattaggagaaaatctgtcacaaaatagaggctgaacagctcccccagaacacacatatagtaaggtgtggaagtataataaaacccaggcagtttaacttcaaagacagagttcttagccactgtgcgtactgtcactcttaaacagaggacaaagaagttactcaaacaaggtcccaggagagacagaaagaggagcatttaagtataattacaaagattatctaagagggaaataaataaggatggtataaagtttcagactgctagcaggaagttgagggactacttctcagtctctttctcaatattattttcctagactcatcgctgaatataaaaattcccttctcaggttcgttttccacatagtttcaaggggaaaaagaacctctggctatagtcgaccttcacatgagtgagattttatttctgtccaaggttaatctgggtagttagctcccttatctgaaacttaccaaaaagtttaagttgatgacatccaaatctaacctcaaatctcttattgccaatgttttagcgtaagaaaataagttagatttctacgtattaacatgggaatacgttcaacttataccattaaagtgaaaaaactggacgttttgatccgatttctgaaaataataggtattacctctagcgtcgaaaacatctggaataatatacttcaatctattaacaggggtcatctctggcggatgtggttacaggcatctttcactctataatttaaatttttatgaccgtgtagtaaacggggaaaataagattttgttcctgttagaagcagatatcctgtcttctctgcttgactgagttccttaacagcgggtcatattcactggtatatacctatagcacatagctgggctcactaagattctacaacaaacgaatgaattaatcaatgattaggagttttgagcatctcaaataaccgttgaaggaaacatatacacacaaatgcatgcattttcccgttaacgcgcaatggagatgtaagctgtaaggggccttggaaggcagttatttcgacgtccctgcctacgttacgattttaaaagcccgattacgattacaagtgtcccgaggggatgaaagtacagctttctttagtagtccctgctaacactaatttacccttgccatgggagaactcagaagctgagttcagaattggagtcggccctggtcggaggtggcgtgtgtttcgggggaaatgaattccgccagctccgagcagcggttgggaccgttactcaccatttctcaggacgccaagctggggctggcggagcaccgaattgaagagcatcagggtcggaggaaaagcctcagctgagagaaaagtcgtagaaatgcctccaagttcagcagaaatcgcagcttgcgcctctcacaacacaaatcgttatcgcctccaactcccgccactgtaagccccggccgccaaactccgcgccaaactgacgtcacgctctctgattggcttccgagcgacgtccgggcgcctcagagtcatttcccccttcggatccccgcctccttttctcccagccgcgggaacctggagtccaagagctccttgagcgcctgcgcagggggtagcagaggcgcggacaaaccgcggggtgaccagggcgcatgcgtaacagggcttgacagcgcgcggaagaaaaaccagcaagaaggcggcgggggaagatggcggtcctggggtagagtttgcaagctttctgactaggctagtcgagtaactattcgggtcatggcgtcaaactcaactaagtctttcctggcagatgccggctatggcgaacaggaactggatgccaactctgcccttatggaattggacaaagg

SEQ ID NO: 3895 - DNA, 2300 bp, Homo sapien
gagtctaagtagatgcagtaggctcagacgagcaaaatcttttagtcaccagtttgttttttgagtataagttgaaatattaacactgtatactaaaacttaatgatccttgctaaaattacctcttggtcagcatatatatctgatcgagatcattagacaagacttcatctaagtcagtctggggagaaaagtcgttttttagcaccttgttcccttgatggtaaagattatgatgcccaagatagaatcttcttcttttcttgtgctatcaggatttccagcaaagtgttactgtggtcctctttcaagacgagaataccttagtctcagcaggagctgtggatgggtaagagtctatttcttttttcttccgacgagatcttttttatgagattgtgatgaggcagtcacatagtctcattataattgaatgtgtgtgctttcaactgtcaacatagcaagtaccccaactgaggaaaggagctatagatcacattggaaaatacctagttgaaggactcttgctggataattaaatgaaagaatacatgtgtcacgcttagcacattgtctagcacataagagcagtggtagctgctgttgctatcttagaaaagaagctggctgggtagcttgcttgccttatgcaatataatttagtcactaattctcattttgaagagtaaaatttctgttactttgggttttgtctttttcaggtttaagaatatcctaaaagaagaaatctgattctggggatgtaattgacatttctgggagtaatctaactagattgatgatagtaaggtctaatgactttcacatacctgtcatccatgattagtctgaattcttggcttccaaataagtctgctctgtgatgcttgttgattgtgttgtagaatattaattctatgcaaatggagactctttctttttaagtttccttcctattatatctctcaaggcatccttctcttaaaatttttaatttaaaagatgatggcttaccaaactaggatttccattgtgtcctctgggcactaaaaccctctgaaccaaattctcaggcaggaatgaaggattatctaaaggttattagttctgcttgtgaatgactgtgaaagcttgctctgtttgtttccaagaatactgtcatttcatagcaggtctgtgttttcaagttacctttatactagaagtagaggattaagacaattatctcaatagatgaaatgaaaaaatactttatttcacagaacaatttgtttagattatttaaagagttatgtatggagatataaccacagggacagaacttgctacttatgatatcaaaaatatatgcagaatattaaaggcttaggaagtgtattttctaaaaacaatggaacaattactatcggcactcaaccttcatcttccttttccgttctcttagagtaaactccagtaacccatcactgggtcaaatcacatctgtttccgttctgtcagaattataagcctgatattggagacaacagtataagatactttaatttgtttcccaatgaaatatccttactgtacctagttaatgtgccagaggagttagattaaaagtcatttcacatttagtgtagttgaagttgtttggggttggaagaaggtctacaaaatatttatttgccttggtttttaggataatcaaagtatgggatttacgtaagaattatactgcttatcgacaagaacccatagcatccaagtctttcctgtacccaggtagcagcactcgaaaacttggtaagcctttaataggtcttttgggggagataagagtttttgtttaaaaaaaaaaaaaaaggctaatttccagtaacattgatatgaaaaattctaatatgtgaagttcaaaagataaaaactcagaagaatgtttttggtttgtgtatattttggggacaaagaattctgatgatgattcttatgaaatgatctatttttgtctctacattttaacctcagatctactcaccatcatcaggacgtgctaacttaagtttcctttttccaggatattcaagtctgattttggattccactggctctactttatttgctaattgcacagacgataacatctacatgtttaatatgactgggttgaagacttctccaggtaagatattagtcattcaaattctcttaccaggaaagcattatgggctttttttggtaatgataatttaatgggctttcttctaaactgaacttattaagccatatgaggactttggcatctttgattacat

SEQ ID NO: 3896 - DNA, 2300 bp, Homo sapien
tctgctttcttggagcagggttgttctgttgaattgctgtaatggcttgaattggttggcctccagccaggaggtggcactttcaagagagtatcaactgcagtagtatagcgggggatataagcttgccttacggtttcctggataggttttcgggcttctcaggcaatgagcagggccccacgagtttttgtcttttgtttacggctaccagggcggttagagaaagaccatctggtgggggcagggatagtgtgtctgagctcagactccttgggcagggcttgctgtggcctctgggcgatgggagtggtggttaacaggccaatggagttacgttctaagggagattatggctgcctctgctgcttcatacacatcaccagggaaataggggaaagccggcagtgacagaccacagccagcaaggccagtctcactcctgcagtgcttccccaacagccaacagaaccaaatttatatccatgcctccagtgcacagggtggagatcttgccctagactacaaaactccccgccgagaaagcaagcagggctgttaggccttgtccatctgcctgccacagcttctgtgctcatatctgcacttcctatttgtcccatccccctgcagattctgcccaggaaaattcacgctcagttgaaatcattacaaagttcagctgaaagtctccttctccctatggtccttccccaattccattggctgccctctccaaagacccctgtgagatagtcagaaatggtttccctggggaccaggagtgcctacagggctcttcctgctgctgcttctacttttatattttgtttggctctctaaattcatttcagttctccttctcccatgatctggatcctcagtgaggatgtgtgcagaagtggactttacccctctcacactgttttttgtttgtttgtttgtttgtttgtttgttttgaaacggagtctcgctgtcaggcaggctggagtgcagtgcatgcgatcttggctcactgcaacttccacctcccaggttcaagcaactcttctgcctcagcctcctgagtagctgggactacaggtgcacaccaccatgcctggctaatttttgtatttttagtagagacagggtttcaccatgttggccaggctagtgttgaactcctgacctcaagtgatccacccacctcggcctcccatagtgctgggattacaggcatgagccaccacacccagccaccctctcacactttggaccttgagagcttgtttggaggttctagcaggggagcacatttactcgtatacccttgactgaagaccgattctcctcttatcaggaatggttgtcctcttcgaccaagcacacagcttcgggagccctctcacactttgggcactcaatttttctgctgtcttgtggattttgcagcagcaagccacttctttcaaaggatctgttaattcttttgttttttctggtatgttcctgtgatagttcttggagccaaagttcactatgtgagtctccacatgctgttctgtctgtctgagtggcaaattagtcctgcctcctatctgccactttccccttaaatcagtctcatttttgtaaagaaaaaagttgagatgtatagtatgtatcacatgcacaaatatagaaagtatgctaaacatggtttacgtaagtgctttaaattttttctctttatgtttttcggtattttgtcgatttttacaagtatatattttataatgggatagttgggaggttggtgacttggaaaagagaaaggaaaatgataaaagggtgtggttggaatcaagtgatgtatacctacttactggcaaattgacccttagatgattaggttagctatgatttttcttgatgagaatttagggactttgtatggctttcacttctgatcttcatgatcctctcctctttttcagtaacagtaacgagtagccagagtactcctgccaaagcccccagggcaaagtgcaatccatccaattcttccccgtcatccgcagcttgtgccccaagctgtgctggagacctccctcttccttcaaatactcctacgttctctattaaaacctctcctgccaaggcccggtctcccatcaacagaagaggctctgtctcctccgtctctcccaagccaccttcatctttcaagatgtcgattagaaactgggtgacccgaacaccttcctcatcaccacccatcactccacctgcttcggagaccaagatcatgtctccgagaaaagcccttattcctgtg

SEQ ID NO: 3897 - DNA, 2300 bp, Homo sapien
agcctgggcaacatggtgaaaccccgtcgctactaaaaatacaaaaaattagccgggcgtggtggcaggtgcctgtaatcccagctactcgggaggctgaggcaggagaatcgcttgaacccgggaggcggagcatgcagtgagccgagattgtgccaccattgcactccagcctgggtgacagagcaagactccgtctcaaaaaagaaaaaaaaaagtggattatttcaagatgttggaacagcaaagactaagtgttgaggatgcataacttcttttaggggatcagtatgtggaatgatgtgcctgaactaaaaagagtttttgtgggcacatgtaggaatttacacttggaaagacaggagtcagatcgcagagagtcttgaatttggactctattctgcaggtattgggtggttcctcaaacacgcaggtaagataaaagtgatcttaaaagattgatgtggcagtgagtttgaaagccgtgaactacgtttggcggtctttgtacacattgggagaaacgccaattgtgaaagtagatttaacatgatctggagcttgactatgtgagaaagcgaaaagtgtcagaaacgctgctgaggtttgaacctccttgactgggaggattatgtacaatttcaccgcccagcaaatctgaaggaggaaatgttttgaggatagtatgtttggttctaggtctagaattcaacttcctgccaaatttggaatcttctgtacatatgcatcaggtggcttcgtttaaatatacgacaattacttttattatgttgaaaggaaaaggtctggagctcgagggaggggattacagatttgggtccattggcgcaaagggaggctgactgttcagattaataattattaacggccaccgtatggaaagcactgcacgaaaaactaagatgaccagtcctcgtccttaagaaattcaaaatctagacggaatctccaagaaagagattccggtaagagtacatggcaagcctccatatccacacaccactgaccaatgaatttgtactcttctcgttggagtagttgagggcctttggctcaaggaggggtgaaaattagcaggatactaaattgggaatgagaaatctctttttagagggcgtggacttgcagaactctttgaagcagcagatgctagactgcccaaaccccacgcgagagtagctctctggagttgcggagtccgaacctcccaagagctacaaatttattccgcaactaccaattttgcggtttggggccagtaaggcgccaagacccgcccaggtgtccagacctcgcaacgattggacgagctcaccttctcgccttccccgggcccctcgcccgtcaatcacactgcttgctcgccacctgacctctgctgcgccccctttcagtggtgtaacacctggcgctctttcgcgccccagccctccggcgccccaccaatcgcttcagttcttcattggccagcagagaggtgagggaagggaaggggcgctctattttgctctctgaacgcaccctctcaagtttcccagtcttctcgtagacggtcaggagagcaatgacagcctggagcagtcgcgcgtgagcgcaaaaatgcccgctggtggaggagcgcttcccctccctcccaagcgatttgccgcatttgttctgacgcaggggcaccccgctcgccgtcttcacttacgattggctgtggccgaagcccgtcacacagcccgccccactcctctgcctcaagaggccgcacctcacgccgtcgctgccgcttagccgtgtgattggctaagagggctggcatgctttcccgccccctcccccgccgccgcaccaagaggcgggcgggaccccgcggaagttgtcagtcaaactcctccttcccaccccttgcgaggcccctccccgggccgcgcgccctggcgcgcgcacacgcgcacacactccccagtcgcctgtaccaaccaccttctcaagttgtagcggtcgctcgcctggggttctccgtgggcggccgacgggcgcgtgggggagggggttcgggccgcccagcgcggcaaggagcgagtgtgtgcacgcagagggccggggctacggggcagcgccccgggcgatgaggggccggcgttgaccgggaagagcgggcaccgcggcagtggctccgaggggacccgcgatggcagcgccctgagaggaggctccaggcagggcgggctgcgctggcagcggccgctgaggtgctggccggccggctggctggcgacgggggcagaagc

SEQ ID NO: 3898 - DNA, 2300 bp, Homo sapien
ccaggctggtctcgaactcctgacctcaggcaatccgcccgcctcggcctcctaaagagttgggattacaggcgtgagccactgggcctggccttaaacaattcttaagcaaaagccttatgattccaatgtcagaaatcctacctgtaggagcagtggagatgcaaatggtcagtatctagtgctacatgacttttggctacaaggaagtgggtcaaattacagcctgattaatgcttaattataactctatttctgtgcagaattcgtgttaaccctgtgaggatggcttcaaagtgaggtaggagcaagccgggagtgtgtggtgtcctggaagccagggaggaacgcgtatcaaggaggagggaggatcagccaagtccactgtggctgataaatcaagaaagaggaggatgggaaaatggccatctgatgtgacaacactgaggtcacttgtgaccttgacaagcactgttccagtggagtggaggggagtaaagcctgactggtgtgtgctcatgaaggaatgggagagaggacttgggggctgcaaggacagaacattatttacatgtttatgatctgtctctccacagttgcatgaaagagccacgaaagccaggacccaagggtatcttatccatttctgtatcccagtgcccagcacattgtatttgttaagccatattttatattttattagccagtatctccttcaaatgtgggagcccataattttccagtttggtcacaccaacaaagactagagaggaatgacagggttggaatagaattctctggttccttccagctctaatattctatgatggtgtgaacttgttctatcaagtaccattgtattaacacagtaaggaatttaattagtggtctgctattgttaatttgttttggtaagcaactgttaaatgaaatggctggaatcagtgttccattcataaatttaacaaacatttgtcgagtgcctacaatgtgttaggcactatatatattgtcccatataacagatttaagagcagagggcctaggataggggtgagtggtcaggagaggtgatggggacctcccattgctaatgctccaggaggtccagggttctttgatgtggctggcactattctgcttatcactgaggagagaagaggctcccagtggcctgagtggaggggttaccaagctgcagctgcaagggacacagagcagcattcaccaaggcacaacaagcagcctctatctgcttcaccactgaggagccgagggccctcacacaacagctgtttcaggcagtgggaggagaggaagatgtggtcttcaggtccaccctgccacagggccaacaccagatttgacgccacatctagcgcttgaggcttcttctgtggctgaacagcggctttaggctttctctgcacgatccttcctttctgctttcataggccttgtcaggcagggcagggtttagcagttgcattctaaggcgaggagaggagggctcagagcattgcaagacctaaaggggagggtcagagccaggacaagaacctaggggtactcctgcccctggaataatggagagaacatgggctccgcagtctacccctggatgaaataatcttcatttgattaccgctccacccgcatcctttctgaaacaaagtacctcagtttcctcatttgtaaattagggagaaaaatgtccttcttacagggttccttgcagaatcaacggcataatgtgagtgagagcgctttgtaactaacatacaaagtgctctccagacatttattaccgttttaaaccgccaggccaagcttcctcttgcaattatagattaggggctcctactcatctgactttgttccactttccactcctcttctccgtccctccccctccaacaaagagaggaagtgagagacgcagaggcacgcgtctaaggaccagcttagctggcccagggtcacatgcaggcctccgccacaggggtgagagctggtgtgaggggcgcccccgcccagaactacatttcccatcaacactttcgcgactcctgggcggcagcggccaggcgcatgcgccgagtatcgccacgcctggtctctgggacgcccctccggaccggtttcgcctcgcggagccggtaggtccaggtgcagcggccgcagtgctgcgtccgtgcgccgcgggctggggcggtctcaggtgtgccgaagctctggtcagtgccatgatccggcaggagcgctccacatcctaccaggaggtacgaggttgtgagaga

SEQ ID NO: 3899 - DNA, 2300 bp, Homo sapien
gttttgtgctgtggaatatactgcattgtactttttatgtaggaataagagttaagcttattcaatgcttctttaaatttaacacgttaattttctagatttcacctttttctgggacttagaattatgtatgattggtcctcactatacagatgctttctgactggctagctctctactttgggcaaagggatcctaatggttaggcaggaatatcatcgcttctgttcagcttgaagttactgaagatggatctctgtccccctgcaccccttaggattaaaggtctccttgtaaaaaggaggagggaattatgtcagaagtgtcctaaccagagtgattccatcttgaataaaggtcagataaagccaaacctgctgggcgactttcccaggaagataggcactcttcacaagatgtttatggttgaggaaatgagataatggaaaaaggcattcttagtttaaaaatgagtttcactttaaagataacagtacacccataaattctccctgaagtcaatagttacacaagagaataacaatactaatagtctgtaacaagctgatcataggcttttgtaatgaagtacgctagttttagccctataaaagcaagcattacattgaaggcagaggtgctcctatataaacaatacttgcttagtactacttcaaagcaaggatactactcagaaacacagtagtactattattagaaatggagtagtttctaatgaactattttaactactatgctctgcgacttgccctgattctttgccgtggacgtctaagaacctgctcttgggtctggaatgagaccctttttctgttaattcctctattccagtcttgaaagtaaaagccagtcttgaaaataacctgtgaagcccccaagatccacccccactcccttacccgcttccttcctgacttcacctacccctcttaccttcccttgatcctccagcaagccgggcatcctcattcctccgcatttatgcacctgatcctttgaccaaagtgctcttccctctagaccgcctccttcgcctcctgtagatttttatgcaaataccctgttctcagtgaggccttccctaacctgcctatttaaaatgaccatccccataaccgggcaccgttcctcacacctgtaatcccagcactttgggtggatgaggtggatggttcacttgaggccaggagttcgagaccagcctggccagcatatagtgaaacctcatctcgactaaaaattaaaaaaaaaaaaaattagccaggcgtggtggtgggtgcctgtaatcccaactactctggtggctgaggcaggagaatcacttgaacccggaaggtggaggttgcagtgggccgagatggcgccactgcactccagcgtaggcgacagactccgtctcaaaaataaataaatacataacaataaaataaaataaaatgtccatcccagtgctccctatctctttgccctactttttctccctagtatttaccaccatctaacatactacttagcatcttattgtctatctgcccacacaatgtaagcttcacgtgggcgtggatctgtcttgttcagtggtgagtccccagtgacctggtacatggaggtactcaaaaatatttgttgcataaagtaatgagcaaagtttggcacaaatgttagctattattatttcagggcgtatcggtaacagcaccctaccctttgcaaaaatctccttgggaaccagaaacttaaacacaaccaggaagaaaaaaaatcagccaaaaataaaagcgaattaagacagttggggtcttattttagaaatatacctttctaggttctggtatgttgggctctgtcatctttctacctgatcaaggaaccactgtgacattttttggtaacttccagtctgtagtttggatttaggagttcaggattccaatcctaatttccaggttccagctgcgtggcccgagtagcccggccagccccaccccggggcgcaggaggcgcgcgaagggcgggagttctcgggtccccgccctcggggaggctctgggcgcggggcgggactccgggacgctgggcgggcgtgctagggccccgccgccctggcccggccttgccttgcgctgcgcgctcaccatggtgggccccgcgccgcggcggcggctgcggccgctggcagcgctggccctggtcctggcgctggccccggggctgcccacagcccgggccgggcagacaccgcgccctgccgagcgggggcccccagtgcggcttttcac

SEQ ID NO: 3900 - DNA, 2300 bp, Homo sapien
cacaggcactaggaaacctgtaagaacaggaagaacagcgggcaatgcttctatcagcatgaggggcaggagctggggacaccaaggagagagcttgctggtggctggagactggggaggggagaggagtcagctctaaatatctcccagaagtgagctggaggcggaaggtgcttctggtacacctgacatgtgtagcctgaagaggtggctgcaatatttagccaagtaccagtagtgattgtcagatgtaacagtgacagtggctcactcactttgctccatttccagaacacggtcaccatcattttgctcaaaattttgagaagttgttgttgtttctaatttgtttttggcacaagcatgctgttccgataggaaactttctgttgttttatgctcgagcggggacgatgaaagaggagataaccaagtgtttcttctgcacttgggcagatctggtcgctggtaggccaggtgaggactctttaagtagaaatggcctctcgagtttccagaaaggaaacacagagtcaagggtgggtctggcagggctgggacgaaggggagccaagtggggtgcctaaggtgtaaaactgaaggcggcgctcatggtcaggccctgcaagcacagggtgggcgcctgatgcgatgcctcctcatacaccttctcatggctgggccctgaggccgaccacctccatctctggagatctggtctggcgccggttacctgctgaaaggcactgagattgtgttccaagtggaaaagttggttccagcggactcacatgcatagaataagacacacatttcacagcccaccttcatcaccaaaaccatggacttcggagtctgatgacctgggactgacttccagctcgccattcattagctgtgtgacccagggaaacgcttaatcgtgtgcctcgatttccgtcctcatcagtaaaatggggaggactcagagaagaggactaaacgacaaggggatggaggatcatgaaaacacctggcacagagcaaacctcagtaaattgtgagttccctgtgaggccctgatgttgtttacgatcacgtgttggccagggatcctggcctctggaaacttccattggcaacattagcacagtaggagggtttggagatcagtccacgaatttaccacccagcgaaattaactggtttctagtcacaccactaatgacagtttagacacagtcaaaacggtgataaatggacctagttggcccaagctgatggattcataaataaatatttaaaccacagcctttctctgacagcagaggcatcagagagcagagacgctataagcaaagagttaaggagtcaagggccatagaaaactcttcctgacacttggttcaggctcagagggcaactgagatgtccatctggttaaccaaagagggcttccaggaggaggttctgggacttcaaagagcctccaactaggctcagttgttcttccgttttcatcatcatctcaacagtcaactctcttaaagtataacacggtacaagatgggctctcagtctgcaggtgagtgagtggagtcgtttccccagatgtttcacgatcccaggcctggtccctttaaggcatcgaaactcagaacattctatcagctgcctcggcctccccgtggcgcgcttacgtcacccttcggggaagcggctgacgtcagcgcgttcttggcgagtggggcggggccggtgactcacccggaccgcgccccttgctccccgcccccgccgggccgcgcgcacgtgagcgcgcgctgcgcgggttgctaattttagctccggcggcttccctggggtcccgtgaggtgaaggggagtggaggggacgaggcgggcaaggagcgtggctctcctcgttccttcctgccccgccgtgggttttcctcgaggaccgggcccggcccgaggggtgggggcccgcgggcgactcgaggtgctggaacgcgggcgcttaccgaggcgagaacctagggggtctccccgcgtggaaaccccgcccctccctcggccttggacacagtcggcgctcaataaatgaatcgaagtttcttcctggacggcgaccctgggctttcgggagaaagccagaggggcagggttctggaaggttccctggcggctggggtgcggtgcgggctgaaatccgagcaggagctgggcgcggccctcggggaccgactatgggggacggcgccgcgggagtggggcaagtgcgggcctggacccttggggccaccgcgtcagcagtcggcg

SEQ ID NO: 3901 - DNA, 2300 bp, Homo sapien
ttgtttacttgacgccctaagttgaatttccccttaaggacaggagcagatctccacagatctggcttgggtgttttaatggaatcatagttcaacctgtaaactggtcaaaatttctgtttcacagcagaaagagtaaaaagcttcacgtgttctccctcctctccttgcttcactttataatggtgctatttattccagaacaatctataagtagataaaatagctaagtagagataacaaataacttcattcaaatgcaaacactcctccacctaatcccgcccggtgtccgccgggctgctccgacacgcccggggtttacctgcgcgcactccagcgggagggcgggttgtggaggtgtgctgagcggcgcgcgggggtgagggcgtggaagcggagggtggggcccggagagccgttaccagggcgaaaagtaaagcgaaaacacccgccctgcacttcccgcgcgacgccgctggaaatcggttcaggtccagagcaggatctcggaggatcccgcgtggaactccagggctcccgggtccgccggggcgcaaagacttccgaggccgccctccgcgtgttcccaggcccgtggagaggtgggtggtctgagtgaggtcgggcttggcggcgaggaaccccggtggggggaactggggacttcaagtgagacccaggctccagacacctctagtttctaccccaaattaccaaactgtgaccttcggccgcctctctcccagaggcaggtggaaaggagcaggtgtttctgcccttcaccgtgcccccacaccctgcggccgcgcaggtctccctcccaggcaggtgcgaaagtcccaggccacacttgtgtctacaaatagtcatccacgggcagtcaagaaggttccttggttctgccgctctctgagcagaaattgttggggtcggggaataagaaccaggaaatcgtttttaaggttcaaacccagttctgctgaggtctcagctcgaatctcggaccacggggccccgcctttcccgccaccctggcttgagggcagaggggatttctgctgcgggttccgcctgtggtcattgcgtccccattccgggccgtccggtcccagtccaatcggctctgggagcagaagaacacgtgaaagctgaacatgggttttccctaaatattgcctgagagcggggcgacccccaggcctgggcaggttcgcggaccccaaagcaccttctctttccccctcctcctggccgctggcttccgccccctcctaccctcccaccgggttgcctctgattcctcctggactccgatcttttcacgctcttgttggtttcactgacatgttcttgtcaatttcaaacgctttgtgattgtaaaaaaaaaaaaatcgaaccgatacggtcctaccactcgccctagtttcggagcccggagctgtcctgcgtgtgcgtccatgtggagtgtccggggctgcgggctcgggcgcacggtgccagccgagggctgccctccgcttttgtgttaaccggcgggcttctcgcggtccccgccgcagaggtcacacccggcgggtaacggcgtggatacaccgaagggtgactttggacaccttccccacaccacagactaacgcttctgcccctactccgcccctgctagagaagtaggaggccagtgggggagggggtattttcctgaagctccagaaaatgaccacgcattttagagaaaggtcgtgcccgcttcccagcctcacctagtctgggctggggccgggacccgcctccccaccttccccgccccccccgctcttcaacctagcggagggacagatgccagcgcggtggagtcatgccgctggcttgggcaccattggtcatgcctggaacacgcagcagcgagtacgcacatctggcggctatcccgggcggctccggtcctgatatggagagagagggcgggctggtgtgtgtctcagtgagcgaggctgggggaacgcgcctgggctggctcctccccgaacttgcatcaccagtgccccctctctccacccgccttcggccccgccttggcccctcctccaccccccttcctccgctccgttcggccggttctcccgggaagctattaatagcattacgtcagcctgggactggcaacacggagtaaacgaccgcgccgccagcctgagggctataaaaggggtgatgcaacgctctccaagccacagtcgcacgcagccaggcgcgcactgcacagctctcttctctcgccgccgcccgagcgcaccctt

SEQ ID NO: 3902 - DNA, 2300 bp, Homo sapien
acagaatgagtttttcctgaaatggagaagatggagtcacagtagtaatgactacccggtgtgtatgtaaatctcatatgtccttctcaacagccctttggggaaggcagttttgatctcaaattacagaggaagagaatgagaggcccagaaagcctaagtgatttgttggtggatgctcagcttatgagtggcactgataggcttagaaacattgtctctggcccttgatgcccagctttgcacctcttcaagaggtctgggaggaagaccaagatatgaagagttagtgaaaggccagtactggcttcctagtaacataagatggttagcaagcaatgcttagtggaaagaggatgaaaattaaaagtgaaaattcaatgtagctgtagctactaggaaataaaaatctgggagctgaatttccagttaaaggaatacatgagtaaactttcactttcttgaaaatgatgaaactgccaatgatacaacatgatttctgattggaaataatcaagcagaaacaaaatgcaagttcttggtagcaagtctgaacaattttatgatcagcatagaaagtcaactctgatctgaggtccccaaacaatttttttcaatgaccgggatgtttgaggatctcaactttctgaaaaattgtgtgaagatttaacttcatttccttgtggggacacagccgtagtctaggctgaatcatacctcgagagactgagtaaaggaataactagaaagtatcccgagaagttaagctttagcctagtgccgagaaaacccaaatctcgacagatacatctgttttattttctgaaaggcttttaacatttttacaaccatttatgtccccaaggaagcccacccaatgcttttcataaaagcattccataccactgacattcttcagcttctttcattgggactgctgactttacataagaagaagggtagggggcgggagtcataaacagcagaccccaagccctgagagctcattaataaacctagttggatggcaaaatggaactacactctactgcagtggaattcaaagtccccgtgtagaagggagccatccaggcctccaaacaaagaccagcccagtggcagctctgaatgtcatccccgaatcactgagtttttaataaacttggaaagggaagggaaacatgaatgcatgggagaatcttaagcctctggctttagaaggctagtttctcagagtttattgcctgacagcgacaagtatcctcccagcatcctaagattataggattaaattgagagaagaacttcagttctgactcatgacacagggctttgggaaaagaattacatacatagcctgggtttctttgactagtcaagggcagatttcattggcctggaagtcttgcctccattggtgtatgttagatctccagggggagtttgaagtcagggtattctattcagaagcctttgagatcaaagtgggtgaccagctgccctccttcctggactccacagagcctctgtcagagagccagccctgggctggagagatctctgggaggcctagtaatcatggagctcctggccaaagaatgttttccagggcatattcatgtattagttcctcaattcctcataggatattatgggaaaatagggcgattattacaagccctctttaacagaggagaaaaagccacggggaggtacaatgataacacataatggagtaagtgggcttcaaatcttcatcttctgacctcagtctgggaattttgtggataagagacccacttgctcacactcccagaaggcagttagcaagcagcctgggtatgcaccgtgacataaagattagcagttcattaaacagagttcagtttatcccgaggaatctttacttagcctcccctctatcacttcatttccaggcctcccacctaccttaaggcctgccccgagaaaatttgctctggttttttgtttgtttgtgcaatataacataatgcttgtttgtttttgtaatgtagaataatatttgtttgttttttgcaatgtacaaattaagggcatgaatcctggagccaaactaacttaattccaaatcctgatgctgccccatattaattctgtgaattcgggcaaatgacttagtttgtctaaacctcaattatctcatctataaaaggcagctagatcttaactcactgggttctcgtgaggattaaatgagatagtgcccctaaggtttctggtatgaaggaggcactccttaaatgttcgagacttgccag

SEQ ID NO: 3903 - DNA, 2300 bp, Homo sapien
ccctgtcccgtaacctctggttgggttcatgtactgtttctttgtggcgtgaacagcgtttccaattagaatctgcctgaaaggaggtcccatttgcccactgagcatcctgtgttctcatggtggctctaactccagaagattttaacacagtctcatcaaacactgctttcagggaggaatttacactgaggttaaaaggactgttgaggactaatgctaacagaagctaacatttattgcgtaggacaatacactaaacacttcacatgtattatcccatttaatcctcacaacaactgctacccccattttacagatgagggagtggagagctcagtaacttgctcgaggtctcacagtggatctttccaaagctgaagcctatgcttgttttcaacagcaatgatttcaaacaagagtatatacatttgtgtgtgtgtgcgtggtaagatatacaaaaaatttgccattgtaactattttgaagtgtacaattcagtgccattaagtacattcacaatgcagtgtaaccattactatctagttccagaactttttcactgtccccaaaggaaatcctgtacccattaaggagtcactcttcattccccttccttccagtctctggcaaccactaatctgtcttctgtttctatggacttgcctgcgctggatattttatgtaaatagcatcatacaatatgtggcctttcgcacaatacggctggcttctttcacttagcataatgttttcaagtgtcagcctagcgtattatgtaatagtaccttatttctctttatggctgaatagtattctgttgtatggatactatactttttgtttatccattcatcagttgatagacaggtgtgtgtatgttaagaaacagctagcctttatcttcaagaactgaatctctaaggtaggatttcaggcctgatgtcaagctgggagaaaagagagttggaagcaggtgctccttttcaggacttccaggtaacagcttggaaattacttattcctgggctcgctctgtgggcatggcaaggcaggaggtatagtagcacctgttccccatggatgtaaatggcttccaaagtacttctgcatagtagagaggttagtagaggagggcctttgataggctcctggaatgtaagctcacactttccatcctaccctcttctcccggcatttcacagggtagggggtaagaagaggcacggggcaaacactgggggccttgagaaaatatttgggctccctgacacaggatgttggtataaacatgatggaggagaaatagaggtggccccttggataatttaatcccccactcagcccagcccctttctgaagtggttgtcctggattctccataacatgcatgcatacacacacacacacacacacacacacacagaattaattatgcaacttatttggcttgcccaagctttttttgtaagttctgtagtggttcagaaggaagattttaaaagcagcaagacctgtattcaaataatacctccactgcctacgagttctacaaatgcaggtatgtttcacaacttcaggttttttttacctgtaagatgagaagcgttgcaatagtatcaaactggaatggagtttgatacatagtatggcgcctagaagaagcaatctctcatgttattattaaaggttgaggttattactaaagatttccattgtcagcatgaactgagattttatggaagagtgggctaagaaccaagactgcgaattctaggttaaaaaaaaatttaaaccgtgtactcaaatggttcaaatttatcccatcatcttgcgttcctgtagactctgcctagttgctgaatcttttgaatttggggtgaggaaggggaagcaaccacacattttctcatttgaaaaatttttattttggcacccacttgagtacctggcacggtggggctgtcctctatgggggcaatggagtattagtgagggcattgtggccctggcctgggggatgagaacaaaggggtatgtgacagcaacaggtcacaaagggaagcagaagataaatatggctgcacagggggtttaggcagagagggtcgtcacttcctgtcactaggactacagtttgtagtctctctcagggagagagactacaaactgtaattaaaaaaatcagaggtggaggtcagggggttaggtccagaagaaaacctctctggagcccaccctgcatctctacgtcttggaagagtctggagtccaggcaccctacagcaccccccacagca

SEQ ID NO: 3904 - DNA, 2300 bp, Homo sapien
taattcatccccctgcaggccccccaatcttccctagaattctgggttaatgattctgaggttgttttcctcacagagccaattcatatctaatctttggcatgttcccccctttattaagaataacttgactcaccccattaattcctcatcctggggtcacgagccttgttttgcagaaggaaatggtggctgtgtgtatgtcttgggccttctttctttctcaaacccctttctttcatggattcatgcctacaattccctctgtggacagaagagacctctccttacctgcataatgaaatgtgtgacttttctcaaaagtagctttaggaattaactgtggaggtccaagtagcaaggatgctgtgacctaactcgttaccccctcacgtgtggtttggaatcccagcagaaaaaatttcctgaagatctggtacggagaaaccattctgggcctggcttttaaatgttttattagcagctgggcgaggactgggctgcaaagagatgcagcccccgtcagaagcgatccctgttggggagcaaggcctggaattccaggagggaggtctgtttatagctgaggcagaggctggggagcgaagcctgggagccagacatggcttaagggtggtctggacactcttgagataaggccaactaaggactatgagctcattgaagttccaaagccaactcacagcagctcaccaccagacatgtcccctgcccccacattccctcctctcaatccaggaattttggtgctcatctctataaagttttagaccatggtggtaggaacctggtaagtctcaggttcttgcattgcccgattctccttggatttgctgggtttgcctccttcccatgtctcagacagggctttgcataaagaagtgggctggtagatctgcaaaggtccctctgtgtgactggagcaagttaccctcttgagcctcagtgtcctcttctgtaaaatagggatatcattctttctttcccaaggcttttggtaataatgtcattctcatgtgattcttaacaaaatgggcctttcagacttagatcacttttgtgcatgcataaaaatgaaagcattgaggagaaggaattggtgaatatatgtctggagcaataacttcatcagaactgccacggtggttgtaggaccattctgattccagaggtattaaaatgcaaaacacaatgttgaaatgcaaaacccaacaaaataataaacagccttgtacctaccgcctcccttaagaactaaaacaattcccaacaccactgaaagactgtgttcacctccttgatccaatctcttgcctttccaccccagagaaaaccactgtcctgaattttttcccactcccttggttttgttttaccaaacatgtatccaatatgtaacatattatttgtatttgatcttgtttttgaattgtcctgtaggtagaattatatcttattctgcaatttgctttttaaagtttttgaaagagcaaaacttatctatgctaatacgctaatgtgtgtagctgccatttatttgtcactgcatatacccctctcaattctgttgatggaaatttaggcagtttccagtattattttgctacaaacattctcatggctgtctcctgcaacatgtgtgtttcttgggagtatacttaggggtggaattgctaagtctagacaatgctcctccctgttctggttgccaacacatgctgctgctcccttactccctcctatgaatagtgcaagggggtgagagttctgttcttgcttcgtctttggattttccagggttgggagggggcaagtttataaaaaggatggggagatggtggaggtagagcttcaagctcccagcctgactttcagccatagtcctggcgaaccaaagccaggaaggggttgaggaaagctggagcactcatctgggctctgctgagcatgggtgtgaggtggggctacccttgactggatcctggggtctcaggctgcagcacagttgacatcacagaatccactgtgaggtcactgctgggctgtgggacacaaaaattcagccagcaagccactttcagatgtatgattctttatttaaacggcagtaaagaacgctggaataggctttccagggacactcccatgagctctgggctcctttgcagcttccagctctgggtcttatttaatgggcttcaaaggtcactgtctccatgatgtccggtgtcatagaaccaaccgtctccagcccctggccaccctctgctgtctcggcg

SEQ ID NO: 3905 - DNA, 2300 bp, Homo sapien
ctagtgtttccttcgctaggaccacgggtaattgtcttggcttcgcatcttttgactggcaggcaggtggacagggacttgccctacctcaacccggtccccagcttggcacgagcagataaatcttgaaaaagaaaaatgatctgggccgtttaaccgtggcatggcgggtccagatccccaaacctgtcactagtgacgtcccacgtggcagattcgctctcagggaagcccgtcaccgtttttgtccgggacatcctccccatgcccaccctccgctccgggaattcaccctcggggccgccccgcctcgttccctcccacagcccggcggacccgagacgggaagggcaggcactccctgcagagtccctggggcgcccgtggctcggggtgcgcggtgggactcggtgaagccggcgtcttcaccccagagccgcggcttcggggccgctggaggagcgagagtggcgcccggatgactgatcgccgcggagaaagtcccccgggactgtgacccccgcgccggggggcggacgcagggcgtggctgaggcgcaggaagatgccgcgatgggaccgggaaaaaacaccgaccccaaaacacccactgtgtttctcaacctgagttccccggcagccgccgaaggaccccaaaggctgcatggcgcccccctggtccccacccccccgggcgtcgcctcgcgtgggtgggcttcgcgttccctccggggtttcagagccaccacgtgacttccacgaagcgcggggcgccggcggaaagccgcggcaggggtgggatttgggaccccgaggtgcggagagagggcgggcagaggaggaaacgaggcgggggtgggagaaggagggcggggcagacgtgggacgggaaggacggctgccgggactggcgcgcggggacactgggccgacgcgtggagtagcggggagagcgggaagcctgagggggcggggccggcgcgaggccgtgggtgcggcacgaggatgccggcggcgggacagcgcccgtaggcagccccacgggcagggcgcgcgggcggggcggggcgggccgggccagaggagcgcccggcatgtcgcaagggctcccggccgccggcagcgtcctgcagaggagcgtcgcggcgcccgggaaccagccgcagccgcagccgcagcagcaggtagagggcgagaggctcagggagggccgtggggtgcggggaccggcgcgccgcggggggcgaggaggtgggtgctggagttccgtggtggtgactgcggaggtgcagaggtggcgggtgcggccggagacaagcagaggtaggggcgtagggatgttggggaatgggggcgatccagggaccctgtcgtgcgcacagtgtccgcggctcctggaatggctcctgagccagctcctgcgccctctgggggaagaagcccgagggcgccgacgcctggctgggccgggcatggccggtgctccccggcacgtgggctccgcactgccctgagggccgccccatcctggcgcagccagcgactgccaccccaccacccgcgcctgtagcccctccaggattcccccgggtggggggggtgctgccgcgggaatggagaacgccggactagtcagcctgggcggagggaacccacaaagggccgactccgcccccagctggtggaaaccctttgccccttcccagttcgctgtcccctagcaacgtttacagcggcgcagtcaggaaggagaccaggttggccacagggacggccgtctggaaactttgcctgggtcttggccacctgccttacgacgaagactgggtcttttcatccttactccccaccttcccaattcagcgcccggcccatgtcatcaggtgtcgctggagtgtcacagagatctgagtttgggcctgggctttgccacacacaggctgagcagccttgagcaatttgtttaacctctcggaccgtccatttccccatctgtaaaatgaatatagtaacatcaacctctcaggatttttgagactgaatcagatatggttaataacataatactatctctaactttcgctcacctctttctgtcttgattaaatgtttctgctgggttggcaggtgtgatcatggtgatgagtccagtttagagtcagctccccgagggcagtatgcaggctgctttcttgtgctagtgactttttgattacagagagcaaagaggcatgagaagcactatgcagaatacatttttttttaaagtagcaacttcaacaaaggcaggtaacttcttga

SEQ ID NO: 3906 - DNA, 2300 bp, Homo sapien
agctcattgcagcctcaaactcctgagcttaagtgatcctcctgcctcagcgtcctgagtagctgggactacaggtgtgcaccaccacactcagctagttgatttcttttaatttttggtagagttgggggtctcactatgttgcctatgcttccatgacttaaataagaatttaattctgctttagctctctgattttcatttctgtatctagctatttaatccattcattttgatgtatgatctttacatcaaattgatctctgccctaaatgctacctagttaaccaagactaaatgtatttgaagaaacccttgcgtaacacaagacagtagactatgcctatataaagagttcgtgtgtgctgggacatggtttcaggctccctggggagagacagggaagcagcagccccaaaggacttaaaatgtgatgtggttcagtgagaaaagtgggcatgaccagaataaagtgtaggagtgcacgggaatgttcccgaggtgtttctaccttgccttttctgtgcataaaaaacactggggaatgaaatcacttctgaaaatgataaccccttgacccagatgttttcctagctcgttagagcccttttagtgcttcaggaatgagagctttcagctgacctagtgcaatacatatactgagcacctgttgagtgtatgtagcgtgctatgctaggcaccttgtgtgggtaccttgtgggatgcaaaatagtcctggggcaaccaccagttaagctgagtgatgaaataacggagaggaaaagattaatccgggcagataacccagcgtagcgctggctctgctgcgcagccttgctgctgtggagtgtggcgctgcaactctaaagggctgcgtccaccctccgtcttcctccccgcctctcagttggccgaagcttctgatcacacagacaagaatctccgctcgctttcccgctggcctccaggcagccaagttcactcaagctctctcaaagcttttgcaagagtgggtcttaaatcctggcggggggcacgtgcactcatttaagacttaaaaaggaatcggaaatgactgtccccatgcccactgctgcccacaaacctgaagacccaagcgaccacacttggtaggcacttctgcccttctggtctggttcccacccgcccatcccgaatcgcggttatctttcccggtgctcacagcatgcagaccacagcctgtggccgctagtgtttccttcgctaggaccacgggtaattgtcttggcttcgcatcttttgactggcaggcaggtggacagggacttgccctacctcaacccggtccccagcttggcacgagcagataaatcttgaaaaagaaaaatgatctgggccgtttaaccgtggcatggcgggtccagatccccaaacctgtcactagtgacgtcccacgtggcagattcgctctcagggaagcccgtcaccgtttttgtccgggacatcctccccatgcccaccctccgctccgggaattcaccctcggggccgccccgcctcgttccctcccacagcccggcggacccgagacgggaagggcaggcactccctgcagagtccctggggcgcccgtggctcggggtgcgcggtgggactcggtgaagccggcgtcttcaccccagagccgcggcttcggggccgctggaggagcgagagtggcgcccggatgactgatcgccgcggagaaagtcccccgggactgtgacccccgcgccggggggcggacgcagggcgtggctgaggcgcaggaagatgccgcgatgggaccgggaaaaaacaccgaccccaaaacacccactgtgtttctcaacctgagttccccggcagccgccgaaggaccccaaaggctgcatggcgcccccctggtccccacccccccgggcgtcgcctcgcgtgggtgggcttcgcgttccctccggggtttcagagccaccacgtgacttccacgaagcgcggggcgccggcggaaagccgcggcaggggtgggatttgggaccccgaggtgcggagagagggcgggcagaggaggaaacgaggcgggggtgggagaaggagggcggggcagacgtgggacgggaaggacggctgccgggactggcgcgcggggacactgggccgacgcgtggagtagcggggagagcgggaagcctgagggggcggggccggcgcgaggccgtgggtgcggcacgaggatgccggcggcgggacagcgcccgtaggcagccccacgggcagggcgcgcgggcggggcggggcgg

SEQ ID NO: 3907 - DNA, 2300 bp, Homo sapien
ggtgtcccaggacatggagctggagcagccagagtggcagggatagtgaggaggcttctgtgccaaccagtacaatccatatgtttgtaacagtgtgactgtctgaacaccagctttgacatggcagtggggagtgaaatcttcacccaccacaactggaagtcagtggatgtctaaaaagctgattcaagatcatacaatatggatataatttagtgcagcagaataaagagctgacgaagtgggaagtattaactctgtggatgaacttaggtgggggaactgggccagggactgataatttttgatagaagcctcatagatttgatttttaaaattaaatgcatatagtaattaagggaaaataaatttggtttaagagacaaatcatcccctagaacctttctcggggtttcagtttttcagggtttcagaagctttctcagggtttcaaaacaggcgtgtgccaccatgcccggctagtttatttgttttagagatggggtctcgccatattgccccggctggtcttgaattcctgggctcaagccatcctcctgcctcagcttcccaaagtgctgggattacaggaatgagccactgcacctggcctatcacagtatatttcagataagacttactattctctgtttttggctgataattctagttttggtttcttcaggtttttttttttttctcccctctgaccatttgttttgcaaatagattatattatgaaagtctctgaagaaaaaaatatctctctagagaaccactgaagggggttcttggggattttatatgaaaggatttgagaaaattaatgttatattcatttgaagcttcaggggtaaagaatcccttgtaattcgttgctgtgtctctacattgctcatactttgcccatgggctgtaaactaatattcgttgaatgaatgagttcatattgcaaatttctaacttgtcggtttccctggatcacaatctcacacattaatggcttgtggcatttatattcattattaattgaacttagaaggtgagtgtggggaggggagaggtaaaaaactgaggacagatcactgggaaactgacctgaattaggactccagagtctcctgtctactagaactacgtctactagaactaagtctaattcccatatccctgcaggacataagagcagaggatggcattgacatccctcagtgacatcactgtgctagcaggtatagttgccttctgatcaccttttcctttggtcacatcccctgacttctgggtggcctgggatagctagagaagaaaattcaacttctccctgcaggtcttctgctccagctgactcctgtgcctgtgtaaaagattgggcatttctatcatcaccttgactagccttactcagagaatggctccagtgcctttgggctcatacctagttgcagattttaagacctcccttggtgcccattcatgtagctctgtggcccacatcttctacaatgatgtcattggagttcttttgtccatttctgcccctgatgccaccttgatgggaatgccaccctccacacaactcttcaccagtccataaatacctgagacttggcgcatttcttttttttttttttttttttttttttttgagactgtcacccaggctggagtgtagtggagcgatctcaactcactgcaacctccacctcccaggttcaagaggttctcatgccttagcctcccgagtagctgggattacaggcgcgtgctaccatgctgggctaatatttgcatttttatagagatgaggttttgccatgttggtcaggctggtctcgaactcctgacctcaggtgatccactcgccctggcctcccaaagtgctgtgattacaggagtgagccgccacgcccggcccatttcattcttaaaaaaaaaaatccttccggaggtttagttcctccacaaggcagcttctggttacctgccccctcagggtccttgctgcctgggtcaccccagcaaccccttcgtccacacatcactgccctttgcagcaccagctgattacattgctttttccatgttctagctgttcttttgagccgttttatagccgagcatctccaccagaagagcggataggaaaaaggaaaagagaggaggatttgaccttggtatcttgcttcatttccttctctgacaaaaatttggtgaaaaggttaaaataagtgttcgaattctctctgacttgtcatattctgtctatgccctgtgtgcctgcctctgatcctgaggaa

SEQ ID NO: 3908 - DNA, 2300 bp, Homo sapien
tcctctttttctgtaagacacctaaatgttttaaataccttagcatttcctagaatcagacaaattctaagattatacaacaaaagtcttctcccaaaaaactactaaaaacgtcctgagatatatccctattcttgccttgcttgcaaggagggaatgacgtaagagtcactatatacaaaactacatacagagtcacaacccaggaagtgtttcttcattcttccactgaaccttttttttttgagatggagtctcgctctgtcacccaggctggagtgcagtggcgagatctgggctcactgcaagctccgcctcccgggttcacgccattctcctgcctcagcctcccgagtagctgggactacaggtgcctgccaccatggccggctaattttttgtattattattattattgttttagtagagacggggtttcaccatgttagccaggatggtctcgatctcctgacctcgtgatccgcccgcctcggcctcccaaagtgctgggattacaggcgtgagccaccgcgcccgaccccttttgcctgttttagagtgaaaacattttctttacaagactaaaataggttaaaaaaaattgtgttggttgaaaactttactaagatcatacatttgcctctataccacatttcccaagcctttcttaaatatttttgcaaagccctgaaggtggtagttttttgggaacacaagaaataaagggattgtgtgcttccttataacaggcaccaatctacttatattagcggaaaaaatttaaaagctcataataccgcacatttgtgagttatgaatgaccacagtgcaaacagtaaaaataaaggttaataggccgggcgaggtggctcacgcctgtaataccagcactttgggagcccaaggcgggcggatcacgaggtcaggagatcgagaccatgctggctaacacggtgaaaccctgtctctactaaaaacacaaaaaaattagccgggcgtggtggcaggcgcctggagtcccagctactcaggaggctgaggcaggagaatggcgtgaacccaggaggcggagcttgcagtgagccgagatcgcgccactgcactccagcctgggcgacagagcgagactctgtctcaaaaaaaaaaaataaaataaaataaataaataaataaaacatgcaaaaggaaagatcaaatgctgcttgggtgaatggctgacttccagaattaccctttccaggagaattcctcattgtctgcggctgcattgtccaacaggtgagccactagccactttgtagttactgagcgcttaaatgtaactagttcgaagatgtgccgtaaatgcagcacaccagatttgaaaagcttagtacgaacaaaagaatgtaaaatatctcattcatttgatattattacatgttaaaataccttggatttattgggttaaacaaaatgtcttatttccattaacttcacctatttcttacttttagtttaaaactacataaagattagcttgccttgtattttcactggacagcgctggtctaagtaattaataagacccagctgacattagcatctatttctttctcctctagcgtttctcgaactggttctacagtagcctggggcaccgttaattctgccaaggcctggcgtgggatctttctgaatcctaagatcctgggtgttgggtaagaggatgatgagtaaagaactggctaactggtcccgtacccactgcgcatctcgcagagcgggctcccgaatctcctccggcagagcgtccccgagcttttgcacgaagcggccgcacagttgtagcatttcggtcacagcccgcttcgaggtgcagcgcacccgaaagtcttctcggggagtggcggagaccaaggcctggctctctgtgccagccgcgagctccttgtcccatggagggtcaaggaccaccaactcaggagaccccgccatttttcgtcggaactgtgggcggggcactctgggagcggaaaagcgggttcacactggtgtaaccagcatgcatccggctggaaactcaggacgctgcagctgaaacgttccggctccggctctgctggccggtctaaagcggcagccgccggggcgcaatgcgagcggctggcgtaggcttggtggactgtcactgccacctctccgccccggactttgaccgcgtatgtgagggcgatacgggaccagagggagcagggaggcccccgtcctttcccctcgtgttatctttgctctcctcccttgggacgaaaccccatatc

SEQ ID NO: 3909 - DNA, 2300 bp, Homo sapien
ttattttctccccacaaacctattccttctgctgacctccccacctccacctcagaccttggtcttcccttatctcagtaaaccagcaccaccatcttccctatagcacaagctaataatctgagtcatccttgactcctccctttcccttgctatccacatccaattcttcagtacttactgtggattctctctctaaaatgtatcttgaatccatgtattcatctcaaactcacctgctatcatcatagtaccaacagccaacatctcttgcctatatactgcaaaagcctcctaactagtcttgtagcttccactcttctcctccacccatttgccatacagcagcaaaatggtgttaaaatggatagcatcatgcctatccatttttgtgtaatcccaggactttgggaggccaaggagggttgatcacttgaggccagaagttcaagaccagcctggacaacatggcaaaactctgtctctattaaaaatacaaaaaattagccaggcgtggtgggacacacctgtgatcccagctacttgggaggctgagacaggagaattttttgagcccaggaggtggaggttgcaatgacctgagatcatgctattgcatttcagcctgagggacacagccagactcaatctaaaaaaataaaaaaatgaaaataaattttaaaaaagccctttaatgaatctgcattgtgcttcaaatgcaatccaaattccttactgacccacctcatctatcccctgcaaacctccccagttttgtttcatgcctttctctttctagctcatcaggctccacttagctttttggcaactgaaatgtgccaaattctagcttgtctgggggcctgcaacctatctgtttccctaaccagcatacactcacccccttgcttgggtggctccttgtcttttcagccttaagtgtcagctcctgggaggatttccccctgaaataaaaccccccttaatcctctattattagtctctagtttcccacgtaatgggtaaaacagtttgtaactgattttacgtgtgtattattattttaattgagacggggtctcaccacattgcccaggctggtctcaaactcctgggctcaagcgatccacccacttcggcctctcatagtgctaggattacaagtgtgagcaaccacactcggccatgtatttttgtttgtttgtttgcctctctcccccatttgtgaatttttttttttttttttttttgagacagggtctcactgttacccaggctggagtgcagtggcttgatgtcagctcactgcaacctccacctcctgggctccagcgattctcccacctcagcctcccgagtagctgggaccacaggcaaacgccacaatcaccggctttttttttttttttgtagggacgaggtttcaccatgttgcccaggctggtcacgatctcctggacacaggagatgcgcagcgcccgcctcggcctcccaaagtgctgggattacgggcgtgagcccgcgcccgacctctccccgatttgaacgcgtttcgaggaccgcttcccacaaagagtggcatctcagccaggaggtgagagccccgaggggaaaaacaggccagccaaggggagtgagggaacgattccaggaactcagaagagcaaacaaaagccttgtggagatagcttaccgctactgaatcaggaaaaaaaaatcggtatgtctgaggttaaatagggaatagggaaatgaggggcaaggtcatatggccataaacaagggtctgggcgggggatatggggtttcgtcccaagggaggagagcaaagataacacgaggggaaaggacgggggcctccctgctccctctggtcccgtatcgccctcacatacgcggtcaaagtccggggcggagaggtggcagtgacagtccaccaagcctacgccagccgctcgcattgcgccccggcggctgccgctttagaccggccagcagagccggagccggaacgtttcagctgcagcgtcctgagtttccagccggatgcatgctggttacaccagtgtgaacccgcttttccgctcccagagtgccccgcccacagttccgacgaaaaatggcggggtctcctgagttggtggtccttgaccctccatgggacaaggagctcgcggctggcacagagagccaggccttggtctccgccactccccgagaagactttcgggtgcgctgcacctcgaagcgggctgtgaccgaaatgctacaactgtgcggccgcttcgtgcaaaagctcg

SEQ ID NO: 3910 - DNA, 2300 bp, Homo sapien
agttcatatggaaccaaaaaagagcccgcatcgccaagtcaatcctaagccaaaagaacaaagctggaggcatcacactacctgacttcaaactatactacaaggctacagtaaccaaaacagcatggtactggtaccaaaacagagatatagatcaatggaacagaacagagccctcagaaataacgccgcatacctacaactatctgatctttgacaaacctgagaaaaacaagcaatggggaaaggattccctatttaataaatggtgctgggaaaactggctagccatatgtagaaagctgaaactggatcccttccttacaccttatacaaaaatcaattcaagatggattaaactgtattttctaaaagtaaataaatgtgttggctgggagcggtggctcaggcctgtaatcccagcactttgggagaccgagcaggaggatggcttgagctcaggaattcgagacaagcctgggtaacatagcgagaccttgtctttacaaaaaatacaaaaattagccgggcctggtgacacaaacctattcttccagctacttgggaggctgaggtgggaggatggcttgagccctggaggcgggggttgcaatgagccaagatcatgccactgcactctagcctgggcaacagagcaagaccttgccaccaaaaaaataaaataaataaatgtgtttttaaaaaatgcactgcccacctttgaaggcaacaatggcactatgaatgatctctaatttcttgagtcagcttgtttcttgagttgcttctccatgtagtgagtgagttagttagttttgctgggccccttcctccacattggaaacattccagagtgacctgaagatttaaaaaaaaaaaaaactggagacctcctcttcttagaaaagaaatatatgaataaaataactttccatgtagcttgggcaacatggcaaaaccccgtctctatgagaaatttaaaaattagccagttgtggtggtccacgcctgtagtcccagctactcaggaggcagaggtgagaggatcacctgagttcaggaggtcgaggttgcagtaagcctcaatcacaccactgcactctagcctgtccgatggaatgagatcctgtctcaaaaaacaaaagaggccagggaggccaaggtaggcagatcacctgaggtcaggagttcgagaccagcctggctaacttggtgaaacctcatttctactaaaaatacaaaattagccggatgtggtggcgtatgcctgtaatcccagctactcaggaggctgagacaggagaatcacttgaacctgggagatggaggttgcagtaagccgagatcgtgtcattgcattccagcctgggcaacaacagtgaaactccatctcaaaaaccaaaccaaaacaaaaacaaacaacaacaacaagttccccatgtaaaatataaagttttaataaaaccaataaagtagctaccacttactgagtacttacaatgaatctttagattagaactcttcttcatcggggcaaggacccatttgtccccagtatccacaatagctccaagcacagtatgtgctcaaaacatatcagtacatgtaataaattgatgccagccacaatgcaaaaatctttacatgcattcctaatttaatctcaacactctcctcatcacttaccacacatacaaacacacagcttggtgaaagcagtatctttagcccccattttgcaaatgatgaaaccaatattacgagggttgaatggctgggcctggtgatgcacacctgtaatcccagcattttgggaggccaagaggaatcgcttgagctcaggagttcaagagcagcgtggccgacataatgaaactgtgattgcaccattgcactccagcctgggtgacagagcaagaccttgtctccaaaaaaaaaaaaaaaaaaaaaaaaaagagggtagaggaatttatatttatccaaggtcacctggctggtaagtaaatgatctctgactccagaacctctcttaaccaggcttctatgaatagaacaaagttggaatggcactgatcagaatattccatcaccaaggtgtcatcccagtgggctaatccacaccagtggacttgaaacacgctttgggttgctgtatggtagtatgctaaaggtaatttataataatatacctgtagaaatagtaatatattttctcgtacagtcaattcttattattatgatagttatgttctataaagttgccacaaacattaaattagcaaatactgaaccattgctcc

SEQ ID NO: 3911 - DNA, 2300 bp, Homo sapien
aaagtaaaaatataggacattttaggtgaaggtaagcactaggaaagaaagaaaaaaaaaagcagggaagggatgttggccggggcgggcggagggggggatttatacagtttggccaaggaagacattataataatgcacttattccttagtttagaacatgtagcatttcacctgtaccgagagatgcctgatatatttcatacatgaccaaaataataatgtaagaggcaataaaaaagtgcagggttttagggttctagatatcagcacattttaagattaaatgcatggtaagaacttttgtactatatacacctagtttgaacttaaatttaataacaaactctttggagtctctctctctctctttttttttttttcccaaacatagcttcccaaggagcagaagggctgaattttctctagttccaggaagaccgcaaggctactgtgctctggatgtctcgtttttatttttttatttttttattctccagatctcaagacggtgtctggcacataccattcaatacaagtttggtacctggaacccactgaatatgcatgtccagtaactattaactacatgtgttggtgcaagggagaaggtcgagcaaccggatctgctccatcatagcccgtctcagtcgcttcattcaagtcagcggggtgaggttgaggggattccaacttcacaagggcagatttctcatggactctctttctctggttgtactggaacactttctggcgttattcctctgctgggacagcatgaacttatgaaacgtggtcctgtctgccctaaagccagggtctcaccgacaaggacagcgatgctggggcgagaaataaagttcgtcctgggcctgcgtacggtacagcgcccttgggaagcccttgtggagttaagggtgatgcccacttctttgtctccctcattctgtttcggtggctctctcgttcccagttccaagctgcccacttgttagaggagccactgcttaccaggcatctggtttaataaaacatggctagagcgactgcatgttaaagtgagtaactaggcactcacaaggcacctataaggttaatgctaaaggtctgaaaatagccgcattctaagctgaccaacaattataattacacaatatttatggccatacaggacatctcccaccaagtctgcggaattgtccagatgtcctgagttttttttttttttttagacaaggtctcactttgtcgcccaggctaggctggagggcagtgtggtgcgatctcagctcactgcaacctccgcctcccaggttcaagtagttctcctgcctcagcctcctgagtagctgggactacaggcatgcaccaccacgcctggctactggcttttttttttttttttttttttttaaatagatggcatctcagtatgttgcccaggctggtctcgaactcctgggctcaagggagactcctgtccggcctcccacagtgctgggattacagacgtggccaccgagcccggcccagccctctactcagagataacgtcaatgcgcaggcttaggttgaaggattaatggtcattagtgcaccaacagcccctacctttagtgggcacatcagcacattccacgattaatcacagctcctcacagctgcctctaagtagtgacactaccgaaggacgggagttcctcctcctgcagtctgaggacttgcactctctaacggagtagattccaataaacttgcttccttcactgcgctctgtgactcgcctccaattcttccctgaagtagacccaagaaccctctcttggggtctggatcgagacccctttttccagcaacacaacccgcggggccgcctcccgcccaccctcaggtgcaggagaccccgggccatgcatccttccgggcaggaaaatgtcagccagcgctcgccggccgctttcctcccccgcctcccgaagttctcgcccggtagctccccgactggctctcgcgccggacaaaggcgcacgctgattggccggagggccgtagtcatgcaggacgcgcgactctaggggcgggaccagacaaggggtgactgccgcgcggcgcgggggaggagaccttcatctgttcacgcggtagcgcggattgcggttcgcggcgcgcgccaccggggaaggagcggtgggccgaggggttggaggtggggccccaggaggacctcgggctgtgggccgggagagcggagtcggggagtggggcgggggagcgaggtggcgccggggagcctgggatat

SEQ ID NO: 3912 - DNA, 2300 bp, Homo sapien
accgacaaggacagcgatgctggggcgagaaataaagttcgtcctgggcctgcgtacggtacagcgcccttgggaagcccttgtggagttaagggtgatgcccacttctttgtctccctcattctgtttcggtggctctctcgttcccagttccaagctgcccacttgttagaggagccactgcttaccaggcatctggtttaataaaacatggctagagcgactgcatgttaaagtgagtaactaggcactcacaaggcacctataaggttaatgctaaaggtctgaaaatagccgcattctaagctgaccaacaattataattacacaatatttatggccatacaggacatctcccaccaagtctgcggaattgtccagatgtcctgagttttttttttttttttagacaaggtctcactttgtcgcccaggctaggctggagggcagtgtggtgcgatctcagctcactgcaacctccgcctcccaggttcaagtagttctcctgcctcagcctcctgagtagctgggactacaggcatgcaccaccacgcctggctactggcttttttttttttttttttttttttaaatagatggcatctcagtatgttgcccaggctggtctcgaactcctgggctcaagggagactcctgtccggcctcccacagtgctgggattacagacgtggccaccgagcccggcccagccctctactcagagataacgtcaatgcgcaggcttaggttgaaggattaatggtcattagtgcaccaacagcccctacctttagtgggcacatcagcacattccacgattaatcacagctcctcacagctgcctctaagtagtgacactaccgaaggacgggagttcctcctcctgcagtctgaggacttgcactctctaacggagtagattccaataaacttgcttccttcactgcgctctgtgactcgcctccaattcttccctgaagtagacccaagaaccctctcttggggtctggatcgagacccctttttccagcaacacaacccgcggggccgcctcccgcccaccctcaggtgcaggagaccccgggccatgcatccttccgggcaggaaaatgtcagccagcgctcgccggccgctttcctcccccgcctcccgaagttctcgcccggtagctccccgactggctctcgcgccggacaaaggcgcacgctgattggccggagggccgtagtcatgcaggacgcgcgactctaggggcgggaccagacaaggggtgactgccgcgcggcgcgggggaggagaccttcatctgttcacgcggtagcgcggattgcggttcgcggcgcgcgccaccggggaaggagcggtgggccgaggggttggaggtggggccccaggaggacctcgggctgtgggccgggagagcggagtcggggagtggggcgggggagcgaggtggcgccggggagcctgggatatggcgcggccagacgatgaggagggggcggcggtggcgcccggacacccgctcgcgaaaggatacctcccgttgccgaggggcgcgcccgttgggaaggagagcgtggagctgcagaacgggcccaaagcgggcaccttcccggtgaatggggccccccgggacagcctcgctgccgcctcgggagttctgggcgggcctcagactccactggccccagaagaggagacccaggcccggctgctgcctgcgggcgcgggagctgagaccccgggggccgagagcagcccgctgccccttacggcgctctccccgcggcgcttcgtggtgctcctgatcttcagcctgtactcgctggtcaacgcctttcagtggatccagtacagcatcattagcaacgtcttcgagggcttctacggtgtcaccttgctgcacatcgactggctgtccatggtgtacatgctggcctacgtgcccctcatcttcccggccacctggctgctggacaccagaggcctgcggctcaccgccctgctgggctccggcctcaactgcctgggtgcctggatcaagtgcggcagtgtgcagcagcatctcttctgggtcaccatgttgggccagtgcttgtgctcggtggcccaggtgttcatcctgggcttgccctcccgcatcgcctcagtgtggtttgggcccaaagaggtgtccacagcttgtgccaccgccgtgctgggcaatcaggtaagtactggagtggtaggtgaaagtcagatccttaaaagaccggaaaaagtcataggccgtgagaactatggcctgtatggatga

SEQ ID NO: 3913 - DNA, 2300 bp, Homo sapien
gattctcatgccttggccacctgagtagctggaattacaggcatgcaccacaccatgccccactaatttttgtgtatttggttttgccatgttggccaggctggtctcagactcctggcctcaagtgatccgcctgcctcagcctcccaaagtgctgagattacaggcgtgagccaccacgcccagcccagaacttttggttagcagtcatttatgtgtcccttatgtgccaggaactgtgctgactgctaatatatgaaattaaaagggagctgttcacaatgacctctcaaaatggaaacaatcttcccagaacccaataccttcctttcacaaatacactggtgacaaaaataataccccaagtcttgttcgttactgcattgacaaattttccatgttaggcatacacaagccaatacagttaattattattattattattatggttacagtttattattattatttgagacagagtctcactctgtcacccaagctggagtgcaaaggtgcaatctccgctcactgcaacctccacctcccgggttcaagagattctcctgcctcagcctcctgagttgctgggactacagatacccgcaagcaggcctggctaatttctgtatttttaacagagacggggtttccccatgttgcccaggctggtctggaactcctgacttgaagtgatccacccacctcggcctcccaaagtgctgggattacaggtgtgtgccaccgcgcccggcccagttaattattttataggtaattttcaaagcaagatgacaaggtcgtttggaaaattttgtccttacaaagaaatttatagcccacttcaatccaagacggcctcctattcaacggcttcatctcctcttttatagacaaatacctcctggggcagttcatccatacaggccatagttctcacggcctatgactttttccggtcttttaaggatctgactttcacctaccactccagtacttacctgattgcccagcacggcggtggcacaagctgtggacacctctttgggcccaaaccacactgaggcgatgcgggagggcaagcccaggatgaacacctgggccaccgagcacaagcactggcccaacatggtgacccagaagagatgctgctgcacactgccgcacttgatccaggcacccaggcagttgaggccggagcccagcagggcggtgagccgcaggcctctggtgtccagcagccaggtggccgggaagatgaggggcacgtaggccagcatgtacaccatggacagccagtcgatgtgcagcaaggtgacaccgtagaagccctcgaagacgttgctaatgatgctgtactggatccactgaaaggcgttgaccagcgagtacaggctgaagatcaggagcaccacgaagcgccgcggggagagcgccgtaaggggcagcgggctgctctcggcccccggggtctcagctcccgcgcccgcaggcagcagccgggcctgggtctcctcttctggggccagtggagtctgaggcccgcccagaactcccgaggcggcagcgaggctgtcccggggggccccattcaccgggaaggtgcccgctttgggcccgttctgcagctccacgctctccttcccaacgggcgcgcccctcggcaacgggaggtatcctttcgcgagcgggtgtccgggcgccaccgccgccccctcctcatcgtctggccgcgccatatcccaggctccccggcgccacctcgctcccccgccccactccccgactccgctctcccggcccacagcccgaggtcctcctggggccccacctccaacccctcggcccaccgctccttccccggtggcgcgcgccgcgaaccgcaatccgcgctaccgcgtgaacagatgaaggtctcctcccccgcgccgcgcggcagtcaccccttgtctggtcccgcccctagagtcgcgcgtcctgcatgactacggccctccggccaatcagcgtgcgcctttgtccggcgcgagagccagtcggggagctaccgggcgagaacttcgggaggcgggggaggaaagcggccggcgagcgctggctgacattttcctgcccggaaggatgcatggcccggggtctcctgcacctgagggtgggcgggaggcggccccgcgggttgtgttgctggaaaaaggggtctcgatccagaccccaagagagggttcttgggtctacttcagggaagaattggaggcgagtcacagagcgcagtgaaggaagcaagtttattggaatctactccg

SEQ ID NO: 3914 - DNA, 2300 bp, Homo sapien
tagtttacattctcaccagcagttttatgcatgttccctttttgccacatccacatcaaaatctattattttttgacttttatgacaattctcgcaagagtaagatggtatcttatggtggtttaatttgtatgtctctgataattagtgatgttgaacattttttcatatgtttgttgactgtatatcctcttttgaaaattgtctattcatgtcctttgccaattttttgatgggattggttttatctggctgatctgtttgggttccttgtagattctggatactggtcctttgtcagatgcacagtttgtgaatatttgctcgcactctgtggattgtcggtttactccgctgattatttcttttgctgtgcagaccctttttagtttaattaggtctcatttatttattttcatttttgttacatttgcttttgaggtcttagtcatgatttctttgcctgagctaatgtctagaagtgtttttctcatgttatcttctagaatttttatggtttcaggtcttagacttaagtctttgatccatctggagttgatttttgtgtaaggtgagagacgaggatccagtttcattctacatgtccacttcagccttttgagtagctgggactacaggtgtgtgccaccacatctggctaatttcaaaatatttatttagtagagacaaggtctcgctatgttggtccagtctctaattcctggcctcaagtaatccttcctcctctttctcccaaagtgctgggtttaaaggtgtgaggcaccacgtctgccctattctcattattgaatctataaagttcttggcatgggctctgtctcagggagcagtgcagggctaagtccagaatccaggtctcctcacccaagccctggctctcaactacccctcaggggtctctgccctcctgtggaagagaagttccagttccatgacaggcaacttgtcaggataagcatccagaaactgacccgccatcagtggcactttgacaactgtcttcttaattcaaggttcacttagcataggtctcataactgctttgctcagagctggcctgctggcctgcagtttaaagagaaaggatgctatggccaggatcctcagtgtcacaagagaggaagtcagggaatcacagaaccttacagccagaacagaccctggagagcgggaggtctgctctcctttcagaaagagaagctaaggcccagagcagggaagtggcttgtccagggtcacacagctgagcaaagtgacaaacctggaccaggagccagccttcaggtcagcagtctggtgctcttcccacctcaacctgctctcctctttcttaaagaaaaagaaagagaaggtgtttcagtagtgagtgtgggatagccacccacttcaccatggtttggaagcatctctccatccctcctctcactcaacagctgtggcagaacagtcagggcctgcctgacctcttgagttttattgtctcctctcaacttgggcttaaagggactttattaaccatgactaataccagaggatccaaagctgcacccacttgttaattttgaggaatttttaaatgcgggatttaaaaaagatttaatttcacgcataggtatgaacagcccctcatcatcccaggtagaggatgaacaactcatcatcccgggtagaggcaggtaagtgtgtccagcgtccctcagggaatgctcttctgatgccaaaccctctgcttccgcggggtcacttctcgggtggttttgtttctcctctgcttccacagttgcaaaccctcgaagtgccacgacccctggggaaactcgatcttaagtcccatggccaaacgctccagcccgcggggctctcaggacaccacagcgatcggatttcgcgtggccgccaggctccccctactcctgtcccctcccgccagagaacccctggagccaatcagagcgtcgcggagcccggggttgtagagtcccgagcccgggacccgcccctctttgttgcggtggccaatagacgcattcggaacatcggcggctgcccgggtgacttggttatatgtcacagaataacattcgagaatgggacatggaatgaggcgacggccccagcaagccccagcagccccagccccagccccaggcccagcagcagcagcagcagcccctgctctcccgccgcccggagaggctctgcagccatgaagccaaccgtcccgaggtaggatcttggagctgccgcgcgcccttcctgcgcgccgcccgcctgcagcc

SEQ ID NO: 3915 - DNA, 2300 bp, Homo sapien
tgcctcagcctcccgagtggctggggttacaggtgtgtgccaccacacctggctaatttttgtatttttagtagagacggggtttcagcttgttgaccaggctggtctcgaactccttacgtcgtgatccacctgcttcggcctcccaaagtgctgggattacaggcgtgagccactgtgcccagcttcttctagtaagtaattattttcacttggttgatttatatctttttcatctatctgtggcaacatactgcttggaggaattaacaggcagcaaaaaaaaaaaaagtattgacagacatggatacttcaccgataagtaacacaaggtggcaggatagaattttgaatgctggttgtgggcaaaatagtaatttaacatttattatacaagtttccgttgtagaataataaatattttctttagcttagcacaatttatctcgtgattatttttattgtgctttcctctccttactttagatcatttcatcttcagtatatttaccaaaataagctctccaacactggagttttgagtaatagtttaaaattatttatttttttttttgagatggagtcttgctctttcgccaggctggagtgcaatggtgggatctcggctcactgcatcctctgtctcccaggttcaagcaattctgcctcagcctcccgagtagctgggactacaggcttgcaccaccaagcccggctaattttttgtatttttagtagagatggggtttcacagtgttagccaggatggtctctaactcccaaccttaggtgacctgcaggttcacctcggcctcccaaagtgctgggattacaggcgtgagccaccatgcccagccaataagtttaaaattttgtaagagttaatctctcttagtacaggtatacttcattttattgtgctttgctttatcgagcttcaaacatactgcattttacaaaattgaagtttcatagcaactctaccttaagcagctctatcattgccatttttccaacagcatgtgctcaattcctgtctctgtcaccttttggtaactcttgcattactcaagcattttcattattattaacatctgttatgttgatccaagattagtgatcttcgatattactattgtaatggttttggggtgttatgaactgtacccatataaaatgagaacttaatcgataaatgtgttctgactgctccactaatcatctctctccccctacttgggcctctatattccctgaagcacaaccatattgaaactaggccaagtaatagccctgcagcgctctctaagtgttcaagtagaaggaagactcacatgtctcactttgaatcaaaagctagaaatgattaagcttagcaaggaaggcattttgaaagctgagagaggccaaaagctaggcctcttgcaccaaacagcaaagttgtgaatgcaaggaaaagttcttgaaggaagttagaagtgctactccagtgtatgaaggcataataagaaagcaaaacagccttattgctaatatggagaaagcttgagtggtctggatagaagatcaaaccagccacaggattcccttgagtcaaagcctaatccagaggaatgcattaagtctcttcaattttttgaaggctgagagatgaggaagctgcagaagagaagttggaagttaacagaggttaatttatgaggtttaaagaatgaagccatctccataacataaaagtacaggtaaagcagcaagtgctgctgatgtagaagctgcagtaggttatccagaagatctagctaagatcattgatgaaggtggctacactaaataatagatttttttttttttttttttgagacaggatctcgcgctgttgcccaggctggactgcagtgacacgatctcggttcactgctacctctgcctcctgggttccagcgattctgcttcagcttcccaagtaggtgggattacaggtgcatgcctccacgccgggctaattttttaatattttttggtagaggtggcgtttcaccatgttgcccaggctggtctcgaactcctgggcttgagcaatcctcctgcctcagcccctcaaagtgttgggattacaggcatgagccaccgcacctggccaacaatttttaatgtggatgaaaccactttatattgcaagaagatgccatctaggacttcataactagaaagaagaagtcagtgcctggtttcaaaggacaggctgactcttttgttaggagctaatatagcttgttactttaagttaaagtcagcattca

SEQ ID NO: 3916 - DNA, 2300 bp, Homo sapien
ggcgggctaggggtggaaggaagaggaagagggtctgggcgatggtgcatccgggacgagcctccagagaccaagcgggataggtaaacccgccgcgcagctggcgggacgctgggccaacgaggtctggggtcttggcgcggagttcatgggccgccggccaggcttgtgccagtggctttggatccctggcctgcttcccccaacccagcctccagaccagcgctggcctgctccacacactccgcagcaccgtcccgggaaccgagcgtcggcggggaggccgcctctccgcagtaggtctcggcgggcctgatcccttggaggcgcgtgtgtggcacacgcccaggaggggcttgatttttgttgatgtgttagtgtctttcaaactttagtcacttgtatgtcatcccttactgttatggccaagttcttgtttcacgtgtattatttactggatatttttctttaaattgactcagttttttttaaaaagcacttcagtaggtgctgcccacattagcttcaccctaagcagtgtctgcagagtcttggatttgatgtgcgattatgttttttcctaataaactaacataagtatttagaaattacaatcaagtaatttaactgtgtactctgtgaaaccgactcgtgtaccacccaccacgcttgggaaacacagcatgtattattacataagcgatggggatttggttgtaactcccataggcctgggacttgatggtaattcagttcaacaatgtttcctgagtaccagctgtttgccaggcactgtgctaggcacttgtgaagataacggaattaaaatgaataagacggttctgttctggccctgaaggagcttaacatcttaagagaaaaaaaagtctgaataaataactgcaaatatagataatagcttttgtagtacaagtattatatttcaatacagtggcttattagcatagaaaatgcatggaccaagtgcccaaattcctatggctttcagagttatcacaaagcagtgtagaatgcccatgttatgcctttaaagatttacaattaagtagattttagagaacaactagcgaatacttaaactgtaaaaattataataaaaatttaaatgctgttaaaacgagaataacagcgtataaagttaaataacagtaaacgcaacttaaacaaaattcccttagggatgggagcgcacattattgatgctgtggtagaaatgtagctgttaagaattttggaggaaaggataaaagtccttctctgaatcttaacattttgccaaagtagtatagtgagaggaacatggtgctttattaagctgaagtgtttcttgagagcctgagagcaacatacctattaaaaatgttagcgccactttggagatgttttggatgatgggttaaattgaagctgttggtttggagtgttggtgcattcgtagtacgtcatccccatcctctttcatttcccccaacgagaatcatgcttaaaaaagaatggagaaataaattatccacccgttgattagtaagagaagtagttttgtgaatttatgaagttgtggataggcttttgttttcctaactatacaagtgtttggaaaaatctgcccttggtataaaaaactgttcagaaacttgttattactccaagttggaggagaggtttactttaattgtagtgtgatatgagttccttattcgatttcagtataatacttgttgtgtattttattttctcattgagttttgtaggtgcttgaaagctactctgaatatcattttgatagttgattcatctctcagttgaactatgtacattttcaggggtatgtggtattttgggagcctgggaggcattctgtgttaagtattcagaataccattcatggttttttaggacgagagtattgagatattgatgccaataggtaaatcatgggtgctttcctcttcatccttcacagatttagcagccagattttaaatattagacattaccttcccttgaggaaacaggcttagattttgtaaactatagctgaacaaaaagtggtgcctcaaggagtgtatttatttcttttagataccccatgtttccccatcactcgaggagtctgggcagagactggactacaccgtgggagaatctgcaaaggtgttgctggaacagacatatttctagttgtatgaggtggcctggacattactctcgagctccttacccatacttcagtagtaggcatttttcactaaattggagaccaccctgtttgtttgagt

SEQ ID NO: 3917 - DNA, 2300 bp, Homo sapien
atttgtggattccatatttgcaaatttgcctacttgctaaaattgatctgtaacctccatgtattcttggacatgtacagagcagggaaaatttttaattgcccaaagtgcacattcccagctgaggctaaacaaggcattctctgcctttttgtttcagctctcatgctataccatagtgtccccttgttgccagggctggagtacagtgacactatcttggttcactgcagcctcgccctctcgggctaaagtaatcctttcacctcaaattctggagtagctgggactacagacgagagccaccatgcccggctaatttttgtattttttgtagggacggggtttcgccatgttgtccagtgtggtcttgaactccctggctgaagcgatccagccgccttggcctcccatattgctgggattacaggcgtgagccatcaggaccaagtgtccttttcacattccatttagtgatatgtttttcacgtttttgtactttttgttgatgttgctgtttaaaatggtccccaagcgttgtgctgtatagtgctcctaagcacaagaaggctgtcatgagccttgcagagaaaatagcagtgttagataagctttgttgaggtatgaattatagtgctgttgactgagttcaatgttaatgaatcaacaatatatattaaataagatgtctttaagcggaaacacacatacaacaaaactatgtattgattaagttgatgaaaatgcgaccagaggcttacaggatcctaatcctgtatttcccttaggagtaatgattcagtatttactaattcagtgtttccagcaactttacagaacctaactactgcaaataacaagaatcaattacatactgagggaaaggtttttttcaaatacactttacttccttttatgcaccagggataagaaaagccttcccaagaaattaccactgtttcaaagagcctataaaagcagtgctcctgccttctagtatccttttcccctctactctccacactttattctttctcggtttctctcttcctgtttcttgcagggtctccacttaaataatgtctttcaacaatctacagtcctataatacatttaataaaggtggacacacaagacatacaagtactttttttttttttttttttttttttgagacggagtctcgctctgtcgcccaggctggagtgcagtggctcgatctctgctcactgcaagctctgcctcccaggttcacgccattctcctgcctcaggctcccgagtagctgggaccacaggcgcccgccaccacgcccggctaattctttgtatgtttagtagagacggggtttcaccgtgttagccaggatggtctcgatctcctgacctcgtgatccgcccgccttggcctcccagagtgctgggattacaggcgtgagccaccgcgcccggcccatacacgtacattttaaagtgagagctatggctgtgcttccgcaacattaattgcaaaattctgtggtacctcagttccatgggcacccagaggatgcgttgttcagcctcagctgggaatctgcactttgggcaattaaaaattttcactgctctgtttatttctgccgggcgcggtagctcactcctgtaatcccagcactttgggaggccgaggcgggcgaatcacttgaggtcaggagttcgaaaccagcctggccaacatggtgcaaccctgtctctactaaaaattcaaaaattagccgggtgtggtggctcatgcctgtaatcccagctacttggcaggctgaggcaggagaatcgcttgaacccgggaggtggaggttgcagtgagccgagatcgtgccattgcactacagcctgggcgacaagagcgaaactccatctcaaaaaaaaaaaaagaaagaaagaaagaaaaagaaaaaaaagaaagtttatttctgtttctttaagacgaagttcgggtgttttgccctcttcagaaatggttgcacgcgcgtcccacgctctgcgcatgctccttgagcagaattccgggttaaggcattcagggactctgactgcgcaagatggagtgtaggccggccggcgagactgcacctcccagcatgccttgcagccaggactggagtcggtacttaagagtgatggggttccctagatactttaggccgtcgcatcgattatagagattgaggtggaacccggggcctgggaactggacgcacgcggagggcgaagatggaagcctggcgctgtgtgaggaagggctacggccactgtgtg

SEQ ID NO: 3918 - DNA, 2300 bp, Homo sapien
tcaagtcctggaagagagatatgctgggagatagacatttgcaagtcaatgggaataaagaacaaaggatcaaaggcaaaatcttgagaaacaagaatactaaaagttcttggaaggaatagaaaccagcaaaggagactgaaaaaagagcaagtcatctgagtataaaagagaaaagagaaataatgctgactcatatgctaagaatatacaaaagttttaaaaaggtagaaatggtcagagactttcaaaatccagaaatattgggcaaattgaggtcactggaaactgttttcagagcagtttcagagtagcaatatagaggtgaaaccagattgaattggacatgggaataaatgggtgatgatgcaatgttgatgtagattactttaaaatcaacttaaacaactttgacggtgagtggaaggagaaagaaaggaagaaaagaaggcaaaatgaataatgccctttactcccttctctcctggctaactcccatctctcttccaagactcagtcttctatcagaaagccttaggcgatcttccatcctgaattgatgtgctctttagtactccatatatacattcaccatggtacttatcacagtatattttgtgtctttatttttcctactagatggtacttgagaacagggactatctacctttttttttttttttttttttttgagagaagtcttgctcttgtcccccaggctgaagtgcaatggtgcgatcttggctcaccgaaacctccacctcccgggttcaaacgactcttttgcctcagcctcccaagtagctgggattgcaggcgcctgccaccacgcctggctaattttttgtatttttagtagagacggggtttcaccatgttggccaggctggtctcgaactcctgacctgaggtaatccgcccgcctcggcctcccaaagtgttgggattacaggcgtgagccaccgcgcccggtcggagaacagggactatctttgtaactccaatgccaaattggcatcatgtctggcacatagtaggtggtgaattcaggtttaatgaatgactaatagacttagatatatgtaggttgaaaagaaggagccagtggtgagaaagagattaaacatacagaaaggagatttggaatgtcattgaaacagtgtcttaaggtttgccaaagaggatgggattcagatcacatgtggagtcattagctgtaaaaatgagcaagtgatatgtgtacgtttcagactggcatggaaatgtgagaagacaaaggaattggtactaagggccatagctgcttcttcctcttcttttttccctgtaaagaagagtggtggtgcggagagtagggaggcaaaaggaagaggaacagagtctttaggataatggcaaagacttggcatgaatattttgtggaatgaaaaggaaccttgatcacaaaaagataaaggaactgccaagcgttgataacaacctcagctgaaattggaaactgtagtgagtgactcggagaggtcgagtgacatatttctttcttctagccagaggcggactccagattttcgaacctgtggggatttttaaaagattgatattggcttgggagcttttttgggttgggggcttgctgtgcagatgtgttacagaaaggcgctcaatggaaggaaattcgtcttagaaagaagtaagggatatgtctcagagaatgagatgttgctgtgggtatttaaaatgataggctgtgaataggtaaggaaagaaggtgctaggctatggtatctctccatcccttcaacactccacttaagtttgtaccacggcggggcggaggcagggaggaccacgctctcccggtgtggcgtggctataccaactctcataaaatctcataaaaggtgacggagctagcgtacaagaggtcgtctttagtggagaggcctgaggtctccgcagtgacgggggtggcagcgcgaccccttagtcttcaactacaggccagtcccaggtgccccaaaggggctagaatctaaggaggagtctcccctccccctagaagcgggagatagcctggcccggaagcttctctgctgacccggaagcagagctgtgcagctgaggcgccgccgtggagccgccttggagccaccgccccctcgccgcttcgccgctgcgttggggaacctggaccgcggcggcgccgggtttccctcatgatcccgggcgggtggcggcggcggcagaggcggcgggaggatgacctcttaccgggagcggagtgccgacctggcccgttt

SEQ ID NO: 3919 - DNA, 2300 bp, Homo sapien
ttcagatagtgaagttattatatagctgagttttggataaatgatatagtgtttatttttttaagcaaattgaatttttcatacaaatactattggaagttaattatacaaatatgaaatcttaaattttgataatgattagagatttctatgtatgttttgttttaggttgtttcacgaagaaatccagaggatgtccaggaggtaacatttatatgaagattttattttatgtatttgataaaaatttaactaaatgcttttttgaggaaattgcctgaatcatttgtacatcaacctcttttttttgagacggagtttcgctcctgttgctcaggctggagtgcagtggcgcaatctcggctcactgcaacctctgcctcctgggttcaagtgattctcctgcctctgcctcccgagtagctggaattacaggcatctgccaccacactcagctatttttgtatttttagtagagatggggttttaccacgttggccaggctggtctcgaattcctgacctcaggtgatccacctgcctcagcctcccaaagtgctgggattacagacgtgagccactgtgcctggcctgtacatcagtctttatatgtttgcgtgaagattgtcttcatttcacaaaacagtagctgaagtgtcctatttgagacctactaagtaattgttaagttttagtaggtgttaagttatataaataagaatttaatgaattatggtgctgtttactaagtgatcattgttctggtaactagtgtttacaagatttcagtatcacttaagggcccctatttacccatttcaagatcataatgcctgtgtaataaaaagtatttggtaactaatatttattttaaagattctaacagtaaattatgggtctctgcctactttcacttttagattgaattgacatgttgacatcttggaaaactgctttaggcatagatatttctttttttttaaactttaagttagtaagttcttttgcagattcttctgtgcattttttcattttttttccttctttctataatggtaccagcctgttatgttttgcttaaaattgtggaattctctatttgtatttactttgtgcttgttgtgtatctttaggaatccttactgaggagcttgctgctttgaatgtttcttgatttattttcattttagtccctgctcaatttcactaagactagaaggacatatatcaggattttttccgcctccctaatgtgtttaaaacagatactttaagtttacagtcctgattctgcaacagtattgttttttttttttccacaattaaatatgaatgtctttgggtggtaggttgtttctgtttagccacgggtcccactactctacagaaaatacctggcttgattcatacatttaaggtgactgtttggtactggttgatatgagtgtatggccccaggtttagataatatttaaattttatacattatcatttctggctatgtctgatttcatagttgtttttgtcctatgatttaaaacagatatatttttatacaaaaattagctgggcatggtggcaggcacctgtaatcccatctacttgggaggctgaggtaggagaactgcttgaacctgggaggcagaggttgcagtgagctgagattgcaccactgcactccagcctgagcaacagagtgagactctgtctcaaaaaaaaaaaaaaatagatttaatactattttcctgatgggttttaagacaattcattccctaccaggaaacagaaagaatattgtaatattgttattttgaaagaaaaaaatgtatacatacatatatatgtatcagtgaaagtaatttgcaccattgattaaagtacttttctgtctttacttgtatcaattgatgagtgtgaactattctttagatttctagtttacaactcttaaaattgaaaatgggtgtatttcctttgaatgcattgtctgattgctgtgctgtagtttgtagcttgatgttcccattttccagggagaatcctgaaccaacctatccatgaacatactctctgccattttcttagtccttttttcgggaaaactcttttataataacaactgttggtgaaccattcatctgaaaactcttgtaagtgtcttttagttagacaattgcatggttctttgttagaagtggtataaatttttaaaagttttctatttagttggcttcttaaaatatagaataatcttgaaattataacagtactttttttagtttcccacttagtgtatttaaa

SEQ ID NO: 3920 - DNA, 2300 bp, Homo sapien
ggttgtcacttaaaaaaaaaattgatatcaggagatatgcttgaaaccgtactcaccagtcagcaataacaagcattttattaaatatgcttatcttatggcacacgatattaatggatattattgacttgttttgattgatttttaagatagtttttgtttttctaatggcttaaataactgtcaatttggagatcttaatacttttgtttgttttgttatacttgttcacaggtggcaaactgtggtcatatatcagtaaatttctaaacagaagtcctgaagaaagctttgacatcaaggaagtgaaaaaacctacacttgcaaaagttcacctgcagcagccaacttctagtcctcaggacagcagtagctttgaatccagaggaagtgatggtggaagcatgcttaaagctctgcctttgaagagtagtcttactccaagttctcaagatgacagcaaccaggaagatgatggccaagatagctctccaaagtggccagattctggttcaagttcagaagaagaatgtactactagttatttaacattatgcaatgaatatgggcaagaaaagattgaaccagggtctttgaatgaggagcccttcatgaagactgaagggaatggtgttgatacaaaagctattaaaagcttcccagcacaccttgctgctgacagtgacagccccagcacacagctgagagctcacgagctgaagttcttccccaacgatgacccagaagcagttagttctccaagaacatcagattccctcagtagatcaaaaaatagccccatggaattctttaggatagacagtaaggatagcgcaagtgaactcctgggacttgactttggagaaaaattgtatagtctaaaatcagaacctttgaaaccattctttactcttccagatggagacagtgcttctaggagttttaatactagtgaaagcaaggtagagtttaaagctcaggacaccattagcaggggctcagatgactcagtgccagttatttcatttaaagatgctgcttttgatgatgtcagtggtactgatgaaggaagacctgatcttcttgtaaatttacctggtgaattggagtcaacaagagaagctgcagcaatgggacctactaagtttacacaaactaatatagggataatagaaaataaactcttggaagcccctgatgttttatgcctcaggcttagtactgaacaatgccaagcacatgaggagaaaggcatagaggaactgagtgatccctctgggcccaaatcctatagtataacagagaaacactatgcacaggaggatcccaggatgttatttgtagcagctgttgatcatagtagttcaggagatatgtctttgttacccagctcagatcctaagtttcaaggacttggagtggttgagtcagcagtaactgcaaacaacacagaagaaagcttattccgtatttgtagtccactctcaggtgctaatgaatatattgcaagcacagacactttaaaaacagaagaagtattgctgtttacagatcagactgatgatttggctaaagaggaaccaacttctttattccagagagactctgagactaagggtgaaagtggtttagtgctagaaggagacaaggaaatacatcagatttttgaggaccttgataaaaaattagcactagcctccaggttttacatcccagagggctgcattcaaagatgggcagctgaaatggtggtagcccttgatgctttacatagagagggaattgtgtgccgcgatttgaacccaaacaacatcttattgaatgatagaggtcaggaacttttgcaaatgcatttctttttattcgctgttgcttccaattaactgagtaggcgttttatcttgtaattagtatcttcatttcctgtctagagcttcattatcagtgcagcaaattcacccccagtaatagcttctagtacttaatgatgccattattcttaatgatactgtttttagctacaaaaggagtaattacagttcacttctgcagaaaatggaagagaaaaatgttttgatttctcctgtcgttttgtttttaggacacattcagctaacgtattttagcaggtggagtgaggttgaagattcctgtgacagcgatgccatagagagaatgtactgtgccccaggttagagcaatctcctaaaatgtttcacttgaaaaagtggttcggcagctctcatttctttatagaagttgtatttttgtattgttcactagcagtttacatatgtgtt

SEQ ID NO: 3921 - DNA, 2300 bp, Homo sapien
agtccattgtcacatcttttctgcagcaacttggcaaccatccaggagtggcaggaatgggtcttctgctgtaactcatgggggatagtatctaatgttattactgttgctgataataataatagcaacaacaatttatagtgccaatccaatcctcctagcatcttgcattttacagatgaggaaactgaggaccaaagagattaaataaattgtccacagtcacacagctgataagcgacagagctaaggttttaagtgaggtctggtggattccaaactcatatctgtttctattatagcagcatactgacttctggaagacttcagcacatctccctgaatctgaaagggaaagaaatggtcaaaggactagtcgttttgatgcaagtgtcaccaggcacttctaaatgttgtagcagaggatgatggaatgagccagtcacagtcaaatacacatagatagattgtgctgactaataaaagaagtggagaatctgatgctccgatcagatcagccctggataaatgaatcgttcctcatcctggccccccacaatccctcccctactcccaatgatctgacctggggaacagatcctctgccttggaatgggattgacatggaaagagacagcagcagactccgatctgaacagcaccaggaccaatcctaggtactattcagatcctgacaccaacctctggccttatatggttttctgctcctaagaaaaccacgttgtcttcattcatcaagtttcaggttcttttttccattaagcaagttttagtttcttatcccagtaacctttgaaaagttctgattataaaatagagaatgtggaaatacagagtaatacattggagaaaataaaagtcacctgttattctatcaccaggagaaaacagcctatggtctatatctttctagtctgggctgtacatacatatgctgggcagtaaaatgtggtggttatagggatagattctgaaaacagactatctgtatttaaatctaaacacctcctctcgcagtctgacctaacctctctggcctccagttttctcatatgcacagtactttcctcttataatttttgtgacactcaatgatctaacggatgtaaagtagctaggccatgggaatcccttattgcacattagctactgttccttatgttttggtccagtgttcttgtcttgttcgctgattctgactgtgccccagcctccttgatttgaagaccatggataacttcattctcagtggtgattctgttccttctcagtgcatttggtttgatcagccttcccctgacactgcatcagtgacttttcaggtctcaattcctacccatttaaacataactcttaaggaagcattgacagcatcttaccttatttttgttcctgtctgctggacatatttctgcctggatgccctgcttacccagcctggcactaaggcaaaacctaagtagcccttcctgttctcatctgtcttgaactccttgaggttagtgcagatggaggcaagatcaggagttcgtgatcacagagacaccagcagcatcaacccacaatcttgggcctctggaatgtcagtgacaaactaggttccaagtatatataggcaacacaaaggcaagtttatttgtttaaaccattttgaatgtgaaaaagaaggtaattatgaaggatatttctttattatcttctttaaaaatcctctgttggtaagcccatctctcagagaccttttcaccacttagtaaaaaactctgtctatctatctatctacttacctatctactttttttaaatggggaactatgtgtgatgggtgagtggatgtcaacaacaggaatcggaggggtggtgagggtgaattacatttaatgaagctggaagttcacatggacctttcagacttaaaaaaaaaatgttgattttacatgccaaagtcttgaaaggggcttgacggctcacggctttagtgtgtttttccagatggcagatgccattttgtgttttgcataaactgactaaatttgcttgctctttgtacttatttcagagagaaccattctctgctttcaataggacagaagagctccttggcactggatgcctccgggtctggttgagagaggaatggttaggagactgttctgaggatacgcagacatcatccaaagcttcctacattcagatgaggacagaggttgggccagagctttgtaagcttgttacctaaggatggttctgaccatgtaagcagatcacagaaggtaagc

SEQ ID NO: 3922 - DNA, 2300 bp, Homo sapien
cctccttctctgctctccgcccttttaaatgtcaaactgagcagatggttttaaggtgtggaaaggtatatagcccttactcctaccagtttatttgtgggctggcgctaacttatatgtacaaaccaagattcttaaagaaaactagtaggacgaaaaataagaaagaaagtagctttgatccattctcagatcccaagtttccccgctcaatacacccgcttacctcgaagggacccaaccaatagaagcattattccgtcctgtatctaatgggcatgttgattatttctgctcccagcctcaactgtcacatcccggttagaacacctgatacaacagtcaatagttggaggtgtgagtggtgcgtgtgcgctcctctgtgttgcttccgtgatagacgcgtggggggagtgtgtgggggcggcaaaaggggaaagaagaaggctggggatgctcccgcaatctcttttcttatcgccgacacctaacctgaccgacctaattttttttctccttttcactgtttgaaattcgtgccaaaagtttcctgccgggatagactcggacatactaacatcgctattcttattcaaagggagggcttaatatcctctttacggtttggtgaatttgaggctgaaattgtaaattccctaggaaggagtgtgtgtgtgtgtgtgtcgcagaagacattggtagtgtttggccagtgtacttgtaacacacctcataaataccctgttgtcacgacacagcatgattcaacctttgatctgattaaatttgagggacacacgaagactacttgtcctcctcctacttacaaaaatgagtgtctaatagactatgtatgaatgtttctgcttcgcagctcttgcaagtcccagcttttataggatctttaggtcataaacgcggctgctttattaaaagccgtttactgtgcccggtgaaagggacgttctagctgcggctgaggctcgcttgcatttgtaacttgcaaagcccaaggagatctttaagagccacattatctaaagaaattttgctggttatttttcaagcaagaaatgtcaaaccaaagtaaattttctagggctttattttagagcctgcgatttatgcgtttgaaatttcttgcctaataaactttaaagtttgttgcccaggcgtcaaaactgtgtaaatcctgtattgaacagctatctttggtctttctggggcgagtgaattagtgaagggtaatcgccagatgtttgcaacatatatatttttaaaggctgctttacctacaatccaactaatgtcagaggtaaccaagggtaaatattcctcttcctgataatttggactggagataaactgggactcagccaatgttgatcttcgtctaataacagatgcagcggacccgatgtgaaacctctggcacctattattttaataccaaacctacctgtattttattgtccacctcccctttaaaaggaaccaagggtgacacgtatccttgacactacctatgatcgtttaaaaagtggaatgatttgcagatccccccctccctcctcctatgccacccccacccctaaaacccccactttttctcccgtatacttttccgtgccttcctccacccaagtcggaggagcgctcactcgctcggccactcggcgaactcgatcagctgtatctgggaaatgaaaaaagaaaaagaaaaaaaaaaaaaaagacctgcgtcctggaagagctagtgtgagccgggcgccgctcgcgccgtctcccgctttgcatagtgcccgcagatggctcgctccggcccaggcgcggcgatccagtcgtcccgaagctgtggcagggtgggggtgggggtgggggccggggatggaggccggggagggggagcgcagggcccctctcccctcctctcttcccagcccctcacccccaccccttttatatttttttttcctcccaagttctcttgccttgctatccccccttgaatccgaaggcgcctcgcgattgggtgctggggccgggtacgtcagatagactgtgacgtgcagtcttcctgtttccttcagctgtgtcttaaagtaaatcttgttgtggagcggagccctcagctgagggagcgctctgaaataatacaccattgcagccggggaaagcagagcggcgcaaaagagctctcgccgggtccgcctgctccctctccgcttcgctcctcttctcttctttacccttctcctctctcctcctctgctgctctctcctctcctcccgctcttctc

SEQ ID NO: 3923 - DNA, 2300 bp, Homo sapien
taacatcgctattcttattcaaagggagggcttaatatcctctttacggtttggtgaatttgaggctgaaattgtaaattccctaggaaggagtgtgtgtgtgtgtgtgtcgcagaagacattggtagtgtttggccagtgtacttgtaacacacctcataaataccctgttgtcacgacacagcatgattcaacctttgatctgattaaatttgagggacacacgaagactacttgtcctcctcctacttacaaaaatgagtgtctaatagactatgtatgaatgtttctgcttcgcagctcttgcaagtcccagcttttataggatctttaggtcataaacgcggctgctttattaaaagccgtttactgtgcccggtgaaagggacgttctagctgcggctgaggctcgcttgcatttgtaacttgcaaagcccaaggagatctttaagagccacattatctaaagaaattttgctggttatttttcaagcaagaaatgtcaaaccaaagtaaattttctagggctttattttagagcctgcgatttatgcgtttgaaatttcttgcctaataaactttaaagtttgttgcccaggcgtcaaaactgtgtaaatcctgtattgaacagctatctttggtctttctggggcgagtgaattagtgaagggtaatcgccagatgtttgcaacatatatatttttaaaggctgctttacctacaatccaactaatgtcagaggtaaccaagggtaaatattcctcttcctgataatttggactggagataaactgggactcagccaatgttgatcttcgtctaataacagatgcagcggacccgatgtgaaacctctggcacctattattttaataccaaacctacctgtattttattgtccacctcccctttaaaaggaaccaagggtgacacgtatccttgacactacctatgatcgtttaaaaagtggaatgatttgcagatccccccctccctcctcctatgccacccccacccctaaaacccccactttttctcccgtatacttttccgtgccttcctccacccaagtcggaggagcgctcactcgctcggccactcggcgaactcgatcagctgtatctgggaaatgaaaaaagaaaaagaaaaaaaaaaaaaaagacctgcgtcctggaagagctagtgtgagccgggcgccgctcgcgccgtctcccgctttgcatagtgcccgcagatggctcgctccggcccaggcgcggcgatccagtcgtcccgaagctgtggcagggtgggggtgggggtgggggccggggatggaggccggggagggggagcgcagggcccctctcccctcctctcttcccagcccctcacccccaccccttttatatttttttttcctcccaagttctcttgccttgctatccccccttgaatccgaaggcgcctcgcgattgggtgctggggccgggtacgtcagatagactgtgacgtgcagtcttcctgtttccttcagctgtgtcttaaagtaaatcttgttgtggagcggagccctcagctgagggagcgctctgaaataatacaccattgcagccggggaaagcagagcggcgcaaaagagctctcgccgggtccgcctgctccctctccgcttcgctcctcttctcttctttacccttctcctctctcctcctctgctgctctctcctctcctcccgctcttctctctcctcctctcctgctctctcctcttcccttagctcctcttcttttcttctcctcttcttccctctcctcgcctctcccctgctcctcttctctcgtctcccctcccctcccgcctctctctcccctctccctctcccactcgccccgctcgctcgctcgctgtcgcacagactcaccgtcccttgtccaattatcatattcatcacccgcaagatatcaccgtgtgtgcactcgcgtgttttcctctctctgccgggggaaaaaaaagagagagagagagatagagagagagagagagagagagagagagaggctcggtcccactgctccctgcaccgcgtaagtatcttcttcttcccctcgtgagtccctccccttttccagaatcacttgcactgtcttgttcttgaatgagaaaggaagaaaagagcctcccattactcagacccgtgtaaacattattccccccaggagaaaatggtgttattcaaatgaatcataataaaatagcctctaaacagtttctaagcgggagcctccgtggaactcagcgctccgctcctcccagttcc

SEQ ID NO: 3924 - DNA, 2300 bp, Homo sapien
agccaccataactgcacttatcccagtgaactgtgtttgtttgcagcaaaacactgtggttaggaacatggaccttgaattcagactgacttggaaaccaaattctgcaatttattgtgtggccttgaaaatcattccttctgggtcttagtttccttcctaattttggcaatgaggggcataatacctaactcattagcctgttgtaaagataaaccagataatgtgtttaatgatggagcacgatgcctggtcaacaatactcaataactaatggtattatcaaacttgaatgtgccaaatgcaaggacctaggactacattttgtccactttttttttttttttttttttgagacagagtttcgctcttcttgcgcaggctggagtgcaatggtgcgattttggctcacagcaacctccacctcccaggttcaagcgattctcctgcctcagcctcccgagtagctgggattacaggcatgcaccaccacacctggctaattttgtatttttagtagagatgaggtttctccatgttggtcaggctggtcttgaactctcgacctcaggtgatccgcctacctcggcctcccaaagtgctgggattacaggcgtgagccaccacagccggctgatgtccatctttctatcccagttgctggccatagtcagtcgaagtttcttaaaatgcataaatgaaaatactatcataacttcctttacttgaagacgggttagaggcttatttagtttgccactaataagggcttttttgttttcttttgagacaaggtcctgctctgtcacccaggctggagtataatggagtcaccacagctcactgcaaccttgacttcccaggctcaagctatcctcccacctcagcaccacttgagaggtggttaatttcccatagagacggggtctttatgttgcccaagctggtctccaactctccaattcctgggctcaaatgatcctcccaccttggcctcccacagtgttgggattacagggctgagccaccacacccagctgataaagacattttactgaaatgccaaaaattccactgattttacatctccaatcatattaatcctttccctttgctcaaccagtcctgaacttacacaggtaactgtttgaggtcctattttgaagtagtggtttctgctaaatgatctcgtcacaattttagtctttactgcatgtacatcaattccagtctttacataatcatgtggaacacggattatattttcctttctcatatgaaaagtaatagcgtgcatgtgtataggatttacgtttcaggctttgtgggctttaaatcctttgactcctaacccaagtgacttttctaagatcacagttcgtgggtggtcaagcatattaaaactactgcaaactctagcgcagtgtcctggacactggccacagcatcgcattatcccccaacagcctaaattccttgaaggcaaggttctctctggcttcctctgcaacgttcgcagcatgcctcagagactcggtgagctgggccggccaatgcatttcctcttccgtccatgtaattccactagaggagcagagggcaaactacgttcccattaaagccacaaggtttaaaaacctctaaccttggaaaagcacacttcaaccctctgcacaccaaacttctctactgtggtttcccctctgccgctttctccttggcgttccccgatcactgcctctagggtctttacaagggacagcgaacgtaaggtttcggagctggcttcgcccccttctatttaccgggggctggtcatccttcgggccaggctgactgtctaggggtggccctcggatacctggtccccgcaggtgacccccctccctcccaccgaggaggagggcgcgtcccgctcgctccgtggagacgccgcggaggcgcacacgcctcacgcctcctcgcagaagccacaggggctgcggctctttgtcgcggccacaccggaaacggcccggagcgcgcgcggggcggccgccgagggtcgcggcgctaggcggggccgccgggcccgtccccctccccgcgggggcgcgcgaggcccgggcggggccgccctcccttccggggagcggggagccgccgccgcgtccgccgggcggctcccaccccgccccccgcagctctaggtgacgcgtctccaataacagctcgccgggagccgcagctcgggcacagccggcggccgcgccccgccgccaccatgagggccgagggcctcggcggcctggagcgcttct

SEQ ID NO: 3925 - DNA, 2300 bp, Homo sapien
ggatccttaataacagttatttttaaatttatgcagagtatttgggctgaataagtcagagggaataggatgactgggtgtgaggtatcagagtcagtaagtcatcagatgggatctccgcacatcttgggaggattgggtggccaagctggtgttttattattttgttcccctgaattattgatgatatttatagtgatatgttaagaattcagaagaggctggtagactttcctgaatgaaaagctttcccaagcgagatgacttataaatcttataaaaatgcatcccgtgaatggaagatttctgctccaaaaaagaactattgaaatatttcggcaccaggagggtagtctgaatgcaaagatgagtttatacaagcttcattcaagttttattataattactactactactaatagtgtattaaatgaaagttacctgcccatcttttcatctctataggacttgatgattaaaaaaacagaccatttgtattctagtagcttgcaaaggattaggggagacaggctaccaaactaccaaggggaggcttaacatgttaactagggaggtgagcgtgccctgctagaccacctgtatccccaaattgaatagccacattacaaagacatggccttgggccagctcctgagctctgcctttgaactcttgtcaacaccaagtttattcatgttctcaaagcctagcgggtttactattgttagctcctcttggggtgtctagaacaaagccagcaacgcgtttaaagtgaatctgggctcacagatacaaccaaaagtgttctttttgaaacacagaatttgagatcattttagcctatgcttaaagaaagtgtaaaatggatggggggtttgattttgttcctttttagaaggagaaataataaataggatggtttgtctgtagacccagtccttttaagtaaggaccctaaaaagttgttttccggccctgttctttcccgtaacaggtatttctgagcctactgtgtgcatagtattatcagggtgttaggtacacggtagacatttaaaaaagcgctttagaagagtctttggatttggctggtggagagccctagtggtggagtccttgagtagcttgttttacttccttaagaattgttactttttctttatgttgatgtaaaagtgaaagtgccactttattacactggttgttaaaaaatctgtatctgtgtgatttcttccccaattgctagaaaatccacccagagagaacaccttcggaaaaattgttagctgtgaaggagtttgaatcacgtaagtctttctgtgaccagccgcgcagttctctcagccacagatttcacatgggttgggcaggattgaagcgaggacgggctagtttgtgctcagaggagtagtgatttctttgattactagtttttatttttactcttgtgctgtttcgaaaagcacttttagcttttttcttctgagttgacaggattgttaggaaataattaaaggaggtaggagctcccaaaatgaattattgcaccctgagctacctcctgctggccctcttggcatgctgaatacttttggatctttgctgaattgcgtcctctaaatagctgatgttcttactgaaagccgtgaaatcaggggttgtccagttgtttgaccacggcccagattcccgggccaattggggggcccttgactaggctgaggctggttatgagtcattgctacccatccctgacctcattgctaacagtcagtcgaaatctcacgtcccaagtgacttctagtcatcagagggagagaaggaagaaatggcttgctttctttccttagggtttgtcagttaaaccaagtaatggggaagaatgttctctgggggttcaacatgttagttttgggttttttttttttcgcccgttcctttcctctgtatcatttacagcaaaaataggatgtagctagaaatcccacgctttctactgggtgaataatggattatttatccacagatctggataagttagacaatgagaagaaggatttgattcagagtgacatagctgctctccatcacttttactccaagcatctcggattccctgacaatgatagcctcgtagtactctttgcacaggtaaggacgctggcagcaggtaacactcagtctggcctttccctctccaaggccctctccctagcaagcactcagtgaagatgaatgcaaatagaatgatggcatcttcctgacaacgaagctctgagccaattggaccgtgtgttgcc

SEQ ID NO: 3926 - DNA, 2300 bp, Homo sapien
tatctttagagtctctgtatccctattgccaaacaactgagcttgagccttattttattttattttttttggtgaattcttgcttgttccccaccatccctcaaaggtccaaagcaaaagaaagcaagcaacgcagcagtagctaaagagctggcactccaagggacacatcagaatttcgtgttctatcagttccacatctgaacttcaggtcgcagttcactttttaggaatctaaatcaaaagtccaggtatatgcagtaataggagaagtcaaggcagtctgtggccaaggggcaccttagtttccctcctcagcttcaggacgtggagagaaccagtcttcccatcacctgctcagcgattccctgttcccttcccatgtgtgattcctgactacctcatgagacgtctcacctgggaagggctggcctgatggattgctgtagtatgctctgtgttcttaagtaaattcccagcaagacacatgagtttttaggaacttgtaatcacacttgggttaatttcagtttagcaatttgtaatgctattttacggtgcatgcctgggtatttgaagtgtgaagtgtaaaatataactgtcagcgtgctgaatgacaagtgctttgctttctctggaaggcactcactaatccacagctgcactgggagctgaagcccaagatgcaggcaggttggcccttctaccttcagctaaatccattacgatgagggtgtgtcccctttcggctggggtgtctgagtttccaaaggtcttatggagactgctctgaagcctttcttgaaacagataattgcagccagtcagaatgcagtcacccaggctccagtgcacctgtgggctgactgcagagatgagcaggttgtcacctaagctggctcagtctggctgggagcagtggtactggagtggcctttgtcgccatcttctggaagcttccgcatgttgcactgtgagtcagtcattacagagattgttggcaggctcttgtggtgtgaggcagggcaggggtggctgcagtttccttttgcccttatgttctcccagatctgaaacgcagtaacctcatttttgggaagtcagtgctttggggattacttacccttcagagaaggagaaaccccattccccagggtttcggggtgagctgcaacgtgtccagtacctccccatgggctggggagagcttagctgcccctgcagcacccagccctgtgcgtgtcctcccctgcctgcctggtggtgcccgtggtcactggcacgctagcggcttcatgagatccatctgttcagtcagacatttgcctgattgtgtgggatgagtagccagtgctgtcccagtgagtagataatggacatctaaatgctggtctcctccatatgctccaagccttagttacagaccccattaggaaaaggcaaggacggtggagccccatgaaccaaaggtaaggactttccaagctcgctgccctgcaggatcaggagctgcccgctgggccaggccgcagcattctggtgtcctagaagatgtgttcaccctccgctggccacccagagctgtgggtcccagcccactgagtggagcctcttgctccattgccagttgatgtgaggagaaggggagcttagctgcatgtgtgtggtgtgtgcgtgctcatgccctcccctgcacgcagcatccagtgatgacggcaacgaagcatttgcgccgtctcaggtggtgaaacatgaaactacatgaaggccaggcagaggcagctgagggaggcagggatcctctgaaccctccaggacactgttttaaggactccttgattctacagactctttccactaacctgcaccttggcttcagctcccagttcagctgtggattagtgaacaccttccagagaaagccaacgtcaggtggctgctcagttcaggaattccgtgccttaaagtaaacagcgcattcctccgctgcagcccgccttatcctctgcatgggccctgcaggtgactgcaaaggcacgggaatgacaaggattgagtttacctgtagcagactgaagctttatctttttggaccccgtaggtttttaccagctatattgatctcctgtacccaacggaagatagaaatgaccggttaagagattcttatttctttacctgtgagtgccaggagtgtaccaccaaggacaaggtaaggttgttcattgggcaagagcgctgactgcactctgatctcaggacctctctgctgaagagcttgtctgacttggcggatctcc

SEQ ID NO: 3927 - DNA, 2300 bp, Homo sapien
tggcctttgtcgccatcttctggaagcttccgcatgttgcactgtgagtcagtcattacagagattgttggcaggctcttgtggtgtgaggcagggcaggggtggctgcagtttccttttgcccttatgttctcccagatctgaaacgcagtaacctcatttttgggaagtcagtgctttggggattacttacccttcagagaaggagaaaccccattccccagggtttcggggtgagctgcaacgtgtccagtacctccccatgggctggggagagcttagctgcccctgcagcacccagccctgtgcgtgtcctcccctgcctgcctggtggtgcccgtggtcactggcacgctagcggcttcatgagatccatctgttcagtcagacatttgcctgattgtgtgggatgagtagccagtgctgtcccagtgagtagataatggacatctaaatgctggtctcctccatatgctccaagccttagttacagaccccattaggaaaaggcaaggacggtggagccccatgaaccaaaggtaaggactttccaagctcgctgccctgcaggatcaggagctgcccgctgggccaggccgcagcattctggtgtcctagaagatgtgttcaccctccgctggccacccagagctgtgggtcccagcccactgagtggagcctcttgctccattgccagttgatgtgaggagaaggggagcttagctgcatgtgtgtggtgtgtgcgtgctcatgccctcccctgcacgcagcatccagtgatgacggcaacgaagcatttgcgccgtctcaggtggtgaaacatgaaactacatgaaggccaggcagaggcagctgagggaggcagggatcctctgaaccctccaggacactgttttaaggactccttgattctacagactctttccactaacctgcaccttggcttcagctcccagttcagctgtggattagtgaacaccttccagagaaagccaacgtcaggtggctgctcagttcaggaattccgtgccttaaagtaaacagcgcattcctccgctgcagcccgccttatcctctgcatgggccctgcaggtgactgcaaaggcacgggaatgacaaggattgagtttacctgtagcagactgaagctttatctttttggaccccgtaggtttttaccagctatattgatctcctgtacccaacggaagatagaaatgaccggttaagagattcttatttctttacctgtgagtgccaggagtgtaccaccaaggacaaggtaaggttgttcattgggcaagagcgctgactgcactctgatctcaggacctctctgctgaagagcttgtctgacttggcggatctcctctaggatctttttgaccctttaaaccctccttacaaagacagccaaagggaatctagttagaccaggtctctgttcagacctgctcctagtagctaaagaaaacatttccattacactgtacaaacaggagaaaggtctgccgaactgctctttcttgaaaagaaacaactgctcaaaggaggaggggggaaaagcacatgagtataatctctaggctttccaacctgttcaccagaatatgtggaagtttccctggcattttccaaattgttccgtcaatgccatccttccttattctagtctcttgattcgtagatgtgtaaacacatatatctgcccatagccaacacattttagataaggagtatctagaaaattaatctttttgttttgtttctgtaaaaaggtaatggagtactgaatttcttcagatgcattgcctgatttcctttcattcttttgtaaccttggaatgggccagtgtcgaccgctgtgtgggaatgtgtattatatgagaggtttccctatcagtgtggtttccatgggcggtaacgccttgcccttgtggacgtttccttcaggataaggccaaggtggaaatccggaagctcagcgatcccccaaaggcagaagccatccgagacatggtcagatatgcacgcaacgtcattgaagagttccggagggccaagcactataaatatatcctttacaactgccctgatagcttattatccctcgccaacaaggcaaggtgggaagttggaaagagggagcaggagaaggatggatttaagattctgaaaaccaaaggaggaatgtctcctagtaaatgtgtaaaggcgtactgaccacccacaatgtggtgtccatcctgttggagttgtatgattttatttccccttattttggctagtttggctgggag

SEQ ID NO: 3928 - DNA, 2300 bp, Homo sapien
agactacctttcttatcttttcagcttaatatagctgcatcttctttctcaaagccaaactaagatattctctattaaaatgtccatgagcctagcattgagtgtctggcatccatcaatttcatagactggaaaatgattgttgtttggtacagtaaagaagaggatgtgcatcagttcctaccgtttgcagctttgtttttagccttcccattttaaaaataaattcaaggacattgagttacaaggcaggagggctggagctactgggcagcctgaatatgacaagcatttgtgtggaaagtcattgctccttctgccacactttgggccatcaggatcattctttcccagaagtgccataaacttgctcaaaagtttctataaatgggaagagggagaggaaggatttttgcatcagtcctgaagttgctatccaaaagttctctgtttcacaaataattttctgaactctggaatgcctctcctactccctgcctccctttctgtaatgtcagagtgatggaaaccaccaagtggcatgctagggaaagcctgcagcagtgttggagtctatttcaccctagctcatagttttaaactgtcttcactgttgaggtagagcttgatgaatgtcatggattatgatgtgtggtttatcatatttgcctggatttgctgatcaaaagcaccatcttccctcgcctgctgctggcagcctttccttgccttgcttgttagcagagcattctgcttacccatgtggctcccagagttagcagccccggctcttggatttcttgattcttctcccctgtgatctcagaggtgctgcagaggacattcccctttagagcaagtcatgtttctattcaggccacaaaactgggatgtacatgcagtgactttggtgttccttgtcttgttcaggggaacgggtgggactgttgtgtgctgtcaccctcttcattccatgagcaccttgttcacttagggtctgctgcctttttttttttctttttctttttttttttttttttagtttttgagatcgtgtctcactcctgttgcgcaggctggagtgcagcctccaaagtagctgggattataggcgtgcaccaccacacccggctaatttttatatttttagtagagacggggttttgccatgttggccagactggtctcaaacctctgacctcgtgatgacccccctcggcctcccaaagtgctgggattacacccagcctctgctgccttttcatatttccccatctgctttatggatcaactctcaacagtacactttttcttttctttacctaccctatgagtgcaacccagatgtaagagttaatcctcgtcagagaatcattgccttaaacctctcagaaatatgtaattaggaaatcttattttaattttttaaaaattgcttgtatagtttcaaagaataagatctggcaaatggccagatgtggtggctcacacctgtaatcaaaccagcactttgggaggctgaggcaggcagatcacctgaggtcaggcgttcaagaccagcctggccaacatggtgaaatcccgtctctactaaaaatacaaaaaaaaaaaaaaaaaaaaaaattagccaggcatggtggcacatgcctgtaatcccagctactcaggaggctgaggcaggataattgcttgaacccgggaggtggaggttgcagtgagccgagatcatgccactgcactccagcctgggcaacagagtgagactttgtctcaaaaaaaaaaaaaaaaaaaaaaaaagatctggcggatgaaaataaccagaatgaaaatagctagaaaactcagcaagcaggaagctccctttctcacccttttgttcccttgccgatagaatcagtcactattagaaaaaatgaaagacgctctgtttaaaacaatgatgacagcagtacttaatatgtatttcgaggtgaacttatatagattgagagaggctgcatttggcagactgatgtataggaagacccatttgtttctagcttctccctgcagggaaaatgctttcgtcattatagcctctttacacagactggccattctagtgaaacaggtggtaaacctttgggctgcccagaaacattttatctgttttcacttacctaggaaggggaaagattagcgggtcatccaaaatctgtatgtaagctatcttcattttcttccccaaccttctcctcctgggaaacacaaatgctatctcatctgacaaaaggttttagaggataaagctgaaaagattg

SEQ ID NO: 3929 - DNA, 2300 bp, Homo sapien
tagcacagtgatgttagagcaacacaatatatttcctagtgtcttttcactagaaaagacaccaagcaagaggtctcccatctcccaggaaagagcaaaggccagagttttacattgagatcctgaaggcattttcttatctttaatcctaatcctgtttgggtccaatttcaaagagatgaagagcatgcactttaggcctgacagactagggccctgatcatatcttcctagttgtatgaccctcagtgagacaggtaatttcttcatgcctcactttcctcatctaggaatgggggagtgctttccacactttctggaacacagtcaggcactgcctaatgttttctttggaaacccagcacgtctgtacagctatttcctttaaaatgtgagaaagttgatttcccttcaaccttttctttccatcacttttgcattgcactcggcgttttctctaatttacagttctagagattggcagatgctcgaagaaaatcagagtcactacggatttatttattttattttattttattttattttatttttttgagaggagtctggccgtgtagcccaggctggagtgcagtggcgcgatctcggctcactgcaacctccgcctcccaagttcaagcaattaacctgcctcagccccagagtagctgggactacaggcgcacgccgccacccccgaaacattttttgaattttagtagagacggggtttcaccgtgttgcccgggctggtgtcgaacttctgagctcagccaatcccccagctttggcttcccaaagtgctgggattacaggtgtgagccaccgcgctttttggtttccaattctcttccccaagaggccaggaatttttgcatgagttgccggacactgaagtgatttgggacaatacattgtgtgccaacgacttcaaggtcccttttcaacaaaggactggaatcttaccgagataaatcccaagacatgtttgtagcaatgcaaaggaccacagaaatctagacaaattatttaattttgcagctacagaaacctaggatctcaggggctgggatactcctcagttatccaatcgggcagggcctaaaacccaggttcagtcgcctggctccgagctttttccatcataccagctgcgtctcattaactccacctccgaaagtgctaaggaagttccctcccagtgcctacccaggcagggtggggcgattctgtggcatggaacaaaccgggaaaacgacattttccaactctcagcacacaggctgctttttatcattcctacggggcgggagggggcagggagagaaggctaagacaccgggtccagtacccagagattctagggagagatctctgagattgcctacttggtgaggccaccttactttctcctggtctgttttcccctgtggggtggctgcatgaaacgtcctgcttggagggttccccaatataaggtggactattctgaatgtaggtcggggtgagcaagttcctgccgccgccccgtctctgcggtcctcggaagtctaggtgggctcttccttgccttgcctctttctccccaacggcgggagcagcccagggttggggtggctgcggtcgccttgctctctccacttccacgtctcttactccagggagtttcatccggtcctccgtcctcggcccccaccttttaaaacattttccaaaactaccccattaaaagtgtgcgacttctccgggcctgcagaaggagctcctgcagcccggcattcctcggattccagcgctgtgacgtccccaaggacggcgcgcctccagctcgggagctcgggagctggggctccacgtttcagcgcgcgcccgcggcgcccccggcgcgcgccctcccgggccgcattcctccccgcccccggccgcgcgcccagcgctccctccgcctcccggcccccagggccgcggagcccggctctggggtgggggagccgtggccgccggcgcctgctccgtcccctcccactcgcacggccccttcctccctcctctcccggccgctcgcatttcctgccgctctggctctcccggcccctcaaagttctttccaactttttctcggcggagtgagcgcagcgggcgcagactcgggggcaggttgctgtgcttctccgggctcagccgcctgctctcctggctcaggtcctcggggagccctagacagacatcaagtggccactggcgctccttcccctcccagctgagccatcctccccggcctcctcgggcgggacagccccgtg

SEQ ID NO: 3930 - DNA, 2300 bp, Homo sapien
tctgagagtaagaatggagatggttgttgcagcggattagagaaatcctgaaactgggagaaagggctgtggagcagcattgaggcccagctagacatcctacatttaaagtatttgcacagtgctgggatttttttccagccccattctgcagcaatagtgcaccaagggatgatatggacatttgcacacatacaagtttgggagatagaacaagaggcaagggagttgaggacactggcaaaagagtgatttcagtgatgaacctgcagtctaatctgtagaaaagatgggaagactcaaagacactggtccacaagcagaatatcgaggtagtggatgaacaatccagagagagtagactggctaactgagggaaaggacttaaaaagagaagagcagagagccaaaaatggacccttagagaacatctgtctttggttggacgggatcctccccctacaaaacaaacaaaccaaccgggggaaaaataaagggaggggaagggaagcataaaattaaagtcagagaaatatcacaggagttactagaatggtatccatcctatttcccttgttcaagaaatgaatgtatttctttattgttcattgtagaaaaacgaagcacaaggcttgactatacagtggccactcaatagatatctgctgaagaacgaatgaatgaatagtaaatgcaaatttcttattcaaaccttaaaaatatcctctattatctgtctttctagctgtttatttttccttaaacagcctatacatagttgaataattactctgggaagcaatggaattgtaatttgtgttgaagccagacacaatttggttcaaattctaaaactaccagacactagactgatcatggcaatgtctgacaaaagttttcctcccctacctgctctctcccctccctttggggattcgaaggtagaagatagtaagaacaaggcctttccccaaatagcagttttatctcccaagatgatctggattttaaattactatgtgcaaagttactagggatgcaaaaatgaattaaaacagattttactgtaaaggaatttttgagtctgatgggggagtcagacgtagacataaatacaagacaagacacggcgaaaatcctaaacatgaagtttgcaagttccaggaaaggtctaggaaataattatctctaaggagtgggtgggattagggaggttttataaaaaaagtgacacttgaattgggtactgcaggaacagtctaatgaaaggtaaagtcagggggctggaaagtttggtacctattgaggcagacaacagcattagagatctattactttaacaattaattgttttgcttctgcctttagaagcttatttatagtttaatagggaaataaaacgagtatataacatacatagaaaactagtgggcttcacgaaaagcattacaccccgttttgaggattcttctgaattttaaattctgatgcagtgtcctccccccacgccttaatcccggaaaataagtgttcagaatcacgtcttagaaatatgaaccataaaggacagcatttaagagcgacatcctgcattgcgtagattcaatttcaaattactgtacttagcttctatgagcctgttaactttttaataaaatgaggataatactttcctcaaagaattgttaagaacgacaccggataaagaatgcatgacaaacacagcacctagtatctatgtcctaaatttacgtttaattaagtagattggtacgtgcagtttaaaagaggtttcaccaggcagcacagttcccctggctgtaggcgatagaccacgccttcctaatcagcgggcgcattccctgacttttgcggaaatagcggtccaaaaccgcgtctagcattagcaaaagcacgtggtctccgtctccccgcaacaacaaaaaagaacagtaaactccggcgcaggcacctccagtagagggcttgtttttaaaatccatccgaaagggccaatcagacgcggcagtctgagtgcgcaggcgcggattggtccgcagctacttagagtgaccaataggcgtggaggtaagtttggttgagaccagaagcgggcgaattgggcaccggtggcggctgcgggcagtttgaattagactctgggctccagcccgccgaagccgcgccagaactgtactctccgagaggtcgttttcccgtccccgagagcaaggtgagcgtcctgactgggtccggatcctggccctggcggcgggcggtaggcggcgggcggcgtgggg

SEQ ID NO: 3931 - DNA, 2300 bp, Homo sapien
aatcagagtgacacaaatggaaaaacatcccatgctcatgaatatgaagaatcagtatcattgaaatggccatactgcccaaagcaatttgcatattcaatgctattcctatcaaactaccaaagacattgttcacagaactagaaaaaactattttaaaattgatatggaaccaaaaataagcccaaatagccaagacaagcctaagcaaaaagaacaaagctgacagcaacatgttaccctacttcaaactatactacagggctacagtaaccaaaacagcatggtactagtacaaaatcagacacatagaccaatggaacataatagagagcccagaaataagccgcacacctacaaccatctgatctttgacaaagctgacaaaaacaaacaatggggaaaggattccctattcaataaatgatgagatagctggctagccatatgcagaagaatgaaactggaccccctccttacaccatatacaaaaattaattcaagatggattaaagacttaaatgtaaaaccccaaactataaaaaccacagaagacaacctaggcaataccatcccggacacaggaatgggcaaatatttcatgacaaagacactaagagcaatcacaacaaaagcaaaaattgacaaatgagatctaattaaactgaagagcttctgcacagcaaaagaaactcaacagagtaaaaagacaacctaaagaatgggagaaaatatttacaaactatgcatctgataaaggtctaatatccagcatctataaggaacttaaatttacaagagaaaaacaacaaccccattaaaaagtaggcaaaggacatgaacacttttctaaaaaaaaaaaaaaaatacatgtggctaacaagcatatgaaaaaaagctcaatatcactatcattagagaaatgcaaattaaaaccacaatgaaataccatctcacaccagtcagaatggctatgattaaaaagttaaaaaataacagatgctggccaagttgagaagggaacacttatacacttttggtgggagtgcaaattagttcaaccattgtggaaagcagtatggcaattcctcaaagagctaaaaacagaactaccattcaacccagcaatctcattcctgggtatatacccagaggaatataaatcattcagccataaagacacatgcatggccaggcacagtggctcatgcctgtaatcccaacactttgggaggccaaggcaggtggataacttgagctcaggagttcgagaccagcctgggcaacatggcaaaatcccttatctaccaaaaaaaaaaaaaaaaaaggcacatgcacacacaaatgttcattgcagcactgttcacaatagcaaagacatgcaatcaatctaaatgcccatcagtgacagattggataaacaaaatgtagtacacatataccatggaatactatgcagccataaaaaagaatgagatcatggttttttgcaggaacatggatggaattagaggccattatccttagcaaactaatgcaagaacagaaaaccaaatgaacacaaagaagggaacaacagacactgaggcctccttgagggtggagagttggaggaggaagagcagaagaaaaaataactattgagtattaggcttagtacctgggcaacaaaataatctgtacaacaatcccccatgacatgagtctacctgtaaaacaaacctgcatgtgtacccctgaaccaaaaataaaagctaagaaaaaaataatattttgccataaggttttcaggtgaaataggtcctataaacaaagaaaatgcatgacaagatattctgcatatgctcctctttccctcttcacatggttaattaccactcacactttgtccctcttcctctgggaaacttttctgagatccctgacccggccatagtttcccatcatagttactcacagcacaggtagcccatctccttccaagcagttatcattttttaataatgaatgcatgcatgaatgaagagtgaatgccgtattagtactagaatcactgcaaaaggtggtaaagtcatgctccagacagacactgaccaggaaagacatatacagtacaaccttagagattcaaagcggattcttcggggggagctgcggcggtggcgatgcaggaggccggccggggcgcggagggaccgacggacgcacgggcaggcggccaggcgccatggagtgcggccctggggcccaggggcgcgggccggggtgggcttcccacggcgtgacatggagacctgtgg

SEQ ID NO: 3932 - DNA, 2300 bp, Homo sapien
ccctcatctttgctatttccctactttgcacatatttatattattgcatttaacacacaacgttgcattcttaacacagtgcctggggcatagtagatgtttgataaatagagatggattgtgcaatacaccactacaaaaccttttccctttttgtaacacaggagccctcaatcaacattagcctcatccttatctctcaaccaaatactaatctaccatttgtcattcccgacatgactgttgtctcagcagcttccacacactttctctgtccttcaagtccctctgtcagccttctcatgtacaaatataaaaggtcaacaaatgctcatggaatagtacttttccatcagttggcccaattctaaggtgctaatttaaagcgatcttaacttccggactctagcaccatttatagcgctgcattacttgatgtcttatattatggtaatatttggatttacaatacagaaactcccatgaagttataacaggagaaggataatttgatttagtttctttttcaggttgccagtgactgagtacttcagattatagtgtgagatagtactgatgaggcaaaggtcaggggttcacatctctgtctggtccacatcatattattatttttcaattctctttccattcctctcaatctcagccaaatttcctacagattagtgcaattgagtaaagggatatccagaaaagagggcataggaagggcctagtaaaaacttattactggaaaaaaacagctgacagtttatgtgctattgctgtgtgtgtgtgtgtgtgtgtgtgcgcgcacatgagtgtgtgcccatgggagggccattttttgcatgtgcacaaaaataagtgtctgtttctcatatgatctgaaaagtattcattatttcagtcagatggaaggattatgttacttgaacactggtatttaatgtacattatcacatttattaccatatcaaaaccagatgtttaaaattggggctagaaattccatcatacagattgtgttacttcaggactaccccactacctaatgttcagctgtattttgttatggctttaatagagcaataatgtgtttccacaagtcttagcctgatattagatgacatgtgggctaaatttggtgggttcagcagactggtagggggttatacaaaccagagcaacaataaggaaatatgtgaaaaattattgctaatagtcaaggcctctctctctctctgttgctctcacttttgctgtctctccttttctcttctcttctcttttattcatttttcactccttaagatttgttgtcatttttactgtctccaaatgtcccttaaacttcttccagaggcagcatctacctctaattactaactttcttatctcagcaaaaactatttaaaactttcctcttatttgacttttttacatggcttctacaatcataaaacaagcatgctcagaaatctgataacatttctgatttaagaaattattatcgatgcaatttagataaggtaagataaaaaataaaagcctatatggaacgcagccaacgattcatctgtttgcattaataggttccagcaatggttctacaggcacggaaagccaagccggtttgccactgcacttagcaagcacatgagcttaaaaataaacttttgacaatgcagatctctttgtccttttgggaatggaaaacattatgtacttcaaagcatactaagcctgatttgaaaatatagttgggatattgttactgtggcagttgggagggtctttagccttcacacagtgcgtggatgcttcgtgtgtaaatgcttgagccacaaacttgtgagaataagtgacgctggcaactttgatatgctcattcataaggaagaaacttctgtcttttaaattctctggaacaactgggatatagttcctcattttaatcagggaatttcttcctgaaccagactgtaaaaacagaggatttgagtagcacatttcacttgcatacagcagcgtttgttcgttttgagtgtttttgtacaggaaactgatctacagggtaacattcacacacaaaaaggaaacagtatgggacgatggcttgttagtacaagtgactctgttttggaaattacggacaagaaaccttggaggaagaacggcattaaagatcaaaagcatgatgactcctgatgaaaacatcaccaaatgatgaacccacgagcaaaaagggatttctactgtgagtatctttgcaataatcaagtaccttatttgttttcaaa

SEQ ID NO: 3933 - DNA, 2300 bp, Homo sapien
acacgcaaatgtgtgtgtgtgtgtgtgtgtgtgtgtgtgtacatatgttccatttctctagagaaccttactgataaaataccttagtcatgtaaagttggtgtgtgtgtggtgtgtgcactgagggaaggtaactgcccaggaagacttagaatgaaaaagatttagccagatcaggaagcacattataggtgacctagagactttgtaaggattgtgagaggatcagattcacattttagaaaggacatctgattgtattacttttgagcacataagttgagaaaaatgtgtttgaattccagcaggaaggatattaggaagatttttttttaataggggaaagaggtgctgaatgtattctggaatctagaaaaaattgcatttttatcattgacggtaacagttttgcaaaagatttacaagctttttttcccctacaattacgtctatatttttcactaagaagttcttgtaactgggaaaatactccaatctggccgagcagcagttatggaagaaaaactctagcaaacagcagttgggatgggagggtggaggtcatcaggggattcccgctgagaaagtgggaaggaagagagtttagaaacggattgaagttccactacatcacgtgtgttgttagagaattcgcctattacgacgacagcaacgtctgatctcctggctttcttcccctccttggtgggttccgttccgtccccctgtcgctgcgagtttggctgtccctacgccggggtcttggagtttgggcggggtctggtacctgccaaatacggatcctgatggggaggaggtcggggagcgctaagttcaggctggagtctgagttctcccaccctgctgctcccacccaccgcgcttagaaacctatgtttccagcaaaggggtcttgctctgagagaacctaaccgggttttcttccattccctttgcatctctagatgtcttcgccctggctccaggtgcgttccccatccttttcggtcccggacgttctgcagattatagcgcccagctcatgtccagcaccgccggaggtgaagtggggcgagctggtgactccttaacccttcccgaaggtgtagactggaagaagccagggtcttcattacctcccctactccagggctctcaaggcgccaacggggacacttccctgtacaggtctggggggccacgagggcgaggaggacgccctagtgcaggggtccaaggactcgcgtcccagagcttggtcccacacccggtcccacaccccgaacgctggtcgggaaggagataggatgcagcgcagtgtgatgtggatgccagacagcgagagtgaggattttgcggggtggggatgggggttagtggaaggggctgagaggggaggaggcagcaggtgagccaaggggttgtgcccccaggaagagggaagagaggatctttagaagggagcatcttgcaggggcgacgcaggcaagggtagggctaggaggaggtgcggggaagcaagccctggcggtgagacaggagggggaggaggcgaagaggagggagttccgaaaggagggaaacgagccggcaaggggcgacaggagcgagccgggaagggagagcagcggagggctgcagagctgcgggcgcccggaccgtgccacacaccccccgcggggcacggagggcattgcggggggagacacacaaagacatgcgaagaggggctgaacgaggctcgcgcacaaagacgccggggcgcacggcagctggggctgcacccaccgcccccgcgccgcgccgtgccggggccgggccagcgagcagcccggggctgagcgcgtggcggcggcggcggcggcggcggcggcgggcaggcgcgggacccgggtcgcccgcgctctccgggtgacccgggcccggcagcaggcgcgcgcgggggcggcggcgcccaagcccaacttggcctccgcctcgccctctgcccagcccgccggtgtcccctccttcccgcgatttcgtttcttctcacgctcccccccccgccccctcccgcgtccagccccgctctccccaccttgtaaaacaaagccggggaaaatgcctgcccgtgcagctcggagcgcgcagcccgtctctgaataagaagtgagtacaatggcgtgtttgtaaaaaaaagcttcaagtccgtctttttcaaaaaacattttgaatgctgcatgcctcatgcttcccagcgcctcgcgggagagacccggctatagagcaggaggtgagaccccccctccggtaccccc

SEQ ID NO: 3934 - DNA, 2300 bp, Homo sapien
aatcatttgatatatgttgcaaatatcttttctcattctgctatttgtttttgttaatggtgttccaatttattcttaaaaattaagtcacaccctaactttaagttttatgagcaagaaatgcctcagatatctctatattgttctggacatatcaagaagtcatgaccatttgtcttataaaatactgagaacttttccttctcttgaagagatgttctcctaatttttaagtacagtataataaaatgaacacggtttcatttatttcaggaaaaataagaagcctttcacaaatatatatatttttaaatttataaggccttattctaactccaacttgcctcttggattcaaaggctgttagcaactattctttcatattcttccaaggtttggacctaaggaaaattaaatggcccttttaccacttaaatcttcgctgcaaattttaaagcaaagtttcagatcctgatagaaccagatattatgtgttagggcaaaggcagttaacattgtttaaagcaagcttgtccaacctgcagccccatgggtcgcatgcagcccaggaaagctttgaatgtggcccaacacaaattcataaactttctttctttctttctttctttttttcagctcatcagttatcgttagtgttagtgtattttatgtgtggccaaagacaattcatcttccaatgtggcccaggaaagccaaaagattggacaccctggtttagattcctagttgctgctgctttaatctgaactgttactcatcttccctgtctaaagtgaagataatgaggtacaatgcagtggtaaggatggtgaacagtggccttgaattcaagctgcttgccttgaaattcctgccatcccacttgctacctatgtaattttgagcaagtttttttgatcattttcattcccaaatttccttttttaaaaataattataacattagttgtgacgaagaaagatgacaaaatatctaaaccaccgggtatatgataaacacaaattagctattattaagcttatcatcaactgggagaaataatacttatcttacatccatatgtactattaacatctttcaagtcgaatctagatagagcatatcacaacattagtatgcttgccagaggctattttttatttttttggtaaaaattatgacaatgacaataaaaacttaacatcagatacattatcagtttgaattattatgatacaactatgacaaaacaattcatgttaagaatttagtaccacaaactaatgacctctgaaacataacgcactatctttgttagtctttgttagcagggcatcaagtattatagtattccgatttaaaaaatattttaatagccactaaggttttgggtttgaatagataccgtttaaagcaaaaacaaataaataaacaagcgcataaaattgtgtgttttctgcgtgtgtctaacattagttgagtgcttactatattccagaaataggttgctgggcattacacagtctaggggtttttgtcctttggtttccttcctgcttaacaaacaaaagcaaaaaacaaaacaaaaaaactgcttgggagattggggattaaattgaagagggtaaagtaagcagttttctggggtaaacgctgtaaggttttaaaatctccaaatgttccctgcatttgcactgtctacatttaggcatcaacttttactacctctaggattagtttttcctttcccaatccatgttgacaaagtgggtcataaagatccgtagatcgtttgcccagatctgccctcaatctgcgaatcagcttcctcgttttagaaaatctgaaatgtaaaagggaaaggggctgggatcgcgtggggaggaggaacgaaatggaatcccgcgtgggcaggcggctggccaggagcacattcccctagcctccctacgcgccagccccgcggcgttgggaagctcctccctgacctttccttcctcctcctcctcctcattctaggcggcagtggcgggcgaagcgtgagcgctgcggtattttgtcccgaacggtgacccctcctcccaggcaggctgcggcggcgtcggtggcagcggagcacggagaagaggcccgggcggcccggcggcctggaggccgcgaaaggtggaggccgggccgcccttgtgcaccgcaggattgacccgggaaggggcagaagctagcgagccccgcccggccgccgggaaggtgggggaagccccgtgcaccccccgccctccggccgccgccgccccgctggc

SEQ ID NO: 3935 - DNA, 2300 bp, Homo sapien
ataaaaacaatttaacatagtaattgtatatatttatcaaggctggggaatatttttaaaataaggacaaattacaactgaaacctaagatgaattattagtattataagttctgaatcttccattttttaaaaattttatttcatgttacttaactttactactatgaagtagcatcatttcatctggataacatagcccttcccaaggctagtcttttttttttttctattttatttgttcaacaaatatttattacataactattttatacaagcactatgctaggcactgtgaggtatacaaacatagatcagaaatagatcatgctcgcagggaatttatagtgtaattggggagattaagatagatatgtatagaaataattgcgataaaaagttaaaagcaactaatgccataaaagaatggtttccattctatcgtttgccttctagacaatttatttgtactagcctgatagagccctaatctctcctttagtgacccaattcatatatatgtatatatatgaatggtttttaagtagataacagaatatttttgttcacatgcagtttttatttacactttttaatgattaaggataatagaaataaagagtattaggaggaaaataatttttaaagccttatgactatatacatgaagaacctagaattttttcctttcatgtcagatgataatacaggtttccagtgttagagaatttacatcatttgtttctttgtaggggagtgagtattaatgttctcaggcatgaagcagaattttacgggatcactccattaggtatgtgctcttttaatatttggtgtttatgatttgactcatgtatgaaagttgccctaaatgaaatgtgtttatatcaggtcctaatttttgatggacttgttcagtgcttagtttttgtggattttcatagtaaaaagatgttgtcaactctgacttaattaaaattttccttttctttccttatcctcttgaactagagaaaataaaaatggagtactgtttttctgtttgcatgtactcttgacaagtttgctttgaaatgtttttagtaagaaggcttctcttatgtgaagaattggagcgttcctcttgtggcagtgtcctttttcatggttacttgcccccaccaggtattttcactttattaaatcttttaaaaaattccttgtatcattaagcaagtacaagcatatgaataggaaaaactgctccttgattattgagttttttgtctataaatctattagaaatggtaagaacttttgatttttatagaaattaagtcacattatatattggagcaggggtttggcaaactttttctgtaaagagccagatagattttgtgagccagaggatctctgtgacagccacttaactccgctgtgtatactacatgaagactaggtttaactgtaaccactacaactttatttacataaatagcattgattgggctggattttccatggcccatagtttgctgacccatatgttagagcactggttgtcaaactgcttttttgcaaaatttaaggaattctgcagagataagtcagtgtcacctcagccccactttagttagaagagcctgattttacctgtgttataatggacttctgagcaagatttcattttaaaaaatgttcccctgtcaaataaaaaatgtttgaaagtatggggaatttcagttctaaagcagttaaattattacatagtacctaacacataatacctgtaccataattgtaaagagtggctggcagactgaattaattacccattaattcagtaacctaaagcttatttattgtaaacagtatgacaataccagaaatctgttgacagaattttgtctttgtctttgtttttttcattttcattttattttttaattgtaattaaattatttgtaataatttgctatattggaagatgtatttcggctttaatgaaattcacatttttgtttctttgtcacaatgtgatatttttaatttttgaaaggtgaacttaggaatgtatttgttttcttcttctctttataggtattcctagtcgtaaaataaacaacacagtcagatctgctgattctaggaatggtctaaattctacagaaggtgaagcccggggaaatggtacacagcctgttctctctggaacgggagaagaaactgttaggctaggtaagcaaagattacagaaatagaaaaagaaaaatacgtatgtttttagtgctgggtgatattgagtaattacttttaaag

SEQ ID NO: 3936 - DNA, 2300 bp, Homo sapien
gtcagagagaaactttgcttctgagggtattttctgagacccaagttttcatatgcatacaaatgttgatttgttttatttgaaacataaacaggactctgaggagggagttgttgaacattttaaatcaatttacagatattatttaaaaataaatgtaattcactaaattatgatcatcttgataaatacaggaataaaatctgataatttgtcacctatttatgatttaaaaaaaccctagcaactaaaaaaagggaaattttaaaatctgataatgcccatgaaaataattctttcaaactttatattggcgaaatattaaaaacttccaggccgggtgcggtggctcacacctgtaatcccagcactttgggaggctgaggtgggcggatcacctgaggtcgggagttcaagatcagcctgaccaacatggagaaaccccatctctactaaaaatacaaaattagccaggcctggtggcacacgcctgtaatcccagctactcaggaggctgaggcaggagaatcgcttgaacccaggaggcagaggttgcagtgagccgagatcacgccattgcactccagcctgggcaacaagagcaaaactccgtctaatgaaaaaaaataataatttcctttgtgtgatattgtgaaatacatatttggtctttgtctctgtttcctggtatattccttcaaaaattcttaaagtcttccaaatgataagtgtctttttgtatgccaatgagttgactgatggcaggtcaccagaaagaccaagatgggagtagaaggttggcactttcagccccacccagcaacctttgagaaggggagaggagccgaaggctaagttgatcaatggccaatgatttaatcaatcatgcctatataatggagccattataaaataataataataaactgagttcagagcgcttccagatagctgaaaacctggaggttctgaagggtggcgtgcccagggagggcatggaagctctatgctccttcccacacaccttaccctgggaatctattgttcatctgtattctttgtaattaactcgtaaatgcgagctttcctttgaattctgtgagccactctagcaaattagttgaacctaaggaggaggctgtgggaaccctgatttacagtcagtcagttagaagcacaggcaaaataacctgaggcttgtgatcagcctctgaagtggggctcagctttgtgagaccgagtcttctacccgtgtgatatgacagatagtgtcagaattaaattgagttagaggacacttagctggtgtctgctgcagaatcgactgcttgcttggtgtttggtgaacccctccaccccatttggtcacagaacccttttttttgccaaggagtgaaggacattctgccccaaaataggccaaattggtatattgattattttgaggtgaaaacattagagaaattgtcatttcagaaggggatagctgacctctctcttcctacatgcagcaagccaaaagattttctcggagttttatcctccctgtaccaggacaggagagtgggaactgggggctgcagtggacctgagtgaatatgcttaccttccactagttttacattgtcccactatatatatatataatgtatatatataatacatatttaatatatattaaatatatattacatatatttagtatatacgtaatatatattaaatatatataatatatatgtatatcttctagtgactcccttagaaatttactgcctctagtcagattttctttatcctgtcatttgttctacagtttatcattctttgtctgaattgtataaaagcatcttgctgtggccacttctttggacctcactctcttgtgaagattcccatgtacatgtaaaactaataaaatgtatatgcttctctcttgtcagtctgtgtggtgtcagtttggtttctagatccagccaagagcccacataactaaaagggcatttggaggtaaactttcactttccttagagttgattgttgcatgagagtacaggaaaaatactttggtttgtttattcctgtattcacaaaccttgagctcaagaatgagactaggatagtctttatcactacatgtgggcatgtaggaattatctttttccctcctttttgtccggcctactaggaagctcatctaagcttcatattctattcctgtatgcttctcaaattcatgtggattgtatttttttttgtctatttttttgaccttgcgtttgcctatactgatttttctt

SEQ ID NO: 3937 - DNA, 2300 bp, Homo sapien
atctactttccttttaaaaaatctgtacttatttcccaggcacttataggggtgatggaactcttagtgtctaattcatttatcagatgcaccctcaggattgatagccctgaattgcaaaggttgagggatatgtgaatccattgtttgcctttgcaaataataggcagagtttcttaatgtggactagagttgctaatcttagattatccatttgagtcatgatttcctactatacaaagcaggagttgttatggggtagaagaatttttatcccaggaatgacaaagataagttgaagcactacagtaaaaaattagagttagacatggacacgtagaagggaacaacagactctacagactctaggacctacttgaggctgaagggtgggaggaggtggaagattgaaaaactacctatcaggtactgtgcttattacctggatgatgacataatctgtacatctaacccccatgacacacaatttacctatataacaaacctccaaatgtacccctgaacctaaaataaaagtttagaaaaaatgagaattagttcttggattcacaagatataaagagaagccagccattgaataccttgtttgaaagtaggttgacttcatgttttgtagcaggtctgaataatccatttgtctaattcactgtgctctataatacctattttcaaagatagtttcccaagttctgagaagtccttacatattagctgactttatactaaaatttgggtttaaaaaaatttttttttagagacatggtctcactctgtcatccaggttaaagtgcagtggtggtgtgataatagtttactgcagcctcgaaatcctgggctcaacaaccctcccacctcagcatcctaagtagctgggactacgagtgtgtgccaccatgcctggcttaaatttttttatttttatttttatttttattttttttttggagacgtgggatttcactatgttgcacagcatggtcttgaactcctggcttcaagcaatcctcccaccttggcctcccaaatccctaggaggcacaagcatgagccattgtgctttgccctaaaatttgttttaaattaaagtttttctggtaagaatgtaatagcgtattttgacaaagggtgagaaaggcttcttctggaagcaactaatgctaattgataaaattgatatataaatgggttgtggtttccagctctcttctgggagagaaataaaagggaatctaataaagaacaatgttggtttttctctggctgctttactaacaagaaacaccatgaaacatttctctcatttctaaacatttctataaaaaagataacttatagagaacaaaatcacaatcgaccagttatttcccaaacaaattttccatttttacaatacaaagggaaagctacaagtattagctgatttagaatatttctcatctaggatgagatgtcccagatggcagagtagagagagttttggatataattgaaactctatagaattggtggcaaatgtgcacatatacacacacacacacgttcctatccaattaagcagccaaaaagtcagcaatcccattgcttctttagtttaattaaagtcactgattttccaaacccaacatttagagatcacatcagatgctactcataatgtaaggaagcatgtattatggagaggttatcctgggtgaaaggtacagcaacaactgaatagtcaaccgaaacttctatcaatgggccaagctttgggagcatcaatatataaaagtttagaattccattttgtatcctcttctcccccaaaaagaaagagcactggaaattattccttgtgtggtgtttaatagtggtagatcattttgattaaggaattaaatggattgaggtgcatgagagcaagaaagaggaggggcaagaggggggattataggataaggtgtactgctactttaaaattatgtatgcatgatcccatccaggtccctcccactgcttgaggtaccagcggaaagcttgggcagctcagttccaagagggccaccaagcagaccacgctctgagcttcaggtaaccaagtgtttgctctgcagaatactttacctgggcacccaagtcttccttccagcattcctgctgctacagcctatttgctgagtaaccaggggttacagcagcgttgccaggcaacgagggacagcggtcctgttgaagagccatttgtcacactgaggggactggttgaaatgcaataaagaaatggtaactcagcttattta

SEQ ID NO: 3938 - DNA, 2300 bp, Homo sapien
tccatatttctttgagtgtattttagaaaaatcatgtttcttttgcaaaatgcctgttttatttattttttaattgtaaaatgattacgtgtcttattttagattgaatagacaattttttttttctctcagtgtctgcagaatgcttggattttcttctacatctcaaagctcttttaattcactgctcacaaccaaatttacatcttaattgcagagttcacatttaacaatatagacagcataatgctactggtaattaagcttttactacctgcttttatacagtattctgaggcacagtttttgctatgtgagttctgatctagaaactttgtatgcatttagaacacaaataaaaggaattaggcctatatcttagatatagctaaatacaaggcagtgaaattgctttcttctgtggggggaccaaatcatgtctgtcatttttatattctgaattttaatgtggctgctctattttagtgttttggttttttaaagacctagaaaatttgagagggttaagggagttgagtcctaatttagtgaatttaacatacgatgaatatctgaactaatttattttgatctcaaagattatactatttctatcatgtaggacttaagatgtaaaaggttgataagcagtagagctgaattatatcaaaattgtgggtttttcactctccataaggtagcagttatctctttgccataaatagctggtatctattccaatgtacatttgctagtataaaaaaatcctgtagattaaaataggacctaagcaaactctttgttatatggaaattaaagacacggtgtacacaattgaaggaggaaaaaacacacttgtcctcttatatcctccttttatttttatttttttgaacacttttgattgagaattcttagttttgtaaattattatctgtttgaaactagttcttatagtgaccagactgtgtgatggtttataaaatgtttctgggttgatttttttaaagcatatagggtgccttatgtatagaaacaaatgtgtacactgtgttttatttgaaagcaggatgttttgggtaaaatcatatataaaattatatgcctcctagtttggaagcttgtattgaaatatatacatataattaagaatacttttagtgcactgtttagtaatgctctccctacaaaaaaaaaaaaaaatgctgtctttattttgtcaaaatgcatcgagagagatttaattcgctatttacccccacagccctcagactccccacccctaaaactgaagaagccaatttgtcctgcggctgtttaccgttgttttgaaaagctatgcgttgtatctatatgtaaagagacagtcgcaggtatagaaaggtttacacatataatttacttaggcattctttcaaattgtattgtcactatctcctcttctgtagttgtgtaaaactgcattccacctcagagatgacgatcccagttcacatgctcaaacaatttagaagaatgcctttattattattatttttaatgcccagcatacatcaggaaaacaggaaaagacatgattaggaatacatgagaaagtacagcaccaaataagccgcggcccccggtgtaataaaaacacagacaacggcaggacaaacttaattctctaccttccgcagaatcctttcccaaattaactgagagtctgcgtgagttctccttttcaaggcaaaagagatcttaggttagaaatcaaaggcaaatccctccagtgcttagagagttaagttagttatgtttcttttgtagcttcccagaagaaaaaaaaaagaaagagagagaagggaggaaaaaaaatcaaacccgagagtgtgtattgggagcgtttcaatcgctcccttctccgctccctttttctctgcccactctcagtttccagcccccttcggctctctgcaccctgcctacctgcctggctcctctcgctccgtgcagcctcccgtcgcctccctcctgattgggcagaggccccccaatcggctgcgcggctgggccggtgggactgcatatgtaaagccctacttcatattaataagctccaatcggggctttaagtccttgattaggagagtgtgagagctttggtcccaactggctgtgcctataggcttgtcactaggagaacatttgtgttaattgcactgtgctctgtcaaggaaactttgatttatagctggggtgcacaaataatggttgccggtcgcacatggattcggtagaactttgccttcctgaatctt

SEQ ID NO: 3939 - DNA, 2300 bp, Homo sapien
ttgaaagatggaaacaagttagaacagaaagtctagtttgtaaattaaactgatccaaaaatagcaatgtgatatgtttttctcagactcttgatcaactttctaatatgactatcagacctgaaccacatccagagaaaaattgaagggtttttaagcacccacaaaatggtaacacatttctcatagacaattatgagatccccaagagaacctctcccaaccgtctttgcgggtgaaaggatgccattcgacggtggaacaattgtattagacttcgagggacttccaaattgttctccaaaccagaagctagtttgctaatattcatgtcaaaccatggcgtaagtctgccatggacttgattgttaattgtcagttactgatggtagctactcccagaatgcattaaagctcaagaaattcagaattggttccttaatcaagaatgtggaattgccaagctatcacatacgagaggaagctacagatgagttacagagccctggcctcacagataggattcctttactagcccacaggtgcccattatgcattctgtctctaccatattgaggtaaaggcaataacatcatttgatgatgggtttattctctccaaatttcaagattgaaagctgacacctgaatgtaattcccagggcagccgaacactgtccagtcctggcaagatgcacaaaaacatgtgagaccccaaagaagtctattaggggatttgtttcctcaagctcagtatttcttacattcgagttttacccgatacttaatttaactccacaagtaatataatacactggggcaggactagagtgaggtgaatggtattgcagcctgcacgttatgcctgaccttgcagctgggtattaatttgaagtagtggaattaaaattttctattcttttgcatcgtcatgcctcacgttgataagcacaaagaaatgtaaataaaaaagacctatttcaaaacctttcgtacaacctttttgttttatgacaaaagacagttaattaacatactagcagtaagcagccttcccaaactcaagctaattatgtattctgttgaccgtgactctagtcataaggtaattggcttgcagcaacatgacatttcaaatcatctcttgaaattacatcaaaaagccagcctgttttgttttgataggggaacaatcaatttgataagtggtaacacagctcattgtttcacattaattagactaattgctgcatgttagcctctgaaatagacagaacttggagaagacaaaggctgcggcctttagcatgcagggcatgtgatggttccacttgcttgcacatactgtaggcagaaaacagagctattaggaggcagccttgcaggaggctggatgttaacagtagtctgaagtgttatgctttatatactggctttcaattatagcatccaggttccaagtcccatagaggaaagaaaggatggctctgaagaaatgctgtttcccagctaaccacgtttgggttctgagggagttataacagccttctagtcatcttctctccttcagaatccatacactcttatgtccctagcagggaggctgtacttatttccttttgtagtattctgggcttaaatgccttgacaaacagactgaaacaaaaacaaataaacaaagccaaaacaaaaccgaacacctaaaggttaaaaaaaatccttttttttttttttccaattacaaaacagtgttctaacagacagagattcagcaaattgtcactgcggaagcctaacacttgagcacggcaaatgcctttcagtttgacagactgtagactgtacctttgtttattctcaagaccaccaatttgaccaaattggacagtgtgatatttatgacaacagcacatgtcaatctcaattggcaacgaagggaatttcacttgtgacccgcctggacttgtgatgctcacataggttcatggtatcgtgttactgggtgtctgatgcaatggaacagagctcttttccaagtaagaggcatccagcactttaaaaacccagatgcactgtctctgtcactctgacactgtctagttatccacacacagcatcggaatattgctagctaactcaacaaatgtgcaaatcaggggactgttgtgtgtgtaccgattcatgtctatactgtttttattggtgaagtaggaaattagtctaaatatttgattctgcagttgcatgtcaccaaattcagtgaggttagatgttaaatcatcttgttggctttgggctgaa

SEQ ID NO: 3940 - DNA, 2300 bp, Homo sapien
aaacagtggaatatttcatgttcttcattgcttgtctgttcctaacatctctatagctcattacaacagttggttctgttggagtgaagttttgcagccatccccagtttctaaagaacaatactaaaatggcccctgacaacacagtaatgttaaaactccagcctctgcattgggagacagaatgcagaggttgataccagactacccgatcttacattattttgtcctcagtttatttctgaggaaaaacagaggaaccttacatacaaaggtttctataagaagcagagggaaatgcattttaaaaaatcctgattcattttaaagcttctgttaaaatatagtacactgtaggtcaggacagcagagacaggaactacgtataagtcccgagaataccttacactgttgtcagaatccagccagtaacagtgtgtggtttcccagggactgcgctaacatacctgagatgaaacctggtggggagatactttccacattcctttctgacctgtggtgagtctgctggggtgaattgtgtgaagttgtcaaaggttgctctgctctccagcacttggcaccagctctgctgaaatgtgatgccattggttttcagtaaaggttcctttctgcagggctgcaaatacagatcagctgctactgtgtatacacaaccagggagcaaatcaaccagcacatttaaagcagcctttttaaccctgagactttccaagatctcctcttcacacaggaagtttccttctctgttgtcagatttagcactgtgctcttgtcatcagatccgagccaggctccctgctgcacagtagagaggcttccttaagacatttgtccttgaaactgcaccaaactcttggaagaacccagaacgtgtaagtatgtatgatttaggcagcaatagtacagggcaaagctgcaatcaaccattatacaatatccgattagcagtgcaggagggatttttccgacgttatgttacattcattttcaatttgttctgaggaaacaaatcaattctagcttctgatacagtgactttgcagtagatggggttgtaatatgttagctttaactatttgctgttctcatttagcatttagatgtgacttgtgggacaattactgtgggcattaaactataaaacttctaaatttttattaggaattgtaattgttggtcatgtccatcttgagaaacaagttagctttggggaatgtttttaaagaattaaccacataaattcatggacaaaagaatgaatttgtactgttcttgctctcaaaacatattagtttgcagttttaatttactcgtaaagagcattccactgaggttttgtcttaattgaatcctacccagtgctgtctgtttggtgttttactgtcttgtatatatctgtttaagttacttcgctaggattgcagtctggttaaacctgtatttagccactacctagattctaagaacattcaggtcagtaaatgctcacagaattttggaaagtggtggatttgttttcaagggtggtcgtattacccttgaaagctttttaggtgcacaatgtgaatggctgtcagatggagaccacagactgaacactctaaggctctaagtcaaatctcggcttgtccactttcataactccaattaactccaaccaataaaagcccatgccccctttctatcaatttttaatatgcaacaatacttatgtttatgagattaatttctctcagattagtctgattgatagctggattgtggtttcttaagagcttgctccctgaaacccacagcagagctgcattccatttaactagtgaatgtaaaaacgggtaaccatggattcagccaccactaactgccagtgcaatgacttgttgtaaacaatacaaatgagccaggagagcagaggcaaccagacatgaaatgattttaatagaaattacggtaaaaggtcatgtgatttggtatcagcttctgttcagttttaaagggaaagtctttattttctcccccttcttccccccttacctatttccaaccaacccaagtaggtatctccacaaacttggcaggtcccactctgtgcttccatggagaagggcggccaatgtgattctgggcaaagtgtggtgacttgtggattttcactggtaagtacctttattttagaaacaaaaaggaagtctgtatttcagggcttcctttatggaaggtcaagctaattgcgtactagaagttctcaagtcttgacataagaggaataggtcatt

SEQ ID NO: 3941 - DNA, 2300 bp, Homo sapien
ctatgcctctggtaacatctaagcacccgacaagactgcaccaattcatccttctggcatgccaaagggacagataagcaaagtgagccagagaagctatgtccaattttcaaggtggagagacataggccaagttttgggatctggccatcagtcaatagtcctcagaccctcttagtctagtttctccaattcagatcatctggtctctgcataattacaatatcttccctgtggaatttgcgaatgattcttggactgtgactctaaagggaaaagatctagtaagttacttgctgttttcattaaacttatccgacctctcaaataggtaaactatttttaaaccttcgagcagctgcagattattatggatgaattcaaaagtttttctctcaatcggctgtgcttttcagattcaaaactctccttgtgcttaattttttgcaacctcggcctctgctgtcatcttttaggaatttggaattagtaggaacagtgactccaccaatacatgatggtgacaaaggccaactacaggctcggtgaaaataaaaattcctaaacaaatgttgttactccaaatggataattattgataaagcagagcaaagcatttgccaaacctggtgctagatacttatttatcaggaatatgccacatgttgggtaatatacacaacattatgattaagagaagctacataaaaggtaccagacaatgtacaaataacacaaatattagaaaaagaagtaatctgtgctttacctgccatgtggccacaccggctaaaaatgcattctcatatttgcagaagtaaacgttaaggattgttcttgagaccactcctactgattctgagcataattataaaaataacagatacagtgcataattagcaataacatctttgtattaaaaaaaagttttcctgctgttgtagaatgagttaaataaaatctagttatccttcttgcccttccagactcccctggtgggccagatgcccggagccccccaaattttatgatgtgtcagtcgagtttctcaactaggggtttgggcttctctctgggtccctttctctctatttgtctctcgctctttcttccctgacccctccccatttttaaaaggctttaaagaacatctctgggagacaaaaatagctccagttgtgagaggcctacacaccgggaatgcaactgagagatgcaagtcagcaagtgcgagccgcgaacatgagtgtctggccctgggtggatgctcctcgctgtcttggtgccgattctctgcctgggcccggtgggtagaagggaaaatggtttttcagggttgggaggtgggttgggtaggtttgggatccctagccgtaggaatggaaaccccagcattcgggctgagggggctcttccttcccctccccccacgtttttcaaatttattttgcccaggcggggattggtgacggtcaaaagggagcagttggcactgaatgtcaccctgaaggtaaaatgaaagacaaaagatgaacgcatgcttgctttccgtttgcagcggctgcggcggcggcaggagcagcaggatttaaaggggaaaaaaatcacacgcatatgcacacatatatacacacccagaggcgtcaattatgcaaacgcaataatgcaatcaaatcatgacagtgccgggaattttttttagaaaaatatagatatttatttttaaaaagagaaacgcatgcaaacagaatcgtgcacataccacgtaaccacccgaggagaacctggcagcctctctcttcttctgccaagttatcattgagaaaacagacaggcatcatgacgtcctgggtcacagggagtgcggaccgacgctaccaagagaaaagggaggcgccttggcgctccggctagccgtgggcgcccctctgcccctcgcagcccggctcggtgagtgcacagccgctcgggacgcggaccccgggtgccaggccggccccgcgcccgcgggggcagagcggggggccgtgcccttgccaccggagggccggccagcaccccctcgcctgccgaggtcgcgggagcccagttaaaggaggcgtgtgtaagatgtgcaatgttcctgcatgggggttttgtagactttcatagccaaagaaaccggcttcggcttctttaaaatccccgacgactcacctgattaacctgctgcagttctgaccctgccaaggtaactggtccaaatccttatcatcaacatctggagacagacatttgcatctggggcattctttatttgc

SEQ ID NO: 3942 - DNA, 2300 bp, Homo sapien
ttttctgcaggacaggcaggctcggagatccgcttcgctccgttcccaccccatgtatattaaatagccggcgagcggcggtcgcccggcgcggtgacctagcaagcgcccgaagtccccggcctctgcgcgggcccgcgcaccgccgccgccgccggcaattgcagaggggcctctcccagccagattggtttctctatccagggataattaccgcaagctcacttgcctagcgtcctttatattttcaaaaagttcaggggaagagtacgtatgtattggagggggagtgatagtcattctagatttaaaaatatttatatgaaaagtaacagtattcgcggagacacctaatatcatcatcgacctcatcggaggagcaggtccaggttccactggcccaaggctgcatctgccagctcccgcctgcccgcagttttctgccttatttagccctttgccctaggttctcaggcctccatgtgtcactttgcttctatttgtgttttcatttgggttgactgtgtgtatgtatgtgtgtgtgttacacttctcagaatccaccaaagaccttgagtaagagctgttgactgcatcttccctctctctgaaatctgttagcaccccccggcccaacccgcctcattctcctgcctatacacattcacaggggcaggcgctcctatgcacgcccacattcacccacactcccacacatcgttcattgcaacttccccacttgcagaagccagatgaggacttggtgccgagttgggcaccttaaggccacaccgatctctaagtcaacttcttggttatcaacctagacttttgtcttaacatggtttcagggatgccacatgatcccatcaccaacaccacccaaaaggaggccagggatagcaaatctaaccaattaattatgtgtgtcgtatctaaagggcgtgccttattgatgacacctaatgaagcaaataatggatttgcagtatctcgctattcatctggtccttccagaataccaagtattaaggagagatggatatgatggatggagagagagacagagaggagagggggagggggagaaggggtcggctacagatccttggaaacagaccagatttgttgagtgtcggcttgaagaaagcagtctgagctatgatttaaacaccggaggcatcattgttaactagtgtccgacgactgtcccccgcccccactgtgccttcctcccgctcctttcttttctcccttttgtaggatacagaaggtgaataatgaaaccattttgctaatagtttatgagccatgagattggaaatgtatatggatagaccgtagcaccaggctaaaatcatttgaaagaagcgtgaggcttggcagagacagaaagaaaccctcggtgtcctgtctccccagcccgaagcggaaagggacgaatgaggtggcctcgtgcctctccctctcctctccatccgaggacagcggcttggccggtcctcctgccagcgcctcgccctcctcgtctccccaaggggctagagccagagggagatgaattggggcgatggcgagatagcgcgagcgggagataatcgttatcaccagggtttttcttccagtgatggatctgaaaagatctatcacgcggggtagctctcccggaggcataaaacaatagacgtgaacctcgcgctgcagacagccacagagacgctgttcgtgcgtctgtcatttctgcccccatagggcctgttcccctagttacgaacacccagaaccttgagaaatgccgcgagtacccacccacccacccacccgacctccacattcggccctctaggaggttttcccaaaggctttctttgcggagttgctgcagtttcaaagcctggactctggaggagggatgcgggggcacctaaggggactggaggtggaatagggtgcaaggtgaggcgctggcctagacccacaaaggggccgcaaagcctggggaaatcctaggagctgactcggaacggtggcccaagccaatggcccgcgagagaccgccccgcatttggccaggcgtcccagagagcggaggcgcgcgggggagggcgagggcgggctcctctggaggcggcgggctccaggccgggctccctaaacgggtcagcaattggagcgggaaggccggacaggtaggtggcgtggggcgcacaagcccggcagcgataaccggggacgtctgtactgcttccaaccccgtctttgagaactcttaagcaagcgcgctcgggaccgggaccgac

SEQ ID NO: 3943 - DNA, 2300 bp, Homo sapien
atttaatgtagaggtagagatttcatcatcttacttctagctatctgtgtcacaaatgttggtttgtatatatattttttaaaaggcactagacttagaaatgccaaagtaattaattttctttattttcagaaacaatttagtgttcatggtacgaagtgtttctaaattgaaacactttcagattaatggatttaagataactggttgctcttttctataagtagtaataatgagatatggcttcagctacatatcagataccagatctcacttcctgttcctttatttcattcatccattcattcagcaaatatttgctgagcactaaaatgctccagacacagtgcatgaaccctgaagatataggcaaattgcataacccaagcaaagggccagagatgagcaacagcatggtacataccccaaactaagaacttcactatggctaggatatataatttagaagaaagaaggttaggttggggtaggaggaagcataataaattatgaatttagagatgtaatcaaattatgaagggtcatgaaagccttgtacaagattttgagtttgatctccatagagtcatataattagattaattttagaaagctcatagtgtctgcagtgtggagagtagattagaaggaagcaggcctggaagcagggagatcatttgggagacttttccaggacagagaaaatggtggtctaaactgggatggttgcaagggggatgaaaagaagtagatatttaagagaaaatttaagaatacttatttagttcagacgttcctgaaagaatgagcctaaccatattcttgatcatctaaggaaggtctattccttctcaaggacagctaagtaaactaataattgattctaagtgatgtaattgaacagttcaaagcagttattcgtcattagaaattattgatactggtcagataatacctactgagagctagtcccattaattttcatcataattataatcatagcatttaagccatattatttctcagcatttcctatgttccagttttatagcactgaatattttaaatggtttatattacttaatactcacagtagctttacaggtagatattattgttatttccattttacaggtggagaccaaggcttagagaagttaagtactttgcctaaagttacacaggttgtaaatggtaaagctattattggaacctagtgactttttagttactggcccagctgggattagaacccagctctatcctgtattattatttccaagacttttatttttgttggggttaattgctaatattctgtacaacttcgttttagcccagtcttgcatataatcatattttctgcataaataagataagctagagtttgagtgagcacatagtgaagaatattgactatttgtttttttctttccaattagttagggtaaagcaagtgtaaagggaagtggatggtaaggcattttgaggaggcaatcaaatatgtttttttctaattatatatttccaagccaataatttctttgaagaagaatgttttaagcgtgtttctttaccatgttaggccagtaggtacagagaaaataatattagctctttatgtcagcataggtaacaaagccttaaaaaattcacagctgaatgcaacagtgaaggccgttgacaagagaggttgcattacttcaaccagggctactgcagtgaaccaaaaaaagaactgagttctaggcttccatctccaggctacatcttaactgactaagagggcagtttagctgtccaggaagaactcgattgctaactctcactgataattttgcaacagtgacaataaagaatgaattttaaaaagaaaaacttgtctccctgaactattgaactccagaaaaagtagtacttacagtctttgctttaagagaaaccagttaaaaaaaaaaaaaaaaagccgtgcaaataaatgagtagtgtccctttgaatgagaatattttcctacttgcaaaataatataatgaaaatatttttgtttctatgactttgtcttaacactttgtgtagcatcagcttctgagagataatcgagctgaaagaggacacaagaaaaattgttctgtgagaacagccagcaggtaagcaattcaaaatcgctttttattcattcattttctttttttctatgcctataagaatgtaatgaattgttgttaggttgcctttggttctaaaaagtcaccttaaaatattttatgtattgtttattggaatctattttaggattacg

SEQ ID NO: 3944 - DNA, 2300 bp, Homo sapien
tgaaacaaggccgtgtcacctggctggagctcagctggaaacgtgttagaggctactcagatttttaccactctggctacacatgtctgcaaatgactgcaaaagcaggggaagtattggtttttgtgttacaaataaatgttagcaagtaggtgtatggaatctgaataatgacaatgaattgtacatgtatgtatatgtacaatacattctacttacataagggataataatttcttagttcaactcagacctaactgtatagcagactaaactgttgtctaaagtcaggtgcaagtggtgaaatgcaagaccatgaagtataaaatcttttagtttattgttgaaggaatgactaattagcatgcatgattaccttatgcttttctcataccaacttaacacaaagaaacaataatattaaccctacttttaaaatcccatctctcactcctttctccatcttattgattcttctttcttgctattcttcagtgctaagtcccatttcaatttactatacatagtgatcgtgcctttactatacatttgttaaataacttactcaccagccactatctattgaggactctctatttttattaaaagagttatttgtaaaaaacaacatagtttttcccctgaggtggttatagtctggagcaggtaagcagtaattatactatgttggtaaatgtttcagaaaaccatagagaaggcactatgaaggccacgaaagagaaatgtgaaagttagttcaggggtggaaggaaagagggagaggcaactataggaagcatcattttttgttttgtcttctttaattctgaagcttttcttccttgagacattttgactgagtttacaagaagtatcttagtgagtcagatcatagtttagtttttacttagttccccttttaattttgaggacactgttgagtgtgaagagacttgaaattattttgcagacatttgaggaattacctgaacagtggctgccaatagaagcactcctgagcttgagtgccttatgtataatcaggtagtaaagagaggattggtggggaatgagaattctgctctttgcctttcctcttgggatgtgagacttttaataatcttgaaaaatgtcatgaatagccacagaaactcttagttccttttctttaaatgtaaaaaccattatccacaaggtatacttttcttcctggtttaattcagcagtttttccaattgtacctaggttttttacttacagattttaatgtaattcttatatgagttattttttaatatacatctgcaggtcactaataaggggattgtatcttcgtttggcctaagtccagcaatctgaaagttggaaggtaagaagcacttcgcaccatattcacaagttctgtttttgatcagagttgacattattgagtcagaatccagaaagcaacctcacttgtgacactgataggagtccaagggaacagaaaaaaaaaaatgtatcaagaagaagaatgaaaaaattttcagagtcttttgagctgctcttgcttattagagcagggatcaaggattcttgtttgttttgaattcataatctgactttaaaaaaaaatatgttgggagtcttcttttttttttgagacagagtctcactttttcatccaggctggagtgcagtggcgcaatctcggctcactgcaacctccgtctcccgagttcaaacgattctcatgcctcagcctccctgagtagctgggattaattacaggcgcctgccaccatgcccggctaatttttctatttttagtagagacaaggtttcgctatgttggccaggctggtttcgaactcccgacttcaggtgatccgcccgccatggcctcccaaagtgctgggattacaggcgtgagccactgcacctggccaggagccttctaaatgcaaatacatgttgttcaagtaacaccttagattaattttttcatctttgccccataaaagatctaagctcacatattaacttgtgattcatgacccagagatctctgtagttttatctgagcttccttttgaagttgcagtggtatccccagatgtataattgtactgataaggtgagataagtttgtgatgggttttatacatatagatgcattgcattaagtaatgccattgtttgacttgtttttatgtacaaagcccatcaaaactatacatttgaggaagaaaacacattataatataaatctaataaaaggagctataacatcaacgttcagagagggtgctatctcattt

SEQ ID NO: 3945 - DNA, 2300 bp, Homo sapien
cagatagactagaaaataaagatccagttttctggaacatattcattctgacagaacaggaatgactttagaatttcattcaaaaatactaagtgctaccactttgttatactctggtgccataagaaatggtgagttgtatgacaagcgagcctttaaagagaattgaaggaggtttctctcagtacctaaccatgattttaaaggtaaaagaagttgagagaatcaatcacattctgatgtagtcacctaccctacaaatcaatagcaccctaggaagagcagaccaatctacataggacattttgtctccctgacttaaccaagataatgaacagtgaaacattaagacaggtatccttgagagggaactgtggggtgatggacaaatccattatcttgttttgtgtggtgtttacataagtatatgcaattgccaaaactaataaaattaagcctgtaaaaattgtgcatttcattctatgctagttataccattaaaaactggttcatttaaaaaatgctccctacttttctcactggaaaatgtaataatttacaaatagtataatcaaatctatattcactataaaattaactacaggatgatcaggtccaactagaaatattttggataaggtattcttttaacttttcagtgataggtgatggaaaagcaattatctgagatcacagactactagaattcctcatgttctaatttttgcagaatctaggaatgaacacgcaccatttagccacatttctttcacctgttggtcagaactttatgtttgaggattttcaatgggaaattgcttgtttgtgtcactggttgtcttatgttatgtttggaggaaaagggcttgggagaaaaacaggacagataatacagagtgttcaactagaaatccccaaatcaggattctagctctaggattaaaatgtacagggcaactttggacacggtacttgaattttctgtgcttgtgatattctgctatcacaaggctgtcataggataaagtgtattaatttgtggaaatactttgaaaagtcaaagcaatatattattctaacatgataccatagacatagtcaagccccaaacttaatcctgacagttataggttcttggaaagcccccatacatatctcactttaacttgaatagaatgttcaagagggtggaaacaggtaggttaccctctctctttaaaaaagggggtgagagggtgatgtgttttccacgattgaacttccagaactctagatttctggaatttatcttccaaaagacttggtataatctggtaaatattgaaagaggagtggggaataaggcccggattaagataaattcttcctgtccctagtgttgtcaacaatcaatgaggagatgaattgctcctggagtacaggaagcttgacttctaaaatattgttaaacaagcaatcagaaaacatttactgtattctttcacaaatctttggcacacacccaagagctccctcaaactgcgtgcatcccaggaatgagtgagagcaaggcctagatgtcttcagatcatccatcacagctccctcccgcctccattccaggtccagcggagcggcctcgggcaatcacacccttccctgacctccccctccccagggccgccagcctcaccagctgttcccggctgctggagctccgatcggttggcgcccggcggccccgaacattaacgacacccgggagcctggcctcgaagctcaggcccgtgaacagactccaactacaacagcaccggcgacttccaaagagcagttcagcattttgagatgagcttccggaagccgacaggcggcggaaaccggatgcccggagcaaccattagttctccgcgtttactgctttccccttcctataatcccctcttcctactcgcagtagagacagagacaaataaattaaacttttgtgctacacagaaatttcttaattctctttttagtgctcttaaagtcaaagcagcatgagagaaaagaggagtgaacaaaaagtcgaaccccgggagtgagctatggtttagcccagttaccatggagaccggtagtaacaccagttgtaaacccaaggccaagagaccatggccacgttagcccggctgcaagctaggtcgtcgactgtaggaaatcagtactactttaggaacaggtaagtcaggaagagaaggatcgcgtaaagggcgggcgtgactttataccagttgttcctcagcgggagtttccaattaacgatttaacgattaccc

SEQ ID NO: 3946 - DNA, 2300 bp, Homo sapien
tctgtcgcccaggctggagtgcagtattgcgatctcggctcactacaacctctgcctcctgggttcaactgattctcttgcctcagcttccagagtagctgggactacaggcgtgcaccaccatgcctggctgatttttgtaattttaggagagacagggttttgccatgttggccagtctggtctggaacttctgccctcaagtgatccatctgcctctgcctcccaaagtgctgggattacaggcatgagccactgagcccagctagtattgtaattattttttaaaagcctatattccatacaaggatgtgaacatcatgatggatggggcttatttcatttatatatgtcataaatacagcacctgccacatactctaaataaatagataatttctatgtttagctattgttagtatgtttacttaaaccagggctacagatttattgaaaaattcattaatgtgagtcttcaacaattattgtgttactattatttgtatggggctatcatagacgttggagacaaaaataatggtgagcaaaataagagacactgtctctgctactagtttaagaggggagatagatattatctcataaaagaatgtaaaattgaattgtgatcagtgctgtaagagaggtacgttgtgaaataatgatgtagtaggtgagataaacgttagaataaaagcagctcagcaagaccctatctcattgacatattttccattggtctgtcatgtcactgtattccataatagtctaattcacttttttgcagtttcttttaagttacaaaaactcctggggcaatgcttctttaaaatgaaactcttcctgggcaagaagtttggctgtagggagatgaagaagactgctagtggttttcttacccgttatctattaattaatatattggtactagttaccgtgtcagaatggtttagacactttcattttattttattttatttatatttatttatttatttattgagacagggtcttaatttgtcacccaggctggagtgcagtggtacaatgtcgggtcactgcaacctctgcctcccaggttcaagcgattctcctgcctcagcctccggactagctgggatgacaggcatgtgccaccatgcccggctagtttttgtatttttaatagagacggggtttcaccatgttgtcctggttggtctagaactcctggcctcaggtgattcgcccccctcggcctcccaaagtgctgggattacaggcgtgagccaccacacccggcagatacgttcattttaaaaaggcgaatgagtcatagaacaattgagtttagtgatgtttgtaaaataacggaggctcaaatccctaggtagatgggacacaatctgagttcattgggctagtgagtcagggtgacccccagtcagggtattgaacataggtttcatcaaattgcagagtggtgatgtcgaagaaaaaaagcactttacaattttatctatgctgggagtttccttaaatcatctcacactgaatatctacggcccctctctatttagaatttcgttgtatggtaacagaaactcccaattatgtttgcagcccattaagggaagaattgggtactacttaatgaattagggtaatcgttaaatcgttaattggaaactcccgctgaggaacaactggtataaagtcacgcccgccctttacgcgatccttctcttcctgacttacctgttcctaaagtagtactgatttcctacagtcgacgacctagcttgcagccgggctaacgtggccatggtctcttggccttgggtttacaactggtgttactaccggtctccatggtaactgggctaaaccatagctcactcccggggttcgactttttgttcactcctcttttctctcatgctgctttgactttaagagcactaaaaagagaattaagaaatttctgtgtagcacaaaagtttaatttatttgtctctgtctctactgcgagtaggaagaggggattataggaaggggaaagcagtaaacgcggagaactaatggttgctccgggcatccggtttccgccgcctgtcggcttccggaagctcatctcaaaatgctgaactgctctttggaagtcgccggtgctgttgtagttggagtctgttcacgggcctgagcttcgaggccaggctcccgggtgtcgttaatgttcggggccgccgggcgccaaccgatcggagctccagcagccgggaacagctggtgaggctggcggccctggggagggggaggtca

SEQ ID NO: 3947 - DNA, 2300 bp, Homo sapien
tgagctgattgatttatgcaatagcacgaaaaatcttcagtatatttttctgtgtgaaagaaggcaaaaccaaaaggccacatagtgtataattaatttcatttgcgtgatattatggaaaaaggaaaactatagggacagaaaacagatcactggttgccaggagatggaggaaggagggggttaactaaaaagcagcaacagaggagaatttttagggtgatgaaaccattctttctgataatgttttggtggatacatgactctatggatttgtcaaaacccatagaacaatacattacaaagagtgagtgtttttgtattcaaaatttaaaaaaatcaaccagaatattgggggtcccaggatggaatgaagattgtatctaaatatacaatctttgaattacaaatacattacaaatatacagcataatgaagaggagaggaaaaaggagccaatctaaataactttgtaaaaatggtgtttgggctgacattgtaaagctaaagacaaaaacaaacaaaaaactgtgcataaacactgtactctgattggtaaatttgtttctcataggggtatgggttataaattctgaaactaatttacatgttcactatggttgaaaaaatgtgtaaaataacttgtagataaagggagctcacttgcttactattagagaaaaaagttgcaaataagcaggtagaggtgcaggggtgggggtgtgggaaggctggaataattcccattgtggtggcttaaatttggagatgtcagcttgatttcttttaacatatataccaatagataaatatgaagtaaatgtagatatgtgtttatacatgggttaatatacatctagtctagccctatctcctgagatgacctgagagcactgatacctcagtagcaatgagcacacctggtacccagatcttgatttctaaataccattctacaataaaaggaaccagggcttcttggagaaataactgtttctagacaaaagaaagaaattgtaaaaaaaaaaaaaaaaaaaaaaaaaaagttaataaaaaagaaggatggagacatgtcaaaagaactcccagggccaaagctagaatgatttgagcaagaaataataatgagagcattggattgtaatccccaaagtattattaacccacaagcccacaagtacacaatgatatgaataagtaaatgggaagaacaagcaaatcttctttacagaaacattccaaataatataggtagagattattccttccaggacatagagcttaattccactttcctatgtgggctagacttagtgactcacctccaaagaataaaatgtaggaagggaaaagtagtaactttacaggaaaaaaaacttggcagataccatcaccttaaccaaataatgaaagttaaaatcaccagtgataaatcgtgttgttctcacatacccatgatacaacgcatagtccacatctctggtcctttttctaaaacccttaatctcattataaaataaaattgaggggtattctataaaattcctgactagcattcttcaaaatgttgattaagaaaaaagaagggaaaactaagaaactattacagattggaggagaaaagggagacataacaaatagatgcaatgtgaattggatcctggaacagaaggacattagtggagaactggtgaataaagtctatagcttagttaaagtattataccagcaagtagagtagtcttctctttttctgcaagggatatattccaagatccctagtggatgcctgaaaacgaacactatatatacttttgcagtttgaggtgtgacagtaaaactaacatgaatttctttttccttcttcaccatttcacggatagaagattcattcttagcatagatcttagcaactacagcatacaatttttgttctttccttattaagtagagaactttaagattttcacttaaagggaacacttctttttggcatttccaaattgccagcatcactactcttgtgctttggggcctttatgatgtaaaataagggttattgaacaccggcactgtaacaccaccacagtcaatctgatactgagatggctactgagtgactaacaggtagggagcctagacagtgtggatacattggccaaagagatgattcacgtcctgtgtgggacagagagaggcagtgtgagattttatcatgctactcagaatggtgcacaatttaaaatatatacattgttgatttctggaattttcgattttgcattttcagactgcaggtg

SEQ ID NO: 3948 - DNA, 2300 bp, Homo sapien
tttttaatcagtcataattttgcattaagtgctgaataaatgccctttgtttcatacttaaactgtcacttacgaacatggggagggcagactagtgcctatcattagagcagagaaaaatcaataccatttttaattaaaggcaggcacagccgggctttaagacaagcaaatctccttgtcagatcatctcccctttaaactctttcagaagttcagttcagaagctaagaacgtccaaatgtgggaagagagtgacacaaatgctttgggggaaggggtaggcaaacaaatgaagatgatagaaggaaacactgggaaatgtgtgcttttcactcagtctgccctaaggggcaatcttaaagtatgataaaatgtagatgctggcttatgctgttgaggtgatcttttcacttgcagactaaaagaggatggaaggacagccaaacagacattcttgtcagtcatattttattatggtttagaagccagtacattgcttatttttaatgcttcccttcacattatattttacagcttggaattttctcactttgtagagcaagagtccagcaagacagaactcaaagtgttttatgacctaatggcagaagtgccattccatcacttttgctatattctatttgttaaaagcaagtcactagaccagcccacattcaaggggagaggattacacaagggtatgagtaccatgaggtagctcagtgagggcgcccttaaaagctccctgccacagaccttgatatcaagaagcatataatctatttagagagaaaatacaaatacatttagagcaatatgagaaaaagaaaaggtaatgtttaatcacatttccaaatatgatagagtcaatgagttctagagataggaaggatggaaatgacatggaaagaagttaattaatgaaggctgatggcactttgataaaggtacaaggctattcagaataatattacttatttccttccggttatataagaattaccatgtaaaggaccctcagaggctcttcctagtgttcagagtttttatagaccatgtgtctaccttccagttattgttatgttcttcttaggatgagaattccaactaaggctggttttgtaggcaaagaatgcttttaccaatcctaattttaccaatcctaatctttatgattctaagtaattttttttttttttttgagacagagtctcgctctgttgcccaggctggactgtagtggcacaatctcggctcattgcaacctctgcctcccgggttcaagtgattctcctgcctcagcctcccgagtagctgggattacaggcaactgccaccacacccacctaatttttgtatttttagtagacacagggtttcaccaagttggccaggctggtcttgaactcctgacctcaagtgatctacttgcctcagcctcccaaagtgctgggattacaggtgtgagccaccatgcctggcctagtatttttttttttaattcatctcaaaacagcttaaggatgagaattccaactgaggctggttttgtaggcaatgaatgcttttaccaatcctaattttaccaatcctaatctttgtgatactaagtaatattttttttaaaaatccatctcaagatagcttaagaataaaatatggtccagcagttcacataattcaaaggtccacaggtaagttaaacctcagattccgtgtgatccggaacccagctcctgattctggggttttctgagctctgctctccttagtgtgtgggcctcatcttcaggtggtttccatcctgcagtcaaggcggctattgacagcaaccagggcaacatacaaccttattcacatccagaagttcctgtatgcccttcaccacaaactccacatattgttttcacattagccactaatttctgccttaattccaatgtttctgtgaaacccaacaaaaatgagtcctattttaaataacatcttcatacagaatggaagcaggatgcataaaatccactatacaatccataagtcaacagcatacttttgttgttgttgttgttgtttttaaaccacttttttagtccgggcgcggtggctcacgcctgtaatcccagcactttgggagaccaaggcaggcggatcacgaggtcaggagatcgagaccatcctggttaacatggtgaaactttgtctctactaaaaatacaaaaaaattagccaggcgcagtggcgggtgcctgtagtcccagctacttgggaggctgaggcaggagaatggcatgaacctg

SEQ ID NO: 3949 - DNA, 2300 bp, Homo sapien
ctgcaaaacttctgaaaccaccactgcactgtacgtttgttagcagctcctgggccaaatgcattgttgatgttgtgaattatctccatcggtttatgacccattttgaacttgaataagaaaattgctcagattgctttttctctagcttcatttccatagtctaaaataaacataaaataaacagcaagtaacaagtcattagcaaataaatatatatagagaaatgcacattaaaatgatgtataacataaccacatttatttcagaagctattccaatatcagacagtaaacttcaacaatgcagtaggcacaattacttttgcaccaatctaataacttagggaggaacttagtttatagtttagctttgaaacaaagacaataacagtcctttccctaaacaaacatccttcgtacaagtgcactagactgcctaaagtcacaagattagaagtcatggtaattttagtaaataattcaagatgtagctattttcattaaaccaatatcgatgtcttatttattagacaagcaaagatcattctgtttttggccgggtttacagttgacccctatgccaaattttgacaccttatagtatttgtcagggataaatataaaattgcttaatcaataaatgcaaacaaaaatgtatgctggcaattcttaagacatttataatattactttagcaataattttaaagctagctcatttattaaagattttacttaagtcatgtaaactcgaaaaagcatttgactagtctttccttttttctgataaagtatttgatttaagtgcttttagttttctttaagttaattaattagggctcttttatatattttcagtagtgaaacattgtgtacacaacacataaatacatagacatattaggcatactgttagaagtacatcttgtagattcatgaggcctcctttttccccccatcttagacttgccaactcttgataacctgtttcaataccctgacagttgtcagctaaatactccttaatctgcatattaaaagaaacaactcttaggtgaatctcaaggtacaaacagaaaaaatctggtggtgctagaggtgcaaggtacagagagaaaaattccagtggtactagagggaaattaaagatggatggcaaatcaatcataaaattatagaaatctatcataggattttaaaaggaaaccaattttatagatagggctacctatcttttaactgtatgtgtgagctctgggcagagcccgcactgaatactgggtctccagaaacggagaattattataaggctagaccatgtgatacttttacagtgcaagtaaaaaaatttttttaaacagagacattttaaagtgtctaaactacagtcttccttacaaacccaagagactctattttagtcagaacatcaggtaacaaaatacaaaagcaaacagtttcagagctgagacaaacttgcctgtttgcactcttggggttctataaggaaaaacaggcttctccccaaaagggagtctgatgccttctccattttctttaagaaattccaggctattataaactactttaggtcccccatgctgcagagggtgcaagagaaaggagagacagcagaagtaaatgaagaaaacagaatttggtcaactgagaagaaaaaaaacttttgatcaaaaaatacaaagtcttaggagagaaaaaaaacaaaagcatgaaggccttttaaacacaaacatacatgcacacatacacacacagaacttggacgttagcttttaattaagctgagttttaaccattgagctcgttaaagaaaatctttttgaagcttattaccatatttcagctaggacaaattactgccatttcaaaagtaccaaatatcaaaccagaaaggtcttgatttagaaaccataccctggctgtcatgtgaaaagaaaagaaggcagaaccttagccatggaactgcagcatggggtaacagtcattgctctttcagtttggcctggctagcaaaaaggtggacttgttatgtaaataaatccccttaagaagtcaaaatagggaggagccaagatggccgaataggaacagctccggtctacagctcccagcgtgagcgacgcagaagacgggtgatttctgcatttccatctgaggtgccgggttcatctcactaggaagtgccagacagtgggcgcaggccagtgtgtgtgcgcactgtgcgcgagccgaagcagggcgaggcattgcctcgcctgggaagcgcaaggggtcaggg

SEQ ID NO: 3950 - DNA, 2300 bp, Homo sapien
ggagattgactggatatagagtaagaaaaagcaaggaaagagtcaaagatcacacctaagtagcaaggttaggatgtgtaatagaaatagaacacattaaccaaaaaaaaaaaaaaaaaaaaaaaaaagccaagtttgaggagaagaaagactatgggttaggtttgcgaaaatgagattgaagatttcagcctctccaaaaggacatctcaagtggaagtgtgaaatcagagtttgaagagaggatgggactacagattatagatttagtgtttacatacatatcaatgacggtttacagtttctagtactgataaattacatgtaaaatgaatgaattacatgtaaaatgaaataatttaagaaatggtgctaggaaataaaagggatcactaaagaaaaaaatataggtgaaaaaaaaaaaaaaacagagacaagccgtggatatgattaagaacatccaaatttctaagtcagggaagaagaggagtcagagatccagacaaagtggcattgaagaggtaagatggaaagtggaagagaatttcaaagaagagaagttaaataggagacatggaggagcaatgatgatggatgcatagctagtgatttgatggtgaggaagctgcttggagcaaaatcagcaaataacaaattgaatgtataataatactgctataatctcaatgtttgtttccccccaaaattcatatgttgaactcctaaccccaaagtgaggacattaggagatagagcctaagtcctttctgccctcgtgaatgggattagtgcccttataaaggagagaccccagagagacccctccctgcttccactatgcagtcatagcaaaaagatggtagtctaggagcatgatcctcactaggcaccaaatctgctggttccttgatctttaaacttcctagcctccagaactgtgagagataaatttctgttgtttataaaccacccagtttatgatattttgttaatgtctagtaatgtaggaaatttcactactaaagttagttttcaaacaaaatttctaacttaaataccagttgcagaaagccaagtatgaaaccaatagaaaataagcaatagattagcgaataggctaattatcatttagagtgtaattaatgcaccttataattaataaatagagactaatctcaataagaccctgaaattcctacatcatttgtaggtggatcaattttatataaccatctttattaaaaaagaaaaatgaccaaagttttgaatttaaaaaaggaaaatgtaaagatcagctttaatctttataactataataaaacagagactactttttactaaattcaaaggttaaataaaggaatcaagaaagagaaaaggtagatacaaggtaatcgtttttaaaattcagaagattaaacatacccaagagatagaatataaaactctatgcaaaccctctcctttcaccaataacaaatttaccttttacttaattctttttcttatttctaaatatacatcatgtgaaaaatctttccttgcaagtattttaactcaaagttctaggaaggaaaagctgcaaatttagcaaattgcttccttttttattttttaagtaagcgagtatctcaaatataaaggccatttcatttggctcatggggaagcccttctgtttgttaaggtacctatatttagttaggagaagataattctataactgctttgaagggtaaccttgattgttctgatgcgatattcagttacacaatcttaagcatcgttactgtactaaaaatgcacacaagtgttggaggaatgtgactgaggaaactcttccccagattcatggacatttcatgtgtctgtttacattttccatttaaacataagatttcttttccttgaatatacacaaaccttcttttaacgttaaatttcatatttcttacagtttgaggacttttcacagcacttatttcacttgattcttttaaaaaatcctgtgtggcaagcaaaacaaagataatgattgccacgtcacagatgaagaaaatgacgcttagaaggtgaattggctgaacagagggtcggctgcaggtgggcagcagggcccttcctttccccacaggcagggaacacttgtgtttcctttgtttacttctttagcttatgtcttccgcgatgaaacggtaacttcctgaacgctctgcagttcatcgctacactcttcctccatatctagaacgtggcctggcacatattagatgctcaatcatcattttaaaataaacgagt

SEQ ID NO: 3951 - DNA, 2300 bp, Homo sapien
aaaaaataggttccagatcaggacacagtggtaatgaaaggatcacactgagcaggatggtgagagctgctgggcatcagcagcatcctaaagggcacctctaaagtgcacccctttttattttgtcaagagtaagggtctcactttgtcacccaggctggaatgcagtagtgcagtcatggctcactgcagcctcgaactcctggactcaagtgatcctcccatctcagccttggagaagccaggattacaggctggagccaccatacctgccatcttggctcactgcaatctttgcccctccccgcccctctgggttcaagcaattctcacctcagcctcctgagtagctgagtagctgggactacaggtgctcaccaccatggctggcgaatttttgtatttttagtggagacggggtttcaccatgtcgtccagcctagtctcttaactcctggcctcaagagatcctcccgcctccgcctcccaaggtgctggaaatacaggcatgagtcaccacgcctggtcaatacctgcactttttaaaggtttaaactggaatctcatctcttaccaactgtattcaaaatgtcattttttttctgcacaattttttgttgttggtggtggtggtggtagattttgtttgtttgtttttgagacagagtctcgctctgtcgccgaggctggagtgcagagtcgcgatctccgctcactgcaacctccgcctccaaggttcaagcgattctcctgcttcagcctcccgagtaactgggactacaggcactcgtcactgcgtttggctaatttgtgtatttttagtagagatggggtttcaccatgttggccaggctgttctcaaactcctggactcaagcgatccacttatctcagcctcccaaagtgctgggattacaggtgtgagccaccgcacccggctagaccctctctctcttaaaagacaaaaaaattaaaaaccaagtttaaaaatgttgtattgagtttttaggatgtgaatatatatttatttcctacataaacatctactggaatatgtcaaaatgaggattcttgtttttgtttttgacttatgggtatcacaatctatgaacctccttaagaggggaaagggaaaacgctaagtttggggaaagcctttagaacaagtctagccagtaaaggtttgctgcattatccatctgagtcattaactttgtcaatagttatattctgtcactcattcattgattcattcatcccttccaaaaatatttttggaaaattcacttcaggccaacttctgttgctaaccttgaggggacatggtaaatgaaatacgttcccctcctgcgagaagccaacattttaggggggaaaatgaaggccgactgtggtaggtgcttcgatggaactaggagctggtgacagaggctaacttcagagaaaagctagccccgggtgggaggcaggatcctcgcgcggatagcaaggtattcgcaccctcggtctgcactgcgcagtcgggcgccagaaaccctccaggccccagccgggtccgagggagaagggtgcggttggattcaacacccgccccagggaaagaaggtgagtctattcggtttgcaagaaaggtctcgcgtgttatcttgggcggggggatgatacgatcgtattctaattatcggcccccagtggatctgtcccgcgtcctagctgctgcggcgttcagtgggcacgtaagagacacctgaggaggacactaaaccaacattaaggcagcagacaagggaagccgccgaggctaggaaatcaaagtggaccgcgctgggctggggacgggctggggacgcactggggcggaggaccagggcacaggcgagctagcggaggagtcggctgaggccattcagccgctgattttcgtcctggaacggacttcgcgtaaacacaccgagccattcagagctctctccaagtcacattctgaggctccggccccggaactctgggctagacgaccccgccccggaaccttgtgttaccggcactaaatgcagaagttcctctggttgccaccggacgcaactgtcaggtgacgcttccggcgcagaaaaatggcagccgccgctccggactcacgtgtgagtgaggaagaaaacctgaaaaagaccccaaagaagaagatgaaaatggtaactggagccgtagcgtcggtgctggaagacgaggccacagacacttctgatagtgaaggtaatgtggtagggctgagctttggtgtctgggaggaaaggcggggc

SEQ ID NO: 3952 - DNA, 2300 bp, Homo sapien
ccacattttgccataaacgtttattataaaatcaagttgttttccaccccattctgcacactcttcatagctcctatctcaggggccgtaaatgaaattaaaacaaaacaaaaaaaaaatcagtgggcgaaaaaaattgaatccataaagtatgtttttaactacaattgcaaatagcttactgaaaatttttaacaacaaagatattaagatgaatttagtcaatgttaagaactttttaaaatttaggtgaaactgagttaaaatgaaaactgaactttcttgttagggaaagcaatgaaatcaactattgttgattactaaatatagatgagactatattgtttctttctttatggtttgattttaattatcccccaccccagcaaatgaaatgaagttaaccatctcattggtgtgagatgaatgtgtaattccaaaccttctttttcagtgttcagtggctgccaatgtatgtttgcgctttgaaatgaaagctgattaacatttttaagggttgtcttcaccttcaaaatggacacagactgcttctgtatggtttcaattcaatatttgtataaaactaggccaaggaaggtggggactgtttgtttccttgcatcatgcagttttcgttaagttcttgcatttagtcacttttacttttcatttgatataagcagaaagagttgtataggttgctttaagtctttgaatcagtgctgccttgcagcaacactgaaagactccgtaagttgataaaagtttggttatttcagtttatactttacgatttatattacagttagttatgtttaacagctaacacagcttccatctatgatagtaaatacctatgtctaacatgtacagtatggttaactttatcttatagctataaccagttaataaaaaataataaattttttatttctttcaaggcctgtacctctaaaactttctaatttgcagtactggagtcaatggcttatctaagattcaaatccagaactctctttttattccttttataaaaagaatataccaaattgctacttctcttttacaaacaaaacaaaaaacccttcattctcaggatgtcttaacatttaatgaaatctattcagggatcaccccaagcaagcttttccgatgaatgacacatttagaatttgcctcaggcttttttttttcttttttcttatattaatctttgatctaccttttttttgtgtgggtgctccaagtatttaagaagtttttatacttaatggtaaatcatatttatggaaaagatatagcaaattgaaattatgtcaatccagtgtgtaatgtaatttactccaaatcttttatggaaattaccttaagcatattcagcattttgcatgtattttagtcctcattcataggttataacaggttatataagaacacagtatattactgtattgtgttcatatcatcagttaagttttagagaagtttagtgttgtggaaagaacatgggctttggaatcaaatggatctgtgtttgggtatagactcagctctttattaactctgaacttgaataattacttcacttctctgagccttagttttcttataaggtaagcatgatacttgctatctggccaggaatcttaagagaattagaaataaggcaatattatataaagtgcttggcacacaatgagttcatagtatacttattgtgtttgaccctttttcatttattgttaggaagtaaaacagaatcatcattgttaataaaactagaaggatttcttaggatatttttgggacgatcttggtagaaaaaagcttgggaaacttaggatttgtggaaatggtttaggtgtacttttttttttttctgtttcttgctgtccctttttttttaaattctttacttatacatgtagtttaaaaagccacattttgccataaacgtttattataaaataaagttgttttccaccccattctgcctactcttcatagctcctatctcaggggcaactaattcttaattctctagctagtcctgctggcatttatacatctctgtattcttaatgttacaggatccttgggtgtcgcttcaccagctggaaacctctgtgaccagtggtgcctttgcctgttttgctcggtcctatgggctcgttttgcccactcagcctggcagtctgcgctcggctcgtgctaccagcctggatcccatgcctgccaagagcgagggatgtatgagcgagagtggggtcctgccactgaacacagccaggcatgccagc

SEQ ID NO: 3953 - DNA, 2300 bp, Homo sapien
taatctgaatctacttaaggtgcatcagtgtctgtaccaagaaggttgtctataaacatgaaagatgctcactggcttgtggaagctgaacctgtatcctcagcaaaatacagtgatagctaattcaggtaaccagccatattccacagcagcatcttctctcagtagctctggtttggagctcctgctctgtgtctataatggccacaggtgtaagaatattcactttttgtccaatctgtagagctagcctactgcagttctcaaactgaactcagagggaggacctaactggatgaaactactagtctgacagtagcgcctcttgattatctttttcttgggctactgggatggtagctttgcttcaactcaaaactggtatcaaggaaaggaacctgctggtgctgatttatacataatttttagaattattcagaagtgggttggaacaattattttattccagagtttttcaatgtgtgataatggaaaaaattctgtattcaagggagtttggaaaatgctgggttaaaagagtgaaaaggttttctcttctacaggagtttcagagcctttaacatgataatgttccagaatgaggaatctaagaggacaggagagtacccagtatctcccaaacttgtttgactccagaattcctgtttgtcagaacatattctgggaccattgtttctcagaagtacatagtaggtaagaacatagtggatcctgactgcaaaaatccagctctaccacttactgtggtctcgaacaaagtacttaacttctttgtacctcagtctcctcatctgccagatatggataataagacccactttataggttcatagtgaagattaaatgaccatacacaacacacatcaaattactaagtgtagtatatgttagctattattattttatttattcagtgctctactaataacctaggccccatacacaactgaagtataaattccaaaagtgatagaaagttctttgtgacttttctgaactcaggaacatctgaagtagagaacagtatagagatcttgggtttgggagtacattcaacagagtttccagtttaaatcatctgtctggtcagtatggctgcagagtcatgccgaaatgaaaatgttgactttgagtaactaaaggtaaaataaaagaaaaagggaaggtggaacagtggtaagagttattcttgtattcatctaatttagacttagttgaaattgaaaatgtcaagttatgagtagtgtagaacagtagacatcaaacacttaaaattccagcttcctggattaatgctatggaaagaatgaagttggttgataatgtttagcctagcaagaaggtgaagaagaaagccatacaagaagtggcttaggcagcaaattataaaggtgaccattcattcaaatcagtaaaacaaacaagtataccttattctttaggtaaaattgatggatctctgttttccagcagttcacaaacagaggggtacattgtaaacaacaaactaacaaaataaattctgggatggcaacctgctaaggtatcccagaaaataagaggtaggacatgaatttaaaagattggaaggtatgtcttcagtactggcctggccctgagtagactagtgctccctcccataggggtgcgtgtgcacacataatacaggagggaagccttcccttctagagcaagtgattcagcttgggaggctgtgactgagctacactaagtaaaaacgggagacttgattgtccttccttcaacagacctgtccaaaatgactggaaagtaaataccgtaaatcactgttgtcagggcgcacattccacctccttcctcccttacccacagcggtcctcatttccacactccctcaacggttcggggagagctcgtggtctaagtaacgagaggacttctgactgtaatcctagcacgtcactttgttgaaggcagacacgtggttcagagagaacttataaatctcccctccccggcaagatcgtgatgttatctgctggcagcagaaggttcgctccgagcggagctccagaagctcctgacaagagaaagacagattgagatagagatagaaagagaaagagagaaagagacagcagagcgagagcgcaagtgaaagaggcaggggagggggatggagaatattagcctgacggtctagggagtcatccaggaacaaactgaggggctgcccggctgcagacaggaggagacagagaggatctattttagggtggcaagtgcctacctaccct

SEQ ID NO: 3954 - DNA, 2300 bp, Homo sapien
agagtcatgccgaaatgaaaatgttgactttgagtaactaaaggtaaaataaaagaaaaagggaaggtggaacagtggtaagagttattcttgtattcatctaatttagacttagttgaaattgaaaatgtcaagttatgagtagtgtagaacagtagacatcaaacacttaaaattccagcttcctggattaatgctatggaaagaatgaagttggttgataatgtttagcctagcaagaaggtgaagaagaaagccatacaagaagtggcttaggcagcaaattataaaggtgaccattcattcaaatcagtaaaacaaacaagtataccttattctttaggtaaaattgatggatctctgttttccagcagttcacaaacagaggggtacattgtaaacaacaaactaacaaaataaattctgggatggcaacctgctaaggtatcccagaaaataagaggtaggacatgaatttaaaagattggaaggtatgtcttcagtactggcctggccctgagtagactagtgctccctcccataggggtgcgtgtgcacacataatacaggagggaagccttcccttctagagcaagtgattcagcttgggaggctgtgactgagctacactaagtaaaaacgggagacttgattgtccttccttcaacagacctgtccaaaatgactggaaagtaaataccgtaaatcactgttgtcagggcgcacattccacctccttcctcccttacccacagcggtcctcatttccacactccctcaacggttcggggagagctcgtggtctaagtaacgagaggacttctgactgtaatcctagcacgtcactttgttgaaggcagacacgtggttcagagagaacttataaatctcccctccccggcaagatcgtgatgttatctgctggcagcagaaggttcgctccgagcggagctccagaagctcctgacaagagaaagacagattgagatagagatagaaagagaaagagagaaagagacagcagagcgagagcgcaagtgaaagaggcaggggagggggatggagaatattagcctgacggtctagggagtcatccaggaacaaactgaggggctgcccggctgcagacaggaggagacagagaggatctattttagggtggcaagtgcctacctaccctaagcgagcaattccacgttggggagaagccagcagaggttgggaaagggtgggagtccaagggagcccctgcgcaaccccctcaggaataaaactccccagccagggtgtcgcaagggctgccgttgtgatccgcagggggtgaacgcaaccgcgacggctgatcgtctgtggctgggttggcgtttggagcaagagaaggaggagcaggagaaggagggagctggaggctggaagcgtttgcaagcggcggcggcagcaacgtggagtaaccaagcgggtcagcgcgcgcccgccagggtgtaggccacggagcgcagctcccagagcaggatccgcgccgcctcagcagcctctgcggcccctgcggcacccgaccgagtaccgagcgccctgcgaagcgcaccctcctccccgcggtgcgctgggctcgcccccagcgcgcgcacacgcacacacacacacacacacacacacgcacgcacacacgtgtgcgcttctctgctccggagctgctgctgctcctgctctcagcgccgcagtggaaggcaggaccgaaccgctccttctttaaatatataaatttcagcccaggtcagcctcggcggcccccctcaccgcgctcccggcgcccctcccgtcagttcgccagctgccagccccgggaccttttcatctcttcccttttggccggaggagccgagttcagatccgccactccgcacccgagactgacacactgaactccacttcctcctcttaaatttatttctacttaatagccactcgtctctttttttccccatctcattgctccaagaatttttttcttcttactcgccaaagtcagggttccctctgcccgtcccgtattaatatttccacttttggaactactggccttttctttttaaaggaattcaagcaggatacgtttttctgttgggcattgactagattgtttgcaaaagtttcgcatcaaaaacaacaacaacaaaaaaccaaacaactctccttgatctatactttgagaattgttgatttcttttttttattctgacttttaaaaacaacttttttttccacttttttaaaaaatgcactactgtgtgctgagcgct

SEQ ID NO: 3955 - DNA, 2300 bp, Homo sapien
gatttctttggctcaccctcgtcctctcttttgagattcaaaggccctgccaagtgccccgccaagtgccccaagatgattaattctgagagcccccacgtggcataggctactaacctttccttttgaatccaacattgttcactatctttgctgccaccttgctttatgggtccaaagccaccttgttgtgacagtgccttagtgcaatattctcaatgacattgctgctgtgggtctgactgggtgagtactgagtataactgcagtctctagaactcagaaaatgtcaaaagtgagctgttataagccctaaaatgtggtgcatctccctttcccttttcacactgtacaaaagggctgcgtggcattgcgaataattcgtaaagaggtattttcattccacttaacattcatttctgcctactactctatggggcttttttgggtgacaaacaagataacagacattgtactcattgcttgctgtagactcagtctccctttgagctacttttgaggcaccttttctctggataagtcttcctcagggaatgcttaggttccttatgcaaatgaacttatggtaggctacttcccaggcatccagacagattaaggtaacagagtttgggttcaagcccagatcccaattcctatatattagttgtaatttgaggatattttaatatattctatttgaaaataaaatcaagggaaaaaatgggacagcaatctgtatatgcgaaatctgtatattctacaataagagaacaggacaagccaagatgaacaatcacctaacatttcaattttgtttggtttggtttggtttggttttttggtttgttttcagtcagtcttaattaaggtatatattccttcctaatgaatatttattggaaatgtaatgttttgttttctgcaaaataacagactaattattaagtagatatgtttgaaattcctggctgactaaataaacgtatctacatttctttctttcaaattagcttaatgtgagtcattaaagaccaagtgggtccaggagttcattggcattctgatatattattgtattcattatatagctggatatataaatttcaagatctgtagaaaatactggctggtttatctaacattccttcatatagagaacaaccatttatatttgtccatagaggacaagatcaattgagtttaaaatgaagacactttatctttcagtaacttctgatccttcaataacttctgattcagtaacttcaaatcttttagtaacttttgaatcaccaatgagtaagtcaggtttagctgagttttacaggtttagctgagttttagtgtgttttattgcagtctgctgaaattggctatccatgtccattatatacagtaactgtgcattaagtaacatagttgaataacacactcactacccataaaatatgatagaaactttcctgtagcctccttgtcctatctcaagtgttctcatggactggggtatggatgtgttatccttcttggtcactgagccacatagtgaatgacagatctattcacctggctgttactaactgcttacgagtccatttatgaaatttaggctgtcagtaacagcagccagaagtccttgaacaagtagataataaaatgcttgcctgccaagatgattataatacaacttaagattgactttctttggagctgccaatgacatttctactgggctcttcccatcctggaaagaacaacagaagcatgtgtatgcatgttatcaccttccagtcacctccaacccttgcaaaaatatcaaaagacttcccagtcttggggaaatctgacaagggacagaattatgagagtcatcttctctgtgttcatcacatttgagttattttacaagccaaaacctaagagcattttccatgtctgtagcgctattcacaggaggcagggtgggagcaccaaatcccaaccctgtgctgattgattggtgtgagccctggatacaggacaacgggagagacctgagaccttcccatatcatactaagtcaaaatgctgatacaaccttcaggaattcggccgggcgcggtggctcacgcctgtaatcccagcactttgggaggctgaggcaggtggatcacgaggtcaggagattgagtccatcctaacacagtgaaaccccgtctctactaaaaatacaagaaattagccaggcatggtggtgggcgcctgtagtcccagctactcgggaggctgaggcaggagaatggcatgaacctgggagg

SEQ ID NO: 3956 - DNA, 2300 bp, Homo sapien
cctatgctctggagtcaagcccagcatgtgaatccaggttctacaattgactggcactatgactttgagccaggttccttacctctttgagcctcattgacaaaagcagatagtaatagtactgagttttattggaattaatttatgacagtttttggcacctactgaatcccatgaatattagttgcttattattattaataatcattactcttaaataattatattctgattttttgctgtctcaaaagcgtggggtggtgtacagtaagattttcaggtagtaaatggagttctaagagtagaacttaaagccttccctgtatatctccaagtggtctttcctagtagcactgccctcttctcacctggctagggaaggttatctagaactcatacggggaaggcaggtcaaaagacagaggtttttcttttaagaattggctatcagagctcagcctaccctagtttgtcctcctcagggacttcacttatacaactctctgctgcagatctatgggctttggagaaatgactcagaatttctttttgatttggttaactaatggcatgtaggaccattcttgttgatggtattgttattaatataacaccatgatagcttagagctgattttggcaactaatgttgatagtaaacagtttacttacctgtaagtagggtgattacctggaacaaataaaaggtaagttgtaattgctaaaatgtaatgcagactacaatgaatggaaggccagtgtttaatggtacttaagcttttactgggttattttgttgaattttacatgaggcaagagcaacctgctggggccactgccttcagtattaaaagatacctatgttttggactttatacaggaaataattccatttcttagtatttttaaaattatggtaaaatacacataaaatttactaggtgtatagttcactggcagttattaacactgttgtacaaccatcatcactgtccatttttaaaaatgtttcactatctaagcagaaactcttgtactcattaaacaacaacctcccaactccctcttcccttagtccctggtaacctctaatttcactttctgtccctatgcatttgccaattctagatatctcatgtaagtggaatcatacaattatttgtccttttgtgtctggcttcactcggcataatgttttcaaggttcatccatgttgtagcatgtatccgaatcacattctttttacaggctgaataatattccattccaatatgtacatagcacatttggtttatctctccatctgtagatgaacatttgagttgtttccactttttggtacttgtgaataatgctgctacagaacactgaagtacaagtatttgtttgagtccctgctttcatctcttttgggtatatacctagaagtggaactgctagtacctatgctaagtcaatgtttaacttgttgaggagccaccaaattatttctattgccgcaacatcattttacattctgatcagctatgcacaaggtttctaatttctacacatctttactaatacttattttctgtttttttgataagagccattctaatgggtatataaagcagaatctcattaaattagatttgctttgtaaactatttattaaaaataagagacacgaagagaacttattattatatgcttcgcttaccctgtatatcaagagctgcaaacatcctgtgcgagtcccaaagtgaaaggtaaaatatggttctattaaattttaaacatagtaacacgaatatttctccaaataaggtaatcttgagttttgggattgcatttaaaattcctacagcaaatgctcaggatataaacatatccattagtcattacagaagtccacacgaggctgacacacgtagaataccattattagcaaaactaaactcagtacagttacaactgcctcaaacttgaccccaaagtattgaaagctcctcagagagcgggccagcagcgctgcgcatgcgcgctcccgggcgtgctcccgcgcgtgcctgcgtatttgcgtgcgcggccccgcgcggcaacgcaggggcggaaccgcatgactggcagtggcatcagcgatggcggctgcgtcggggtcggttctgcagcgctgtatcgtgtcgccggcagggaggcatagcgcctctctgatcttcctgcatggctcaggtggatttcaattttacgtcctggttttctacagctcgggaaacatcctcccctcggttaccccagtattgcccaagtggaggtgtc

SEQ ID NO: 3957 - DNA, 2300 bp, Homo sapien
agaaaccaaacatctcctataacataaccacatacattaaagttgaatgtaaaatcactagctgctaaagacctactggatgataaagacctactcccaacgataaagatgataaagacctactcccaataaggttttatttacttcagtggagatttaaatatataggaatcacattatactcgcatacttggcagaattctttgaataaattcttggttcaaagtacaaaggaaaaaatacatacatacatgactctgaattttagagacatacccttacaggttataaaaatgtaatctgaaattcaaaaaaaggataattattttaagcaaagaggtccaggggaaaaaagaacatagtctaggagttcttcctaaagataatgagaattgattatgagaaagggtacagtgttggggaatttctgggtacttataaatgaacactcttggagccctaaatagtactaccagtctcctagttattaagtaccgctgtcatcttacacacgtcaccttctaaatatatgccgtctttccctttaaacactattggacctcttcttccctatctccaaaacaatatatcctagttcaaactttttcaccttaccccaccaaagccctgagtttgaggtcggagagctttgggttctaatcccaaatccgccactactcacagtaacagctaagagaccttggccaagctgctgaacctgtctggcctcattttcaaaataaagagaatacctcccacaattgcccttttccaggtctctgcccagtacctttccaattcccttccaatcaccgtcccatttaagcctacccgtctcggctcaaagaccactttcttcgaaaagtctgacaagcttttcatcttccaaatgccttaataatgcctaaccacatttttttctcttacaattcacttggcaggaaaccatgcaccgtcttgtgatcttccatgcactgctgactcaaactaattggattgtttttgtttttaactttaggtaggccccctgaggacaccggctgcatctcatttctttaaaaaacatttcctgagagcttaccctgggccaagcactgggggtgcaaaggttgacacaagggcccttactctcataatccagtgggaagttcacaatccagtggggaagacagacaaaagtgattacagatgagtgttaagtaacgatacagcattaagcacacgttactaagggcaggtagtggaagatgcctgtccctgggggtcctgcccctgtagtctatcttggaagtttaatgacacaggcgggaaagggaaaggaaggaaagagaagcagcaaaaaggaaagtgagagaaagcactccagccatggcacagtggcttacagaaaagagataatctgtaaacagtatctaagttaactgtgaatctcaattgtctacattagtatgggagcctggaaaaagcaatgggcaattacgactgaaaaatcactagtagctgataatgaaaaacactaaataatttccctctagcagaagacttaccttactaacttgctctgtttaaacttggggcgaggaatggggaggtgtgttgtggggatggagggctggctgagcggcgggacacaaggccccaaagcgagggtggtggaccagtgaccgcccgatagaaagaggaagactaacgggggaggctgggggcaggtggcgctgcccgtgcatctacagccggggctggcgacgggggagccacccactgggccctatttgggcccggcgacacctccacttgggcaatactggggtaaccgaggggaggatgtttcccgagctgtagaaaaccaggacgtaaaattgaaatccacctgagccatgcaggaagatcagagaggcgctatgcctccctgccggcgacacgatacagcgctgcagaaccgaccccgacgcagccgccatcgctgatgccactgccagtcatgcggttccgcccctgcgttgccgcgcggggccgcgcacgcaaatacgcaggcacgcgcgggagcacgcccgggagcgcgcatgcgcagcgctgctggcccgctctctgaggagctttcaatactttggggtcaagtttgaggcagttgtaactgtactgagtttagttttgctaataatggtattctacgtgtgtcagcctcgtgtggacttctgtaatgactaatggatatgtttatatcctgagcatttgctgtaggaattttaaatgcaatcccaaaactcaagattaccttatttggagaaatattcgtgtta

SEQ ID NO: 3958 - DNA, 2300 bp, Homo sapien
gtacagcaaaagtttccatttaaactacaaactccttccccaaatgggacacactaaatttaaggaaagctggcatttaaagtgcaagactacagaattttcagcactataactgatcaaaatgaacaaaaagatgcaaaaataaccttgcaagtgttaatacttataagtaggaagaagcccaaattgatttcataaactaagaaatattagccaggaaaaacacaatatcgaaacagacaccacaaatcaacatccaactcctgtctttgaaagaggaagcagagtggtgggaagtcagtaaagacaattctgaaaatcttctgaactcctctgatttagactttttttctcgaatggaatatggatgtgctactagaatgtaaactcctcagagcagagattttcgtctgcgttgcttaccaaaatctctcagcatttacaataatgttcaataaatgttcattgaattaattcatacatacactgtcatcttggcagaattaggcccctgcataggggtgtgaacaagttcaaacaaacgatgcagttttttccacatatcactcattcagtacaaagacagaagagttgaaattatcttaaagtatacgttggtactttctacttgcctggttgttataacacaatcataagatattgaattggttttgcaagtaacttaatgaagtacataatacttaaacttaatgagactatctttatatatgattttaaacttttcccctagttaattcacattcctcattatattcatctttacaacaactaccaacagttgcttgaaaattaactcttctatttttgaataaagaaaatgaggcaaaatagtttggcaataaatattaactaataaacagttaactgttgaatatctattgcacacaagatatcagagtaccacagcatgcatgttagagttgttggtcagcaacaaagctggatcagaatttgaagtcattgagtattcaccttttttttttttctatgtgttattccaaagagatttcacatcagctaccagttactttcagctgatagcagctatctatttgatgtgctgtgttgagaagggttaagaacctacgtggcttctcagggaagaatattttgaccgatgatcagtgtcttccaaggacagagtgggagcagaatgcatgctgtatatttggcagcattttatagtcaaaaacaaaatgttgcctttataaaaactaaatctaacctcagggaaaacaaaggcaaaaaacagaggatcagatccctggattcttatgaaataaatataaaagaacatccaaataaactagcagttaaaaaagccaaccagaaatgatagttatgtcattgttcagtattgcatgtcaattgtgtggcaatcactgtactaggcactaagagaaaaaagaaaagataaagggatagatagcccttagccttgagttcaaaatatgtagtgggtacaggaccaacatgtaaaagatgaatacagaaacatggagaacagagaacatgagtgacaacttctaccatagacacttgggcaaggcattgcgtcactcaaaacttgtgtctaaaacgtttagtttgtcaattgagggagaaggaaagagcattccaggtagaaggaataatatgctacacacaaagtcatgaaaaggtttggcacgtccaggaaatattggcatggtagaagcatcaggtgtgtgtgtatgtgtgtgtgtctatctgtctgtgcatatgcactgtaacatgggagacgagaggcaggaggtgaagctgtgatgaagctggtaaggaccagattgtgaagggatttactgctgagctaaagaatttgaatgttattctgaagacagactaacatggggagccagcagggcttattaggtggtggaacagaccaataactctcagggcacatgggaaataaataggtggaagagaggagaaaccagaggctgggagatccatccaaactgattatgaggagggtagaactaagagggagtcaacaaggatgatttagatgtcacaatggaaagatgttgcttttatagaacatcaaaagcatctgttaactgacaagtgagaagatgagaggggggatgaatagatgctgacataatgatattatatggagaaaaagtcattttttaaagatcacaaaaggagaagcaggttccaggatgaaccacaaaaacagtaactcaacttctgtcctgggctctttatattaaatctcaccagaaacccattttacaggtaaggaaacaaat

SEQ ID NO: 3959 - DNA, 2300 bp, Homo sapien
tttattactgggttctctattctgttccattgattcgtgtgtctatctctttgcccgtgtgacactgtcttgattactgtagctacacagtaaattttgaaattgggtggacttatttttcccaatttattcttctctttcaaaattgttttagctactctatttcctttgccttttcctataaacttttgtttacatctgtaacaaatattgcaatataggaattgcattaaacctaaacatcaatttggaaaaaattgacatctttgttgtattgagtttttcaatctatgaagatggtgaagtttcttcatttatttagatcttgtttggtctttcatcagcatttgaagttttcaacaaataagtcttgtaatttttttttttttttagctctacacctaagtttttaatttttggggacattataaataatactgttcttataaatgtggtgtttccatgttcattgctaatatatggaaatacaattaatttgtataagtttatcatgtatattgcacccttgataaactcactttttaattctaggagtttcttatagagtccttagaattttcgatgtatacaataatgtaatctttaaatagagacagttttatttcttttttaaaaattacctgtatccttgtttccttttcttgccttattgtagtggcaaatacttccagcgttatgttgagtaagagtgaatattccctttgtttccagtcttttggaaaatgcattgtcttttattattaagtatgatgttaactctaggttttgtgtggatgcttttaatcatattgaagaagtttcttctgttcctacttttctgatttttttatttaccaccaatgagtagtcaatgctttttctgaactgatcaagatgatcatataatttttcttctttagcctgttgatatggtagattacactaacttttctaatattaaaccatctctggatcccacttagtaatgatacagaattctttgcttatatttcagaagtttttgctaatattttgtttaggatttttgtatctgtattcatggaagacatcattctataattttctcatgctgtccttctctggtttgataccaggataatgttaacctcataaatgaattaagaagcattcccttttcttctactttctgaaaaaacttgtggagaataggcatcaagatgtttgatagaattctccagcaaaatactcagggattagagatttctttatcaaaaattttaaagttaaaaatttaattttctttagaattatatggtgattcaaattatctgtattatgttaggtgttttgtgatagtttgtgttttctgaggaattagtccatttcatctaagttatcagatttatgtgtgtagcgtgtattacgtctgtagtgataccccttttctctttcctgatattggtagtttgtatcttgcctctttgttttcttttcttgacaaatctttgtaaattcaattttttttggtcttgacaaagctttgtcaatttattaatttttttaccagctttttgattctgtgtgtgtatattccatttttatcctcattgtgtttttatcgtccttaaaatccttgtgtgcagctataactactttaaggttcttgtctgctaattctattatttctgtctttctgcatctgtttgtattgacttatttttctcttgttatggcttatactttcctgatcctttgcattttaaataatttttgttaggatgttagacattgtaaatattttattgaaagtctagattttgggctgggcgtggtaactcatgcctgtaatcccagcactttgggaggccgaggcgggcagatcacgaggtcaggagatcgagaccatcctggctaacacggtgaaaccccgtctctaccaaagatataagaaattagatcttaggcatcgcgtcatagaggaactacatcttccagaaccctcgcgccctgcgtcgtgctggcacttttaccggccgggccttagagcgcagcctgtagccgggcgccatctttgacgctggcagtcttggttttctgctagtgctgctgctgctgggaggacgacggacggcagcggccaagcaagaagaaagacgtggcagcaagcgggagtcggggatagtgtcatcggttcgggtcccactactttggagcttgtctcaaactccacatacagaaagccaccaaccttattccggtatcctacacccattccccaccctcattacactcccacccctggccctcagcatgggagt

SEQ ID NO: 3960 - DNA, 2300 bp, Homo sapien
acattattgattatttttatgttgatttttagaaaatacttccaatgatcaattttctctaattctcaatataaggatattttcctggaggtgcaaatatttaataagctctgagtttggaggcttatctggtgtaaggtgggacttggatcaaggatgctttagcatggctgttatggacctcagaaatactgaaagacaaggttatgttttacaaggctaaggacaatgaatagggctagaggttaggatgttctgtggttggggggaggtggggttgagacagggccttgctatgtcacccaggctggagtgcagtggcaccaccacgactcactgcagtctcgacttcttgggttcaagccttcctcccactttagcctcctgaatagctgggaccataggcacacacgcctggctaattttttttatttttattttttgtagagatggggtttccctatattgcccaggctgatcttgaactcctgggttcaagtgatcctcccacctcggtcttccaaaatgttgaaattacaggtgtaagccaccacgcctgacctgtgttttttttttgtttgtttgttttttgttgtttttggaataagacatttgtattcatttctaagccaaaactacatgtgtattcttcaggaatggttaaagttcaggggctagggatggggaaggagaatagagatgaccagactgcaccttcaaatcctctatgggatgagataatgagacaacaaaagaaaccaacaaagaaacctaggagccaggcctctcaaacctccacagcaggaagagaccagcagcagacacccttcttcaagggtcccttcctcagcctcttccagagtcctggagacagttaccttctggataacttttatttggaacacagcctgttgtcaatagaagagtcttggccaggtgcagtggctcacgcctgtaatcccagcactttgggaggctgaggtgggcagatcacttgaggtcaggagttcgagaccagcctggccaacatggtgaaaccctgtctctactagaaatacaaaaaataaaaaattagccgggcatggtgcctgtaatcccagctactctggaggctgaggcaggagaatcgcttgaatccgagaggcggaggttgcagtgagccgagatggcgccattgcactccagcctgggcaacaacaacgaaactctgtctcaaaaaaaaaaaagagtctttatttggaataaaccttcatgtaggtcagtcgattgtactgcgtatcaggtcatgctgtcagggacacgtgggggtgagtagaatattctcttcaatgaagaatgagacaagtacacagaggaggtcagccctggtttctttggcggccaagggacttgtgtctaccacaaagtagaccagccttcgagtgctaggcaggagtgcatgcttacagaagtggggtctgctctcctgagggctgcctgcgattcacccagggaaggaagccttgacagcgaagatcctgaaggggaacggggacgatcttgtgccatgagtgggtaataggaacgatcctgcaccgtttataatggctgtgaggaacaagagaggattaaatagctttatcctggggttagtggaatgagggtggagggctgagtggcggatgaggtcacatttcacgaaatgaaaagcaggaagcaccctcaagggcaagttgccccaagcctgtgctccggggccttgcacctgattaatatggaatctgcaccgcaaggtgcctatgggcacgtacgcgaaggtgtcccagtccaccgcagcgaacacaccccacagcagccaaggcccttatgactgagtcaacaggacactggcgaccctgagggccaggagaagcggggtgtctgggtgaatcccacctctgcatggggagggagtctgtgaagattgacgtccagacacgccccctctcctccgcagcgcccctctctgcacagtcctgtcccacaaagagagacatcggctcgtggccacctgccaagtcaggcccaggccgcgagggaggggaaaagggccgcgggaggcggtgcacgggctgttcagatactgcccccgccactcctttagactctggacgtgcggggactggtggcgctcggcctcgcgttataaaaagcggtggggcagggccggcgagacaatctgggaggcgggtaccgggcctcacggatccgcgccgcgccccccacctgtggctgcgcgcggggtgggctgcgctcccctgggcggcgccgggcgcccgggg

SEQ ID NO: 3961 - DNA, 2300 bp, Homo sapien
tatatatatttatatatatatttatatatatatttatatatttatatatatttatatatattatatatttctatatatatttatatatatttatatatatttctatatttatatatatttatatatatttctatatatatttctatatatttctatatatatttatatatatttctatatatatttctatatatatttatatatatttatatatatttatatatttatatatatttatttacatatttatatatatatttatatatttatatatatttatatatttatttatatatatttatatatatttatatatatttatatatatttatatatatatttatatatatttatatatatatttatatattcatatatatttatatatatttatatattcatatatatttatatatttatatatttatatatatttatatatatatttatatatatttatatatatgtttatatatatttatatatatgtttatatatatatataaagaaatgtattataaagaattatttcacatgattaaaagactaagaagtcccaagattgatggtgaatcagtaggcaagagacccaggagagccgatggtgtagcccaaatcaaagacccacacgctcaagacccaggaagagtccatgtttcagtttgagtctgaaggcaggaaaaaacaaacgtcccaggctgaaggcagtcaggcaggaagagctacctcttattcagcatttttgttctcctcaggcttcaactgattggaggaggcccacccacattagtgagggcaatctccttcattcactctgctgatccaactgttaatttcatccagaaacacactcacagacaaagccagaaagtcttgcatgtcattgaccaaatgaccagtcaagttgacatacaaaattaacatcacatctgggagaaatagagattgtaatatcactctgtgtttctttaaaatattgacagtagtcaggctgctcacaatagaggccactgctgtttcagtcattttggaactgataggcctttaagggctatgagtgtttgacagataacattttttaaaaataaaaacaaaaacttccttgcatcagtgaaatcattattacctgtctgtcttcctggaaactaactggaattatgtcttcagctcttccagtttaaagatttcctgaatatgaggaatatttcttttgtcttatagagaatgtttggaagtagggtgacccctcgaatattccctacttcacacagtaaatgacattcagaactgcacaccaggtggacaagatgtaattgcttatgtcaaatgacttgcttcacctgagctgtttctgcacacacggagcatggaagctggaaaggccaccgccactgatgagcttctacatgactcaaggacacagaagctcttgacgtctgtaattaaacacacacatgcacaaacaaaacagtctctcaagtccatatctgaagccagtgtcttgtatttccataaatcctggctcatgtgacatctcttgcttaattgccctttaaactgttttatggctttatagcaacctataaaaggtgatttccaaatatgacaagcgccggagggctgaagggaagagttacccaggagttgtaatcactgaatctatagctgcttccctagcagctcagccttcccaagaaagggagaggaactgccagggcaccgagacgccatggggcgatactccggaagaagcttccgtttaatcctcatgtgcgtcgttagcatcctcctctttgtgatggaactagtgatcgcttacgttggcaactccctctccttggcctccgatgcttttgccgtcctttcccactttgtgtccatgatcataggtttttttggtgtaagggccagtaacataaaacagcacaagaagagcacttacggctttcttcgggcagatgttgtgggagcatttgggaacaccatttttgcggtggcgctgatgttcagcatcctggttgaagccatcaaaaggtacatcaatccccagaagacagaggagccgatactggttctcagtgctggaattatcggtctgttcttcaatgttcttaactatgtcatcttcttggactgctgttactgcgcagcacccaagccccagggagacatggaagcaggtaaatagctactcagagggtggcagtaaatttggtgagagtcctggcaggtgctgtctgagggggcctttgtggtgctatccaaaggggcccgagtctttgggtcagccttttgtccct

SEQ ID NO: 3962 - DNA, 2300 bp, Homo sapien
aagtgctgggattacgggtgcgagccaccgtgcccggccacagacactattcttgataatgcaacattagcggcattcccactaaagtcaggaacaaagcaaatactctcttattcgacactattattgctcccatttaacatcattctggaagttctagccaatgaaagagataagatataggtcatgtaaattttggataggaagaaaatgatatttacctagaaaatccaacataactaaaaaatgattggaactagtaaaagcatccaacaagatggtaactctaagacctaagactttctgctataagtcccactatcctgaaagtaggcttctttttttttttttttttttttattgagatgaagttttgctcctgttacccaggctggagtgcaatggcgtgatgtcagctcaccgaaacctctgcctcccaggttcaagcgattctctggcgtcagcctcccgagtagctgggattacaggcatgcaccaccacacccagctatttttttgtatttttactagagatggggtttctccatgttggcttggctggtctcaaactctcgaccttaggtgatccgcccgcctcagcttcccaaagtgctgggattacaggcatgagccaccgcgcctggcctcaagtctcatgggagatgtaatctaaggggccctccctaatgaaaacaaggatgtcttggggaggttaagaaaaagtgtaggcgaggatgtggttgagatggttcttggaatccatcccgggtccccgtactttaacaccagcccttgaaatatgggtgcagctcacacacacgaatgtgtgtatacaccttggagtatctctggagctcatgcatgcacgtccgtcacaaaggatttgaaagggagaatcagatgagacgctgaaaaaaacacctgtggactccatgattgggggcggcatcggagggtttttttgttttgttttttagatcaggtctctccctgtgtcggccaggctggagggtagtggctactcacaggcaagtccacggcgaggccactacagcctcatcttcctgggctcaggcgatcctgcctcagccttcttaatagctgagactacaggagcgcgccactgcgcctatctgcagtgattttttgtttgttttgaaacggggtctcagtctgtcgcccaggctggagtgcagtgccgcgatctcggctcaccgcaacctcctcctcccgggttcaagcgattctcctgcctcagctccccaagtagctaggattaaaggtgcgcgctaccattcccggctaatttttgtacttttagtagagacccccgtctctacagtttcaccatgttggtgaagctggtctccaactcctgacctcgagatccgctcgcctccggcctcccaaagtgctgggattacaggcctgagccaccgcgcccggcctctgctgtgattttttttttttttcttttcgagaaggagtctcactctgtcgcccaggctggatgcagtagcacgatctcggctcactgcaacctccacctcccaggttcaagcgattctcctgcctcagcctcccaagtagctgggattacaggggcccaccaccatgccaggctaatttttgtatttttagtagagatggggtttcaccatgctggccagactggtctcgaactcctgacctcaggtgatccgcccgcctacaccttctaaagtgctgagattacaggcgtgagccaccacgcccggcctgcagtgatttttaaagagtcttttatatttcctttaaccattattttcaacacgcaaataactcttgaaaatacgttcttgttttggaaaaaaaaaaacgggggggaatgtataaaataaacaacgagaaaaacttctcccattcccaacgtaatcatggctatcgtgtgtatgcttccaggacttttctttttacataaagacagtgcatgcttttgtttcgtgcttcacataaacgcctatcccatcttaaagatggttttacaacctgctgttttacgacctgctgacttgacgaagtgtcgtaaagtcccgtccacttcagcgtctttcccaccgcagcacgaaaggccacgcaggccgttctaaccctggcggccaagaggaggggtagcaggctctggaacctgcgggcggggacgaagacggcgcgcgacgatgtcgcaccgcggcgtgcgcggtgtcggcagtagctgcggcgcaggggcggagcgaaggctgcggcggcgtcgggtacgcgcacacgttgcatcttcttcc

SEQ ID NO: 3963 - DNA, 2300 bp, Homo sapien
tctctttttaattttagctcgtggtctgggttgatcctctggatggaaccaaggaatataccgaaggttgatatctcttttgtattcatatttgacagtagtgggacaaggatatgatgttagttgtaaatatttgatattttgtatgttgtatggaaagctactatcatgtgttatgtttacccctaaagctatatttgtgctcatggttatcatacatcgttgattgttaagacaggagaataaaattcatctccttcaaataccaccccccacatactccaccagccccacacttctaatgtctcccagatgagaataacatattaaaccagtgttaccaaaatgactatactgaacccagctttattggggtagaaaaacgataacgagtacaactgtgtagctcttgctctgccaccaccaccatcccatgccctccccattcactctcccctaatctgtgaactgctttcacatttcatagcctcaccttctaaaggtgggttttgaaacacagtacaatatttctccttatctaagatgagaacaattagagagcaacaaattaaaataaaattggccatataaatgtaggaatgaacaagctcagagccagagttttaggttttgttttttctattagacagtcttgctcattgcccaggctagagtgcagtggcaccatctcggctcactgcaacctctgcctcccaggttcaagctgttctcctgcctcacctcccaagtagcggggattacaggcacctgccaccacgcccagctaatttttgtatttttaggagagatggggtttcaccatgttggtcaggctggtcttgaactcctgacctcaggtgatccactcacctgggcctcccaaagtgctgggattacaggtgtgagccaccgcacctggtaggttttaggttttaagcttagagttttatttttaaacttaagatctaggccaggcgtggtggcttatgcctgtaatcccagcactttgggaggccgaggtgggcagataattaggtcggaagttcaagaccagcctggccaacatggtgaaacaccttctctcctaaaaatacaaaaattagctgggcctggtggcacacgtctgtaatcccagctacttgtggggctgaggcaggagaattgcttgaatccagaagacagaggttgcagtgagctgagatcatgccactgcactccagcctgggtgacagagcaagactctgtttcaaaaaaagaaaataagaataataatgatgatgatgatgataaaattaaattaaggtctacataaattttcttgtattggctctcaggacatggcttaaaaaatttatcataattactagaaaaaaactattttactgttcttgaatgagacatcgctataatgggtgaatcacagtgtgtgtatacatgtgtatgtatgtgtgtgtgctgaaaacatctgtagaacccattgtgaaataaggaagctctagacaactttaatgtgtataaaagcacctagaaagcttatttaggtcttgtcccccactctcagattttgattcactagttctgggaaggagcctgagaagatctgtattataaaaagtacatcagttaattctaatgctgcttgatagtccttgggcctccctttgagaaactctgttttaaaggcttgaaatacaagtctagagtgtaatccaggaatataaagtgattcggcaggtaaggatgagttggatgatggtggaagaggcacagaggaatctgatgatgatggctgcaaaattatggctgctttatttagttggtttacacattgtactaatgagaccatgatagccaattcaattaagtggccatagatcctatggctgtttctggccagcttatcatttatgcctttcactataaataggattgatcacggatgaatcattgcaaattccataccttaactgcaaaactaacttggagcaattgatgtagtaatgatgagtcataatatgagcaagttatataactgatatttatttcttctttgcaggtcttcttgacaatgtaacagttcttattggaattgcttatgaaggaaaagccatagcaggagttattaaccagccatattacaactatgaggtattactataaatgatacaaagtaatttcattagataaataattatagtgttatctgattctttatgttacctaagcaagtggtttttagcttggttgcatatgcaatcatctggggaacttttcattttttaaattttatttatttattt

SEQ ID NO: 3964 - DNA, 2300 bp, Homo sapien
gaatggcaatttagcaatatccatcaccatttaaaatgcgcttcagctgggcgcggtggctcacgcctgtaaccacagcactttgggaggctgaggcaagtggatcacctgagttcaggagttcgagaccagcctggccaacctggccaacatggtgaaatcccgtctctactaaaaatacaaaaaattagccgggagtggtggcaggcgcctgtaatcccagctactctggaggctgaggcagaagaatcgcttgaactcaggaggcacaggttgcagtgagaaatcaggccactgcacaccagcctgggcgacagagcgagactccatctccaaaaaataaaataaaatgcacttcatctttgacccacggtttcacatctgggatctatcacagctatagtcttccaggagcacaaagatatatttacatagaaactctcctaaccaacctctacataacttgctgaattcaactatgccgttttctcgtaaaacctatgagaggatacaatgaacacttgggagatggctactctttaggatgactgcagatttctattctcacttgttgagcttaccttgcattatgtttgtctttatttaagccatttgtacttgtcatgtaattatacaatttaattataaaaaccaaagtatggccaggtgcagtggctcatgcctgtaatctcagcactttgggaggccgaggcgggcggatcatgaggtcaggagttcgagaccagcctggccaacatggtgaaaccccgtctttactaaaaaaaaaaaaaatgcaaaaactagctgggctgggtggtgtgcgcctgtagtcccagttactcaggaggctgaagcaggagaatagcttgaaccctgggaggcagaggttgcagtgagccgagatcaagccattgcactccagcctgggcgacagagtaagacgccgtctcaaaaaatatatatatgtatatatgtgtgtgtgtgtgtgtgtgtatatatatatatatatatatatatatatatatatatatggttaaagtaatataatttaagttatgtatatttttccacttcccaaaaagggtctacttaactcacagagttattgtgaaaatcaaatgaagacgtaaaagcctttttaagctgggcgcagtggctcacacctgtaatcccagcactttgggaggccgaggtgagcagatcacctggggtcaggagttcaagaccagcctggccaatatgatgaaaccccgtctctacttaaaaaacaaacaaaattagcccggcgtggtggcgcgcctgtagtcctagctacttgggaggctaaggaggaaggatcgcttgaacccaggaggaggaggttgtagtgaacctagactgcgccactgcactccagcctgggcgacaggatgagacactgcccccttccccaaccacgccccccagtaaaagatcccatctgtacacaaaaaatattttaattagctgggtgtggtggcgcgcacctccaccagtagtcccagctacacggaaggctgaggcgggaggatggcttgagcctagaagtgggaaggcagcagtgagccgtaatcgactctgggcgacagagcaagctatctatcgcttaaaaaaaaaaaaaaaaaaaaaaaaaaaaaggtaagcaagcatctttgacacaattctgcataaagttgctgtgttattgcgtggggagtgggaggtggaggtgtgtgtggtggacctgctgaagcctgtccacggaccgctaggggttcgaagttaaatagccgcagagtggtatcactaatacaaagaacattttaaaacagtgaactctacgaagtgggctggaagacagctgaaaccaaaaccaatcttttttttgtttcaacacactgttgctggcttaatgtgttctttccttcttctttttctttttttagccaatctttgaaagttgacacatctttcgcttttatttaatgcaacaggtgacttgcacctacggagagcttggagaaaacacggacaagtggaattttcccgcggatcaggagtctaaagaggcagtgtgaaatcgctgttgtgcgcttgcgcgcagtttcccgcatgctcagtagctgaggtagggatgccatccttctcaaaagacttattgacagtgccaaagctcggtactggacacaacgagggacctgggtctacgataacgcgcttttgctcctcctgaagtgtctttggtccaacgttgttccaggtttgtcaccgtttctctccggccggtcagggcaagagccagg

SEQ ID NO: 3965 - DNA, 2300 bp, Homo sapien
gtatttttagtagagatggggtttctccatgttggtcaggctggtcttgaactcccgacctctggtgatccacccaccttggcctcccgaagtgctgggattataggcatgagccaccgcacctggccgacagtacctatttaacactaccatcagcagtccactttcacacattctcccaagccctgttatcaaacttctttatttttgctttaatctgctggaaagaaaatggtattttaactgtctattcccatgactcctaaagttgaggatctttttatgtttattagctgtttccacttctgtgtctctgagttgactgttcatttcttttgctttattattattattttgagacaggctctcactgtgttgcccaggcaggagtgtagtggtgtaatcatggcccacttgcagccttgacttcctgggctaaagcgatcctcccaccacagcctccaaagcagctgggaccacaagcacatgccactacatccagctaattttaaaaattatttcagagataggggtctccctatgttgcccagggttgtctcaaactcctgggctcaagtgatatttccacttcagcctcctaaggtgctgggattataggcatgagctactgtgtccagcttcttttatccttttttttttttaaattgggttgtttacatttgtttttttgatctgtagcagctctttatgcattttgtgtattattattttttaatgtgtagcaaatgttttcttccacagtatagtgtaggaaagacaacataacatggtggctatgcacacacactggaatctaactgcctgggtttgaattccagctgtgctacttagttgtatcatcttgagcaagttacataattctatgtgcctcagtttccttagctgtgaaatggaaatactcatagttcctatctcacaggtttttttggtatgctgtgtcttcacctcatctggttttgaagattaagtgaattaattcaggtacagagctggagtcattgattggtgaaaggctgacattgagtgctttctgtttgtcacttggtttctcactttccggtatctttttttggtatatatatgttttcatacttgtagaaaatctgtccttcttatttatgtgaaccaaatgttctggatgttgtgttttatgattaggaaggctattcccaagttgtatactcaacaatgaaatggtaacaattgtgaactattatgaactggacaaccaaatagagcagaatctgtcagaaacaggagcagaagttgctatatataccatactattctatgagtgggatataacagggatttcagagaatcttaaaaaaaggttagattgttttataatattgttaaaatctatgggaagtcattgatttggactgagctcctgcactaggctgtttacttgtaaggtctgcgttccaggaaatcaggagagatgatagccaaatccattaagccaaatggcgtctgcttttcgttccctgtttctgccttcttcaaccttttctgcctataaacctcaccctgcccccacagctcatcagagatcctttctattttgtagaaaggtttaggaatatttaataatagccaattagatctttaaaactcgatttgctgaaattttattattttacaatattttcactgaacttgtgctgcccacagtcgtagtcattacccaagtgtgcctgttgaggccttgccatgagtttagcccagattgagatgtgcagtatgtgcaaagtacatgtcaaatttcaaaggcttcgtatgaagagaatatgtaaaatatcttactttttattggctacatgttaaagtgatacaatcatagctatgttgtgttaaagtaaaaaaaaaaaaatatatatatatatatatttaaaaagcagggcacagcgattggactatgagccccacctttccccgcccccgtgaatctgagcccgccccccggcggctgcagggaggacccggaggtggctcagcctccgcggactccgggaaggcggtgcccaccgccccgcccccactacccgccgctccctccccgccccttccgctcccggagcgcgtgcgccctcttactcggctccccttggtttcctggggtcctgccccttcaagctggggcgggagcggaggaccccgctctcaggggttgccggaccatgcgttgggggctgcgccctcgcgggccgggcgcggccgccctggccactgcccgaagtttgtgggggacgccccgccttccctgcagcccggga

SEQ ID NO: 3966 - DNA, 2300 bp, Homo sapien
cgctcccggagcgcgtgcgccctcttactcggctccccttggtttcctggggtcctgccccttcaagctggggcgggagcggaggaccccgctctcaggggttgccggaccatgcgttgggggctgcgccctcgcgggccgggcgcggccgccctggccactgcccgaagtttgtgggggacgccccgccttccctgcagcccgggatggcaaggggcgacgaagaggcttctggtgcggtcggtctccggggccagtaaccaccagccgaactcgaatagtggcagataccgggacacggtgctgctgccgcagacgagcttccccatgaagctgctgggccgccagcagccggacacggagctggagatccagcaggtacgggccccgcctcggcgcggggcctccagagaggcccgatccggccgcgggcaccgggcgctcgcaggcgccacacctctaggctccacgccggtgcgggtgggcgggggtgtgaccagattggtggaattcgtctgcttcgcacagattttgtgggctgaaaacctaagtgaagaaatctctagatgagcccctcctttgtaccaggttctggagcgggacattaaggggtcactagcgatgcccagttaccagcatgtatcgcacgtatgtcccatgtctaccgtaggcaaaacagatagactttgggcacttttccaatgccttgtaaaaagtaaattcacatgtccacatgtaaataaaaacccaggctgggcgcagtggctcacgcctgtaatcccagaactttgaaaggccaaggcgggagaatcgcttgagccaagagttcgagaccatattggctagtcacccccacccccccgtccttaaaaaaaaccttaaaaacctcaattatgatgaatgaaggggaagttgaagcccacttcttggatcttttagatccctagttggaattatgactcgtttgaagtcgcccaggctggagtgcaatggcgcgatctcagctcactacaacttccgcctcccaggctcaggcaattctcctgccttagcctccccagttgctgggattacaggtgcgcaccaccacgcccggctaatttttatatttttagtagagatggagtttcaccatgttggccagggtggtctctaactcctgacctcaagtgatcttcccgcctcggcctcccaaagtgctgggattacaggcctgagccactacgcccagcctagtctgaactttctaagagcagagattcctctttagcttctgtaattctagtctttaaaaatccctgatattcttggaatattggttaagtaaatatacttagcctaaatattctgacagttataagagttcatctaattttttaaaggttttttagtcaataccttctgtatgccagaaagagtgacagtttcaaatgtttcctcgtttaatcttcacaccagccctgtaagatggatattaacacttttttttttcagataagaaagcaggcccgtaagtgcacagtaacctggacaaaatcatacagcaagtgagggaagggaagtgacttagactgccatgcatgttgttcccagatttggggaatggcaagcattgccgccaaagaatagcaagaatatgtgtgtcgggaatctgcaggtccttcaacatgtcgggggtgaggagtgaagcatggggagtgatgaaagaatgcccgagaacttagtggcactaaacctttgtagggtgctgcatatcatataaagagtttagacttcaatctgaggtgtatggggacattactgaaagattttaagagatgcgtactttgacacgcatttcagaaacctcaccttgtatttcagagttgagtagattggaatggaatagattggaatgtaattggaatggaaataagcaagtgttggctgttatttatggttagactcaggagtatgtatttatatgatgtttagatatcttttttttttttaaaacagaaatgtggattttcagaactttattcatggcaaagagaaagaaaagtaaagacagaattttgccttcatgatggacctccttatgcaaacggtgaccctcatgttggacatgctttaaataaggtaactataatttaggttatgacacttgaaagaaagtgtttatgtaaatactctttataaatgtgtattctaattatatgataattatgtaaatttagatttgcacataaaactaaaacattttcatagaaagcaatatacaattttagtactgcataaaaaaaattgctgctatttgc

SEQ ID NO: 3967 - DNA, 2300 bp, Homo sapien
tctcttgacttccctctaaaatggtaccacccccagcccctaaatgtcattttctaaccctataatttgcttttttctccatagtgtgtgatatgttggtatatattctgtgttcctccatgagaaaaaagaccttgtcgtttttgtttactactatattctaggttcctagaaaaattcttgacatacagtaggcattcagatatttatccctcaaacaaagcaatgcatgaatattagaaaaatgaaaggaacagagataaatgactcttaaaagtatggaggaactttttttggggagaaggagggtggtgtttgatactgaggagttagtaaaatattcctatgatattgctactattcttttcactagaggcttcatatattatattttattattacatttaagaatccttattaggtacactgttaattattagttccagtgattgatttcatcctgttcatatgactgaaagcaacactattcagtagaaatacaatgcaagcggctgggcgtggtgggtctggcctgtaatcccagcactttgggaggctgaggcgggcagatcatcaggtcaggagttcgagaccagcctgaccaacatggtaaaaccccctctctactgaaaatacaaaaaaattagctgggcatggtggcatgtgcctgtaatccagctacttaggaggctgaggcaggagaatcacttgaacctgggaggcagaggttgcagtgagccgagattgtaccactgttctccagcttgggcgacagagcgagactccgtctcaaaaaaaaaaaaaaaaaaaagaaataaatataatgcaagctataaatttgtgccacataggtaagttaaaatttttctagtggccccagaaaataatgaaaagaaacaagtgaaattaattttaatattacatttaactcaacatatctaaagtatcatttcaacatacagtcgatgtaaaacatttttgagatatatcacattttcgtaaaacatgtttgaaatcaggtatatattttataatttacattacatctgaattcggactagcaccaaaaatcacatgtggccagtggctactatataagataccattgtttagagcatatatgcatccatgtattcatgtatttgataaatatttatagactagtgccagaaaccattcgaaaggctggaattcataggtgaagaggacagatgggctctctgatttcatggagtttatgttttacagggaagagacaaaaaaataagtaaacaatttccaaagagttaagtagaaaggaggttatttatatgatgattgatttaaataatatacccagagtaaagtgaaccaatcttaagtatgtatagctagatgaattttttttaatgtgacaaccactcagatcacaaggctccttcctgttcattagtaaacagtttgaaattagagtttttaaaggggggaagggatgggaggagaatataataatatcttttctacttttgataggcatggaaaggaggaaattgttttctggactactgggctagtggtcagagcactgtttcctcttgggaagaaggaaattgagcttggagccaaatctatcctttgcctttgattcctccattcaactatagtaatatattttttaaaaggctctgctgccctctggtatctaaaatgaatttaaaaaggtaaattggttctagaactatacctaatgaagaggtctactgttttagtaagggtttgtcaatgacagagttaaccacaatattccattctctgagtacactgtaagttctgcaatggtttgatgatatttcttagctcaatataaataatattagactatttgtgtcaatagtttttttatgagttaatttatacgtttcctttcaaattgcagttttaaaaatggtattaagtttaaaaaaaagaacataaattgtaggccaaatattttatgtatgaatgctaattatcattttatctttgcagattttgaaatacatggccaaatattttatgtatgaatgataattatcattttatctttgcagattttgaaagacatagccaatcgattccatatgatgaatggctccaaaatacattttgtgcccggctgggattgtcatgggttgcccattgaaataaaagtattatcagaacttggtagagaagctcagaatctttcagctatggaaattagaaagaaaggtaaataatctgtatttctgttttaaaatgatatttgtaaacactcaggtccttgaaatagtcagaacttt

SEQ ID NO: 3968 - DNA, 2300 bp, Homo sapien
atttgtgtcaatagtttttttatgagttaatttatacgtttcctttcaaattgcagttttaaaaatggtattaagtttaaaaaaaagaacataaattgtaggccaaatattttatgtatgaatgctaattatcattttatctttgcagattttgaaatacatggccaaatattttatgtatgaatgataattatcattttatctttgcagattttgaaagacatagccaatcgattccatatgatgaatggctccaaaatacattttgtgcccggctgggattgtcatgggttgcccattgaaataaaagtattatcagaacttggtagagaagctcagaatctttcagctatggaaattagaaagaaaggtaaataatctgtatttctgttttaaaatgatatttgtaaacactcaggtccttgaaatagtcagaactttaccaaaggaaccttttgtttgggtttcgtttgcttataataagatctattggaaacgcctttctgtcacagaaaattcagattttatttcattgatttttgtaagaacttatgtttggatattgaaggaaagactttgtgagcatttctgattgcattctcagtttcttaatgttcatattttaaaaaactattttttggtaaattcttttttctgctttcctcaagggggcttgttgactgattttaggtgttaagccaaaattcaattctaaaatacatatattttacattaatcttttatttgatcctttttcttcagtcgactgggccaagggaggattctctttttcttatatgttatactattgtacatttggatgtaactgtgaagatttttttacttccttgtgaaacctattatcattggcttagatttgatattctgattaattttttgtgtataatgaaatgaaaattgttatctgaccttttcttaaattaagaaacaataaggaataatttttccagtttatttgtcctaaatatgaggtcattgtataaagtctggaaaatacagaagacagtaataaaattttaacttttgcaattccagttaattttagaatttgttgtaggtatcttctgaacactgttgaccttcaaattatttttctattaaaaaatttttataggctgggcacagtggctcatgcctgtaatcctagcactttgggaggctgagggaggtggatcgatcacctaaggtcaggagtttgagaccagcctggccaacatggcaaaaccccgtatctactaaaaataccaaataattagccaggtatggtggctcacgcctgtagtcccagatacttgggaggctgaggcacgagaattgcttgaacctgtgtggcagaggttacagtgagctgagatccgccactgcatgccaacctgggcaacagagcaagactccatctcaaaaaaaaaaaattttgtgctcgggcgccgtggctcacgcctgtaatcccagcactttgggaggctgaggcgggtagatcacgaggtcaggagatccagaccatcctggctgacacagtgaaaccccgtctctactaaaactacaaaaaaattagccgggcgtggtggcgggcgcctgtagtcccagctactcaggaggctgaggcaggagaatggcgtgaacccgggaggcagaggcttgcagtgagccgagatcatgccactcgcgccactgcactctagcctgggtgacagcgagactgtgtctcaaaaaaaatttgcattctaaactgtctgtagcatttgcatttagagagatacatgctaaaccatgtttaagaattcgaattcattggttttttaaaatctttttttcgtcttttttttagctagatcatttgctaaagcagccattgagaaacagaaatcagcatttattcgttggggaataatggcagattggaataattgctactatacatttgatgggaagtatgaagccaaacagttgagaactttttaccaaatgtatgataaggtaaagaagtattttttctctttgagtaggttttagtatgcgttacaagattctacttttaacatcatatttttgtcttttatagggcttggtttatcgatcttacaaacctgtgttttggtctccgtcatctaggtatatatgcatttttcggtaattaaaagggagaaatttgtgaggcttccaagtatttatgtttaatatttttaacccttaggactgcattggctgaagcagaacttgaatataatcctgagcatgtcagtcgttcaatatatgtaaaatttcctctcttaaagcct

SEQ ID NO: 3969 - DNA, 2300 bp, Homo sapien
tttttatttttaatagagacagggtttcaccatgttggccaggctggtctcaaactcccagccccaagtgatccacctgcctaggcctcccaaagtgttgggattataggtgtgagccaccgtacccagccaccttctttaggtcttaaatgtctctctgtgaatcctcttttttttttttttttttttttttttattggagggactggttctttatttcaaaaagacacttgtcaatattcagtatcaaagcaggtggactattgatttctgtttctcccaatcggccccaaagagactatatcaaaggacagtacgttttaagccagtatgctgcaggatgtacacctgacagactttacagaaaccttatcggaaagtggggattgggtagggaaagaaactttaaaagatcagcaaactgccagcccggccaggcacggtggctcacccctgtaatcccagcgctttgggaggctgaagcggacatatcacgaggtcaggagttcgagacctgcctggccaacatggtgaaaccctgtgtctactaaaaatacaaaaaattagccaggtgtggtggtaggtgcctgtaatcccagctactctggagggtgaggcaggagaatcacttgaacctgggaggcagaggttgcagtgagctgagactgcaccactgcactccatcctgggcaacagagcgagagtccatctcaaaaaaaaaaaaaaaatctgccagctcacagactgtagagggctgtcacagtcaaactgggtggccagggtgccacccaaagaagcaaagtttcaaaataatacaaaaatttaaaaaagttttgtacataagctatttaagatttctctagcattaactgatattaagcacaatgagatggcacttttagagacagcagcttcaaacccagaaaagggtaatgagatgagtttcacatggctgaatcagtggcaaaaacataatcttctttctatcctcctctaagaacaccagtgctccctaatgcagtgtgacctcatctaaacttgattacatctgcagaggcctgattcccaagtaaggtcacattcactagtgctgggggttagatcttcttggggacacagttcaacccactacacctggtttcctccagattacctggagaccattttaagattcatggcatgaaagattatggatctaaacttcaaatgtagaattctagatataatctgttcatcttttctttgacgtgaaaagaggtagaagtggcataatttggagtctgattaagattttacagtccgtgcttttttttgccaggagaatcccagagcacgcctttgatacctggaaggtgactactcttttttattttatttttttttgtgagacagagtctcgctttgttgcccaggctggagtgcagtggcacaatctcggttcactacagcctccgctttagcttaggttcaaatgattctcccacctcagcctcccaagtagctgggattacaggctcacaccactgtgccctgctaatttttttgtatttttaatagagatggggtttcaccatgcaggccaggctggtcttgaattcctgacctcaagtgatcctctcgtctctgcctcccaaactgttgggattacaggcgtgagcaaccacgcccagccaagttgactactcttttattttttgagacggagtctcgctctgtcacccaggctggagtgcagtggcacgatctcggctcactgcaacctctgcctcccaggttcaagcgattctcctgcctcagcctcctgagtagctgggattatgggcacacaccaccatgcccggctgatttttgcatttttagtagagacgaggtttcaccatgttggtcaggctggtctcgaactcctgacctcgtgatttgcctgcctcagcctcgcaaagtgctgggattacaggtgtgagccactgtggctggcaaggtgactactcttattgccacctgttgctgcagatttagtattttctggaagtttagagcatttttaggattttcacagtactttttaattatgtctaatttggtgtttttttttttaaagttataaagatgcttcagactgcaaagaatttgttgaaagaggagaaattggtgcatagctatccgtatgactggaggaccaagaaacctgtggttattcgtgccagcaagcagtggtttataaacatcacggatattaagactgcagccaaggtataaaaagcatcctgttttaacaggtcgggcatatcattccctcagta

SEQ ID NO: 3970 - DNA, 2300 bp, Homo sapien
agggaagggtgggtactgtattcatctagcagggcctatagattctgcctgccatgcacaaatgcaataattaaggtataactaagtttttggcagcttttgttattgacatgacaataacctctgcttttcgtttatgcctatatagtataggcatattcaaactcttcttattggtaaatagctttatctttgtttctgttttgatttggctattctgttaagtagcagttgccttctagttgttttattctcagcctggatttttgtcatttatgtcatatttggcatgacatgaagttgattgtatattacttaacaacgcaacttgagatttaatatatgtacactaaaacatcttaaatatagagcttccctttgaaatttggggtagtgaaagtttgggcataaatataagatttaaaaaacaaaatcactgccttataattactagaactgttcaatatctttctcctaggctttggaaagcattttggcaagtgaacgtttaccattttcttgccttagaaacatcactcagactttaatggacactttaaaaagtcaaggtaatagggtttgtactgattggaggttatgttcttaactcaaattttgtaactctgattatagaaagctattgactttgtgataccatcatgttactttaatgtggaagtaatatagatataagaaattaagaatcttatttattccctatttaatatatgtagttgatcttcatctaagctgtctttgaatgtattgactgttattgggaagttgtttttaattgtgaggaaagatgtcaggatagaatgataagtggttattctgatatagctttgtattaatgttctatcagtgtatcagtttccctcgtgaacagagttaaggacttccagaatcacaatcaacaatcagattattatttctgaattttctggtcattttttgatattcaaaatttgtctgtactatcacattgttctttaaaatccatcagtccgtcaaaatgtatttgtctgaaaaaggattacacttgaaacttgaaactgtggggttgtaacaccatattccatccaactgaactagtaaaaattcactttattctgaattcctaacatcagttaaattgtgtgcagtggactgatgtcatctagttgtgacttttgtttgtcatattaattatgtaaaaccagctttgtgttttagttgtgtgtaagacagcttaaagtggcttaatacacaaattataatttgttctttcaggacttcaaacatgctaattttgagactctttttcaaccttttttttttaacagatacataaaactgacattggcaaatagtgaactcctttagcatacaccacttgtcagaaataaatccctcttttaaaaagcgtggtatacttacaaagccctcccacccctcaaggcattcacaacatcccaaaatttattaaatgaaaagttatcttccactggcctggtagtaaaccaaacaccattgttggaattccataaaatcatcagtttcaagttctacataaacataagattcctaaaaactttaatcattttgtgtggtcagttttattatggctataagaacttgaacaatattccatgatactgtatttcaaataagattttgaggggattatcagtgtctccctttttaaagaataaatatttcttttatattagatataaatattcatacagtatatgaattatgtagtcagggaaaatattttcaaaggtatttccagataatttctttaaattttaagtattagatgaagatatttccgcttccttttttatctccctacttttagagcatcttattttatttaaaaagttagacattttgtcatgacagaaaaattatttttgctttcaaaacctggtatagcttaagcatctcagtatttaatacatcagagcatcagggaattacataatattgagagatttaatgaaagcaaagcctgtttatgagtctgttaaatatatctcttatatatacttttccttctgccttttagaacttgagtctgttgatgaaggattgctacagttttgtgccaataaactaaaactgctgcaactctatgagtctgtcagtcaattaaattcccttgattttcatttagacacaccattctctgataatgtgagtaatcccacattttatattatataaaataatctctttgattagttttactttttaaaattagtagtaaagaagtagaaaattaagaattttttttaaagctttaaaggtat

SEQ ID NO: 3971 - DNA, 2300 bp, Homo sapien
gcagaaaccatggtagcagaactccagaggcatccccccctgttgcattacaacttcctgggggaagagttcagttcatgaatgtgttgtaatttctgtgaagggtatctaaagtccttaaaaacatccatgaatgatccttttcaacagtacttggaaggaagtcagggacttcaccattaaaactgagccaacacagtaatgaaattcaatgaccaccacaggagacatatgaatgcctcagggaagaacaaaggccagcaaaatcagccaacagcagttacttccacaaaatgcatttacctgaataggaacttgaatggttttcaaggaatgacagtctccttccagaaagtgtcatgtgtttgttattcgtccagtaacactaagaatctaaatttaaattttggtttagtttgggattggtgctggattttagggaataatcttatcagggctggattattctagttagtgatgatctgaggaaacactgcatttcttcagatggaagaagggagcactggcagcttgctttttctgaaagctttgattacagaagtataggtccctgatgcttaaagggaccttacagcacatctgattcaactgccttttataggtgaagaactgattcctgttaacctgataacatagaaattgcctatcctattttgtgaaaatcatcctactctagaagtaggaaataatggagtaggaacctgggcactaaattatagttgttatattattaggactaagtgtgtatgtccacgggcctgacagaaatgaatgctctggaccccatccacttgcctttcatttgttcctgtgcccttttttcatacaaagtggatggcctctttaggtttcctttaggaaatgtgtaagtgcctacaggcctttgtgctcacattaaaataattttttttgtttttattttttggaaaaataacttaaagtctgctcagagacagctcaatttctttattttaaaaatgggataagacacactatttttagatggcatttgtgactatccaaatgaacaatgtaaagtactttcaaaaatagtgctttgtcaaagaaacaagttattctatttactttatgtatgcattccatttatttcttcagcaaatatttatgaagcacttactagcatgatcacaatttcagttaaatagttaagtacagtagtcccccctttatccatgggttcattttccacataattattcaatttaattattagttattgttaatctttcactgtgcctaatttataaatttaactttatcatatatatgtataggtaaaaacataatacacatacataggtttcagtactatccatggtttgagtcatccactggggatcttaaaacatatccccttggattaaagggaaatactgtaattaattgcttactgcctgtatcagtcactagaattccagctttctgggaaaaggtacttcttctcttttgttctctaatgctcagcaccctgcgtggctggcatttaaaagactaacaaatatttgttgaatggatggatgaatgcatgaatgaaaaaccaaatgaataatgaaaacaaaagtgtataatacactataacacgtactatattgggcttgcgtagtactatgggaatctatagtaggagcatttaaagccagccttgacggggctaatctccggaagagcaattaatcttttcaaaatccgactcttgcaggatacggtcccccactggcctgccactagtttaaaacgaattagtttctgtgaaacatcaggatcgtgccaatagtaggggaccaataagactgaataagtcaaagggctgcgcggacaagtccaattagaacacctctggctaaaagccagaatgaatgaaagggttcatgcctcggcgtagacacacaactgggactgaaaaatctgccccaagcctccacgtcgactttggctccacctgcagcggcggcgccgtagtcacgtgacccgggcccccgcgccctaggcgcctgggccagcctgcgcctgcgcagtactcggagacagcggacccgtgtcagtgacagcttccggtttggtttctccgccttctgcttggctagagctattggggctcggtggcggccgcagtggggtggagggggcagggcgtggtgaggtaaggtgagtgccgtagtggggttccctggagccatggcctgctccattgtccagttctgctacttccaggacctccaggccgcccgggacttcctctttcctcacctgcgggagga

SEQ ID NO: 3972 - DNA, 2300 bp, Homo sapien
cagaatctggggctctcctttaagctctgtctcgaattagccattatatcttatggggtgaacctatggtttttgtgactggtgcaagattgaacagcaccacatatttcagttatcttcttctgtatcttattaacctggtgcatctgtgatcttgaacaagttaacttagtggaattttgtaaaatggaaataaatatgcctgtcagggtcaccacgattataaagatagaaaaatatgtgagtatactttaaagagcaaaatacatactaccagctgaaggaatgattcatattccaatggggctgaacgccttttcacagctacttgtttattgctaggttaactcaggtactattgcaacactaggtacccttgtgtggctgcagcagtcagtgatgccgctgacactgtgatggcagcccctacaggcagccgtcgcaatagttaaccagaaaataaccagaaaaatacaggattatgcccttgcaacttcaatgtatcttggtgattcaggattttctgcagagggcacgtaaatgcttgacattctcagtaacacatcatagttcaggaggcagcattgcagttccgctgcctaaattctgtttgagaagtggtgatgaccaccaaagggatcttgttttttttttttttttcatttgctttgtgaaattggtaagtggttacaagagaaaatgctaaagaaataagtacacagatggtgttctagaagtgaatatagactgggtgagaattgcttctttcctcaaaggatttttgtgtttgctattttcaggtcttttggacccatgcttcaagggtcaagtgttaacttttcagaaacaacctttaatgagtcaggataaaaaccatctggttcagggattcttctttcaaatggaggaaattcagaagagacgagaaatttcccaccattataagaattccactggaggcatactgaagcagctcagaaaatcaatgtatccgctcctatctttcattccttttgtcttcctgcccatccatgaaaggaagtgaaaaagaaatgttgcaaagaagaatagagagacgataaggttttcgttctacaggctgaatgtgcaaaatgtaagctctcaaatgagattaaaaaaaaatgcagccttgcttataaaaggcgaatgggtcctggacaatgcactacagacgcgggtgcctacaggatgtcttgaggcaggtgggtggaagtgtgaggaagccacctggaagagggaggacagggcccaaatcagacacagctctccatcctccctaaacaggctcgcctaagtgacacttccttgtgtcccaggaagtgacgatcagccagtgtagatgttgtgactcgcgggtctcacccactccgagggtgctgcagggcgcccagagcgagacgtcttccgccggccccattcccgaagaggccgcgccgtcgggggctgagacccacttgtactgagtctccagccgcctccctaggctgctggcgcttctaggggcttctgtgctttttgccaaactctgagggtgaccctgaacctaacggctccctagagaaggagactgacagagggctcaggcgaggatagggattgagaaagcgtggaaacgggggaggaggagtagaatttaagaatggtaaaagtcccgaggtaggagaaaaggaggggtaggatccagggtaggattgaatccaattcttctccaatgaaacggacaaacaaacaaacaaacaaacaaaaacagaaagaaagaaaaagaaaaaaaaaagccactgattcacatcagctctctctcaccctcaacccggcaaaaaccaaacacgaataaaaataaaaccaccagaggctcttagacgaccgtaaactctgcgggtggggcacgaaacaaaaataaacacagggacaggcgggcaagagagcgcgggaggaggaggaggagaaaaaggaggaggaggaggaggaggaggcggccccgcatccctaatgagggaatgaatggagaggccccctcggctggcgcccgcccacccggcggcggccgccaagtgcctctgggcgctgcgtgccgcgcccgctgctccgcgcgcagccggctcgggccgctcctcctgactgaggcgcggcggcggcggtggctgtgaccgcgcggaccgagccgagacattcgcgccgggggatcgggcgccgccgccgctgggccccgggcgcgtggatgcggctgggtcgggcggcgccgtacacctgaggcggagaacggggcgcggcgcgggtga

SEQ ID NO: 3973 - DNA, 2300 bp, Homo sapien
aagtaaaatgaaaaggaggaaaattttaacatttgtgtttcaagtcgcttcttgtcattttgtttttatataaattagtaaatgtgtttttattgttctttaatgttattctacaaatctacctaaaaaccttactgaatctttcattaaaatgtctgatcagtcagaagagatgactttaaagagtcaaacccctaaggaaggtggtttctgggtaaaaatcatatgaaggagcatttagtttcattttcagtgtttttcttctgtagcttttcataaggaatggttaaataattgtaagttttactgtgtatagtgtattcacaccacagacacacacagatcatttgagttcatctacttaaaattcttttagaaaccaagtcacagcgaagttaatgtcacagtctaagttaacatagcttgtttgtacagagttgggactgagaaaatatcttgtttcaatgcattgccagaatcctgtagcattttgtaagcagattaatttcttcaaataaatattttaattggctctctgcttgcttgtttttttttaacagaaatatatctacctgttttctttaacagttatttcgagaagtacgaataatgaagatactgaatcatcctaatataggtatgaaatatatatatattatatatatatatatatataattagcgatgaagtgttttccttaatttgagggtatttgaaaagacacaatgtttaaggatagtttatttaagcagaagaaaagtgataacctgagtgataaccccaggaagtgatactttgggtaaaaatagattacaaagaagctaactggaggctacagattgctgttttctgctaccttgctatcttctgctctccactaaaataattgatatcattcagaattaatgcatacaattttttttaatttcctaattaaatgtttctaaatttaaaaaaaaatgtctttctggccgggcgtggtggcttatgcctgtaatcccagcactttgggaggctgaggcaggtggattgcccgagttcaggagtttgagaccaccctgggcaacacggcaaaaaaatacaaaaattagccaggagtgatggtgcgcacctgtaggcccagctactcaggaggatgaggtgggaggattgcttgagcctgggaggtggaggttgcagcgagccaagatcgcaccactgcactccagcctagacaacagagtgagaccctgtctcaaaaaaaagtctctaaatagatattgcaggtcatttaggtatctataaaaaaaaaatggctttcagatattttgatactatgcacttgggtttgatcataggtttacaggcaaaataactttgcgttttaaagaaaataaaaagttgatttcaattttagtaaaatttttcagtaagttctgatttctccccctttgcaaataaacgtattgattagatatattattatatgaaatcatttgattgtgacaagtaaaattctttttaaaatctgttttttaaaacacttttttttgcacatttaaaaatcttatctgtatatagttgttaaagtatttatttgtggtgaatatttgaactacataaatttgataatttggtaatttttctaaccagaaactttcataatatcacagaaatacagaaattcttttgtttctgtaccaaagattatttagcattttttgatgtctcactgtaatgtaacatagtctctttttaaacttcagtttaaattctgtttttctgattttaagagttccttttattaccttattctaatttgaaaaagtaatgaccttttaatcctagaaacttaactttttcaactcaagaagttggttctaaatcactttgtggtaagtagttttctgtcataggagtaataatctttgagagactttttgaacttaaaattgtgattaataatgtttagcaagtagtcaaattttctactagtttagtgttaccttagattttcttaaagcatattcaatctgtgctaacagttatagagttatatctctaattttttttcagtaaaattgtttgaagttattgaaacagagaagactctctatttagtcatggaatacgcgagtgggggtaagaatgagggtgattgaaaagttctctttgctgagacatacagaaatgttaacacctaagagttcattatgacatttatgtcttcagtgttaatgaatctattgttttatctaaatgcctttaaattacatcttaaggaaaattcagtgtttacttttaagacctttcgatcttac

SEQ ID NO: 3974 - DNA, 2300 bp, Homo sapien
atttgtattagtccgttcttgcactgctataaagaaatacctgagactcagtaatttataaagaaaagagggttaatttgctcacagttctgctggctatacaggaagcatgatggcttctgcttctggggaggcctcaggaaacttacaatcatggcagaaagtaaaggggaaacacgcaaacatggccaaagaaggaagatgagagagagaagggggaggtgcacaccacccacttttaaacgaccagatctcgcgataactcactcactattactaggatagcactgaggggatggtgctaagtcattcatgaagggccaccctcatgatccaatcacctcccaccaggccccacctccaacagtggggattacaattcaacatgaaatttggtggggacatagaaccaaactatatcaccatttgataagcagcctagggttctttgaggtcggttttgtacaaaaaaaaaagggactacaagggtctctgtttgtttataaagtaatagttgctttagcaaaattacaaatctacaaatctactttctcttaaccttttaaattcaaattacatactgttttaaactatttactcacccgataaaattttacaattactgtaaggaggcacttttactgtttagttaattctcctaaacatttcaagcaacttttacaaatttaatatttgactttcttttcaagtacttcaattctataacaaaactctaagtaattcttataaatatagtaagttaaattcattttcatacccatttcacctgaaattgaattgtacataaattttatatactattttacatataaagactctatgtttttaagattaaatataagtcattacttattaccttattacataagttaaataaaagcgtaaatcaattagctgattacttttttttttttttttgagacagagtctcactctgttgcccaggctggagtgccgtggcacgatctccgctcactgcaacctctgcctcttgggtttaagcgattctcctcctcagcctgccgaatagctgagactacaggagcacgccaccatgcctggctaatttttgtatttttagtagagacagggtttcactatattggccaggctggtctcgaactcctgacctcaggtgatccaccgccttggtctcccaaagtgttgggattacaggtgtgagtcaccgcaccgagccacacattttcacttttttagaaatggggcctacgttgctcagaactcctagcctcaagggatcctcccaccacagcctgtggagttgctgggattacaggtgaaagtcaccatgctggctcacattttaagttggaatcacaaaactaatttcttttgcatcctagtgaactaaattgtcgtaaacattgtatgtgcttataccaacatatacacgttattcttaaatttaatcacaaactttaatgttaaaatatcagtgtatctaacaatctatgttattttatacctaagtatttttttgagatgggatctcactctgtcgacccctttggagcgcagtggcacaatcatagctcactgcaatctccaccttccaggatcaagcgatctccctacctcactgggactacaggtaaacttttgtatttgtttttctatttctagagatgaggtctccctgtgttgcccaggctagtctcaaactcccaggcccaagcgatcctcctgaatagctgggatcacaggtgtgcgcccctacgcctggctaatttttttttttttttctagagatggaggtctcactatgttgcccaggctgttccccaactcctgggctgaagctatcctcccggcctctcaaagtgctgggattacaggcgtgagccactgctttcggcccttaattctacattagccagaattcaaaggcatttacccacttaagaaaatagggcactctcagcttgttgagattcacagtacactgataatgcttatctcacagagagatattcctgaaaatcatgattttaaagactgcgccatatgctggcatgtctgcaccagaatttcctttgcgcctccctgttggtttgctccactttttcactgagtcagaccgttgaacaccgtggacacactgtcttgcgtttccgaatatttcctagaatacggacgtttcctaagactcacgataaagattttctgatcgtctctccaaaaccttgccaccaatttgcactcccacgaatcctgttaccgtgactatctcgccatgccctccctagcactgagcgtga

SEQ ID NO: 3975 - DNA, 2300 bp, Homo sapien
taatagttgctttagcaaaattacaaatctacaaatctactttctcttaaccttttaaattcaaattacatactgttttaaactatttactcacccgataaaattttacaattactgtaaggaggcacttttactgtttagttaattctcctaaacatttcaagcaacttttacaaatttaatatttgactttcttttcaagtacttcaattctataacaaaactctaagtaattcttataaatatagtaagttaaattcattttcatacccatttcacctgaaattgaattgtacataaattttatatactattttacatataaagactctatgtttttaagattaaatataagtcattacttattaccttattacataagttaaataaaagcgtaaatcaattagctgattacttttttttttttttttgagacagagtctcactctgttgcccaggctggagtgccgtggcacgatctccgctcactgcaacctctgcctcttgggtttaagcgattctcctcctcagcctgccgaatagctgagactacaggagcacgccaccatgcctggctaatttttgtatttttagtagagacagggtttcactatattggccaggctggtctcgaactcctgacctcaggtgatccaccgccttggtctcccaaagtgttgggattacaggtgtgagtcaccgcaccgagccacacattttcacttttttagaaatggggcctacgttgctcagaactcctagcctcaagggatcctcccaccacagcctgtggagttgctgggattacaggtgaaagtcaccatgctggctcacattttaagttggaatcacaaaactaatttcttttgcatcctagtgaactaaattgtcgtaaacattgtatgtgcttataccaacatatacacgttattcttaaatttaatcacaaactttaatgttaaaatatcagtgtatctaacaatctatgttattttatacctaagtatttttttgagatgggatctcactctgtcgacccctttggagcgcagtggcacaatcatagctcactgcaatctccaccttccaggatcaagcgatctccctacctcactgggactacaggtaaacttttgtatttgtttttctatttctagagatgaggtctccctgtgttgcccaggctagtctcaaactcccaggcccaagcgatcctcctgaatagctgggatcacaggtgtgcgcccctacgcctggctaatttttttttttttttctagagatggaggtctcactatgttgcccaggctgttccccaactcctgggctgaagctatcctcccggcctctcaaagtgctgggattacaggcgtgagccactgctttcggcccttaattctacattagccagaattcaaaggcatttacccacttaagaaaatagggcactctcagcttgttgagattcacagtacactgataatgcttatctcacagagagatattcctgaaaatcatgattttaaagactgcgccatatgctggcatgtctgcaccagaatttcctttgcgcctccctgttggtttgctccactttttcactgagtcagaccgttgaacaccgtggacacactgtcttgcgtttccgaatatttcctagaatacggacgtttcctaagactcacgataaagattttctgatcgtctctccaaaaccttgccaccaatttgcactcccacgaatcctgttaccgtgactatctcgccatgccctccctagcactgagcgtgatctctagtatcattttccatcgttgctaatttgaacatgagcagatggagtcctattatttggggtcattaatttcgtagcaagtgcagttgaaggtgttttgcatgttcattgtgcagtgcgcgccgtagtctgcacagtttggccggcaggtgggatgaagggcggggctggcggagcgcgcccgccgcctggtaggccagttcggagcggagccaacgctatcccgggccccacggccagggggcgctgcggcccccccaatcccccgccccgtccgggctggggcggaggagcgggcggggaccaaaggttggtgtctttgcgctcggaccttcgccagaggggccgggacatcatgacggtgggagccaggctccgaagcaaggcggagagcagcctcctgcgccgcgggccccgagggcgagggcgaaccgagggggacgaggaggcggccgccatcctggagcacctggagtacgcggacgaggcggaggcggcggccgag

SEQ ID NO: 3976 - DNA, 2300 bp, Homo sapien
ctgaactagggcatttgcaactcatctaaccatctttggtgttactctttctcagagcagccagaatggccttcctagcacccaagtctaatcatgccagactgttgttcagaattctgaggtgtctccacattaagtagagataagatgcctgttgatctgacctctgcccacctgtcctgcctcaactcccgccacctgctgcatgcacaggtacatcctaatacagctggattgctggtggttgcccaaacatgccacactctcttgttccttccattttttcaggctattgcacgtgctgctccttttgcccagaatcctctcctttacccatctccaagcccctcctcatgttcaagtctcagctccaaagctccgccctctgaaaacagcactgtcctgagattcagctgctcttttgcctctgcatcctctgcatcttgaccttgcttctcctctgacattatcctctagacttgcaggggaggtgtcagtcttctggggagtcagtgaactggatggaagggcagcttcttctaaactttaaatccccagtgccaatctaggacgaagcctggtgaatgatcaatatctatgtggtgaaagaaagagatgattaatcaataagacatttgccctgtctgggagctcacgtatagcgaggcgatggctttgtaagcccctcactctgacagcaggcttgtgggcagggaggactctgaccctcctcaggagttgggagaggcaaagggggtcagctacaagtgtacacacatcacattcaccacaccatgcttaaaaaacaaatccataagtcgcagctgccaagcatgatgtaaatgtatggggattgagggactaattctgctggcctgaggttttttcctgggtggggagagattcaggccctgttttgtctttcacttttcacaaggaacagccaaagggaacctggctcctctggttctccatccttcccggagtctcttcccacactccagaacgggcccctttctctggaggtggccagcccagatttggggggtggcccactggttggcctccttaaactttcctagaactgtgccacagtttaagggacaaacttttgaaaaacagaacaacaacaaaaaacttgaaagacttcaaaccttaatttgtctgagaaaatccactgttaacccaatagcttgcttgaatggaggtgttaaagatcaacaaagccagacattagttaaaccatgaaaacagattttactcagtaactacttacagtaggagaaaaagctgatcattctcatttgtgcatagcagaatgggcgttttaaagggtgaaggagagaatagggccgggaagctagcaggggatcaagtgaaaaatcatgaaggggcggtcagtattaatgacgggcagctgtgcctggagctggccgttatgaagctgggattctatcctcccacagagactgggggacagaggcctatcctccccatgactgcatttcagagcaatggctttcaggtccttgagaaagacacttctgaggtgtaggcgatacatatacatctcaaagcaacagagaaaggattcacagttgtaagcccttttaagaaaatatcctaaaaaagggaggtcaggggctttaccatcgggtgttggctagaataaacggggaattctcctggctgccttgagctttctcgggaagacattttactggggtcgaggttaggcggcagcggagggtgggggaccttgagtcatgctcctataagccacgctagagttcctcgtctttgagtgcagaggtttagactgtgtctttgtgtgcagaaagtcctgcagttctcacagcgacctgccagaaaaagtcgttcccaaatgtttgtaaatcctccgttgggcaacccgccttcacgttctgcggtgatcttgtcgagcgactaagcgtgcagtattagcagagaagggggtggcagagtgctggcgctgaaggtcatgttgcatgggtaactgtcgtgttgtaggggcggggaagagggaggagacactgaccaccccagaggccgccccattagctcgcttgctttgggcggcgtcgctcccacggcgcccagggtacccccgccgctgtctgcctgtcttcctccattaccgcgcaggcttggtcaccgcattaaggcattcccgctctccgcggaactgctctgccgtctcggcggtgaaagtgtgagagggtccgtagttgggtcaactttgactcctctcgcctgcccggatccttaagggcctcctc

SEQ ID NO: 3977 - DNA, 2300 bp, Homo sapien
taatcccaacactttgggaggccgaggtgggcagatcatgagatcaggagatcgagaccatcctggctaacacggtgaaaccctgtctctactaaaaaaaaaaaaaaaaaaatacaaaaaattagccgggcatggtggcgggtgcctgtagtcccagctacatgggaggctgaggcaggagaatggtgtgaacccaggaggtggagcttgcagttagccgagatcgtgccactgcactccagcctgggtgacagagtgagactccgtctcagaaaaaaagaaaaaaaaaagaaagaaagaaaaaggtggtctcctcagtggggtggggacttgctgctacccagtgtcaccagctttttggaagcaggtagtcaagacagttactggaatgcctttacactgccacaccatcataatgccagttagcagagcacaggctgccagccattgtcttctggtgtggttgcggggaagggacagtttagccagcacctggaaaggactttacggataaggaggttgcagatgtaagactatctgtcagggtcaggacagggcagagacggagctccctgtgctgggatattggatgtcctcctgaggtctcctcagcctttccctgatggctctggtcatattttggaatgtctccctgggaggagccgcccctgcttctggaaggggctgtgctttttatcctcctcacatttggaaagcctctggctttcagacaatttttacttatcagtgcctgcattttcctcacccgctagtctgcagattctatcttctttctaaaatagtgatattgggctaggcacagtggctcatgcctataatcccagtactttgggaggctgaggcggcaggtcacttgaggccatgagttcaagaccagcccagccaacatagcgaaaccccatctctactaaaagtacaaaaattagctgggcgtggtggtacacacctgtaatcccagctacccgggaggctaaggcaagagaatcacttgaaccaaggaggtggaggttgcagtgagctagactgtaccactgcactccagcctggctgacagagtgagactctgtctcaaacgaaatgaaacaaaacaactaaacgaaacaaaacaaaatgaaactaaactgtgatattgaaatttattttccctaggagtggaagatttttttctttttggcaacacagtcttttgtgtggtacagccccaacctatatgctaggctgtaggtaaaagcctaaccaactgggcctggccagcttcccctcactcttcagctcatcccatagaaatacaaagtaagaaaaccaagtccagtacagtgggctctctaggaaataagtgggattcttatctaacatgtgacttctgtgtgtctttgttctctatgtcagaatgtgtgcatgaagaggaaaggctgtttgggaggtttcctgatgtaggacccccgcatgccgcggcaagttaaacagagcagaggctggcctggttccgcttggaggcagcaacattgcaagacctttgtctcagactcaaactcacttggccaacctcatcttgttctacaacaaaaggacctgaaagctattttacttctcccagggccacagagacatatttaacagacctgcagaagcttctaaccaaagcagaacccccagacaagcagcagggttgactaagcagtgagggagagtctctgagccaggctcatgttcttgtttttgaaactggagattgccatacatcagccagacactctcccagaactgtttccgccaaataagctctttctggggtcaccaacttttagacccaaatcatttggccagacctggataattgtctggaaaatgattgttaggtcccaagacggggtgggtggagagttctgaggaagtagaaagctggagggaagctgttgggaggtggaagaggattttctgagtgtgccctggtttgtttctctgcaggttttggctggtgattaaggaagatggacacatggtcactgcccgacaggagcctcgcctcgtgctcatctccatcatttatgagaataactgcctgatcttcagggctccagacatggaccagctggttttgcctagcaagcagccttcctcaaacaaactccacaactgcaggtgttccgcttgggggcatccacagaactgcaacaggcttggtttctcttcaggctcctccttgcattctgtcttgctatagtttctacagtagaggatgacattggtaaaggaaacatttaagagaagtgcagttt

SEQ ID NO: 3978 - DNA, 2300 bp, Homo sapien
aagtgccacccataagctttcccgggtgggtggagactgtgagtaatatgtgtgcacttatgtacaagtgctgttctgaggggatgagggaagagctccatccaggagcatgtacttagggaactgctgaacagtgggatggaatcagttttaggggaaaggcagaaggccaggagaggatcatgagatgtctgtagagccaagaattaatcagaggtgaaacagtggcttcgagaagggggtttagagggaaggaaaaggcccaagaaatgtgaaaggaacagcactgagatttgacagtagataggagaggaggtgagaggttgggagtctctaccctcagaccaggattgtgagttgcagggtacacaggggttcatctaactgggagcacctcaggtgtccacattgaaatccttcacatgcatcgcctcaggagtcctcacactggtatgagccttcccacggggaggggcaagcccttcccatggtagatgagggtaggggaatcaatttccagatcctgtgaattatatctacaatcagcaagttctccggtctcaccataaacatttcttctttgtacagaggaaaggcttttgtctgtccaccccacatcttactaggggcattgcccttggagggaaaaacatacagggacccaaacaatgaaaaatgctggtgttgataaagagggtgatgttaatgacagggtaaaatggttgtacaagtcagtggttccaactctttgtcttacattaaaatgaaggggcctccagtgaaattgttgctgataaatcattaaaaatactttttgatgacaaatcactatgtgaaatatattgcctggagattcaaggaataagtgaaattactataactcccatttctatctatttgtttgtgtgaaaaattcctcagggcttatttaaaagaaagaaaattgatactgaaccttgtcttattctagcaatatgtgagattcattcagagttttatggatattttatggggttcattaagcatttgatttcaaataaaatttcactttttaagttcatgaattataaaaatatatagcatatctattttgttatgatcaattgtatataaatcataattgtaatgataactcaatcctgaaaacatttcttcacacttgaaagcttaagaaacaaaacaaatttaattgattcaaaagaaatacagtaagtgagcgatagccataaaaatacattaggataaaattacataagtaaaataatatacatatgtgttcatgaataaaaagaggaataatacaaaaatgtttaaatggataatggtggatatcaaaccaacatggcatttagatcccgttacacacttttaaaagcataatgtaatcattttattttaaatgtcagtgtttagaattcaatggaaatgatgtctttcagaacaaattaaacttatgatgaaaaagtttacctgtcaacttatagttctgtgaagggtccatagctttttaaaactccattaggggaatttaagcaagaaaaccttgagggccgctgtgttatctaaagttatctgttcccaccaagtgacgtaggtaggtaccatataattatttccaatttacaactgaagacaggtcagaggagttaaatgatttgcttatggtcacagaactagagaatggccgagttccaatttgacccaggtctgttggattctaagctcagggtgcatctgccacagggcagcccctctcctcttgtgaaagtgtcctaaatccttacgttcatggaccagcagcttaggcatacagaagcttgttgggaatgcagaatctcagactctaacccagacctactgaaccagaatctgcattcaaacaagatcctggaggatttgcacatacattagggtttgggtagctcttccccagagcacactctactcctttctcttgcacttctgcccagctttgacccagggaccacttaacagccctctgggatggtcaggtcccaacagtccagctgttcatttttgacaccatccctcagtgtattgatataagtaagtaacctggtgttcttttgtgacctttccaggatatttggccttgacattaaaggcagagactgtggcaatgaggcagctaagtggttcaccaacttcttgaaaactgaagcgtatagattggttcaatttgagacaaacatgaagggaagaacatcaagaaaacttctccccactcttgatcagaatttccaggtgagcttacagagagtttaccttcactgctacta

SEQ ID NO: 3979 - DNA, 2300 bp, Homo sapien
tctcaatcctgctttatctttggtatttatgagtcttcttcctgggtttttctctttatattagaatttgagtcactgcaatttatttttccttaccctttctgattgcctccagagatacaatctgactccacaaacactggcttctgtcattggcagggggcgagggcgttgtgagctgcaggcacacaggtggcctgtctgtggcaggatggccagtgtccgcaaggggccttcctagtggtcagtgaggagtggctgttccctcctcctccattttcctttgctgggttctgggactgaaattcaccaccattccccgcaccctgtgaggtaaaagtggtaagtgagctgtaggcctgggtaaattctggaagtgatgaaattgaaaaatcagaacttcaaagtcagccattaaaatagggaagccattttttcctcttaaattttcaaagaggaattcaggagggagataaacagaaacgcacatttggtgccccggaactgcctttccgaggaggatcaagtcgtgcctcctgctgagctgtgtcctttacagacaaggtgtgacctggggttggaagagaagagaatagagcagaaaaacaggacagataagtgttcaggccaataaagacagagcctccctgagcactgaactgctctgcagtgagttgccagctggaggaagagtgttgttcttttctcttggcgaactcccgcttctcatccatgcacccttgccctgcatgggcaattctggctgagtcttgcaatgtacactcctggctcaggggaccatggctgagctggggataacacagactctccttgaccaaacttcggactctcctgtgcccttttcttcatgaggccttgaccttgccaccctactccctgcagagcccagtttagcaagaatcctgcttagtcagtttccagagtattctcccatccttaatatctgatcacccttgatgtctgctcagattcctcatatgtcaccctcagtgtgtaagtccttgccttgttcagtagaatcctgttaagtgggtttatcaagaatcctctacacttgatgtctccgcttagtgattttccattcactgaccccgaggaacttcgctccttggctatgaatcctgagctgtctttgctgtaatacagagttgagcctaatctctttcccctattgtgatgcccctgttacagtagccttgaatagtcttccttacctttttaacaagcgtctgagggaatttttttcctttaatagcttggtacatcaagcaggagcctgactcctaaaccacgctgttcggggtatgctaacattgttgtctggaatataacctgatttggaagtgacaagtgactgaggtgagtgcctgcaggaccaagtgactttccctcccgccggaagcagcccggggaccttgtgcagcgttaaactgagccaaggcccttgccaatgcagctccagctcgaggctccccgccggtaggagtcgagcgtccccgagccgtgtagaaggcactctcagacgcccattgccgctcccaggggccgccgggagaactctggccttggctcgccggcgcggagggcctggtagcatcctccttcatcagacccccactctctggaagctcctagcccctgggcagactgaggggagggcggcggcagcagagagctggacactgcacaggccaggcagggcctaccagctctccactattcccaggagaggctgctgccagctgtctgatttctaatttcaaaatcacgctttgtcctgcaaatgttgtatattgtttattttaggtcaaataaccccataaatacgtaagtaaataaattggtcacttgcagcgatcgtggggtgggggagggcacagcgccctgcagcgcaggcgacggaaggttgcagaggcagtggggcgccgaccaagtggaagctgagccaccacctcccactccccgcgccgccccccagaaggacgcactgctctgattggcccggaagggttcaggagctgcccagcctttgggctcggggccaaaggccgcaccttcccccagcggccccgggcgaccagcgcgctccggccttgccgccgccacctcgcggagaagccagccatgggcgccgccggctcctccgcgctggcgcgctttgtcctcctcgcgcaatcccggcccgggtggctcggggttgccgcgctgggcctgaccgcggtggcgctgggggctgtcgcctggcgccgcgcatggcccacgcggcgccggcggctgct

SEQ ID NO: 3980 - DNA, 2300 bp, Homo sapien
taccagatgccaggccctgtgcttcctcctgcctttgaggtcttcatgtaaaatagattcttgtcatctgcttggggcatgtttaatgaaagtgatcaggctttctagagattgagatgaaaatataattaacatctttgatttctgtgccatcaaagagctcaaactgttctccagatatatgttggatgcttgagtggttatgaaatcctttgaaattaagtgacagactcagtcctgtgtgctgatgtttaggacagacagacacacacactcaaactcacacacaccaggcttatggggaagaaatcaaagatgacaacagtgtctaattgaagctcctccagggtctggcttcctgccataatggttcacacatatcctgtgttttgaaaacggcaggttttggcttgtgatcaaccaggagggaaacatggttactgctcgccaggaacctcgcctggtcctgatttccctgacctgcgatggtgacaccctgactctcagtgcagcctacacaaaggacctactactgcctatcaaaacgcccaccacaaatgcagtgcacaagtgcaggtaaggaaagggcaggtcgtagcccttgtgtgaatgaatagtcatgcaattttgagaaagcataaactctagagggaatgctgagaaacatatcaataatgaaccgttgattgcatgtgtaccatatacagaatgaagtcctcaacattatgaagatctaaaagaaggagaaagaaggaagcagcttcagaaacttgtgttgtggagatgacagacatgaaagtgctatgtagaaacccatgagaacaaaagcatattgacatgtcagcaagagaaaaataacagcacccaaagatcaagcacaaaaatggggtgggagtggtgggggcgagtgtcctagcagaggtgaaactcgatctacgtattctcatagaactttttcttcttggcttagaaaaactgggcaccttccaagtctgagttaggaaaggagttgcaaatggctatgtgacccgtaagatttagttctaatgaaaggaagttccaaaatagaaaagaacaactctagctagaagagtgatccagccagcggctgcccaggggtcagtgtcagaatgaggctggggatgtaacccaggaggatgttctgtacacaagcccttccctcaacatcagaagggctgcaatgaagcaattcttctaggaaaactagttttgcctccaagaagtcatgtctagagttgatttcttatctgattatgggaaaattagagttggtccagttatattcttgttatagtttctgcatttggaataaagatgcagtgtgaatgtagtttatagcctatcataaaaaaatagcatcacctcaaaaaatgtagttatctgaacaacgtctaaagacccagaaaagttcacaaaatgcaatactgatgtaatttctacattttagagttttaaacttgataatatacttttttgaatttggtggcttttcagattagaaaagtggtacatattcattgttgaaaatttgggaaataccaagaaaaaaaaaaaaaagaaacaaaaactatctgtgataactaattaatattgcagcatattttctttcggtctctatgcctactacttaaaaactaaactgaaataatacaaaaaatcctttaatattgtttatatacttaaattgatatgttgagtattttttcatattgttaaaaaatctttaaggataccatttttcatgttggcataatatttcattttgtgggtgtcctctaatgcattttaatatgccccatgattaaacattttgattgtcttaatttttttccaggtattaagaagaatgtgatgaatatcttggcataaatctttgtttatatcatttgttgttttcttagggaaaaaattctagcagtggttttgcttgaaataagaatatggatcctgtaggcttttgatacaccttgctaaattgtttgcagaatggttttaccaattccattttaaccattatgttaaaaaacattttgccatttttatgggcaaaaatgataatttcttgttaatttaatttgtatttttccctgaatgaggtaagcttttaaatacttatattgcaatctgtatttcatgtttgtccatgtcttgatttgtgtttatttgccatggttagatatttacccatattttcttacagttaatttttttgtttaatttttaattcatttgaaattgtgttgaaacttttttcacagtcccatatgggcatttggtcc

SEQ ID NO: 3981 - DNA, 2300 bp, Homo sapien
atacccaggtgccatctacagttatcttgaatgccagcagtggtaatggtcttgcattttgtgaaacactggcctacaccatagcatttattttcctctccatagctgtgaaattcatataacgccaaacagccctgcacaggactatgtgctggggagtgggaacttcaaatcctacaaagttataacttgcaatcaaatccagtagattattattgttattattaaataaatataatattattgttaatgattgttatatatatagttattatctgtaatgttttaggctttatagaacattttcatattgttgctgtactatactggcaaagcatagccaggcctgtgaataaagatttctggtcgctattcagctgggtgaactagattttgcagtaattctaagtttactttatactgatacattagttttcttctggagaactcagtacatttttaaatatattatttcatttcatcctccctgcattccttccaggtagggagacacagttgtacaaaacttgatttttaaaatgaggaaagcaatgcttaaaggggtgctttcattttcatttggccttacacaggtttggagtcaggaccaggactaaaattacatcttctgataattaagaaatgacagtaatgttacagctaggagcagcttttctgatatagctggcacatattagggtgcatggattttcaaagccatgtctgccctttgctcctgctacccctgcagagtgcacggcctggagatagagggcagggactgtggcgaggccaccgcccagtggataaccagcttcctgaagtcacagccctaccgcctggtgcacttcgagcctcacatgcgaccgagacgtcctcatcaaatagcagacttgttccgacccaaggaccaggtgagaggttctgctgcctccatgggtagaaagcagtcacccccagatcagggggctcaggtggcatctctgatgacctcggctctgttgttttctggggcagccctctggtagctcagatcacaagcagtaggcagaaataaagcccttcccttggaagcattgtttgtttctttgtttgggggactcttgaatttttgcccttgagcatctaccttcctatttgtgtaagcattctgatgccagtagggtttcaaaactgttctgcaccagtgtctttttttcattccattctgtaattgcacatggagtccagaatttttacagtttgcagttgtatgtcagattccaattgtgcaagttggcatgggtatggagatacacagactcaaatgatcagccttaatggcataaagctctaaggattcatcataaaagcagggtttgtagtaccatatactgcttttaccatggccataaaaaaaataaattatgctgtagtccttactgctaaggaggctgaggtgggaggattgcttgagtccagagagttgaggctgcagtgatctgtgatggcaccattgcactacagcccaggtgacaaggagtctctgtctcaaaatatataaataaagaaacaagcaaatgcataaattatggtcaacataaatattaatttgtaagttgcataaaataagtattcatggaattagtgaacatttaaatcaaacataatgaggtcatcaaactcaaccaccttattaaacatttgagaaatgggaggcttagaaaggttcagtgatgtccccaagggcacatgccttgtggcagcttaggattgattctgagtccttgttcccttcattccaccatgcagtttctgctatctgcaaggctattgaaaacttctgagtcactgtgacttctattaaaagaacaagagaactactttgaaagattgtgtgtggggtggggtggagcatggaggctatgtctaggaactaggcacacctaaccactgaaaagttggtgtgccatgtgttataacaatgtctatttccttatcagattgcttactcagacaccagcccattcttgatcctttctgaggcgtcgctggcggatctcaactccaggctagagaagaaagttaaagcaaccaacttcaggcccaatattgtaatttcaggatgcgatgtctatgcagaggtaacactatgcccctttggatctttccttggatttgacttcttttttaaggtatgagagtctttgacattggattagattattctgaagggtgcattatttatcaactctgtaatacataacaatttgatttttagatttattcagcacttaataagtgcagacttctgtgtggag

SEQ ID NO: 3982 - DNA, 2300 bp, Homo sapien
cccacgctgctgcagtgcagtggtgtgatcacagctcactgtagcctcgatctcctgggctcaagcaatcctcccgcctcagcctcccaagtagcacatgcctggctaatttttaaaaatttttttgtagagatggagtctccctgtgttggccaggctggtctcaaacttgtggcctcaaacgattctcccatctcagcctcccaaagtgctgggattacaggcatgagccactgtgccctgcctttttaaaaaaatgtaaattctcagtccacagtgttgaggatgtgagagtgaagggctgctcatcaagaggcttgcttagttgttgagtgtaggtaagacacttaaagagagtcacattcttgggagaaactaagattcttcccttgctgtaagaggacaccataagaagccaagggttggctctgaacagagggtcaagccaaccaggccctgctgttatcacctacggaaatcctgtgtggcagtaaatacagtcctcagcaaagcctggagaagagattacagggggcacagaggggctggggatgctaatgtggaggttattggccagatagtggccaggaaaccagagactagggggggttcagttggaggagcataggcggaaatgggagagaaaaataaataaatgagataagcaacttcatttgcttcctcccttattactcttttgttttgtgtttaggactctggtctcccctgaggttgatctcttcttctggggacaacagcctgcagggtgattttgaaaagcaggctctgacttctacttccttgtcctgtactcaccccacctggtgtaattcaccgtaatgcagtgaacttccacatggctgctgggcatgcttcccaaagccagcccctgggcagggtttcccttaatttagacccctgtccctacctctccaagtgcaaagtgtacaaggctacacgcccagctgccccccacccccatacacacactggagagaccaaatgtttgagatcactgttgggtagctgggtcaagagagcttcataacaatgttgttggcatgtggagagcttttctttttcttggatcccaactggaaattatcagcttcgccccatgctgacatgcgaatgtccaggcctgcctttctgctgcagggcaatgctccaggttacaacatcgacaccaagcagtttgttgagaaaactttggacctcatgagctgggcaagagcggcctggcaggtggtaggagagcagcctgtccatgcctcagctgtggctccactggctctgtgactgtgcagattttctaacttttgaagacctctgtttggatatccataaaataggtaagatggtgctaatacctacctgtgatgttgtgaagatttaatagcataatacttaaaagcactttgcatacattagcaaagtgcctaaatattagttatttggcggaggctattaaccagtgtgctatgaggtgcaaagtaagttgttaccaataactcaaagaactccagtttgcaaatgttttacttttacttaagagaatctttgcgggagaattaaaaccaattaattcccaccactggccaagagctcatgctgtaattatccaagacagaatagctcaacagaaaaccaagtcatgcaattctgagcacttgtccttgggatgccactttggggctcccatatctgaaatcattttgttctcagtccacctgtgtgacatttctgtcctgctcagccacgggttcacaataatcaagggaatgacccaagggattcacttcttccaagcagccgatgcctttggaagttatgttgacattgcttgtttaaacctagggcaagaaatcctttctctgccagacctgactcttcaggcacactcctcagtttggagacgtgacttgccatgtagtactgagagggaaaacaggccagaaacagccttgttgaaaacttcttttctgcttagctgccctctgaacagtcaccataaagattgtgaggtgctggagccagggatgacctcataaagccctttgctaaatacttagtgagctggtactgtgggccaggcactgtgctcatcatgaacaaaaccaaggcagacaacactgtcattaatggagcttatcatgtaatacggaagcctgggataagcaacaaattacacaagtgacaaatgtgatgagtgctgtgaagcagagtgcggggtgcccagggaatcagcagagccctggaggataacagcctgagctccaggaaggaaggttgtggtggtg

SEQ ID NO: 3983 - DNA, 2300 bp, Homo sapien
gcgggcctcggggcctcgctttcgccgcatctgcccagcgctccgggccttgaatctcggcagatgcgagttgtgggcacctagggaaccctgaggactcgcattcccccgggtctgtatcccgtgcccaccccggagcgtcgcaaaccttggaaagggtgaaagctgataggggagtcttatttcttaagagagagggtgagggcgcgcggcgctgcctcgggtaaggagtaaatgcacctctttcacaaccgtgagtttgggcttaggctgaggtctaaatgtttgcagtcaaattagaaacgcaatcaaactggaagtggcactagaaagcagagggctcacggcctccgctacgcacactcccaccgaaggctcaccagaaccctcagccagcgcctcaattgcccatgttgtacttgtcgctcctttgccttcaccttgacacagaaaaactggtcttaatacgtctctcgccccaggtacccctaccttcagccaaacacacccatctatctctggaaatagcacctctctcctggttgcgtggagcaggggaagaaaacctttcagtaaaagagagatggagagcgagagcgggagagctggagggcgggaggagggagagagagagggagagggagagatcttagtgctggctgatcagaagtgattgataattttccaggagaaagtcaaaagcttaaaaggatagcatctgcatcaaggggctagagaaaacaccagaaattaattttataagcccaaaccctgaactcgagataggcatggcaagttcacttgcttttctgggtttatttggtgaggagccttcgtgctgaagggaaataaaaatgtcacagaatccctgttaggagatgcttattagggcaatcgaaaacaaaagttttcgtggtttcattattcgtattattttattttcttcctgaaaatgtgcaagaacagctcatctgggtggcctgtggtttgtttgggagaggggtggggaaattcattctgactataatttaaagagaagaaattcttaaaatagatatgtcgatgttgcacaaaacctccaccaccactaccctgcgttctaaagacccaaggcacgaatggaagacgttgaccaccacgcagctcctcctgcaaccaggcccaaggggttcctggggaagctgtcacagaattgaaagcagtattgaaccccacggaaatctgctcttgtgggcacttgcaaaacaacgaaccccacgtgatccggagatgtggtggaggggtgaggctaacatttcctacaacctcctgcaaaggatggaagcgcgtgccgctctcccgggtttcgggaggcagcctgttttgtagcctctgaggctccggggaaaggtttggctgcgtctaagagagacgtttggagccatccgtcttattttgtttgaaaagtcactcgttcaatttgtcactgtgtgacagctcagaataaaaccaatttgcggccgcccctcctcctcgcttcccggaggatctcctgggaggcacgaggcggacgcggtgctgagttgggccgggactcagggcggcaacatttgggcaagggcccaggaaagatgaggggctttgccgaggacacggactcctggaataaaagcagaatgaggtcaagagaagggaagcaaaggggccaaagcgcgctccgctctccaccgggaggcgggctttgcagagccctaaagagtgagattaccgtcccttccccacgcccccaactcgccccgggtgacaagcgcttcaggaaagctcctgtgatcaaccctccttgccccgtggcggttcggagctgcagaagttagaagagagtcagagccctccggagcggctgcctggcccctacgcagagtagcaagaagcactgcgatgtgcgctactaagcccacgcggccgcagcaaaaactttggcgtggccggggcgtggctagggtccggccaggcccccttgttcctaattcccctccactccccgctcccattggtcacgaggatgaccaatgagcgctcggatcgaggtcctaccccgggcctgactcgaaagctcctgccaaaactttgggagtttttagagacgagtttttttttttttctattacttttccccccccctaactaacggactattattgttgttgttttaaatttagctcttagggcttagctatttgggttttcttgcggtgtccggctcccgtctccctggctcccccgcccgccctgcggccccagcgcccctcgctctcatccag

SEQ ID NO: 3984 - DNA, 2300 bp, Homo sapien
tcctgaccaagagttgtcagaaaataactttgttgagaattccgggtggaatcatgttcatgtcactgaaattgagatcaaaaaagactctgaatttggttattggtattattatatatcttagtttctcagcctcagacaaaaaaagaaaagacattatcatatgggctggaacaccttctaaatctaatacttttatgtaaccataaaatatcagtattattaacaatgagaaacattattatgaatgcttaaaattctccaaatatcatgctttcatttttacatacattatctctttgaatcttcatactaaatcaataaagtaaacataattagcagcatcttacagatgagaaaaattaggctgttaagagactttgttgtggccacaaggctagcaaataacaagaggtaaaatttaatgcacaaattttgaacctcaaagcctatgttcttaaatactacatggttccaccaataaatgtgtttgctaatgacttacagtcaattgtacataacatacaaacaacaaaaaatagaagtgagaggagggctgagttgtagttgtgtcaagggccccacgatccatttagttccatgagtccatgatggcagccagctgtgagctggacatgaaggagtttcacttccagtatctgagtataaaaccctgggaaggacacaagccagaggagcaaaaggcaccaatagtttggaaacatgcaccttatttagagtcagccttttcttctggtgggacttcccctggcttggagttacttccactgagcactcaagatgggatcacactctgatgatgcttgtcccagattccagaattgccacgatctgctcccatgtattgatcccagcaagcttaatactcaaggcataaaagctttgacttcactaactaagccagcatttctcctaagaggctggatggatgctttgatattgaatgaaaatatctgcatttcataattgtacaaaggcaaaagagtgatggataaagatggaatctaaacacaaatatttaaatatctcaagcttgtatttgtaacaatgatgctatcagcatacggtttgtgtgtttatgctttggagggaagcaggcaggaaaacagtgccttttcttcggagggcaggatagtatcatcattgtactgcatcctgaggctactagcattcattggagaaatattgaggcacaggcacagagagaggctgaagaataaaatggttacaaccagtttgtgctaacccccagccccctagcttgttgatggaaaaatcagccaaatgactctctgttgacctagtctttgagaggaaggtattaggtggcagttattcctaaaaagaggtcactattaaagacgacaaaaagcagctggtagagtcattaaccacggtggtttcaaagctttggtattaatataaaacgtagtgcttgttttaaacgtaacccagaattctagaaaagactaagagactaaacagtctctgcagatgtaagaaagtcttatttgagaagatacgtaatcacatataaggatagtttttactttttaaaactgtcagctgagaagctcacaaaaaacctcagagcagctgatggcaggtaagtctgattatttccctgcaacagagagagaaactgaggcctggaactctacaaaaactgtctccgaaactcttggtgacagaagatgtttctgcaaatgggtactgcatgacacatagggcccggggcaccttaaagagagaatcttgatttttttgaaaatgaaggtaaattaaaaataaaacatattctttttgtagaacatgaagtaacttttgaattcagtttatatgttaaatggccccagtttatatgttgaacagcccccaggggcagtgccattgaaggggctggctcagggtggccggtcattctgacattgttcccagttctccagtattgaccgtatcaggagaaaggttttcactttctcttggatcctgacatcaggggggaaaaatgcagtgtcatagaaaaaaaaaaaaagtaaagatcagcagacaagaggaaaagtaactggtgagttttggatttagaaaagttttggattcatctgtttatgaggaggaaaagaggccaagaaaaggcagcaatttgtccatgtgcttaattagtgagtggcagtggcagtaacctggtctgctgagctccctggactccctgatcccagctcaaaatagtttccagttttcatctgccagttgcttcggaggcttttctaaggaagaca

SEQ ID NO: 3985 - DNA, 2300 bp, Homo sapien
tcccagccacttcacatagtcctcgagtccctgaagagagaaggcaaagaacctctggtgttgaaaggtaatgcccctgctcccttcccaagcacggtcctgattagccgggttcactttgggttttctcgtagagtgacagcattctccttaccctggctaccaaagaccaaaatagactttattcttctcttcccttctatgctctttattgttttggtttagtaagaaaaacccagcagcactgaactggaagccagaagatctgggttctacccttcatttgggttctaatttgcattgtgcaagtcatttcacctctctgggactgttttctcatctttctaaaaaggggctttatacacaccagatggtatctcaagtcatgcctggtctgctagctctattccaatcaatcactagttggaaagttattgtctctcagacttaaccaatgttgatggaacagaggaaggagcaactatggtgaactacaagtaaacctacaggtaccagttcttactgtgggaaattctttctctttctcacctttctgaccagcttgacttttatgtggtttataaagtgaccttgaagaagggcagagcttcttattctaaggccccatataaagtataagttcaccaattacatccattcctctgccaaggctccaagggaacagagacgtttttatgaaacactccccaacccattgttttttctggcctcacctgacaacggttggcatcatggctcctcccaagatggagtaatgggtcacttgccccagtatactgaatgcagaataactgagattagcagaactgagctctggcagaaggaattattcaccactcttctcggagcaccttccataccgtgttgcctaacctttccaagtagcctgcatcctgtgcccagcctagttgcacctctttgccctcagatactgacttttggggcactgtacatcactctcattcggcatcttttacctggtggtggtagtgagagatagtcgtcttctctcttctctcctcttgtgttctgagccaaggtacgcagtttctgggtcacatctccaaccagtctcctaaagtgtgttgaccaaaggtgttgctgagtttgaacacattgcatatttaaattgcaataggacatgtgggtgagcaagttagttattttgtctctatgggacagctttgccattctccttcttgtcttcccagtggggcattctgccttttgttaagcagtgttctgggaattatagttctgaattccactgacacaatctcctcttcccaccctccgctctcctcaaacttgccctcatggggctacactaccacaaaggcacatctctccttagggctggtgggctttgctgggaaggagaacatgaaagaattgtatgtagagagttccagaagcttctagacatttcctggtcgtggtggttgtggtgggttttcttgaggtcacaaatatgttcagatttcctccatatagctctgtattttattgtttctgtattcttgtatggttgactttgagtgattcccaggatatttaccctgctattgtcttaccataatcttgatgtgtctagcctcttacaaatgagaaaatcctaccgaggaatttcccatttgtaatagtttgtcttggggagcaaagaggaggatagccaatgatcatgatgatctcctcttttctcacgcagagcaggtgttcatgataaaaagcaagtcttttgtgtcttcatgatctgaagagaggaaacaacacggatcaagatgatcctagacctcctaatcatggggatgattacaaggagttgcagaccctactctctattttgcagtgggtggagttgtggataggggtgacccatcagtcattgagaaatgaatctcctgggtgctacttgtgaaagtgaggatcctctctccctttcctgtggatgcagctgagattctggacagcctagacttcttcctcagtgtcagagtaagattgcctcaatggggcggggcaggacacactgctgacctcaccactgggcgccctgggcagccactgcgaggcctcgtcattttcgagttggtgagacaccgcggcagtcgacttggaagatgctctggtggtagaggttagattatttgtagttttgggggccttttcttcaaatatctgggaatttcattgaaaatatgtagttcaggagtgaaggggtctatattctactttataattatcattatcattttggtatcttttgggagaatggccta

SEQ ID NO: 3986 - DNA, 2300 bp, Homo sapien
cctcatccagcggctctgcccgctcgctgaattgtggatgcagcagtgccagctgctgcactgtggcaacctacgacaaggacaatcaggcccaaacccaagccattgccgctggcaccaccaccactgccatcggaacctctaccacctgccctgctaaccagatggtcaacaataatgagaatacaggctctctaagtccatcaagtggggtgggcagccctgtgtcagggacccccaagcagctagccagcatcaaaataatctaccccaatgacttggcaaagaagatgaccaaatgcagcaagagtcacctgccgagtcagggccctgtcatcattgactgcaggcccttcatggagtacaacaagagtcacatccaaggagctgtccacattaactgtgccgataagatcagccggcggagactgcagcagggcaagatcactgtcctagacttgatttcctgtagggaaggcaaggactctttcaagaggatcttttccaaagaaattatagtttatgatgagaataccaatgaaccaagccgagtgatgccctcccagccacttcacatagtcctcgagtccctgaagagagaaggcaaagaacctctggtgttgaaaggtaatgcccctgctcccttcccaagcacggtcctgattagccgggttcactttgggttttctcgtagagtgacagcattctccttaccctggctaccaaagaccaaaatagactttattcttctcttcccttctatgctctttattgttttggtttagtaagaaaaacccagcagcactgaactggaagccagaagatctgggttctacccttcatttgggttctaatttgcattgtgcaagtcatttcacctctctgggactgttttctcatctttctaaaaaggggctttatacacaccagatggtatctcaagtcatgcctggtctgctagctctattccaatcaatcactagttggaaagttattgtctctcagacttaaccaatgttgatggaacagaggaaggagcaactatggtgaactacaagtaaacctacaggtaccagttcttactgtgggaaattctttctctttctcacctttctgaccagcttgacttttatgtggtttataaagtgaccttgaagaagggcagagcttcttattctaaggccccatataaagtataagttcaccaattacatccattcctctgccaaggctccaagggaacagagacgtttttatgaaacactccccaacccattgttttttctggcctcacctgacaacggttggcatcatggctcctcccaagatggagtaatgggtcacttgccccagtatactgaatgcagaataactgagattagcagaactgagctctggcagaaggaattattcaccactcttctcggagcaccttccataccgtgttgcctaacctttccaagtagcctgcatcctgtgcccagcctagttgcacctctttgccctcagatactgacttttggggcactgtacatcactctcattcggcatcttttacctggtggtggtagtgagagatagtcgtcttctctcttctctcctcttgtgttctgagccaaggtacgcagtttctgggtcacatctccaaccagtctcctaaagtgtgttgaccaaaggtgttgctgagtttgaacacattgcatatttaaattgcaataggacatgtgggtgagcaagttagttattttgtctctatgggacagctttgccattctccttcttgtcttcccagtggggcattctgccttttgttaagcagtgttctgggaattatagttctgaattccactgacacaatctcctcttcccaccctccgctctcctcaaacttgccctcatggggctacactaccacaaaggcacatctctccttagggctggtgggctttgctgggaaggagaacatgaaagaattgtatgtagagagttccagaagcttctagacatttcctggtcgtggtggttgtggtgggttttcttgaggtcacaaatatgttcagatttcctccatatagctctgtattttattgtttctgtattcttgtatggttgactttgagtgattcccaggatatttaccctgctattgtcttaccataatcttgatgtgtctagcctcttacaaatgagaaaatcctaccgaggaatttcccatttgtaatagtttgtcttggggagcaaagaggaggatagccaatgatcatgatgatctcctcttttctcacgcagagcaggtgttc

SEQ ID NO: 3987 - DNA, 2300 bp, Homo sapien
gtatttcttaaatgtatttgattgatgtctcatgcctccctaaaatgtataaaaccaagctggaccccaaccaccttgggcacgtgctcaggacctcctgagggctgtgtcacaggccatggtcactcatatttggctcagaataaatctcttcaaatattttacagagtttgactattttcgacaacagacgttacacaaaatcctctcctatgtaagactatcggatgtgtacgtgatgcccgtcgtaacactggtgtgaaaagctggactggggggtatgtgcctgcatgtaagtggaggtgcccaaggggatttctcttcacagctcattgagcatagctgacttgctagctatggtctgacacctcctgatttcagatctgccctgaaaacaattacatgaatatgcccctgctactcagtatactactaggcttggagtctgaagtagacctccaaaccccatccaatcaggtaagggagaaaaacgatagcccaacattccctagtgctcataatgtattattccattatttcactttttatcccttctctcacagataagaaaagaaaaagctctacttctttagggttcttggacgtagactctccacagttcatctggggttgttcatctccacttctttttgtatcccagggcaactttcctgcagtttccctaatgagaatattttccggactaggcaaggggcggcttgccccgccccctactcttctccctgatcaggagctgcggccagctacctggcgccggccaaagtcaggggagcggggagaggcggcgtcacctcctccacgctcctccggccccattcaatctagctatttgcactcggctctggctcttttccgccagctgcggctgttccagaagcgccgggctgccggtcctggcctcggcaggggccgtgcgggaccgaggggtggcggccgaggcatgtggggcgggtgggttgcgcgctgctggcacggcgcggggacccagcgcgccaggcgggaaaggggggcggcggcgggcggggacccagacccggaggggcagcgggcgcgtagcgggccccaggacgcccggccaggggattggcctctgcaccgctgctcagggcgcgtcccttgccgcctctggcgtcgactcaagcctcctcctccgagcagccctcagtggcgccgccttagtgctctgggtcgagccccgggagggttagcctggggacggcaggggcgtgaccgtggcgcggaagtaggtgagcagcagggcggcgcgcggcggtcaggccgggacagccagaggggcagcgacatctgcgggcgggcgggcgggaggcggacgcttcccgggcggagcagggccctccggaggacgcaggccgcgtcgaggctgaagggcctccctgtccgggacggtcagctgccaagttcgggcccttagcgcgtggccccgggccgcggctcggagcggaagcgtcgcccctggctgcgcgctcatgctggtcctagcgcagaagacccggcgaggtccgcgaattttggcttagcgtttgtcaagtcacctcgagcgactcggagagaacccggctttcccactagggacggtgatcgcagtctctttcctttagaaagttactccgatacttttgatcatctgtccatagtaaggaggaaaaatagcgtggtttgtccccgggtgagggagtgttggaggatcccgtccagtgggaagagccagttttagcggagcagcgcgtccagcccgctgacacttcagcctggtaaagggttaactgcatcctgccggttcggtttacatgtaaatagagagcagctgctccgcgcggccccggctggctcttttaagtttttgattggttgccaatgacatcaccgcccgtgttttaacaccgaggacccagagcagcttcggataaaccctccttaaagagatgaggccacgccttcttacccgccccctaggctgcccattggtcgcggggctctgtgaggtagcggtcggctttctccggattcttattggcccaacccgccgtcggtcggcggcgagtccgccccctcagaaccttacatttacagtgtagcaaaagagaaagtaactatgttgctgctggagatcaatgaagccgagtgaatgggggctgaatgtgcgagtccatagctgaagaggagcgccagatggtggaggaatacacttatttatgaagtaagtggaagtcaccgcgactactcctgagagcccgggactggaggtggaggattgtaag

SEQ ID NO: 3988 - DNA, 2300 bp, Homo sapien
cttgtagttgtgccattgagtccaagtggtagggataggttgcaggttggagtgtctggctgagagcaaagcaatggctccagctactggtgtctaagggctgtagccatgatagaccaaggacccaaggcaggtgcttgtccacttaagtgatcagagaatttaatgggtctttgtggtgattatctcacaaaatctgagccaggtgagtttggtgcctgggagatcaatttacaggtctgaagctccagacaccctatggggctcagggttagggattttgtccccaggaaagaaaacttccaagggtaaatctgagctctggttctagaaacttcaagataaaaggccagttatggggcacattgagtggggcatctcaggatttagaactagaattgaggaggctgttgtcagaaggaaggtgcctaatggaggttgggggtggaggtgggtcacaaacccagaaaacaatgtttttgttttgtttttaaacataaatccttgccatttgaaagagaaaggtagagatttccctcaattccagtgaatcctgtgttgtcaatgaaacatcttttagaatcttcagttggaaaaaaatatgagaacttctcttgcctagtcttctgattctagtgtgcaaatattggggcctttcctattctagcaaacctcagggtgtgtcctaagtttacatctgcaaacccgtctatataacccacctcataatgtgagaccagctcctgagaacatcactcacagtagatgttctgggatagattgctcccttcctgcctgtgttccccctctccagctccatcctcctgtgtccctggcttatgacttcctgagtttgtctttagtcttgaccatggattttgcttcactagtgctgaccactagcattttatttggatgtcatttgcactacctcactgtttttttccacttccttctttttaggacattaatctgtctactcagaccaaagcccaaccttgacctgcttggccatgggcccgcctggcctggctctaccttcttgggaggggagattatactgttggatacgggatatcaaaatctccttgggtttagctagttaaaaagacatatgtcttgatatttcatcagccccgagtgtttttttaaaaatcattatgggaaaaagaagataaggcattttgggagcttttatcattttgaagatcattctgcagtagagtgataaaaaataccagcaatgcaaacatctgggtgaaagagcagcaaatcaagtcataattcttttttatgtgcaaatatttatattctcccaggccttgtatcctcagttagtgtctgatgtagagtcaaaggaatgtttcactacatttaataatgagcatgaggaacaaacctcaagtgtgacgccatctgcaaagcagtgtgtatttcaagtttgttgacagaacttcctagagggcaattggaaaaagaagcttaattcctaatgagaagatatcttacattttccttactccatgaaaaggaccacttataattttttccatttctaacagtaacaattttaacactcaaaatcagtttcttaagtcctaaagggattggagacatatttctccagaaatctccactatgatggggaatgagatctggtccagtacagaaagcattcacatcataggaattaggggacacacatttatttacatatttatttttagaaagtttagacacttagactttagaaaatctgtttttcataggaagaagtctttcctaaattatttgtataggcctggaactggggaggaggaagaactttctctttggaagttttcaaacactttacatagcattaaatgttatttgtcagactatcatagcattatctatagggtaattaaatatcttagaactatgctgtgattttatttgctgctgagtggagatgggttctgtggctagtgtactaggataatctttttctaataatctcatttattcttgagaatcatctaaaataaaaaatagcattttgttgcccagcattaactttataattgtttttctgggatgagagagggcttgtgggacatataattcacactttgacaagagaggtgctaggagaatagatgtaggacaatacagtgccagattcaatagaggaaaatggaatttaaagatggaagattcacaaactagaaatccataagttgacattgacttgtgtgggtttcttgccactaataccaagaaaggaaagggatgatcatcagaagccagcatggatt

SEQ ID NO: 3989 - DNA, 2300 bp, Homo sapien
ggttcagagatagaatgaaagcacaaaagggaagcagggcatgctgccggagctgggaagaggcagacaggccctaactgggtgtgtccagtgacagagaatcccatctaggtcagccaggtaggccactgcctgtgccaaggattttaacttggaggcaaaggtgagtagaattcagggtctgaagcaaaagtcctcacttctccagggacagaagaagcgggcacagggagaagtggtgaatgaggtggactgtgactccccaaaactacaacttggaggagaactcgtgggctggaaaagaggtgacacaggaaactcctgaaagagtttgtttaatgctttaaacctgtactatgttggttaagtcatgtgatatcataggtattatgacttcgtctcacttgaacagaatttttgccctagattctgagcatgtcatgctgagaatgcacatagagaaagctatgagagatctcacttcaagcacattatctatgaaagtgcatcaacactcaaacttccttagcacctctatccccttttgatctttgggtgatggtaaaatggtgtccaaggtaagcctcatcttttatttcaactaaagcattttcaaagctggcatgacattgctagatttggtggtatgagcctcatctcgcattacttcttttcttttcacatagaaaaagtgctagtgaacataaatatagtcaacacccagtatgctcacttattgaaacaccgtgtaagtgccaggcactgcattaggctagtgtggacagagtagagatgcgtgagacaaacatataaagacagcaaacaatgccaggcaggccccaaaatggccgaagttggctgggttaatcctaaattaaacaaaactttattaacgacatcataaacaggaaagttactacttagctccgtgcaattatggccccatgagaaggcaggaccaattattcaagagaaactggaatagtgtccagttgaaaatcacctcagggttcattcactcatttagcaagtagttaccaaacgcttaccatatgccagtccttggggtacagtggtcaacaagacacattaggtccctgtcttcctggaactcagtatttccagatggggatagtgctgtgaaggaaatgaaacagggtgaggcaagcgggcatgtgtagggtggcctctctggaggggtgtgtgacatgcttgatgagaagaagcctattgtatgcagatctggaggaaacaacattttaggcagggggaaaagaaacgttggtggggtgggtggtggacaagaaagcagggtgggaaattcaagtgggtgttggagttcaaaaagacatctgtcatatgtgacaacatggacgaacctggaggacactacggtaagtgaaataagccaagcacaggaagacaaataccacctgatctaacttatatgtggaatctaaaaaagttgaactcacagaagtaaagagtagaaaggtggttactagaggcttgggggatgggatgggagagttggtcaaaggatacacattttcagttaggaggaataagctttgatgattcattacacaggtggtgactatcgtaaataataatgcattctatatctcaaaatttaaatgtcttggccacaaaaaaatggtatgcgaggaggtggatttgttaattagcctgctttactcattccacattacaaacatatatcataacatcatatggttccccataattattagtgctgaattaaaagttaaaatttggaaaaaagtcaccttctgtccaccattcctatcatgattttaaggtatttctggtcttcttcaagtgtctcctggaggctaaaggtgtacatggtattttcccattgcaatgcagcagcgcagcagaagggggagctgacacaagccttcccaggtctgaaccaacttctctcaagcgtgtgaagcctttctttatgtagccagtctccacccagggctcagtaggcttagggaaatgggaggcggaagggcacctcacagtgtactcaacccttctgaattggattttgtgagctgtgtatgtcaggttccgatgtgaggcctggcgctgtggaggttccaatggccgccatgttgtctcagagggacacaccacaggcttctggaactctggctccattttgtgggtgcaagtttctggcttccgttttaaagaggtaagttttcctctgatgcatattatttatatggattccagatcaccacccagtttgaaagcatatgcagttggttggcgtgtgg

SEQ ID NO: 3990 - DNA, 2300 bp, Homo sapien
tcacaggaagcagtggcacaaggccatcagttactctcctctgactttcaaatgaggaaagtcagccccagagaccacagtcattggcagagcctctcagaagcttctattctgttcttttaactgaccacgttgttaaataaacaataaacaatataactagcttcttgaaaaactttgtcatattagaccaaatcagagagaagctgtgctcatcattaaaataagaattgaagctgcaacttgctcagggtcacatggaccaagatcacatcaaacttttgcctcgtagttctcttagagccaaacatggggcagtcttaaatatcttgtatagatttaaaagaaaatcttcaagctcatacttgcgggtacaaaaaaagaaggaaaataagaagtcaaatcttcccatgggatccttagcagtctcttggcatcagctatgagtcggcccttctgggcgatctcttccagtcctgtggctttccttgcttacctcattctgcttcttggccttctttctttcagaagttccctgctgggaaaagttttaaggatcgatgtgaacagggcaggctcacatggcaagcggtaccgagtcccctcggacaatccatttgtttctgagccaggggcccaccccgccatctatgcctatgggatcaggaacatgtggcgttgtgctgtggaccgaggggaccccatcacgcgccagggccgaggccggatattctgtggggacgtgggccagaacaggtttgaagaggttgacctcattttgaaaggtggaaactatggctggagagcaaaggaagggtttgcatgttatgacaaaaaactttgtcacaatgcctctttgggtaagtaagaagctctctgggtgatttcttggatgagttgagtgggctggaggtggaggtagggaataaaacctgaatgtcctgccctgcaggtcatttaaatcacgccttgtttgtgtcctgtggtgtagtgcttctccaaccggtcctccagccactcactggcaccagagacatcttggcagtggctattttaaaaaagtgaattcctagactctgccctcgacctaatgaatttgaattttgggtggattggagacatgagattgacccaggaatctgtattttaaataagttacccacattaattttaggcatattattttgagaaccactggcagaccaaaattgatgtatgtttttatttatttcccaactgggacaggccactgaaatgatattctgcacataggcaagtaagaggacactttcttttctttttttttcttttctttctttcttttttttttttttttttttttagacagagtcttgctctgtcactgggctggagtgcagtggcatgatctcagctcactgcaacctccgactcccgggttcaagtgattctcctgtctcagccccctgagtagctgggattacaggcatgcaccaccactcctacctaatttttttatttttagtagagatggggtttcaccatgttggccaggatggtctcgatctcctgacctcgtgatccgcctgcctcggcctcccaaagtgctgggattacaggtgtgagtcaccgtgcccggcccaggacactttctaaacaccaataatcaaggtgtactttagaaactccacctggctcaaaattctagtgttctgactctattacttcttcttagtcttttcttgtcctctaacttataaagcagtcttacagactgtgacaatattttccatatccttaaacctgggtttctgccatatcaacctagggggaaaacttagccatgtggatttccaggtcactgcctcatagatggagggaatttttggcttcctctctgcctgcagatagcagttaagtaggaagtttgcaaatattgtggatggcctattgagaacaataaacatgattcacttgcttgcctgtcctactgaagaccaagaggtaaagtgttctttactgaattaggcaactgcattaaaaagtccccttcttcctccttgaagctttcaattttaggccacgacactcactctctttcctctctcctggacagatgatgttctgccaatctatgcttatggccatgcagtggggaagtcagtcactggaggttatgtctatcgtggttgtgaatccccaaatctcaatggcctgtatatctttggagacttcatgagtgggtaaggaaggactgatgtcccttctccctctttttattttaatatttttactgaggtataacttacatatggtgaaat

SEQ ID NO: 3991 - DNA, 2300 bp, Homo sapien
acaccgtgctaaagtatagttacagcagcactggcttgtttacttaacggttttctgagctccccaaactatatgctccattggaagagagactttgtgcatttcgctcactgctgcatcccaatcaatgtagagaacggtgcctggcacgtaagacagactcaacaggagagtcacataggacttttatttatttatttatttatttattttttgagacagagtcttactctgtcactcaggatggagtgcagtggcacggtcttggctgactacaacctctgcctcccggcttcaagcgattctcctgtctcagcctcctgagtacctgggactacaggcacatgacaccatgcctgggtttttttatttttttaatttttttatttttagtagtgacagggtttcaccatgttggccaggctggtcttgaactcctgaccttaggtgatctgcccccctcatcctctcaaagtgctgggattacaggcgtgagctactgcgcctggctagagaccttatgggctttgattttcttccctttgaagtagggaagtatctgttcatttactgagctaattgagtagaagcaaatttgcaaactctaaatggctgcatgagagtgtgccatagtgatggttctctttccacagcccccttctattctctagtattggatccttaattcagcctcccttctccctttttcccagtctccgagagtggacagaatgagcaaggggacacttaagagtgggtcatgttgcttcttgatagctgctgtgataagtgtcttaaatggaaacagacaccccgaggggagcctgcgaatctctgagctccttcttccactctgcccaatgaccgaaagctgactctgcagcgtacaatcagaggaaataagagagaacagggaactcacatatacatgaaaaatgctgctggtccttttgtgaagcgatggcagcacagaggtgaatgagatggttctgcacaggctggctggctcaggagagtccttagtgatcagaagggggcttctgggccaatgggtgaactctgctctaatgcacggctccaaacgacaccctttgaattgggctttcttaccttcctaatctcagttgcctctgtctttcatcactactgggagtcgctcgtctgctcacaatattctattttcctcctaaaaaatgttatagtctagggaggtccaagtagcagatactcctttgagcaaatagtccttatatgtttgtgtaaggagcaggcatattgccctatagccacaattcaaatgtgtataggttccagcatggtactttgcatatattaaacactgaaatttttaaaatcaataattaaagaaattgctaaacacctaatctctgagagtgatacatccaatgtcaattctgataactttatttttcattgtaaaatattccaaaaatatggaaaagcacagaaaaataattaacactgtatctccaacaaccagatttgaacaaatgtaaaatttttgccaaattgtttcagatttgtataaagaaataacatcttggtagatatagcatccataagaaaatgaggctgggccgacatggtggctcatgcctgtaatcccagcactttgggagatcgaagaggcaggagaatcacttgagcctaggagttaggaatcagcctgggcaacatggtgaggccgtttctatgaaaaataaaataaaatgaaaattaaaaaataagaaagagatctagaaatttagtaatatctttttgaaaaaatattcatgcatcatttaataaaactttaaatgtcaaaaactaagctgaaatgttagagatagtacagtgaatatgagagattttccctgttttctgccttctaggagcattaactaggtagaaaatcacagagaagagttttagcagcagttggtaacaaaaactccaaaatcctgattttttccgcctagcaccattttttctttctgcttgctcaaaacttgagacaagtgccggtgtggcaggtctgatgctgagcctgagctccgcgttcttttttaggagtgctcgccctacgcagcccacctctacgacgccgaaaacacccagacgcctctccggaatctcccgggcctctgctctgattactgctctgccttccattctaactgtcactcagccatttccctgctgaccaatgaccgcggcctccaggagtctcatggaagggacggtacccgcttctgccacctcctggaccttcctgacaaggactattgcttccctaatgt

SEQ ID NO: 3992 - DNA, 2300 bp, Homo sapien
atgtggacaaaggaaaacacgtttttattttattttatatttattttattattattactttttgagatggagtttcactcttgttgcccaggctggagtgcaatggcacagtctcagctcactgcaacctctgccttctgggttcaagcgattctcctgcctcagcctcccaagtagctgggattacaggcgcccgccaccacacccagctaattttttttttttttgagatggagtcttgctctgtcacccaggctggaatgcagtggcatgatctcggctcactgcaaccttcgcctgctgggttcaagcaattatcctgcctcagcctcctgagtagctgggactacaggcatgcgccaccatgcccagctaattttttgtatttttagtagaaacggggtttcgccatgctggccaggctggtcttgaactcctgaccttgtgatccgcccgccttggcctcccaaagtgctgggattacaggtgtgagctaccacacctggccgctaattcttgtatttttaggaaagatggaatttcaccatgttggccaggctggtcttgaactccggacctcaggtgattcacccgcctcggcctcccaaagtgctgggatttcaggcatgagccactgtgcccggccacaaaacacatttttaaaatactaatgtgggaacatatactaagtgaggaggagtgtccctacagcaggtatagatttggcaaaggaaggcacccagttgtcctgtgcttcctgaggaaattgtcccaaacagtccttgttgattccttgttttcactggaccacctccctcttctatggtctgaatgtgtccctccctacctcagattcatagattggaatgtaatcgccaatgtgatagtattaagaagtggagcctttgggaggtgattaggtcatgaaggcagaggcctcatggataggattagggtctttataaaaggtcttgaaggagtggatttgaaccatcctgtcccaccatgggagcaacaagtcaccatcaatgaggaacagagccctcgtcggacactgaacctgttggcatctcttatttttttttatttttagagatggtcttgctctgttgcccaggctggagtgcagtggcgtgatcatagctgactgcagcctcaaactcctgggctcaagcaatcctcctgactcagcttcccaagtagctggaactacaggtgtgcaccaccatggctggttaattttctttttatatttgtagagacggggtctcacagcattgcccagtttggtctcaacctcctgggctcaagtaatcctcctgcctcaggctcccgcagtgctgggattacatgcatgaaccaccatgcccagcccctactgccatcttgatcttggacttcccagcctccagaactgtgaccaatacatttctattatttataattacagtctgtggtgttttgttacagcagcatggactaagattccccttcttttccttcactgtgtcctccttcctctccttggtccttactgtggatgcaagattcatgaaatgccctctcttcctacccttccaaatatacaccttgccagatcccaggagctatacagcacaccctgcctcctgccatggcccctccatatctcccaccgccttggggcccttcagcactgtagaaacgcttgaagctttccttctacagagtgtgaagtctgggatgatgtaatatatggtgctctcatggtgactctgggcctctcagcctgtgaagaaacataaaaaagtgtgaatttccgggcatccccacagacagcaggaattctttgcagttttaaggaatcgagcacctctgccattgacaccactacacttttggctaagcaaaggtgtgcccccataacactagcagcactagagtggggcttcatgtttagatgggttgggggaggggggaagggacacctcccactgctttcaaagggagcccacagaagggacactgctcagaaactacctcagcagggaggggcggggaagaggaggaaggaggagaaaacagggtggagtagggggaggaagagagggaggaccttgggcagagcagggaagccaacctgagcaaacacagcagcccgagtgttcccaaggccaaaatgctgagaacgtccactcctaatctgtgtggtggtctgcattgccgggccccctggctctcttctggcattctctgcctctgcctcatattcttgttgggccaggtgggcttgctgcagggacacccccagtgcctggatt

SEQ ID NO: 3993 - DNA, 2300 bp, Homo sapien
cttttttattctcgttagctgtgatataggatagtctatttatgatgaggtctcttcaactgtttggctatgtgaagtttgttctttaatagattgcacaggaagcgttcatggaaataatattccttaaatgacagtttgcaactttaaaaacaacataattcatcaccatattaagttgctctgtagcacaaagtaattgtaagaacatgtttttcttaggacatgttttcttatagattgaaatctagaaaagtctttgcatgctttatgttttcatatttgtcatgccttttttttttttttttttgagacatggtcttgctatgttgcccaggatggaattgaacttttgagctcagcgatcttcctgcctcagcctctggagtagctgggactacagatgcctgccacggcaaccttccctccttccttcttgtttatgctattggatgtgatctagttgattttttttatctcttctctccaacacattttctgtcagaattgcagcatgggaaagaaaaagcataggtagggcacgtttcctactgctccttagagctgtttgagaacttcgaggaaaatctgaaagctcttcctcattttcgggagaacataaacttttttccatgtaaaatcatttctgggctggttttggtgaatttacacctcaagccaatgggagaaaagtagccagactaagcctctagacaagaaagtaatgattatgtatgttattttgtgtgtggtctcctggactacgcataatttatgttagccctgcctgtagagttagagcacaagcttgagtgaggactcaagaactaatgacagagagagcagcagaaggaacttttcttgcaagtccttaactactgcatattgttttatgcagaagacaacatagaatcaactatttgtagcattttaaggaatccatgtacaaaattttttttgacagggtctcattctgtcgcccaggctggagtgcagtagggtgatcacagctcactgcagcctcgacctccctgggctcaggtgatcctcccacctcatcctcccgagtagctgggactagaggcatgcatcatcaccccagcttatttttttttatttttattttgtagggacggggtttcatcatgttgactaggctggtttcgaactcctgagctcaaactttccgcctgcctcggcctcccaaagggctgggattacaggcatgagccaccgcgcccggcctcaaactcttaccagaccctttaatttcctctccgatactccgattctactcaaactgttcacctacacagaggaaactcagtgattcctgggggagcctatgctatatttgtgcatcctcatttgtggacaaaattctttcttgctgtgacttgaaagcagcctccctttacctttcacttattagtcctagttctgttctctgctgctaagaaaaagggtctgatccttctttcactgatcagccctccaaatattggagaagcacactgcgtttccatgggcctgcagtccttttccgggatcatcttccctagaacccctcaactgtctctcatttcacacggtttaaccatcttacctttaacccatatttcatttgtttgtctcaatgtccctcatgaaagttgacccagacgggtccgcagaacaacttttgctgagaaggcaaaggaaattctcgcccaaattgtggagaaggcagtcgaaccaattaaacctaaagctaaaactgtaatagaaaagaactttcaagctcgcaatgaaaaggctatgcatggatttatctcatcacagccactagccacacctccactcgtgcagtgcgcctgcgagccgagcagaaaccaatggcccatcgtagtgaatttctcgggtaaagtgacattctccgcttttgaatgctcccttcgcccagccgccaacccctcgccccaatttccattttaaatgaaagtctcccactttctagctgagacagacaaaaataaaactcgggcaaaaccaatcgcagagaggcagctcactgtcacttcctgggtcacttccagaagtcacttccggggtcgaggcgaggccaacgatacgcctgctgcagcaggaggagttacgagccgggccgcgcgctgcctaaatacctaaaccaggtttagcgcctgctcatataaagctctcctaactcgtcttccggtgggaatttcttcacgtgggccggagtcggagactgagtttagctttactgaggagctctaaatttaggcgggtaagtgccgcag

SEQ ID NO: 3994 - DNA, 2300 bp, Homo sapien
ttgtctgaagacagctgggacaagggagggagggattataaaggatcatgagaactctttcagaggtgatgttgatgaatatgttaattaacttcattgtggtaatggtctcatgggtgtagacatatgtcaaaaattatcattgtacactttaaacatgtgcaatttattgtaggttaattatacttcaacaaagctattaaaaaagacatgggattgtctgatggattggacttgggtgtgagaaaaaagaggtcgaggatggtttgtatgtttttggcttaagcacctagaagataggaattaaattgtcattcctattcctcaaatagggaagaccgaaaggagcagagtttgagagaaaaagataaagagtttggttttcaacatattgttagagatgcctattagacacatctaagatattaaaacaaataaatacacagtagaaaagaaatgaagaatgaacagaactactacttggatagaaagtgcttgtccgtgaccttaccaaatgtatatttctcaagacagcattggaattacattggcccagtaggaactctcacggctcctacagacaaaaatttgtgagcatctgtttaccgttttttccttattcgatataatggattgcacagacaagccacattctttcttcttgcttttaagtaatacgatttgtttgggaaaccagctgctgggtttgttgttcaaggttgatgagtaaccttagagattgcaatgagaagctgctggtcacagacagatgccaagttcttcaaccagggctggagagcattgtagccactcttctggagagcattgtagccactcttctctgggctgacctgctcatgcagtcccccgcttttttaactgcacatataaatcatccagttatagtatgatttaaataagattttgcttccctgctcagaaagaaagtacaaaaattgcttgttgcttgatggaggctttacagagctgtgattaaaaaggagcatactacctgggtttgaatcttagctccatcactcactaggtgtttgaatgccttaaggtagtcatctctgaaatggggatcataataggacctactactctaaggtgcgattgttgtgaagattaatcttaattctggcatgaaataagtataaaatggaagctcatcacactgttattaaattaatttacttttttcctatggatatagatctaggaatctcaagatctcagcccaaggaccattacccatttctatcaacgaccaagcaggccacgggctctgatttatatcctcagccccctattccactcacctccccctttcttaatcaaagagcaccacgggatggtgcccccaaggaagccctgggaggctgaaaaggagggagcctgaaaccagagactaacagtggcaaatcgcgggtgggatttggcagttcagaaaaggaggtaccatgccaagagtgggggtagcggggtgaagtagcggggtgaagtggggggctggttcgggacaggccacaaaccagaaactgcgagaaggcgccagaagggacctgttgagatggcgcagggttgggggacccaagcgcgcggggaggggtgaactaagaatggagtcacgcggaggtgctgcgagggactggggcaaaggcaggtgattgggcgagggagtcctggttgccacggcagcgaccagaggagaaggcttcgaggagaggaggaggctgctgtcagtcctcctcctggaggtctcccgcatccctcctagagcctctgctgacgtgtcagtcggaaactgctcagaccttcgcgggcgccgcccctctgcgcttgtcttcccacatgcccccggcgctccgcctggtccctgcccgcgtccctgcccccgtccctgcccccgtccctgcccccgtccccgccccgtccccgcccccgcccccgcccccgtccccgcccccgtccccgccccgtccccgccccagcccccgccccagcccccccgtccccgccccgtccccgcccccgtcccgcccctctgcgcccgccccggcctcctcctccgcgtcaccggctccccgaggtgaccacaacatggctgcggcgcctgggctgctcgtctggctgctcgtgctccggctgccctggcgggtgccgggccagctggaccccagcactggccggcggttctcggagcacaaactctgcgcggacgacgaatgcagcagtgagtgcgctggaggggcggctggcctcggggcggctggccttggggtctccgccggccccgg

SEQ ID NO: 3995 - DNA, 2300 bp, Homo sapien
ccactgcatgattcccttaatattaaaaaaattggctcagaagtgtgcatgatggaaagagggaagtcattcatctccagtacacaggacagttctcaccagaagattgtgaatgtttagttaggggaagaaagttatctttgttggttttttaacttttccatcattttatggctccttgtatgtcaatttgcttactggtggaggaagggaaaaatacagatttacttgacagtcctgaaagcagatcttagtgactggctagaatccttatttggagttaggtacctaccttactgaatcttgttttcaagttgttcttgtggcagtatgaaaatggggagcctcctttacaccattctttgttctcttacatttttatatctcatgcacctgtatctcagtaagttccttctgaagctgatttctttcccagtccaaggaaaatatgagccccaaatccatgtagactgagagcctgacagccaggtgattctgcctgtttctgactgggtgagcagagaagtatgacatagagggcacaatgtagagaagctgatggtctttcagctcctcctggatgggttataaggtgaattcccagaacatcaggcatagatgatgggagttggggaacccaataaatgacaccttacttttccccacctgtgctcaaaacaaaattgagagacccaggagttgggcaaataggagatcaaaatgaccccattatttactgataaagctgtttggagtatgcagaaataatgggctttctaacattgcggtctaaactaagatggacttatccagtcacagacagagctatccaataggggtctccccaggtgggactgtccctgtaaaacggacagcatggaggaacagaatatgtgtttcctctccagcaggtcccaaacagaaaacaggattgggactgagcaaactcaccagccacatgaatcattcttcccctggggaagagagaatgaagggaagccaggagtattactcagatgggaaagtgggttccagcctcctatccacccactgcccaagaacagtcagtgcccagtgttgacgcaaaagctcctctagagccaaacgtgaattcgagattatctcaatcattaacgtggataagactttgctctggtgacacttggctattgacagactaatgtttttctttttcttacaggagacggattttgtttgttttgatggaggaagagatgattttcataattataatgtagaagaacttttagggtttttggaactgtacaattctgcagctacagattctgagaaagctgtagaaaaaactttacaggatatggaaaaaaaccctgaattatctaaggaaagggaacctgaacctgaaccagtagaagccaactcagaggaaagtgatagtgtattctcagaaaacactgaggatcttcaggaacagtttacaactcagaagcaccactcccatgcaaacagccaagcaaatcatgctcagggagagcaggcttcatttgaatcttttgaagaaatgctgcaagataaactaaaagtgccagaaagtgaaaacaacaaaaccagcaatagttctcaggtctcaaatgaacaggataagattgatgcctataaacttttgaaaaaagaaatgactctagacttgaaaaccaaatttggctcaacagctgatgcacttgtatctgatgatgagacaaccagactcgttacttcattagaagatgattttgatgaggaattggatactgagtattatgcagttggaaaggaagatgaggagaaccaagaagactttgatgagttgccattacttacctttacagatggggaagatatgaaaactccagcaaagtctggcgttgagaaatatccaacagataaagagcagaattcaaatgaagaggacaaggttcagctaactgtgccccctggcatcaaaaatgatgataaaaatatactaacaacctggggggacactatcttctctattgtcacaggaggtgaagaaacaagagatacgatggatttagagagctctagttcagaggaagaaaaagaagatgatgatgatgcattagtcccagatagcaaacaggggaaaccacagtcagcaacagattatagtgaccctgacaatgtagatgatggtctttttattgtagacattcctaaaacaaataatgacaaagaagtaaacgcagaacatcacattaaaggaaaagggaggggagttcaggaatccaagaggggcctggtacaagataagacagaat

SEQ ID NO: 3996 - DNA, 2300 bp, Homo sapien
gaacagtcagtgcccagtgttgacgcaaaagctcctctagagccaaacgtgaattcgagattatctcaatcattaacgtggataagactttgctctggtgacacttggctattgacagactaatgtttttctttttcttacaggagacggattttgtttgttttgatggaggaagagatgattttcataattataatgtagaagaacttttagggtttttggaactgtacaattctgcagctacagattctgagaaagctgtagaaaaaactttacaggatatggaaaaaaaccctgaattatctaaggaaagggaacctgaacctgaaccagtagaagccaactcagaggaaagtgatagtgtattctcagaaaacactgaggatcttcaggaacagtttacaactcagaagcaccactcccatgcaaacagccaagcaaatcatgctcagggagagcaggcttcatttgaatcttttgaagaaatgctgcaagataaactaaaagtgccagaaagtgaaaacaacaaaaccagcaatagttctcaggtctcaaatgaacaggataagattgatgcctataaacttttgaaaaaagaaatgactctagacttgaaaaccaaatttggctcaacagctgatgcacttgtatctgatgatgagacaaccagactcgttacttcattagaagatgattttgatgaggaattggatactgagtattatgcagttggaaaggaagatgaggagaaccaagaagactttgatgagttgccattacttacctttacagatggggaagatatgaaaactccagcaaagtctggcgttgagaaatatccaacagataaagagcagaattcaaatgaagaggacaaggttcagctaactgtgccccctggcatcaaaaatgatgataaaaatatactaacaacctggggggacactatcttctctattgtcacaggaggtgaagaaacaagagatacgatggatttagagagctctagttcagaggaagaaaaagaagatgatgatgatgcattagtcccagatagcaaacaggggaaaccacagtcagcaacagattatagtgaccctgacaatgtagatgatggtctttttattgtagacattcctaaaacaaataatgacaaagaagtaaacgcagaacatcacattaaaggaaaagggaggggagttcaggaatccaagaggggcctggtacaagataagacagaattagaggatgaaaatcaagaaggcatgactgtgcacagttctgttcacagcaataacctcaactctatgccagctgctgaaaagggtaaagacacattaaaatcagcttatgatgatacagaaaatgacctaaaaggagcagctattcatatctcaaaaggaatgctccacgaagaaaagcctggagagcagattttggaaggtggctcagagagtgaatctgcacagaaagctgcagggaatcaaatgaatgacagaaagattcaacaggaatccctgggtagtgcaccactcatgggagatgaccaccctaacgcatccagagacagtgtggagggagacgctttggtaaatggggccaaactgcacacgctttcagtggagcatcaacgtgaggaattgaaagaggaattagttcttaaaactcaaaaccaacctagattctcctctccagatgagattgatttgcccagagaactggaagacgaggttcccattctgggaagaaatcttccctggcaacaagaaagagatgtggctgccacagccagtaagcaaatgagtgagaagataaggctctctgagggagaagccaaagaggactccttggatgaagagttttttcatcacaaggcaatgcagggcacagaggtaggacagacagaccaaactgacagcacaggaggaccagctttcctttctaaagtagaagaggatgattatccctctgaagaactactagaggatgaaaacgctataaatgcaaaacggtctaaagaaaaaaaccctgggaatcagggcaggcagtttgatgttaatctgcaagtccctgacagagcagttttagggaccattcatccagatccagaaattgaagaaagcaagcaagaaactagtatgattttggatagcgaaaaaacaagtgagactgctgccaaaggggtcaacacaggaggcagggaaccaaatacaatggtggaaaaagaacgccctctggcagataagaaagcacagagaccatttgaacgaagtgacttttctgacagcataaaaattcag

SEQ ID NO: 3997 - DNA, 2300 bp, Homo sapien
atgaggaattggatactgagtattatgcagttggaaaggaagatgaggagaaccaagaagactttgatgagttgccattacttacctttacagatggggaagatatgaaaactccagcaaagtctggcgttgagaaatatccaacagataaagagcagaattcaaatgaagaggacaaggttcagctaactgtgccccctggcatcaaaaatgatgataaaaatatactaacaacctggggggacactatcttctctattgtcacaggaggtgaagaaacaagagatacgatggatttagagagctctagttcagaggaagaaaaagaagatgatgatgatgcattagtcccagatagcaaacaggggaaaccacagtcagcaacagattatagtgaccctgacaatgtagatgatggtctttttattgtagacattcctaaaacaaataatgacaaagaagtaaacgcagaacatcacattaaaggaaaagggaggggagttcaggaatccaagaggggcctggtacaagataagacagaattagaggatgaaaatcaagaaggcatgactgtgcacagttctgttcacagcaataacctcaactctatgccagctgctgaaaagggtaaagacacattaaaatcagcttatgatgatacagaaaatgacctaaaaggagcagctattcatatctcaaaaggaatgctccacgaagaaaagcctggagagcagattttggaaggtggctcagagagtgaatctgcacagaaagctgcagggaatcaaatgaatgacagaaagattcaacaggaatccctgggtagtgcaccactcatgggagatgaccaccctaacgcatccagagacagtgtggagggagacgctttggtaaatggggccaaactgcacacgctttcagtggagcatcaacgtgaggaattgaaagaggaattagttcttaaaactcaaaaccaacctagattctcctctccagatgagattgatttgcccagagaactggaagacgaggttcccattctgggaagaaatcttccctggcaacaagaaagagatgtggctgccacagccagtaagcaaatgagtgagaagataaggctctctgagggagaagccaaagaggactccttggatgaagagttttttcatcacaaggcaatgcagggcacagaggtaggacagacagaccaaactgacagcacaggaggaccagctttcctttctaaagtagaagaggatgattatccctctgaagaactactagaggatgaaaacgctataaatgcaaaacggtctaaagaaaaaaaccctgggaatcagggcaggcagtttgatgttaatctgcaagtccctgacagagcagttttagggaccattcatccagatccagaaattgaagaaagcaagcaagaaactagtatgattttggatagcgaaaaaacaagtgagactgctgccaaaggggtcaacacaggaggcagggaaccaaatacaatggtggaaaaagaacgccctctggcagataagaaagcacagagaccatttgaacgaagtgacttttctgacagcataaaaattcagactccagaattaggtgaagtgtttcagaataaagattctgattatctgaagaacgacaaccctgaggaacatctgaagacctcagggcttgcaggggagcctgagggagaactctcaaaagaggaccatgagaacacagagaagtacatgggcacagaaagccaggggtctgctgctgcagaacctgaagatgactcgttccactggactccacatacaagtgtagagccagggcatagtgacaagagggaggacttacttatcataagcagcttctttaaagaacaacagtctttgcagcggttccagaagtactttaatgtccatgagctggaagccttgctacaagaaatgtcatcaaaactgaagtcagcgcagcaggagagcctgccctataatatggaaaaagtcctagataaggtcttccgtgcttctgagtcacaaattctgagcatagcagaaaaaatgcttgatactcgtgtggctgaaaatagagatctgggaatgaacgaaaataacatatttgaagaggctgcagtgcttgatgacattcaagacctcatctattttgtcaggtacaagcactccacagcagaggagacagccacactggtgatggcaccacctctagaggaaggcttgggtggagcaatggaaggtgagatgcctatggccttgtagaacagggctggagaagca

SEQ ID NO: 3998 - DNA, 2300 bp, Homo sapien
atgcaaaactgatcaaactgtgcactttaaatacatataacttattgaatgtcatatttccctcaaagctgtaaagaaaaaaaatcctaactttcttagataaaagtagtagtctctacttttctctaccttttaaaaaaaatgtattctgacagcataccctagcagtatataaaattattttcttttatagcttcacagtatactttgttgtatttaatatgtctttcattcatggccattttggttgtttctagtcttttgttataagtaatgctggaataatatagttttgtgcatatattttttcagcatttgttgttatatccccagtatctttgagatagatctttagaagtaggattgttgagtcagtaggtaaatacacaagttatttcaggagacgttgccaaatcataggggttgtatgattttatataaagatcagcatagcatgagagtgcctgcttcctccacattctctcacctacagagtgtgttgtcaaatgtttggatcttgccaagataagtgagaaatcatatttcattgtaggttcattttgtatttcttgtatcatgagtgaggcagagcatgtttccatatgtttttaaattatttgcatttcttttcctgggatctgttcattacctcagcccatttttctataggtttgctagcggctatcttcttatttgtaaagcactttatattttaggaatattaatccttcataatatgttacaaatattttttcttaggttaccattgccaaagtttgattattttgcaatttttttggatggggttgggcaagtttttttggttttccagtaatcaaatttacgaatattttcctttgttgcttttggattttgatacataattaggaaggtcttgcccactcacataatacatagagacagtcactcaattttttcaacttgtttgttttcattttttacattcaggtttctgattaacttggaatttatgaacaatgagaaaaagatccagttttatcattttccatattgttatctagatatgtaataccacttattaaaaagtctgttaaccagctgccttgctgtatcgcaaatttccagtgcagttgggtctatttctggattttttattctgccccgtggtcggtctgcatccttgggccagtaccatactgttattacagatcctgccctcctcttgtaccacacccttcactgctcttctttctcagggttttcctgcttgttcttgcttgattgttcctctgagttgactttatattcaactcgaagagagacctttaaaggtctaaaaatggtattttttatctacagataccattttttccccacagattaaatgtccccggtttcttcaacttttggaacgtgatttccatactattcattatccttgtccttttccacaagtcatataaccttaagatgtggccggacacttgtagtcccagcttcttagatggcttgagccccggagttcgagtccagcctgggcaacatagggagactccctccccttccccgcagccaccatctaaaaaaaaaagtgggacccataactcaacccatgtgcatgggggtgacacgatgacatgactcctgggtaagactttttaatagagtgtcggcaagaatgtgagacagcgagcgcaatggaggtctggaggcggaacagtaagcagaggactgagtgggcaaggaagaaaggccgcgcactgcagtggcgccccatctgagcggtggtccttccacgctgtgacaggaagggccagctccgggccggcacgagagacctgcttttctccttttccccagctgccgcccacaatcctcctccaggtaaatccctggcctcattactctggggctctttaagtcgccggttcctggcgaaagcgccagtcacttccgcctctttttactgggattcttccgctctagccctattcgctcttctctcccgtcccctcgatagttggttccgtccgctctggccccgccctcgccggccggctcctttggtgccttgaggtgcgccaggggcagtggctgatgacgtgttttataggcggcataaagcgaaagtgcaggcagctgtggaaggcgaagttcaatcccagagtccgccccctgaattggggcctttccggaggaggaagctctgaaaaacagggggcccagtgccattccgcagggaattgtcgcttgcgttcagctgttctacacaatggactcagtacctgccactgtgccttctatcgccgctaccccgg

SEQ ID NO: 3999 - DNA, 2300 bp, Homo sapien
ggaaaatcacataatctagcttagtatttatagcattatttttaaattcagccagtagtcaactttgagtaggatttctgagatgttttctggagagcaaaagaggtgtgtatcttagtacgaagatcatacctttaattatgtttcctcagagtctttttgagtagtcgttgtttttagatttctttctggctatttggagttgtcaaataagtgactttgagtaaataaaacgttaatatatttattacaaaaatattagccatttctgttattcaagttaagtgctcatttcgtaagactggtgctcatttagatatataaacatatctttagctgtgcaaagtaagatatttacctcagtgctttatctgtcagaccacaacatatcactactggttaaatttgaaatgctttttaacctttttaagttttttcatcttgaggattcattatgctaaaccaaagttttattaaattctcatttggttacaattctgacagttgtattagaaactatatacatctattaataaaatgtttgacatcaaatttaattttatttctcttttctaggtgaaggatagagtatatcaaggtaaatctttaggcttttttgttatttgtactagtccctctgtattggtgtttgatatggattttatatataagtagttttagtaacttctgatgtctgactgacttatagcttctgaaaactttactgttcctaggttgccaggttgtatgatagagtaaatggtgatgctaccaactgagatgggagatgaggaggaacgaattgtgggagtagggagaagatcattaatttggggcagattgaccttaaatgttgatgtagtaccaatttattacatgtgaccagtgtccctgtgctaatgatttagtcagtacattaaatatttatttaagtagataatttgagaactagaaatataaatcagcacgcctgcattttctgtttctctttgcaaatgacatatttgaagtgatgccattttctgagaagaaagatgcttcatgcagggaggaatattgagctataacattttactgtatttcccatcttggaaataaattaaactctcattgaaataaaggttcttattatatttttcttaaattctaaccgtatttttacatccttattcttgttagcagattgctttttgtattaatctgttctcacactgctataaagaaatacccaaggcctggtgtggtggctcatgcctgtaatcccaacactttgggaggccaaagcggaggattgcttgagctcaggagttcgagaccagcctgggcaacatggagaaaccccatctctataaaaaaaatataaaagttagctgggtgtggtggcacacacctgtagtcccagctactcaggaggctgaggcaggaggattgcttgagcttgggaggcggactttgcagtgagctgagattgcaccactaaactccagcctggacaacagagcaagaccctgtctcaaaaaaagaaatacctgatactgggtaatttataagaagtttaattagctcatgtttctgcaggctataggaagtatagcggcatctgcttctgaggaggcctcagggagcttttactcacagcagaaggcaaagcgagagcaggccatcttacatggtgggagcaggagcaagagagagtgagcggggaggtgctgcacacttttaaaaccagattccacaagaactcagtcaccatcacagaatagcaccacagggatggtgataaaccactcatgagaaatctacccttatgatccaatcaccttccaccaggccccacctgaacactgggtactataatttgttatgagatttgatggagacacagaaccaaaccatatcactttttaaaaccataatagttatgctgagaagttattttttgtcatagtgcaagataacatgtctttgctgctgatacattgggtaattcaatttcatttagtgatcataataaccttattatttttttcttttttcagtcacggaacagcaaatttctgagaagttgaagactatcatgaaagaaaatacagaacttgtacaaaaattgtcaaattatgaacagaaggtatgattattctttgttttttttttttttcatggtcccagcttgaattatttgtcacctatcttatagttcagttactatggtatttttaaatagtatttattattacattaattcctataaaccatccagatcttaagcagtcatatgtgtaaagtactgttttcttctg

SEQ ID NO: 4000 - DNA, 2300 bp, Homo sapien
atgaaaactacatgatgttgggttggaaaagtaactttttctggttttctttggaattaattcactaataggagtgttttgcattaggttcagattgcacttaatgaagctaagcttagtgaagagaaggtgaagtctgaatgccatcgggttcaagaagaaaatgctaggcttaagaagaaaaaagagcaggtaaaggaaagtgcgtgtcccaggtcatgtaaaatagagaactcagtatcatacctcatgaatgcctttactcagatctatttttagggtaatatatgtgcaggattctgttcttagatatgcaaagtttaaactatgcttccaaaattgagtgtaggtatacattctctatctgttctggattttctgttctgtacaatttattttggctatcagagtgtgtagtcttgttttgtcagacaccaattgctattaacttgagtagcctcgagtgggtagtagattggctttttagacccaagagttagatattttataaccctcctttgagtagttactgcttcactagccaagggaaggttacatgatcaggagtgtggacttgggagatagtaggatgagcccttctgttccttctggaagtgaattatttgaattggctacaattttctgaaggatgcaataaacaagatcaatttccttgatagctctgatgttctcactacagctctgagggttggggccactgtctcctcccacttaaccaaggtcttagcccatagtgataggccaaggagaggcatggttccttatttacctgtctcattcatgtggtcctaatgtctccagtgcaaaagccctaacctgtgggaatcatgtgttttaactttgcagttgcagcaggaaatcgaagactggagtaaattacatgctgagctcagtgagcaaatcaaatcatttgagaagtctcagaaagatttggaagtagctcttactcacaaggatgataatattaatgtaagtgcgttcatgaatacaagcttaattcttgtgaattatcaaatctgttgaattaaatggaaagactcttaatgcccttttacttcttttctaggctttgactaactgcattacacagttgaatctgttagagtgtgaatctgaatctgagggtcaaaataaaggtggaaatgattcagatgaattagcaaatggagaagtgggaggtaagatcagcctcaaggaggatggaccccttttgccttcctgtctttaagtgcaccagtgctacttttcagctggctgcatttcctcttaagctttcgaggtgtaaatacattggatttgaatgtgtgtctgtttgcattgggcagaggtggattgctagggtgaggtgtagcagtaagcatgcagtgaacactgactttgttttcacattgagactagaagggtgcacgggagctgcactggtcatgtcttacacctctaagtattggacacatacagtagtagaaacttgtttttcaatttcatggagataacattttaaaacttgtcatctcagtagctgtgtggttttaaggcccacaactggttttaagagtactgaggtggttggaggcataaactgactaaggccatgaaagaaaaccacaactggttttgagagtactgaggtggttggatccataaactaaggccatgagagtggaggctatagtgttgcagtgtttactgatgaggaaaatgtttctagatgccctctctcaagttggatattgcttgtgtagtgggtgttttaaaccacacctggtagtagattctggaggagaataggagggaatctttctgaataagacactaagcccagatggaagaaagagctttatctcacatgtttcttcttgctcaataatggcatgtataacatgtttattgtacaaatgggaattcactttttcagtcttaagtttgcagttctcttaaaagtcagtctaatccttttctgtttttgtttgttctttaaatgtttgaacatgacaattgtttagttttgggtaaatcaagaaaatatagatttaaaaagcaagggaagaaaaagcaatgaaagaaagccttttgttttttaggtgaccggaatgagaagatgaaaaatcaaattaagcagatgatggatgtctctcgggtataatcgtttttagagtcccataattgcctgtgaatacttttactatgcctcacttttatgaatacttgtctcttctgcaatttttagacacagactgcaatatcggtagttgaagaggatctaaagcttttacagctta

SEQ ID NO: 4001 - DNA, 2300 bp, Homo sapien
aaaccctccacggagaggtaagggagctaccttgtaaagggcaacaatctgttttttgatgtaaaatgtatataagtgactttttgtttctgtgtgtaatggttatggtaccctaggaataatcccaagaactgaataaagaaaaaaaggctgtcttaaaatgctaacaagatgctgtcatctttaggtcctctgagccagaatggctcttttggcccatcccctgtgagtggtggagaatgctcccctccattgacagtggagccacctgtgagacctctctctgctactctcaatcgaagagatatgcctagaagtgaatttggtgagcattcacatgtttccttgcaatactcttttgggtggctttttcccttttatttgagaattctaatgcaaacactttagaattcgggtctgtccagtatagaaaagaaaatttcttaatttgtcttggtggattcaactgcaagtattcaactgcaagatttgctttagaacagaaggcatttattattttcctttattgttttgtttctctttaattttttactctgaagtgtaagcccttatctttcaattaaagttctgtgggattcctctcccaaatacagctgacccttgaacaacacaagtttggtctgtgcaggtccacttctatgcagatttttttcaaaaaatattttgggaaattttttggagctttgcaataatttgaaagaacttgcagatgaaccacatagcctagaaatataaaaaaattaagaaaaatttatgtatgtcgtgaatgcataaaatatatgtagatactagtttgtgttataaactattggaaaatatacaaagatctattttaaaaagttaaaatttatcaaaacttgcacaagcacagatgtacatgacaccattcacaattgggaaaaagtaaacacatgtaaagatgcagttttaaatcataaatgcataagattagctgtagtacatactgtagtactacaataatttcataaccacctcctgttgctattgcagtgagctcaagtgttgtgagtatccgcttaaaacaccgtgtgatgttaatctgcatgtgggcagttcatctctccagtaaattgtgtatcacagtaaacataatctctcatggttcttgtgtatttttcatgtttagtgcaataacataaaccttgaataacaccatgggacccatataaaatgccactagtgatgctggaagtattctcaagaagcaaagtcatgacactactagaaaaagttgaattgctttgatatataccatagtttggagtgtgcagcagcagtcatttcagtcagacgattcatcttgtaaacagaccatgtacacgtacagtacaaatacaatacagtgttataaatacatttcctcttccttatgatttcaataacattttctttagcttactttattaaagaatacagtatacaatatatatacagaatatgtgttaactgtttatgttattggtaaggcttctggtcaatagtaggctatttactagtaggtaggttttggggagtcaaaagttacacgtggatttttgactgcgcaggggatcagcacacctaacccctgcattgttcgagtcaactgtattataaaagtagccttaataactttatcgtttatgcggcatacatgtttccacttgtcattactatatagtatgaaacgctgttgagtctattttgaatcctaaatatgtctataatactcagtaagatacggaagtcagattacatatacactgaacaaaaatcaccatgtagaatactgtacatgtaagtctgtagcttgaagtatagaaccagagccattaatgtgcagggtttattgttctttcagtgcaaggcagttcttattttaattctttaagtccgtgcataaattgtaagtgatttcccttcataaatattgggagacccatttttaatgttgctttccagataagacttgaaccctgatctgtccacaatttattatttcttccaaaaaatacatataaggactctgttatttctttctcaaggatcagtggacgggcctctacctcatcctcgatggtcagctgaggcatctgggaaaccctctccttctggtaagggagcaagagtgttcaaagagtctaaaaccatgcaggaagtggggagaggattttttttttaatcctcctcacagagtacacaagtcagaataagtctacatcagttctctggtctttaacagatccaggatctggtacagctaccatgatgaacagcag

SEQ ID NO: 4002 - DNA, 2300 bp, Homo sapien
gaatgaaaaatccattctctaccatgtaacagcgattattcagagtaccttctgtaggccctacatatattaacacaaattctgacatctctaaatctgtaataggaccatcttgttctaaatatgcaggaacacaggcgcagagagtattagatttgctgatggtcacacagcatgtaagaggctggctggaattccatgccaggtttgactccaaggccacgttctttccacctctgcttctcctttctaacaaagtagtctctacactcttcgaagtctcctacttcaaaggggtctcgggtcttatccaagctgctcttggataaaaacatttctcaagaaatgtgtattcctggagtcctgtgctggaacttggaagtattttccaagagaaacaatgttatgtacacaaattatacaggcacagctctattcatcttcattcactagtaatactgtctactatgagatactgattaatcacttcctatgggaaagtgggttggaaactctcaatcattaaaattattttaatttcaatgtcgagaatcacagtgaggtatgatcagaggacttaccagccataacagctatacaagttacaagagaatacacttatgtggacactgtttaaggacactgctgggaactggctcaacgggtaattatagacttccactattcagtatttcacttccagcaaacattcttctgttatcaatctgtaatttcagatcattcaaaatagggtttgcctagtatacaactgtaggtattcttaaatagcacacttccaaatgaagacataataatgaattacacaatttacaatgaatttactttgcctaagagcattaaacactgagacacacaagagtggggacttttcacttttgtttaagttaattacagttacagcagatgctctacacaggttaaatgtctaaccaaacaggagagaggagaaaaggccaatgaatccgtcagatttcagcaacactcccaagtcaaggataaaagtaagatcaatattgccatgcaacttatagcccagttcagtccacacttctaagtacttactgctactggacgctcagccaaagatgtaatgctgggaactgaggggacttcaggctcttggagaacagtttgcttttttaaaaaataaatgagatagtacagatagaacacacaaataggagatgaggcaaagagagagttgtaggaagagctaaatgttcctgaaataactaattattcaaaatgggtgcatttaccttgccttcatcgagtaccctggtaggggaagagcctcttgagctgctgttcatcatggtagctgtaccagatcctggatctgttaaagaccagagaactgatgtagacttattctgacttgtgtactctgtgaggaggattaaaaaaaaaatcctctccccacttcctgcatggttttagactctttgaacactcttgctcccttaccagaaggagagggtttcccagatgcctcagctgaccatcgaggatgaggtagaggcccgtccactgatccttgagaaagaaataacagagtccttatatgtattttttggaagaaataataaattgtggacagatcagggttcaagtcttatctggaaagcaacattaaaaatgggtctcccaatatttatgaagggaaatcacttacaatttatgcacggacttaaagaattaaaataagaactgccttgcactgaaagaacaataaaccctgcacattaatggctctggttctatacttcaagctacagacttacatgtacagtattctacatggtgatttttgttcagtgtatatgtaatctgacttccgtatcttactgagtattatagacatatttaggattcaaaatagactcaacagcgtttcatactatatagtaatgacaagtggaaacatgtatgccgcataaacgataaagttattaaggctacttttataatacagttgactcgaacaatgcaggggttaggtgtgctgatcccctgcgcagtcaaaaatccacgtgtaacttttgactccccaaaacctacctactagtaaatagcctactattgaccagaagccttaccaataacataaacagttaacacatattctgtatatatattgtatactgtattctttaataaagtaagctaaagaaaatgttattgaaatcataaggaagaggaaatgtatttataacactgtattgtatttgtactgtacgtgtacatggtctgtttacaagatgaatcgtctgactgaa

SEQ ID NO: 4003 - DNA, 2300 bp, Homo sapien
ccattgtgaagtcggctgcccagtgtcaacagctgctaggtctcaccacctcacaagtaagagatggctttctatttcaaactatgcaatattagttaatatacagaatgggtatacataggtgcttactaattggctacagtatggaagggtgtgttctccagtaataaagaaaatcttatcatttgtctaattcacttacagaattactctctcagtacatcttaagcactctgtagtagagacaggatttggattttcttttttaaatcccagatttcagtggtatcagcttgtgacctgagtaatctgtttaacctgagcttcagttttcctcatttcgtaaaatgagaataattatattctcactgggttattgcaagagcaaatgaaatcatgtgaaagtgcaaaacaaatgctagtagttgttacacatcgcaaaatggctcagagcacgggtttttgtcagagctttttgaagctacaggcgattcaaagtcagtacctacacatttaaattatcttaatagataaaaacaaataactattgcggggagacgataagagtttagatcttccaagtaccaagcgtatattcttgccagaaatcgttgtgtgtcgggggcggatggggggtgggggaggccgggggtattctactcatacgtggtttcatactcagtgaaatctcaaacaataacttgctttaaacagagaataattaatggcgagtttgcaaacaatagcattttggcagacagttcttaagttcagtaaaatgtgcaaaaacctaagcaaggttttatgtgtatataaatcttgtcttttattttttaagacaaccctgaagttttctgtggaaaccagaaagggcaagaaattggtcttaggttgctcaaggaaactggtactcacttgtaccctgcggctatacattatatacaggaaaaggaggagggatccaaggagggcgtggagctcctgtgcgtggtccattaattcacattttgctctcttcggttcacatcctgcgcggactccacccaaggcaaccgagcgagggggtgggtgggactcacagcctaccaaataacagtcccagaaaccgaaacgaaatcgaggtggaattctgaaaacacggctcaccagaaagaggggtggagaaggagcgcgagaggagacccttcttttggcagaagaggtatccctggccctcgttgcttcctgggctcccccccatcccctcaatcgcaaacagttccctcctttcctacgcatggaagaaggaagacacacacagagcaaggccactcatccttggaacgtgggcggagaacacacaagtattcctcagagaatttcaaaaggaaatcgaggaaaagcaacctgggagaggaggaggaaaggaaactgactgccaagtgggggacccgcgagacggtggaaaggaactaagcagatagcctgctggggcctgcgccccaggaaagaagggctacctgttgaatggaactgtccctgcggaggcggagagggaagaaggcgagtcaccccagagagcggagccgttgtccctagagcagcctcgctggggctggtggcgagggatctcagccccagtgcctgcggagccccaccctgagaagccttggctgcagatacggtgatgagagacaccgacagaaacaagggagaggcgcacgactggagccggtctggcctgctcccgcggttagtcactcacatctgatactcgtctatcgcctccaccagctggccccaagagtcgaagtcggcgcctctcctaaaactggcgccccagcgctgcagcagactccgggtcacctccgacatggccggtccccaccccgtcccctcccgcccctaccccagcaaggccgggttctagggcgccatcctcccccggcctggccccgacattaacagggccaggaggaaccgctacggccaccaccgccacccgccgaggagccgcccaagcccatttgccgccacagccaaactttgcggctccaaagcgaccgccccgccgagaccccgcccccgaggccccgccccgggttaggttgaggccgccccactgcgccgagggccgccatcgctattgcggcattctccctcggctccggaggtaggggcaactcttctcttcctgtctgggaaaaagaccatagctcaaaaggaaggccgagggagaagttagaaagggatgatgaacgaagcgttttgaggggactgcaacgccgcggcaatacccgcccctgagctgcgcgcactac

SEQ ID NO: 4004 - DNA, 2300 bp, Homo sapien
aaggccgaggtgggtggatcgcttgagctcaggaatttgagactagcttgggcaacatggtgagacccggtctctacaaaaatcagccggggatggtagccacgcctgtggttctagctactgggaagactgaggagggaggatcccctgagtccaggagacgtaggctgcagtgagccctgatctccccatggcactccagcctgggcgacagggcaagatcctatctcaaaaaaggaaaaaggaaaaaaaaaacaaaaaacaaaaacttggaacaccacctaagtgagatgccaacttaaaaaaaaaattaagttccatgccttctacttaaaaaaaaaaaaacgcgcggtggctcacgcctgtaatcccagcactttgggaggccgaggcgggcagatcacaaggtcaggagatcgagaccatcctggctaacacggtgactctactaaaagtacaaaaaaaaaattagccgggcatggtggcggtcgcctgtagtcccagctacttgggaggctgaggcaggagaacccaggaggcggagcttgcagtgagccgagatggcaccactgcactccagcctgggcgacagagggagactccgtctcaaaaaaaaaaaaaaaaaaaagcagcatgtcttgtctaaatgtccttgggtaggtagtgcagcagataataaggagaaagcccaggcgaagacctaaacatggcaattagattccaggaagtaactgagaaaaaattctgataaggttcatttaatttgaaggcactaaaaaattctgacaatcgacttttcctagtattagaaaataatggtggctgtacagtgtatgaaatgcctacattaagtgcttcctttatgctatttattcatgacaaagctggttttgaggagcaccacatacttaatgaatagagaatacagtgtgtacccaacgaaaaactgagcaggtttatttaggactcaaaacatttaacgagttatttcagaaaatatcatcttctacacatcttccatataaattccgatagcctaatacagcatctatgtgcctacaaataatatcacactcagcacttgaggctgcgaaatcttccacaaatacttcttttaatgcggcctcctacttcctggatgaaaatgtctgaagttttgcgaatctttacttcaggaaagaagagggtttctgcccctgccccatcttctccccttctgcgacccggcggtcttcagttttcgggagttcctagggtgggatagaagaacgacacacccacccgcagggacaagggtgcctttagagccaccaatacaacattcggatcgaagctgtaagctaacacacttccacaagaggactcccgctcctaacaagggacccccaccccggaagccccgagtccccagaggaacctacctgagcgccgcccccgagctctgagcgcccacttcctgtttaccacccagcctcttcctcccgtgcccagtcccgttcgaggcagcgggcggcgaccgtgcgcacgcgccaacacttgagttcccctctttccaaacaggcatttttgtggaaagccgatactgtcaacccgggagaggtggccagacaacggccgaacgaaccccagtttagcttgtattataagctctccaatgaccaatggagatgcggggcaaggggattcagcggatctagctgttaatgccactgatttgtggtgaccaatatggattttctttctgtcgtttgtttcaaggcactagaaggagacttttggtccactgtccaggggtctatggagactaatgtaaaagggggtgatcctattgcttgagactccggggaagtagcgggggatattactgagaaacacccatcctctgacatacttaccaaatttctcagagtcggttcagcagttcttctaagggaagaagggcaatatatcggagtccacaagcgagaaaaagagggagtcggagaaccgagactacagaaccagggtgacggaaaaccaggacggcgccaagccggagtcacgtgacccggcggccatgatagctaccgaggcggtagtgcgcgcagctcaggggcgggtattgccgcggcgttgcagtcccctcaaaacgcttcgttcatcatccctttctaacttctccctcggccttccttttgagctatggtctttttcccagacaggaagagaagagttgcccctacctccggagccgagggagaatgccgcaatagcgatggcggccctcggcgcagtggggcggcctcaacctaacccggggc

SEQ ID NO: 4005 - DNA, 2300 bp, Homo sapien
gtgtcctcattttctcttaactctgtttccctgccattcttcctccatatgttttaaatacatcttctcaacctcctttgcatattcgtctcactctggtttcagctacctataaagaaggaaaataaattttctctccagtttttcttgctttttttcaagaggttttccattattaaatcactgctgttcaaattgtagatcaccttctgtgtaggtgggtagactcaatctccttcctgcttttatgtccttacattcttccccttatattcttcatctagtcataatgagcttttcacttccttaagcatgcctagttcacctttaatcacttccttcggaaagagtcactgaacttaattctgggttaattccccttgtctgcattctcatggcactctacatccatggtagctccaattacattgcattgtaattgacaaaagtttcttgactttttcactttcctacataaggcagaaaaacctcttatccatcattaaattgtcattgtcccaaacaggaccttgaacatattaggcactcaaataacgaacaaatgaatgaattgctatttaaattattttttgcagttactttcaaaaaattccaacagaagccccacagctggaactcaaagcaaattatggtctcgtagagcctatacctttcgaatttcctcctacaagtgttcagtggacaccagaaacattggctgcatttgatctcaccaaaagacccaaggatgacagtgtatgagattgtttttttttttccctctcattcacaaaagtttaaaagaaaattcagagttagcattttgatatttttctctaaatagatacatatctttgtctaaatgttaagttagctagttatatagtgcttaatgtaatctgtggtagaacattctcagagataagacctctaggccttaaatgtcttctgattttctacataatgacattcttttcaacacattatcttgcctctttacaacttgtcagtgcctcctttaagaagaatgtgggagaaaagatcatccatgtttatactgctatagcaatactctgtttttgttttagcaaattgcagagcatttgcagatttggcctaatttcagtattctgtgaatccaggtgtaaaataagagtgcttttatttattggtatctaagtacatcttggtgttctaaatcaaatagtaaattaagtggaaattttgaggtctaactaccaaaagactagggatctgtgacaaatgaataagaattattttacagccattgctcctttcttgagattgagttgtgtttatataatttcctttccatattaaaatttattccttaaaataactatctttatattctgttcagctataaaataatgccctaagagatagcctattgctgtcataagttatgtctaagctttagggttcttttcttaattattattattattatactttaagttttagggtacatgtgcacaatgtgcaggttagttacatatgtatacatgtgccatgctggtgtgctgcacccattaacttgtcatttagcattaggtatatctcctaaagctatcatgtatagatagatcacttagaaaaaagtatggagtaggagtaccattagcttggtttttgcctaccaaactaggttttcatctctactgaaatgttgttttctgattatatcttaaaatgaattggtctgtagtttctggaaatagctttgtcagtatccatgttatgtaatttaatatagcatcttttaaaagtctgaagtggaaaagatttagtgtttgttttctcaatcttagtttatgtacttaaactgtggtttttttctccctagactaaacccaaaccagaagaagaagtgaaacctgtgaaagaaccagacatcaaacctcaaaaggacactgggtgctacatctcctaaaatacaacttgcacttagaatttctctagcagtaaataagataaaccacagaatttcagttcttatttctcaaaatgatttctctgaagcttgtagaataactattatattcagagggttatctgccttcagcttacttgttcttaatttttaatacagcggagatgtttcttgctttgttttcagactctcctttttaatcaggacaacatttgaaagattttattgtgcctctaaagggtatatttgggggttgggtctttttgttaaactctggatagtaataagtttcaggtcagtataggcccgaatcatgtggtttcaggtatgtttttcttttttcttt

SEQ ID NO: 4006 - DNA, 2300 bp, Homo sapien
atgttacttcaactaaaagtgtataatgggttgtctttttatttatgaaaataaaagtaattttacttacaatttcattgagatcttttgtttttcgacaaatatttttatacttactaagccagtagcagttaaaacagtgcaaaattattcttcacagtaatgttttaaaatgacagataaccaggcatggtggcttacgcctataatcctagcattttaggaggcttgggcaggaagattgcttgagcccaggagttgagaccagcctggacaacgtggtgaaaccctgtctctgtaaaaaataaaaaattagctgggtatggtggcacgtgcagtgaaccacagtcatgccactgcactccagcctgggcgacacagtgaggccctgtctcaaaaaaaataaaatgacaaacatttgcatcaattgttttatgcttcatgggttcattaaatattcaacgctccttgttcagtttctacttatgtttattggcacctatcacttcttaatctcaaaggattttgattggcctgtttatgtctcgtgcttagtaatagccaacatgatacagtatttgtactatggtacgctaagctaaagagtgtatcattatcgctgtacaataatctgtagaaaactctattccttgcaaacttgaggcagcacttttagcgttgtataaatgcatgcagaaataataccatattcagaattctttcagaattagagtactcatgctttagaaaatactgggtttcttatctcttaatgtgtgtaaaataaacttggaatgtcactttgggttaccataagtttgtatctaaagattttatttgacatttgaataatttgcttaaaatttaaatatttaagaatgttatagtaataaagggatcaaaatagttaatctggaaggggagttgacaaattataaaacagaaaactatatttgattgtgcatatccaaaaagccagagctatcacttcagcaatttaatgtatctaatgcctgtgatttgcttgaggtcggtagaagcttatatagtcactttcagagcactcccctgagaaaatgtcaagacttgaatttgcttctctaatgcagagcttctcaagtagtttgtctcaagctattgatcgaagccttctgggtgtctagctgggcagcacttaaggtggctggagctcccaggctggtcgcctccagaattccaaacaactaattttctctatctgccatgatgtaaaaaatgctgtgaaacaccacagtgggacaggcatggacaggcatgcaggcagtggggtgcatgtatgtggtttaatactgaaaataaggatacaaaaatcctgccaggtgatgctcctgtaattctcaaggagcggcagtgatttgttatttcacatttttcctcactctatccttgcccctgacacacacactgcaagtcactgattggagcaggccagttccttcaggtgaaggggcctagagaaatgtcggtgaatacccagtgaataccacgctgtgaaactctgcatctgaggcacgcagtggggctttggttctctcctctcaccaggggtttgacctttcaaccacctcagaaaaaaggaaaggtggaagcaggaagggggaccagcagctccaggcaagcaatgctaattagctccagcgtaatgacccaacatcagttcttagctgaattttaacagtccatttgaaaacattttctagataaatgaaaatggaaagagctctagaaaatgtttaagtgttacatacttaaaatagtatatttacttattgaagttaaatgccaagatgtagaactagtgtgttattttcttggtacagattacaatgctgtgtttcagtgaaggagctaattgaaatgattagtagatagatgtaatcagaaaaatattaaatgaagatagtaatttctaaagcaggaaataaagacagttacaagtctgttcttatttttccaatctgttatataactcctcccacccattaaccttaactaaatgtatgattcatttgttaaacaaatactgagttccagctacgtgtaaggcatcataggggcagaagatacagcagtgaacataacaggtaaaaccctccccctctgccaaggggcaggacagggaggaaagggaagacagagacaggtggaatatggagtgttcagtgttggtaagtgctaaggagaaaaaatgaaacaggaggtaagatgcagagggtggtggtgaaggcaatgggaggttgccttgaaagcggagctcagtg

SEQ ID NO: 4007 - DNA, 2300 bp, Homo sapien
ttaccatattttcccatttctgatagctatcttctcttctctgacatttataatcaaatatatttcttgactatttcatcaaaaaagatgccacctgtccccacccaggtgctctacttaccactggtctccctccctaagaatatgaaacccttagaatgttatgcccattgtccatatctgttcccctgcccccaaaaaagatgagacccaagagttggtttacttcccttctttctctttcctctatccctaggttttgctgagataatctggtacgtgtaattttaactttgtagtaaattttctcttgcagaaaatattttctatttcaaaaattcgaattctgcctatataatcccactctatcattatctatttaaattttagtacatattgcaaggctcatttctcatcattgttttcatctcttttcttcttctctcttgaaatctctgttttgatttttttcttatttggctggcgttctttctcaaatattttcttcagatgagatacatgggtggtttattatctaataactttcattcccctgtcaggtggtatctttgaagcagtaatgatgtttaaatactaaaccagagactggccagtcaataagaaaggtgtgccaggcattaactccttagttgctgaatcctgtagaacagggtaggagtagaaagggctggtggggagatgatcagggacaaagctatttcatagacagtgtgaaaatattttaatttttttttttttgagatggaatctcgctctgtcacccaggttggagtgtagtggcgtgatcttggctcactgcaacctctgcctcctgagttcaagcaattcttctgcctcagcctcccaagtagctgtgactacaggtgcatgccaccacacctggctaatttatttatttttagtagagacagggtttcgccatgttggccaggctggtctggaactcctggcctcaggtgatccgcctgcctcggcctcccaaagtgctgggattacaggcgtgagccatcacaaatggtcaatattttaatattttaacaataggtgtggcaaaaccactgagttctagctatgtagtagtcctgggtatcagttctctttttttcccaggaaactggatgttattttattattttctagtttctagtgcaacagatgaaaatccaatgacaatctaatttctttttatttgtaaataatgtttatatttgatgtcttgtaagtcatttatttaaccagtatatgtctaggtacacatcttttttatcataaattctatgtaatacttattgaactcttgaaatttgcagcctcaagtgtttctttaggtcagggaaattttcctctgttgtttaattgttgtctttttcccatctatccctttacccactcttttttgtactcctatttttattaatagactttatttttagagcggttttatgtgcactgcaaaactgagttgtaaggtacaaaaatttcccatagacctcctgccccaacaggtgcacaacctcccccatcgtgcacccctacagagtggggcatttgttgtaatcaatgagactacatggtcacatcattatcacccaaagtccatattctaggacacactcttggtgtactttctttgggtttagacaagtgtatagtgacatgtatctaccattatagtatcatacagggtagttttcccatcctaaaaatgctatatgttcccctatttatccatctttcccactactatttttcacatgtaagatcttttggatttgtcattccaatcttttatttttattattttattttcttctacttttttgagacagagtcttgttctgttgcacaggctggagtgtagtggtacaatctcagctcactgcaacctccgcctcctgggttcaagcaattctcataacagccttccaagaagctgggatgacagctgtgagccaccacgctcaactaatttgtgtatttttagtagagacggggttttgccatgtggccaggctggtctcaaacttccggcctcaggcaatccatctgtttttgttttctgtaccacatttccttctctatattttttgccctgggctttgagatactgcttcaacttgagcttttggggaactaattagtgtttcaacagtgagtatcttttcccttcaatttatctactaaattttgaatataagagttcttctttttagttctagaaagtcctttgctgtaattttttgttcaagttctatttcctagaagttgcctgttctgtg

SEQ ID NO: 4008 - DNA, 2300 bp, Homo sapien
tatattctctctgtgtttctctatgcctcatttaagatttctggggcaaagagtctaaatggtctggtttaggatatgcccacctctgaattaatctgttatgtagacaagggacatggtagcgcaaccaacttgtctcagttttcgcaaaactatcccagtttaagcaccgaaagtccagcatcctggtatccccctgtctttagcaaaccagagtagctggtcacactaggacatggtcgcttgtgcatatgtggcccataaaaggactgcctctatgtatttcagccattcctacaaaaaaaggaattgtgagaagctataaggaaacatttcacagagtgtctattacattctacttcttggcacccagcgtgggcacacacacacacacacacacacacacacacaccccccacatcacaccacatacacactctcttctttccatcctttcaaaaatacaccttgccgctatgtgaatcagttatttcaagtatcaccacaaatggactactaaccttcccaatgggagaaaacccaaacgcgtgaccttttacttcacttagagttgatgttatgccctctaagtacagactttctacacgatatccattcctcattttcttctactgtaatcctatctccatatattgcaatgtatggccttttgctggcaaaaggagaaaaaaagaaaaatgtatgtattataccattcctttttaaaaaggcaaagaaagggcttggtgtgcaagagagtatttattaaacactggtagcaaagaaaacaaacaaaaaatgcaacagtcctcattactgtagctggtgttgaagcttctttcttctgggcccattccatagttccctgtgacttcagttagcatctcagttggttggggtgatttgctcaatgcagcaacctgaggggtatgatcccttgtggtcctgcctttatagggttgtggtagccgtctattgcctttacatctgggtatggcagttcaagaaagcaccctcaaggataaaacatgctattcatgatgtattatttttctttgatgactaggacaatccccctagtcaaccccatgactcactgttttgtctattcccttagatgaccccacggattccgttgcacggagtctctgaagtccaaaatttttaagcatagggcacaacgttcttcatgatttggccttgtctcttctcattatgcttgctcttgcatctgccatctgacactttgcttaactcctggccagctaccggtacaagccaagctctcactccataacgtccttcttctctgcatgcccttctccactgtgcctgtcctttaactcttattcatcatttatttcagtctcaattgaagagtcattatttctagaaagccttctccgcccagctctctacattgcaccgttccctacagcaccaccagagtgcctctaacacttgatggtttcattgcttatatatttttgtttctgtgcataagcctcccgagggagccgccgctgttcgatttattctatagctagttcctcgccctgagtgtaagcctcacgagagtggggctgtcctctgttcgctctatccccagcccctacagcagtgcctggttgttcacaggcctatatagcaggtgataataatctgaataatgaaagaagaaacactgtcttgtggcgtgatttacttctgtttttacttatgtcaacttttaactagattgtgaggacagaggtcagtgtctgagtcatcttgtgcctcactgggcttgggcagaatagacgcttggtcaagcatttgcacactggtcgatggatacactagaaagagcaggagcgcgagagggaatttttttggcgcctgcctcgccctttcaagccaagcccctctgccctctgccccttgccagccgcccgtcgcccgccgccggcgatccctctcccggggagcggtagtcaagcgaggccagcgggccgggagcgggccgggagcgggcgaggggcgggacttccggtcccgctcgcgacgcggaccgcgccaggcggaagcccggctccgggccagcatccgagagcccggactggaggtgagttcgcagccggaacgttgcaggcacttgtttcctcagtggatgcctttcggcgcgccgccgcccggcgccgcgggactgggagaccgggtagggacgggagagtcggcatctcccgcgcgtgtggagggaaatccgggaccccaggcttgagagaagggccaggactgagaacggggaaccaggagagccc

SEQ ID NO: 4009 - DNA, 2300 bp, Homo sapien
aatggatatttaggttgtttttacttttggcagttatgaataaggcactatgaatattcatgtacaggtttttgtatgaacatattttctgtctggtatatacagtcagttctcattatttgtggtagttttgttcctgaagtcactgcaaacactgaattagtgaatactgaattactggttctaggagaaatacaggattaggttcctgtaagactctggtcacattttcatcagttgatcaatatataaccttgttttatgtgtgtttctttttaaagatatatttattgctgattcattaacattgagtgcatgcctaacagcgccataactcatgcctgaacaaagcggcttacctaaccaggtatattttctgtgtgtgacaaggcctgtcacagccttcttgcacttagagtaggcagcacttcagcattacacttgggggctatttgaaacagtgaactcaccaaaaaaaaagcacaaatgtgaaaaacctggcactaaatcgaccgcaaaagggagacttgtttacagtatgagagccaaacacaagagggtagtcttgtttgagtgactcacgtttttcaccgctctgccaattcacatgtctgaatgactgtgaaagcaccatgaggattatttgggggttacaaataatttatagtgaataatcatatttgcaaatacagaatccacaaataatgaggatcaactgtactgggagtgtagttgctgggtcatatggtagttctatgttcaatattttgaggaattaccaagctatttttttttttttttgcagaagctaaagcgtgttacattcccgctagcagtgtttaaggattccaatttctccatgtccttgacaacacttgttattttctgtttgtttgaaacagaatggtggatgtgaagtggtatctaataagataccacttataagtggtttcgatttgtatttccctaaatcactaatgacgttgaacatcttttcatgtgcatattggccatttgtatttcttctttagagatgtgtctattcaaacactttacctcttttaaattggattatttgtccttttattgttgagttgtaagagcttttaaatatatattctgaatactagactcttagatatatgacgtgcaaatattttctcccattctgtgttttcattttcttgataatgtcttttgatcttcaaaagtttattttgatgaagtccaattttatcttttttctttgtttatgcttttgaaattgttgaaactactgtcctcatatagttagtacatcctgctacaagaattgcatacatatttttattaccaaagtcatgaagagttagatttcacggtttcaataaattataacttatttgctaagggatgtcatttgtaaatttaaagcatttgttcgtagtatttaagagacttttatgttgtggttgtgggattttaaatactggcatcatgagggccatatgtttataaaaagcagtgtcaaatttatttaacaaactgctgtttttgtttggaaaattgaagaaaaacacttaaaactactctaacattttaaaagaagattctacctctttttaaaaccatgaactttctgtcctaaaagtaggatcttgagccattttgtgaaagaacacaagaatccctggaacttggaaataaatgcagattggtgtttatttgtgttattttaaatgtagtagcactgtgtgttagaaaactcaatctgtaacacttaagtcaggctaagcaagcaaataatatcagctaacatggctttaatctactaagtaacttaaaatccaaaagatcaaaggaagttataactaaaaacagtccttcatgcagtttccctgtggaagcaggaaaaggctagaaattacatgtcaccttcatatcctggcttgctgaccttgtgctcagatcaagcccctctgtatgccagctgttaccattattaagaccttgccccaaggggttaagtaggagaaaaactctcctgtcctattggagagcaaacactgaaagttccagcccctaacatgcctaattcaaagcaatctgcatgtgcttgtcattcagtctgtcctgccgctctgtggagctgcgcctgccaactcattgctttctgctgtgctgtgatcctgcagtcagttgccgctgttgctactgcaatcatttgcaccaaactgagccagagaagttccctcttttaacataaaggtaatacattttctcttgctgtgtgaatatgtgtgtgagaaatgtgtgtgaat

SEQ ID NO: 4010 - DNA, 2300 bp, Homo sapien
ctacttagccgcgacaaaagatggggttctagaaatgagggcccaaatgttgcaagaacttgccagaggtcaaaaacccagaattttttttttttttgagacagagtttcgctcttgttgcccaggctggagtacaatggcgcaatcttgtcttaccacaacctccatctcccaggttcaagcgattctcctgcttcagccttcccgagtagctgggattacaggcatgcaccaccatgcctggctaattttgtatttttagtagagacggggtttctccatccgtgttggttaggctgctctcgaactcccgaacttaggtgaccataccgccttgacttcccaaagtgctgggattacaggcatgagccaccgcacctggccaagaatccagatttgaatgtggagccattaattctctaaatgttggcaacaaattcactacccaaaatttgctgtaacatggagtcagcctgattactctgcagctgccagagaagaaggaaggcacagcctagaggacatgaatataagtatgtaagccattgattagccatagtgattaggattgaggaattgtggatagtataatttttaattaagtgaatattaacattaaagctcttttgatttcagcttttgctgttggtgttgaaaatccctcttaaatgtattttttcctgtcttattagaacactagatgacctgattggatctttgatgtttctggagtttaccaagtctcagggtctttattttgatcacttactctgtatagtaatagatagtaggagatgaggcagaaccttatactgatcccaggaagcaatacatgtttccttttctgtctcttctcttaaaaaacattaggaaattgaactctggttacttgcatgttctggctggtttatttctctcaatcaaagtattagtatatattattgcttaaccaacatctgttagttatgatcttaaccaggaaaaacattacatttcaatagtcaacagtaaatgctgtctcataagtagattctgccttgactaaagccattaccagctctatgtaaatgaaatgcttcagtttctaccaggctgattttgctctccaaaatcagtcaacatgagataatagccaaaacttcatgatcataaataaaaacttttataataaagctttattcataaatttaccagcttatttgttagcacaattagacattttaactatcataaaattaatcttctttgttttatgtggttcatattctttaatacgtggttcatattgtttctgttctgaggatacagaaacaatattgttgggcatctattattatctcatttaattctcacagctatttgagatagatattgctgtctgcattttacaaatgaagaaccaaggctcagagaagttgttagttgcctaaggtcacgtagctagtaaatgacaggacctggttatatcctaatctgactttaaagaccatgcatgctctttctggtatatcatacaacctcccttattcagaaacatatttttttgttaatctgattttcaaaatattttttctagcctctagtgtaccagagagaccatgtactcgaccagaatgtggccagcattctgtacttagttggctgtttttagcgattttaaatagatcacccaccatctctcctctctagttagctgccagggagaacatccctataatccattcttggtattccctagtgcatctttttgtattagggtgatgtgttgtgaaattaagagggatatattcaattcgtttcctgttgtaaattcctgtggatttttcttcctatagtctgaccaaaaatagatttgctatataattcatacaattttaagatgtagtgagtagacaaaggctttgcgctaagacaatattatggcattgcttttttttttcttttaacattttctcctggaatttatcaaaggaaagaatttcctgctgctaatgaatcatccatgtggtttcccagtttgaattatttccaaatcctgagtcttatgaaataaatgaataatttataaacctttttctttccttttttttttcatatcaccaggtgaccgatattccagagtggtatttacttcatctggaggggagacattatggaatttacctgcaattaaatcaatgtgcaatgtagataattccagggtatgtaagataaaaactaaaatctccttagcacaaataaggttgtattattgaaactccttttactgctgaccctggtttctgatcagatgaaagtac

SEQ ID NO: 4011 - DNA, 2300 bp, Homo sapien
gagaagagaagactcaagggaacacgaagccatctccaaagccatgagatgctctcttaagaaagaggaattctatttagctgcgtgggcccacagaggagagccagaatcagtgggtaaaggtttcagggaagtagatttcagttcaatataagaaagacttttctaagagacctgctggcaaatataaacaggctaccttgatgagtattcagtgaggctgaatgaccacttattagaaatgtcagagaggaaactcaagcatagatcccatgtttggatcagataaacttgaatgttcctttcagtcccaacattctctgttaaaattagattgtactccagccaaagaacagatttcaatggcacttagatatatctcttataattgttaagaacatgtgcatggtcaacaaatatttctgaccgttgttgatttggtggatatttaaaaagatttagaaaatttactaagaaagaaaaatggaataaatatacaaactgtagaggacagtcacaggaccttgggaaggtggatggtcccctactaagattttggggtcccaaagtacaagctgtagcaaaactggacttgtgctagtcaacatcttgtttattttgtgcaaagctgccatctcaatttcacacacacgcaaaagcaaaaaacaaaataacggagcttgacttatctactaaaagctaatctatcctgaaagaatgtgttaaaattactcccagtaagagctgacacagtataaaagctgtaatttcccaactaccatcagtatgtgagattttgggaaagtcgatagaagcaaaggatgatttagtagctgtatcaggaacatagttttcatatccacaaattgctacagaatcatggagtgtcactggctctaaagcgctgccggtggacgccacctcattagctgacacctcttaatcactgtggctggaatgtgggcttccctatcttgaaaccgaccgcgggcgatcagagccggcggcgagtgagagctgcaaccactgcgggctgagctccgacaccagaatcggcgcagagacaggggaccgaccaggccaactctctccacttggggctgggagggcaattaccaccgacccccttggcttcccatctacgaccccggaagcctcccctcctccaggtacccaaccttctgcgtgtcaccaatcacccgctacccccgcctccccgcccccgggagcgcctcccaggccaaggctccgagggccccgcgcatctccaagaccggacaggggtcctcactcgcaacacctgcggctggcagagggaaaataccaagggtgtgggggagggggagagtgtctctcagccgcctcagatggtccttcgggctccctggggacgcgcagagcttcggcggagatgggagcggggaggggttaacgcgggaaattaagagactcgggcaattggcggtgctcaagttaaccgggtctgtggcgagagttctggggttgggagctgccggccgcgcactcgccccgggtctgcagccaccgccgcggcggtagttctagggcggagcgctctcccgcgccgcgccgcgggctgggggcaccagaggccgcgcggaggccggggcgggcacctgagctggcgcgcagccggggcaggggctgcagtccagcgccggggaaggggcgaccgagctgcgtgcgtgtgcaagaccggccgccggcgcctcgcgccccgacaggtgcaggcgcgcgggcttcccattggtcgcggcggcgggcccctttccccgtccccgccctcgccagtctccggccacgccgcggcgccggctgggttggcagaggcgcgtgctcgcgcgcccgcgcacccctcgccccgtccccgcccccccactcaccccgtccccacccactccctctctccgcgccgccgccgccgcgcgctcgcgagttcaggtagcgggcgcgcgggcgcctccgcgggggcgcgcggccgggctcccgtcctcccccaacacccgcccgctcgggggcgcctggggagggagcgcgcgggcgggggagctggagccgagcgccgccgccgaagcttccgtctcgctcgctcgcgcagcggcggcagcagaggtcgcgcacagatgcgggttagactggcggggggaggaggcggaggagggaaggaagctgcatgcatgagacccacaggtaagaccgacagtcccggaagggtcttccattccgaggaggcgcgcgcaggccggggagggggagttggtgcctggtgcagctcccca

SEQ ID NO: 4012 - DNA, 2300 bp, Homo sapien
atcatggaaagagaagtaaatctgaagtcaaaactcctgccattgaccaagtgaccctggggaaatcagttaatatggccaagtcccagatttgtccagtggaaaatattatcaaggctattggtccttcctagctggggttgctgtgatgcttcaaggagacgtgaatgaagaggactggtgtgggtaaatactcatttttcttctttaaggaatggtcatacttggagaatgctatccagaactgtttcctcattgcaaccctgccttagtctcttccagatgctattaacaaaataccacagattgggtggcatataaatgaatgaaatttatttctcaccattttgaaggctaagaagtccaagatcaagacatcagatttggtgtctggtgaggatcctctccctggttcagagatggccatcttttcactgtgtcctcgcgtgacagaagggatgagggattactctggggctccttttataagggcactaatcccattgatgagggctccacccatatgacctaatcacctcctaatactatcaccttgagggttagaattttaacatatgaatttgggggaaacacaaaccttcagaccacagcaaccccagagaagagaaatgacttagccaagatccacagtatgatgtggacacgacagagcttggagtctcccctttctagcactctatcctttacttaaactattttaggattacattaatttcattcttttcttaagctaggaatctgcagaaatatttgtaaattcatatattactttaagtcttaacactttgtttttgagacaaagtctcactcttgcccaggctggggtgcagtgacacaatcatggctcactgcagcctcaaattcctgggctcaagcaatccttctacctcagcttccagagtagctggcactacaaatgcacccaccatgtccagctaatttttaaaatttttatatagaagcaggatctctctatgttgcccagactggtctaagtcctgggctcaaggaatcctcctgccttgccttcccaacatgctaggattacaggcatgagccaccacccagcccaacccttaaaacttttaactgacgcttagcatggcaccaaaataatatttattgaatgtattctggtgccaacctctggatgcataatttcatctgaccctcacaacagtcctgcaatgcccatatgatgaggccccacttcccattccaccttgctggaactggaggtcagggaaacttagggaatttgcccaagagcccatgagtgaagagtggtagaggagattcaaattctttttctctaccagatccagtgcttttcccattagccaagggtgcctcaacaaggaacgagaatcccacaaaattggaggaaaagggaaaaaaaaatgtgatttcaacatggtgttcactaatgctattgcagaaatgtgcacgcagcattcacattttgacaaaagcagtaattaccatattaggaaatagagtcgtcttctaccttttctaaaaatcttaaaaagtaaacattaaagcatactttgggcttgctaacttaaaaggcaaatgggtggtgtcgcgtccacagccgttctatttgaccacattgcagaggtacacacgtgcaggacggtgattctgcagctaagggtacctcctccctgagactgcaccccggcccttctccccaccccttccattctgagggtgacgccttcacctgggctctcttaaaatcctgctgtttgtgtgcaaatgcgagttcaaatttctccctgaaacactggtgggggacactatgcaccctcagctttaaatgtcaccctgatttcctacatattccctcctccaacatacaacccctctctcccccacccgacccccaccacccccatccccagcctcctgtccttcccattccaggtgctccgggtgctagcaaagctggggtgggcggcgccgggcaaggtctgaagactgcgaggacccagctgccaggcgcattgtgaagtggcccgagcgtcacaggcgacccggacctcgggaccggggggcagggcgggtgtctgcagcgtcctcgggaggtctcaggccccttgggcagacgctgcgcgtgcccagagggagggatggcaggcttcagccacttctcccagccgccctaccgggatctctgggaacccccgcggcccggcggagaacgagagtccacgcagcggctgggcgggcagaggtccggagccgactccaccgcgtgctcccgggccggg

SEQ ID NO: 4013 - DNA, 2300 bp, Homo sapien
caatgaaaggctagacccagatcttctggaaggagatgctctaaaccagggtttctcagcctctacatgactgatgtcttggactagatcatgttttgggtggagaatgtaaaccaaaaataaaattctaagcctccccctcccctacccccgccaaccatctaaatggatggttcctccttagccgaggctcttaaaattttaacctgaaattttcaggccatgaaggaaaggcaaggtcggacatgcttcattatacctctccagcgtgaacatcaaccagagtttaggtctgataagaaacattttactgcctgttcactctgaagcctgctagctaaaagcttcatctatgtgataaaacttttgtctccacaacctcttatcgcaacccaaacattcctttctattgatcctgggcctttagacaaactcaaccaattgtcaaccagaaaatgtttaaatatttacctatatcctggaagccacccccactacccacccaccaccccccgccactttgagttgtcccgcctttctgaaccaaaccaatgtatttcttaaatgtacttgactgatggctcttgcctccctaacatgtataaaaccaagctgcaccccaaccacctcgggcacatgtcctcaggacttcctgtgtcacaggtgtgcatcttcaaccatggcaaaagaaactttctaaattaaatgagacctgtttcagattttctgggttcacaagagctatcttggacattggaagatgttcagcggcatccctggcttctacttagtaaaggccagtagcacctcatctcctagctgtgaccataaaaactatctccagacattcccaaatgtctcctggggtgggtaggggacaaaactgcccccagttgagaaccactgctgtagaccatgcacagttttccagtgaaacccaaattcttccctactactgtagagaagaagaggaggtaatttctgcccatctgcatttcttggcacgcacccatgtctctgtgtgtgagatgagaatcacaccctagctccacaacagagtggtcacagtagccaacacaggcagtattctaaatgctctctccctatagtaacccaactaatcctgccagttaaatatgagtttcaggtaaacaatgaatcatattttcttttagaataagtatgtatgcccatgcaatatttgggccctacatatactttaaaagtatctgttgtttatctgaaattcaaattaaacatttgggagggttgttgttttattggccaaatcattttattttattttatttttgatatggagtttcgctttgtcacccaggctggagcgcagtggcgcgatctcgtctcactgcaacttctccctcctgggttcaagcgtttctcctgtctcagcctcccgagtaactgagatcacaggtgcctgccacgacgtatttttagtagagacggaatttcaccatgttgaccaggctggtctcgaactcctgaccccaggtgatccgcctgcctccggcctcccaaagtgttgggattacaggtgtgaactaccgcacccagccttattggccaaatctgacaaccctatctataatcaaataaacagctgagcagtagtaattgcagcattgtgattgcaataggcctccggtggcttagagtccctgttctgcctgtgactgttgtgccacattggggacgtcatttagcgtctccgaggctcagttttctcatctgtaaaatggggacaatatcagcgccttcttcagagtcgctgggaggattaaatgagatgatgtatgcagagccgttaagacgctgtttggcacaaagttcagggcagctggtttagtttcctcgacttcactacctgaccctctgctaactccccgggtgttttccggacggccacaactatcctagccttcttccctatgggctgcaaaggtggcctcgggttccggtgggagccccaactctggaccgcgattcgcgagcctccccggcgccgggccgcgccatcccgggagctgtccgcagatggcagcaccggccccgggtcgcggcgttcccggcgctcggcaggccgcaggatggcctggtcccgggccgggagcccagcaggccgggagcggctgaggccacaccccgcgggccgggccgcttccctccggtgaatcatcgctcgcagcggcggcgcccgcagtggccgcagcagcgcgccgggccctggccgcgccccagccgagcgcagcgcggagtcgccccgacctttctctgcg

SEQ ID NO: 4014 - DNA, 2300 bp, Homo sapien
gaggatgaggacgaggaggatggggagagcggctgcaccttcctggtggggctcattcagaagcaccgacggcggcagaggaagatgggcgaggacatgcacaccatcggctttggcatctatgaggtgcagagcgcaggggctcctgccctcccttccccatgtgttcatctcagcccctgcatggaaagctgaccccagaggcagaactggggatgggatcccagaccgggagcttggccaaggaaaaacaaaactaccagcctggccaggctcaggagtagcccccgtagggaggcccctgcagtggctctgggttgtggggccttctaagcccttcacgggccccccacagccagcctgcagggagttccactctcaaatggcctccacatcccttctcacatcctccaggcctggcattctggtcagcctacccatcttcaaagaacagaatatactgggccacatcaggcaatactgtgagggcaggactgagtccatgggtgcagctgctcagagctcggcaaagtcattggcctggatggtggagagcttggggacaggggaacattggtcatgatgctccccccagggctctgatggctggagcccagatccctacacagactcctgctgtatgcgtgttttcctttcactctgagccacagccagagggcagccgcattgcagtctcctctccgccctcaggctggggctggggcactgagaactcacccaacacgctgggcccctgggctctccccactcccttctgcaaaacaagaaagagctttcgtgggctgcaggtagccatgcgaggagagggatgaaaggaaggctttagggcactgactggggatgcatttcggtttgatgggctggagctggctcctcccggctcccaaagcccatctcttttctctgacccatgtctgctgaggtccttcagcagcctgaaaaatggccctggcagggacctgtttacaccatggaaagtggcaaatagtacaaatcagagcttccaccctctcccaagagccagtttcccagcacacccctgggagaatccagacgaggtgtcaggagaggaggctctgtgctcaccactggcaacgttgccacccatggaacactgacttctacctgctcacccacctgagaaaggcagctgggcaaataccatcagttgtaaaaatgcacataggcctaaacccctccgtctctgaaacaggagctgaggacttcggatctgggacagaatcgatccaaggacaatgcaaatggaattgtgatacacagcttccctcccaccggcttatgggcttggaaatgcagccacgggctttcagagttgggacggaccttggggatcactgggtcctatttttgagacaagaaaactgaggccagagaggagaggggacttgctcaaggaaatgcagaccggaccactggacctggctgacagaggccggcactgctggctcctagccccaggtgtatttcacctcgcctgctgcctcctccaacagggcccgcctggccctctttccctgcgtgggaggccgatatgggctttgccaccttagacaagtctcttcacatctccatgcctgagatttatactctaagttaggaagggaggtgagggcttatcaacataagaggattttcttcagtgttggagaggctttgagttccttggaaaacagttactcggttgaattagttgatattgctaatgctacagagaaaacgggggcagcggaagagaagagcacagtgatgcattttcttacactgcttttccggcatctgaattgcatctcctttattttgcaggttccagaggaggtacgtctggcccatgtcccggggtgctcaggtcaccaaaaaagcgagaggcttagactgctggagctcagggagcgtcgtgaagcccgggcaggggctggtggtcatgaaggatgagtcctggccacccctggggccctgctgaagttgcccaggctctagatcccactggtctaagctctgggcaaggtttctggaaagtccttgtgggacccgctgcctccctgtgacctggcagagcccatacagggtttggttctgggcagaaaatccatgatcctgagactgcaggaggcttttcacaaagttctttgtcactcttaggagaagactgagtcagggaaaaggtgaaccctgcagactgtactagaagacaacgcgggagcacagaggagaccaggacccaattcccaggctgtgtgaccttggacacgttacagctc

SEQ ID NO: 4015 - DNA, 2300 bp, Homo sapien
atggctggagcccagatccctacacagactcctgctgtatgcgtgttttcctttcactctgagccacagccagagggcagccgcattgcagtctcctctccgccctcaggctggggctggggcactgagaactcacccaacacgctgggcccctgggctctccccactcccttctgcaaaacaagaaagagctttcgtgggctgcaggtagccatgcgaggagagggatgaaaggaaggctttagggcactgactggggatgcatttcggtttgatgggctggagctggctcctcccggctcccaaagcccatctcttttctctgacccatgtctgctgaggtccttcagcagcctgaaaaatggccctggcagggacctgtttacaccatggaaagtggcaaatagtacaaatcagagcttccaccctctcccaagagccagtttcccagcacacccctgggagaatccagacgaggtgtcaggagaggaggctctgtgctcaccactggcaacgttgccacccatggaacactgacttctacctgctcacccacctgagaaaggcagctgggcaaataccatcagttgtaaaaatgcacataggcctaaacccctccgtctctgaaacaggagctgaggacttcggatctgggacagaatcgatccaaggacaatgcaaatggaattgtgatacacagcttccctcccaccggcttatgggcttggaaatgcagccacgggctttcagagttgggacggaccttggggatcactgggtcctatttttgagacaagaaaactgaggccagagaggagaggggacttgctcaaggaaatgcagaccggaccactggacctggctgacagaggccggcactgctggctcctagccccaggtgtatttcacctcgcctgctgcctcctccaacagggcccgcctggccctctttccctgcgtgggaggccgatatgggctttgccaccttagacaagtctcttcacatctccatgcctgagatttatactctaagttaggaagggaggtgagggcttatcaacataagaggattttcttcagtgttggagaggctttgagttccttggaaaacagttactcggttgaattagttgatattgctaatgctacagagaaaacgggggcagcggaagagaagagcacagtgatgcattttcttacactgcttttccggcatctgaattgcatctcctttattttgcaggttccagaggaggtacgtctggcccatgtcccggggtgctcaggtcaccaaaaaagcgagaggcttagactgctggagctcagggagcgtcgtgaagcccgggcaggggctggtggtcatgaaggatgagtcctggccacccctggggccctgctgaagttgcccaggctctagatcccactggtctaagctctgggcaaggtttctggaaagtccttgtgggacccgctgcctccctgtgacctggcagagcccatacagggtttggttctgggcagaaaatccatgatcctgagactgcaggaggcttttcacaaagttctttgtcactcttaggagaagactgagtcagggaaaaggtgaaccctgcagactgtactagaagacaacgcgggagcacagaggagaccaggacccaattcccaggctgtgtgaccttggacacgttacagctcctctctgcatttcagggttttgttttttttttttttgatttttggtttgtttgtttgttttttgtctcgctctttcacccaggatgaagtgcagtggcatgatctcgactcactgcaacctctacctcctgggttcaagtgattctcctgcttcagcctccccagtagctgggactacaggcacgcaccaggatgccaggccaatttttgtatttttagtagagacggggtttcaccatggtggccaggctggtcttgaactcctgacctcaggtgatccacccccttcagcctcccaaagtgctaggattacaggtgtagccaccgtgcctggctgcatttcagtttatttttcagtaaaactggtcaaccatccacctcactgcactaccgtggaatgacttaaattttgcgagagcatttgggcccacagtcaccgcttgctgaagcagatgggatgcctggtccaaggtcacgattattaaagtagacacacggggcactttgacccacctgtagtacatttctttcacagcaaggcagtgcaaccggtagcacatcgggctcttttagatgctgctccagccttggtccggtggatc

SEQ ID NO: 4016 - DNA, 2300 bp, Homo sapien
ttggcttttgttgccattgcttttggtgttttagacatgaagtccttgcccatgcctatgtcctgaatggtaatgcctaggttttcttctagggttttgatggttttaggtctaacgtttaagtctttaatccatcttgaattgatttttgtataaggtgtaaggaagggatccagtttcagctttctacatatggctagccagttttcccagcaccatttattaaatagggaatcctttccccattgcttgtttttctcaggtttatcaaagatcagatagttgtagatacggcgttatttctgagggctctgttctgttccattgatctatatctgttttggtaccagtaccatgctgttttggttactgtagccttgtagtatagtttgaagtcaggtagtgtgatgcctccagctttgttcttttggctcaggattgacttggcgatgcgggctcttttttggttccatatgaactttaaagtagttttttccaattctgtgaagaaagtcattggtagcttgatggggatggcattgaatctgtaaattaccttgggcagtatggccattttcacaatattgattcttcctacccatgagcatggaatgttcttccatttgtttgtatcctcttttatttccttgagcagtggtttgtagttctccttgaagaggtccttcacatcccttgtaagttggataagatcgtcttcttgatttagataagggctactttcatgaggatcctacttcccttttgctctagctccttcccaggccacccacctttccccaaggcaaactagtcatccatttcccccttgtttccaatgcttagtgagaagtggtggtaaggggcagcctaagcttctgtgaagttttttctgtttgtttgtttagttggttggttggttttttgagacggggtctcactgtgtcacccaggctggagggcagtggcatgatctcagctcactcgaacctccgcctcccaggttcaggtgattctcccccctccagcctccctagtagctaggactacaggtgcgcgccaccatgcccagctgatttttctatttttagtagagacagggtttcaccgtgttggccaggctggtgtcgaattcctgaccacaggtgatctgcccaccttggcctcccaaagtgctgggattagaggtgtgagccaccatgcctggccacttctgtgaagttttatctagtggattcatggtgtacacctgctagctcccttcaccaaaggcctcttagatatactccacatactttaaaaaaaacagcaagggcctagccactagaagccatccaaagccctctgcatgtcatccaatacctcatttttagtagtatctggggcctccacagcacccctagatcaaaacagcaaccagattcggcagggagccagcaggtctttctcgcccttcctccaatcctttaaatggaggtttagccagtgggaaaagcaggaaaaggatccttctgcaaaccctccttgtgtatatgctatgatattcaaaagatccagttgagaagacaaactaggtgacactatgtgcaaatggacccacactcaagggctttccttgactgaaggcagtcggacgggagtggcaagctggggctgaaggagttctacattctctggacgaagattcaaaaataccaagtaagatcccagagatgcgggtggatctgtgttgggaaacattctgttcatatgctttaagatgcagcaactcctgcacagagtggagaaacatttccaaggggattgggattttacccataatgaagctcagagtgagtaaagatggggctgaggaaatgcaaacaaaaaaccaaccaggacttcgcaggtgaaatggcctattcccttcctcctgattattgggatcatctaaaggccaccatcaagggtttcctgaaaagggtttttgacagctaaagtacaaaaattatataagacaagaacatggacctatgggcgttggctggctgatttgatgggcatatttacaaaccagctcacagacagaagcaaaatactattagttatttaaggcagaaacataagtgattcttccacggccaaactagaggcacagagctggaaaaacttcatccccactcagcacatactagggaggtaacttgccagctttgctttgggtcatagttcttacagctaacttatgtgttccagaaaatttaccgagaaatcgacgttgacaggtctggtaccatgaattcctatgaaatgcggaaggcatt

SEQ ID NO: 4017 - DNA, 2300 bp, Homo sapien
gtgtaaatgtgttcccctattatttaattctctaagtgtttagcctttcttctcctctcctgtcttgtttccttttgcatttcctcactacccactcgtgtatttgcttagtgaatatttctcggatgcctgttatgtgctagggactgcacttgattgagagggatacagagatgaaagttgccttcaggtatcttacagggcacaaagagaaacaagtatccacagacatttataatacaatgtgatagttgcagtaatagatgtatttcatctgcaggagaaaagggtgctgggggagatgatgaatgataggaatggcatgttcagagtcacataggcaggaatgccctgtcaaggagatacagtcatgtgtcaataatggtgatacgtgccgagaaatttgtcattaggtgattttgttgtgtgaacatcatagagcgtacttacacaaatctagatggtatagcctactacacacctaggctatatggtatacagccttttgctcctaggctacaaacctgtacagcatgttactgtattgaatactgtaggcagttgtaacacagtggtacatatttgtgtatctaaacataggaaaaggtacagtaaaaatatggccttaaaatcttatgggaccactgtcaacatgcagtgcatgaccgtaggtgtggctggcacatgagtgttagtagggagctttgagagcctttaagtgtctgtttcagcttatgcaggcctatgcctgatcttttgccatcacagggccatcgggatgttagcctagagcttgtgagaagtccatatctttctggggcagtccagcgtggacagcaagctactttacttcctttgagttctctctttgctcctggaacctggagattttacttgttttgagtacagcatgtgtgtgtgtattttgtaggggtgggtggaagggctactcagaatttcttttggaggtgtttctctctaactgtggtgtatcctttttgggggaggtcttagaatatgtgtggtttataaaaggggattatctatgtcaactcagtatgttatgttactggaagtagaaccagaactgcattttgttgcagccaagcagattaagttcagggttggttcaccaaattggctggtgaatgcttgcctgctctgttctctgcccatgtttatttaaggtgttaagatagtgtccttgattactgataaatgtgttgagttttcttagggtatttcaacattcttatatttaaaaatcatgttgacattactggagtttcattgattttaagcaattgcctcctcaaacagtgtgtctcgtttttatatccagatcccttgagattggaagatttttttaggacagcttgagatatattgtttctcctgaagcttctatttttactaggtatttaggtgtgcccttctttttgtttccagaaaaattctgacactggtattctcactggaagaggggcaaatatagatacattttacagcagtaaatagacttttatttggaaatggatgggtctgatttttttaaatattgtttgtaaaattataatttaaaaatagcctgtattgaaaactacaattaaaaaaaaaagactaggctatttagaaagttgctttttaatattttctttgtatattcggagaatcatgaatattagtgttagaagggactatgtgatctaatatagattttacagaaacttttggaaccacagaagttaaatggtgcacctgtggccagcgtggagcccactggatttagactgctgagctcctgacagctggctgagatgcattgccttttgtagtattccaccctggcttgactctgtgtgtgtggaaaatctgtgtgacttcagtttctaagacgtgttttaatgaaaaaaatttacctgagatactaagcatttgttgtatccataatgtataatttgcatgaaggatagatggtgaatgatatatttatctttcttttacctgaaaataatgtggtttctactcatttgctttagaacgtccagttgcggataatgagcgaatgtttgatgttcttcaacgatttggaagtcagaggaacgaagttcgcttcttccttcgtcatgaacgcccccctggcagggacattggtaggtagtgctctgtgaatcgtgacagatatttaagcttttattttgtgctgggagtagtaggtggcacatgatgagaagccaggtaatttgagaggtgaaggagaggttaggaagtggaaacagtggagataggctgtcgagggg

SEQ ID NO: 4018 - DNA, 2300 bp, Homo sapien
cctttccataactccccatttcactcagagcaaaggtaaagtccttagaatagcctacaaggccctccttgtctggcccttcatatcactccatctcatctcctactactctcccctcatcgtctgctccagctatcttagcctccttgatggtcccagaatttgccaggcaggctcccatatcaggccttagcgttggctgttccctctgcctggaaatcttccttcatatttgtggagttcacaccctcatttccttcaagactgtgctcacacaccgccttttcagtgaggcttaccttgaccaccatatttaaagttgcacctgtacaccttatccccttctcttaccttattctatttttttcacaataactacacttgtcttttgaactttttgttcattgatgtatccctaggacttagaagaatatctaccaagtggcaggtatttaataaatatttactgaatgagggatgaatttattttgcttaactcagtataaccctcttaagaaaacaagactataaaccagattttttgagaacgttaaattctttttttttttttcagatggagtttcactctcgttgcccaggctgaagtgcagtggggtgatctctgctcattgcaacctccgcttcccaggttcaagagattctcctgcctcagcctcccgagtagctggcattacaggcatgcgccaccatgcccggctaatttttatatttttagtagagacaagggtttcaccacgtggccaggctggtctcgaactcctgacctcaggtgatctgcccgcctcggcctcccaaagtgctgggattacaggcgtgagccactgcgcccgggcgagaacgttaaattctagttgaattaaccgtaatttagtatttccagatacagtatctgggatggtgcaatagggagttcgatggagattctggtaagggatatggtgggctaagaaagaattgtctgttcttgatactagataaacccaggggatttaccccacttcaggttctagaatcatgtataaaggcagagaaaagtgattctgagtgaacttgcactgacaacttactagaacaaagcttcctggagttagggttcccgcagtatgtgtctctctggaaggtggaataaaagcctgaacccgctctgctactctttggaaggcagccctgccatttccctaggccttggcctccctccctggaaaaggatggtatccaccggctccccgtatcggaggctgtttgcagggtgttcccagcaccccccagggaagctcctcagaatgctgcctgacacatttttacaaaatttatttttattgtggtaaaacatacacaacataaaagttatccctttatccagtttgcggtgtacgtttgttaaccttacagcaagtaacacatgagttttaaattagaatttggacaacggcaaatgagatgaaaggcgaacaatccgaaagccggatcactgaggagctctgggaacgcgccgcgagctgaagccacacggggaactccattttgtcgggacagggtcggtcctggccgcctccagggagtcgggtagtttccgcggcgtggcccgggcctcccctgaagtccgtccgcctctctccgcctggcccagcggcgcggccgccggaggactctgtccacgcgcccaacgtcgggcgccctgttctgaaggcaaagggtcccctgcctcgcacgactcggagccgccgaggaggtgacggcggcagccctggggcggctcggtgccattcactaccatcctgttttcctgaggcgcggccttccaattgccccggctccgctaggaggcgcgcgctccagccgctccgccgcgcggccccgaccgcacttcagtccggggcgaagaaagaaaaggcggccggctcccgccgctccccgtctacccagccgggcccgcgcaggcgcgcgcagctcccgttcccgcggccgcccctcccccaggccgccgggcgcgccgcgggcggggtcggcgcggggggcggagccggcacgggctcggctggggcccgacccgggattagttggtttcggagcggaggagggagccccgaccgtcacgagcgtcgaagagacaaagccgcgtcagggggcccggccggggcgggggagcccggggcttgttggtgccccagcccgcgcggagggcccttcggacccgcgcgccgccgctgccgccgccgccgcctcgcaacaggtccgggcggcctcgctctccgctcccctcccccgcatccgcgacc

SEQ ID NO: 4019 - DNA, 2300 bp, Homo sapien
aatgttcttgattcatttttttggtattaaattatgcagctaatcttagagaaccctgagtgatgccataaaagatgttgatgtggcctgcttaaggaaagtgcacgggaaagtggccatttggaatagatttgttaagaaaagtttgaaattcttggactcgaactaatttgttttccatggatcccatgaggatacttgtaaaagcagatgatagggtccagttggatcctgtgaatggcactagtttgcagttatgttttctggatctcttccatatgtcgctgacttctttgtatttgaccatgtatggacatacagaatttcataggccagagaagaaaagaagctttataaacattccttatgtgtgtaaaatacaaatcttcatttgtcttagcaagtcaataagtaattaagttgttgaactgattttttttttaaacagggaaatatcttaaaatttaagctgttaggttaaaatgtgtgtttggtatacagcatattactgaaggtagaatgggcttcatttggtaataaaggaaccagaaatatttttaagtaaaattgggagatgattcatgtagattaactatatttttgtatcactttctagaatacagtactatgttgtttaaaagagtaagtaggtaaaggagtggtataattactttggatatttctgcgtcagccacagttaccatgaataaatgatctgtctttataaaggagatggaagtgaattcaagatattgagatgttagatttgactgggttgtcctttgactagaagatcaccagataaagaaaatgtaaacttcctaaaccagataagatgatattgttaaaaaatttttttggcccagcactttgggaggctgaaatgggaagattgcttgaacccaggagtttgaagctgcagtaagctatgatctaccatgcactccagcctgggcaacagagtgagaccctgactaaaaaaaaaaattttttttcctttggttctcatgatttcacactgatgaatctgattgttttctctgagtcattttgcctctctcatgttattagggtaacctgataatagacatgttatctgagttatgtggtatgtaacagtgatcttctaaatgatgtgcatccatcactgatactgaggatgatcagaaactattacaactcttatttattgatctttacttttaatctacagataaatgataatacatattaatacttaatattcagattgccaatagtatatatttggtgggtaaatatcttttggatctgcaaaattttcactgatagtttgtatcaggatcaaagcagtttgaagaacattaatctaaaagataagactttggcatctcatttctctaaaagataagtcatgcatgtacacactcaggcaatttttttcagttttataagttttattcttgataataaaattcttttaacagaaaactcttgattgctatagacctctgctgtgtattcagtagtcactagccacatgtggctatttaagttaattcaaattaaataaaattaaatatcagttccttatttgcactagtcagattttaaggagtaagtagccacatgggcaagtggctaccatattggacagtgtggatacacaacaattccatcatctcagaaagtgttattggatagtgtggctacagacttttcttgctcagcaatcttagtctccgcatgttagtctcttcatgcattaggtagcatctataaaacatgccaaaaggaaataggctatctctaaaagtgtcccaaactttttgtcttgtaaattagcttatcagcatacttggagcctcttgccttaaaaaggacttgatataaatgtgtatcaggagaaagcctatcttatgaaggaattattccctttttatttgaatccatgtttgctttatcttcggctcctgaaaactgatactttgcatttaacagcagcatatgcccaggatgaatgataatacatctcctgatacagagcttgaggttacagaatatcttaaattgttccaggaactgttgttatcatttaagtccaataatcagtaagatttcaccctaccagaatacacttttttttattaactgtctggacctttgctgattacattgtccggaatgtggagtatcgcatttgagaagaggattggatcctagccataacataaatataagggtaattacatccatgctgagaaagatttaggaatgatagtaagttcatttgagtgagtggtttgggccaaacttgatag

SEQ ID NO: 4020 - DNA, 2300 bp, Homo sapien
ttttaaatatcagaggaattatcaaaatgtgacagaaagaaacaaggtgaacacatgctgttggaaaaatggcaccaagagacttgctcaagggttgccacaaaccttcaattcatttttaaaaacgcaatatctgagaagcacaagaaagcaaagtgtaaaatacaaagcatgcggccgggcgccattgctgcctgtaatcccagcactttgggaggctgaggtgggtggatcacaaggtcaggagttcgagagcagcctggccaagatggtgaaatcccgtctctactaaaaatacaaaaattagccagacgtgatggtgggcgcctgtaatcccagctactcaggaggctgaggcaggagaattgctcgaaccagctgacatcgcaccactgcactctagcctgggtgacagagcaagactccatctcaaaaaaataaataaataaataaaggaaaataatagaagcatgcttatccttcaatgtgtatttcctaaagacaaagacattgtcttatatgaccataatacaattacccaaatcgaaaaatttaatatgattacagtataatctaatatactgtccatttttaaattttgccagttgtcacaataacgttcttcatagttatttcttccttaatccaggatcccatccaggatcacccatagatttagttgccctgtctctttagtatcctttaatctgccacaaacccttagtctttgtcttttgtaacgttaacacttttgaataatttatgggcccgtcatctagcgatgtctacctcaaacgcaactcgtgctttttttgcatgaatactacattatgctgcgtccttttcagggtattatattaataggcatatgatattggctcctcctataactgtggcgttagtcttgatcatttggttatgatggtgtccaccaaatttctctattgtaaactttttttttttttctcgctctgttgcccaggctggagtgcagtggcaggctgacggttcgctgcagcctcgaactcgtgtggctcaagcaatcctcccatctcagcctcacgagtagctaggaccataggacctagccaccacatttggctaattttttgtattttttgtagagatggggtttctccacgttgcccaggctggtctccaacttctgggctaaagtgattctcccgcttcagccttccaaagtgctggattacaggcgtgagtcaacacgcccagccttgtaaactatttcttttcatctttgtaaataatacataatttatggggagttattttgagactatggaaatatcatgttcctcatcacgtttacctcctagttttagtaccttttgatgattcttgcctaaatcagttattagaatacaattcatatatgataaaattcattaaagtatatagtaattcagtggtttttgtatattcatacggttgtgtaaccatcaccgctaattccagagcatttttatcaccccgaaaatgaaacccttcacccattagcactcatttccccatttcccccagcctctggcgaccactaatctactttttatctctatggatttgcctatttaagacatcctatataaatgcaatcatacaatatgtggtcctttgtgtctaacttatttcacttaatatgttctcacggttcattcatgttgtagttcttattgatatttcatacctttttatttgcctaaatcaatcatttctatgattcctaaaaaatggtgctagtctaactacattatttccatctacacttactaggcaacatctttatcatccattgtcaggaagccctttaagaaaactgcacagtgaagttcattttaataaatagggtttccttgctctcaagtagttactaatcttagacaaaagggtctaggatgaccacctttcttgaggtttacatgatcttccctgacttccacttgaaaggcaccctgtgagtctctctccgcctgttatcccacaggctcctccccactcctccaggtaccccttccccggcggctgcaggaggaggaagtgacgcaccggaagtgtccctgttccccttgctgtgggggtaaggaatcaagcccccaagatggcggcagcggcggaggagcggatggcagaggaaggaggcggcggccaaggcgacggcggttcctctttggcctccggctctacccagcgacagcctccaccgcccgcgccacagcacccgcagccggggtcccaggcgctcccagcccccgcgctggctccggaccagctgcctcaaa

SEQ ID NO: 4021 - DNA, 2300 bp, Homo sapien
tttagctgtgagcttgtaaaaacaaaaacaaacaaaacttatgagaacacttgtacctccctagcctgaggggcatgatgtatagcctctttcaggactgttggtacatgtccctttgaatattcactgtggagaatcttttttagcaagcgtagctaaattgtatctgctcctctaaacatttgccagaagaagaaatagtttattttcaggttcaggctctacacattctctttcttttcttttcttttttttttttgacagagtctcactccttcacccaggctggagtacagtagcgtgatctcggctcaccgcaacctctgtctcctgggtccaagcaatcctccggcctcagcctcccaagtagctgggattacaggagcctgccaccatgaccaactaatttttgtattttttagtagagacgaagtttcaccatgttggccaggctggtcttgaacacctgacctcaggtgatccacctgtctccgcctcccaaagtgctgggattacaggtgtgagccaccgcaccgggccctcttctcccaccctttccctttctttctttctttttttttttttttttttctttgacagagtctcactctgtcgcccaggctggagtgcagaggcatgagcttggctcactgcaacctccacatcctgggttcaagagattcttgtgcctcagcctcccaagtagctgggattacagatgcgtgccaccacacccgactaattttttgtatttttagtagagatggggtttagccatgttggccaggctggttttgaacccctgccctcaagtgatcagctcacgttggcctcccaaagtgtcaggattacaggcatgagccaccacacctggcttctacacattttatgagcaataaataatgttgataatctctcagttttcttctttcttcctgtctctccctccccagtggtcctgcagcagttctaatcccattcccatcaccagttgatcagagacctagtatttttaggaaagtagcagcctttatttattttttatatttatatttatatttttacttatttatttatttatttttgagacagagtttcactcttgttgcccaggctacagtgcaatggcacaatcttggctcactgcaacctccgcctcctgcgttcaagtgattctcccgcctcagcctccagagcagctgggattacaggcatgtgctaccatgcccggctaattttgtatttttagtagatctggggtttctccatgttggtcatttttagtaaatctggggtttctccatgttggtcagtttccatgtggagagagaattttgccatgttgcccaggctgggcttgaactcctgggctcaagtgatctgtctgcctcagccttccaaagtgctgggactacaggtgggagccaccatgtccagcctgcatactttttatgttatcagaaatgctatctttctctttggttacatttctttttttttttttttcgtaaatcaaagtactattttattaaatgagttattttacacaatatgaacatcaatataattacaattgtaaaaaatttttttataacaaggatggactgattttcatatttccaaatcagagtcaactgtacatttacacagaattgtctttgcatgaagcccaaaagggaacagcataaaaaatgagtgtttctgtagcccctttatttttgctgatcaacagtttgttagaaaagcagctgcaggtatgttacctaaggtctgagacagtagaagagtcaaaggtgtcgtgaattcacctgtaaacaaccttatgcctgaacatcagctaattctggaggaagtgaagtcttaggatgcttgctctcaaagtgctgcttgaaggtcttagggtctggcattcgtgtcctacagacagtgcaggtatatattaaggcagctttggcagcagccttttggtcatgtccttgtttcttcttttgtccagcttgctttttggcattattctgctgagactgaattttctgctgtccacgagccatatccgggccaggagaatcttgcgtcggagagacagtgcagcgcgagagggccgggagaggacgccggagggaaaggaagggggagcgcgcccagcatcgcttgggcctcctccacccgctcaggaggggaaacaggagagccgggagcacaacagcctcgcgcgcccgccgccgcctcagccttaggggaggccactacgcctctggttacatttcttgatcatggtatctccccagctaggtaagtat

SEQ ID NO: 4022 - DNA, 2300 bp, Homo sapien
ccttttccaggtgacactccccaccttctttttcctccaccatttcattaacaactaaaaagctcctgcatgatcagacctgtgtatctatccatcatcaaatcccactcctttttcgagactgggaccctctggaggctgacccagccacgcatttgctagcatgccctgcagacatgaccctcgctgggctctgatcagccttcaggcctccactccaggtgtcactgttctgtctcccctctgctctcacagccttctctgctagatgtctcagccgtgctggccctctctatttcagaagtgaatgtactgagagggtcttagggacttattaataatgctcctggggtcggatgtagtagctcatgcctgtgatcccaatactttgagatcacttgagcccaagcgtttgagaccagcctgggcaacaaggtgaggccccatctctatcaaaaattcaaaaaagtagccaagcatggtggtgcacgcctgtgatcccagctcctcgggagactggggtgggaggatggcttaagctcaggtcaagactgaagtgagacatgaggccaccactgcactccagcctgggcaacagagcaggactctgtctcaaaaaaaacaaaacccactataaccataatactattatcacacttaagaaattcataattccttaatatcatcacatatccaattgatatctgagttcaattatttcatgtcaatgtttttaaactatttcaatcagaatctaaatgaggtcaacacgttgcaattggttggtatgtcttttaaactccttttaatctacaggtttctctttttttgccttgagtttcatttattagagaacccagacattgtcccatatagtctcccagagttggatcttgctagtttcatccccacggcctagtttaacacattcctctgtcctttctattttcttttttttttcttgagagggagtctccgtctgtcccccaggctggagtgcagtggctccgtctcagctcactgcaacctctgcctcccagttcgagcgattcccctgcctcagcctcctgagtagctgggattacaggcgcctgccactacgcccagctaatttttttatatttttagtagagacgggggtttcaccatcctgatcaggctggtctcgaactcccgacctcaggtgatggacccgcctctgcctcacagagtgcaaggattacagacgtgagccaccgcacccggccaaatgtcctttctattttctataaattaacagtcagatctaggggctcgatcagatttgtgtgtgtgtgtgtgccgtgtgcgcgtgcacagcatgttctttgactaggaggcacacctgctttggttatcttctttttgtaatctttaagttgctctttgatgtagacgtggtaactaatgttgaaacaaaattagtttcgtttcaaaacctttctttcaggaagaggttgtggttgattacttctgcgacaggtagatgcaaggttgagcaatcatctcttaacagaagtggtcacactagaataattcaagcacaacaacaaatcccacatcatcaccccctcttaataatggtgttttctttttacttgattagcttttaattgtcacgcactctgcattttttccctgaggtattatttccagaaggcagcgaaatatgactcaatggctaatttgctttttaaaaattaaacaaaacttaggccagctgccatttaagaagggctccggggcctccagactcggtgtgaccgtagccgtgcccggtgctcccctcgcggaggcgttagggcggcaggtttatctcacttgagaccattccttcctttttcatcttctccgggctccggcgcagcaggccgcaggggcgggcactcgcaagaacgcggcatcctggatggtggccgagtcaccgaagctcagaaccccgcgtcccagaatcgctgagagccggccccgcacgggggcctgggagcgccacgcgccctccacccagagaggcaggcgggcgggccggggggggcggggcctcgggactccgcccacgcctccgtctcctccgcgctccgccacagccggccgacaccacaccagccggggagccgccgccgccgccgccacctctgagcagccggctgggagcgagagccgacagctagtctgcaagccaccgctgtcgccatggggagccgcgtctcgcgggaagacttcgagtgggtctacaccgaccagccgcacgccgaccggcgccgggagatcctgggtgaggg

SEQ ID NO: 4023 - DNA, 2300 bp, Homo sapien
gtctgggcaacagaaccagactccgtctcaaaaataaataaagaagtgatttttaaatggataggatggaagtgaggaaacacccatcctcctgtctagtctagagagtaaaacatttaagaaagtggacaaatgtttaactctagggacattaaagaatgctaatgtctctccttaggcataattagaagccagtgcttgcattgtagttaagtcctgttgaatactagataacaatggacatttcttttacaggactacctgtcaggagatctgaggttacccttcgatttttttttttttttttttgagacggagtcccactttgttgcccagcctggagtgcaatggcgcgatcccggctcactgcaacctctgcctcccgggttcaagcgattcttctgcctcagcctcccgagtaactgggagtataagtatgtgccaccacgcctggctaatttttgtatttttagtagagacagggtttcaccaggttggccaggctggtctcgaactcctgacctcgcgatctgcctgcctcggcctcccaaagcgctgggattacagatgtgagccactgcatccggccgttttttttgttttgttttgttttgttttcccgagacaaggtctcactctgtcacccaggccggagtgcagtggtgtgatctcagctcaccgcagcattgacttgcccaggccaggtgattctctcacctcagcctcccaaatagctgggactacaggtgtgcaccaccatgcccagctaatttttgtatttttagtagagacagggtttcactgtgttgcccagggtggtctcgaatcctgagctcatacaattcgcccacctcagcctcccaaggtgctgggattacaggcatgagccactgcttctcgcctacccttggattttatgttgcaaaatattacctacattagccacacacggtggcgcttgcctgtaatctcagctactccgtggctgagacacgagaaccacttgagcccgggaggcagagtttgcagtgagctgagatcgcaccactgcactccagcctgggtgacagagcgagactctttaaaaaaatataaaaaattacctacagtttcttatcagaattactgaatcataatgctacaaaagtccctagagtcatctgtgagtgtttctcagctggatgacgcaagaatcaactaagggttttcaaaaatatgttacctgggcctccctacaggccaattatatcagagtctccaggtggggcctgggcggctgcagctagttaaatctctccaggtgattctgatgttccatgagaggagaacccctgacacccaacctccagtttaaagaagaggaactaacccagggcccagataatgactgtccaggagcatgcactagtggctcccaggggtggggcccaagtcccctgcccccaggtcagcatgctttgactaagaccacagagtctcacccagattccagataggagagaatggtgacttggttccatttcagagtgctttttgctttggtttactcccagcagcaaatgggcagggctggggatggaagccaaacacatagggtgtgtctcccgatacctctcttaaatctcagggagacacagtcaggactgcaatatcttatcagtgcctggatggggaggggactgccaggtaggggaggagagatgtggactcactgccgcccatatctccagtctcctcagcacctagaaacaacttacactgccttataaggctgaaatgctgctgccagagagctgtggggcccaggccttgaattcttggtgcaccagtgcttgacaggctccccttatttcccactggcaccgctgggcctaggggttttcctattgtttttctaaaggcattccaaggccaggacaatgttaatttaagttcctccaggctgaattttttttttttttaattacagaggggtgtcactatgttgcccaggctagaatgctgtgcactacaacaggctcaattctctctctctctcttttttttttttttgtcggagatgagatcagctaataacagactcaattcctgaccttcctagttttctgagactgcatccactttgatagtttctactgagtccaaattagaacatcccagctggtgggctgtctcccaggaagccctcggagaggagcggtgcatagggggcacctggacacagcccacctcccccgagtagcgtcaggtaggcttgtctatctacatcctttcgccctttctcaggaaactatcagatg

SEQ ID NO: 4024 - DNA, 2300 bp, Homo sapien
tcgctctgttgaccaggctggagtgcagtggcacaacctcagctcactgcaacctctgcctcctgggttcaagtgattctcctgcctcagccttctgagtagctgtgattacaggtgcatgccaccatgcccagctaatttttgtatttttagtagagacagggttttaccatgttggtcaggctggtctcaaactcctgacctcaagtgatccgcccgcctcagcctccgaaagtgctgggattacaggtgtgagccactgcacccggcttcttttttttttctttttctttttttagagatggggtcttgctatgttgcccaagctagtcttgaactcctggcctcaagggatcttccccccttggccttccaaagtgctgggattacaggctgagccatggcccctggccctgatccacttttctaatatatggctttttaatttgaaaaactgatttccttatacactgtgaaacagcatttctatagctccctggactatgctagttccctcacccaatgtctccacttctaaagtcctcagttactgtgaaactcatttatctttctgcaacattaattttgagaaagttgaagtgagcaaaacttcctggaatctgaaaagaagatccattgtccccgtaccaggctcacaatcagccaaagggggaagtagattttcctgtctgtacaaaagaaggtaattagaattttggttgtaataaattatctatagtctcctctttgaagctgttttagagaatgttcctgtaggccagggtcttagaaagtttcttttgaacgccttgaccatattcagggctcctgggcccctcatcatgagagaagtattgctaaaacggcttctgaccagcagtaactaaataccagaggaagccccacctccaaagccttatggcttgtctgcagacagccatgaaatcttagtttggtggaaatgacatcagatctcttcactgttaactgtgctttgtgccatagaataaagtgattcagttgttcaattattataaaaagtcacttgctggccaggcgcggtgcctcacgcctgtaatcccagcactttggtaggccgaggagggtagatcacctgaggtcaggagttcaagaccagcctggtcaacatggtgaaacgccatctctactaaaaatacaaaaattagccgggcgtggcagtgcatgcctgtagtcccacctcctcaggagactgaggcaggagaattgctggaacccgggaggcgaagactgcagtgagccgagatcgcgccactgccctccagcctgggcgacagagcgagactctcaaaaaaaaaaaaaaaagtaacttggtgcttattatgtgtcaagtgctatagatgccaaaatgaggagaggacatgctattgtcaattttagcctagcacttaaatagcagatctagtatcagtgctggtcagtccaggtcagcatagaaggcagtctgagctgaaagcagatggaggagggaaagctgctcaggaaatggtattgaaatcccaaagcagtccctatgggtggtagggaggagacattctaggaagggggaacatcatgagcacaaactcagaggtgtgatagaacatagcactggaatggaatggcaatcaatccaatcaaggaaagaggaggggcaggtagcaaaggtgggttgatgtcagattacaaagtccatgtgtaattagactaatgaattcatgcccctgaagaatattccacagagaagtgacatgatttattttgttttatttttttgagacagaggctggagtgcaatggcgcaatctcagctcactgcaacctctgcctctcaggttcgagtgattcttgtgcctcagcctcccaaatagctgggattcaggcgtgcaccgacatgcccagctaattttttgtatttttagtagatgggatttcgccatgttggctaggctggattaatttgcattttggaaagcaactctggtttcagtgtacaagagatttgaacaggagattaactaggaagctaaagtaatagttatgaaaggtgatgagagcctgaaattaggtcagtgtctatgagaacaaaggggatggatttcagaaacgtttctaaatcataaatgactgaaccagaagaactgaagctgatgtcagatttctcgcttgggtgatgaggaacaaggcaggaagagcagcaatgaggatagaggtggaagggcagctcaggaatttccctggagttttcccatcttgagacttcggtcttggaagacagaatg

SEQ ID NO: 4025 - DNA, 2300 bp, Homo sapien
gaattacatttcattttaaaaattactgagcattgactacatttgtactatatgctgtagggaatctttgctaacatttaatcaagcacataaatacctaatcaaattttttaaatgttataaaaagttagttataattcttccacttttccccacaagcctaaagcgcagagcagagactgaaactggtaggcactcaataaacacttgttgaatgaatgcaagaaggctggaaagtccaatatcaaggagttgttatttggtgagggccttcttgctgtgtcatcccatggcaaaaggcagaatggcaacaaaagagccaaattttattcagccttaaaagtgaaggaaaggccaggtgcggtggcttatacctgtaatcccagcactttgggaggccaaggcaggtggatcacctcaggtcaggagttggagatcagcctggccaacatggcaaaacgccatttctactaaaaatacaaaaaattagccgggtgtggtggtacacacctgtagtcccaactacttgggaggctgaggtggtagaatctcttgaacccaggaggcgaaggttgcagtgagctgagattgcgccactgcactccagcctgggcaacagagcaagactctgtatcaaaaaaaaaaaaaaaaaaaaaagaaaagaaagaaggaaattctaacacatgctatatgagggcattaagctaagaaacaagccagtcacaaaagtcaaatactggaagattccacttatatgaggaagttagtgtagtcaaaatcataaagacagtaagtagaatggtagttgccaggggctggggggagggaggaatggggagttattttttaattagtatagagttttagttgtacaagatgaaaagagttctggaactagatggcagtgatggttgcatattatgaatgtattatcactaaactgcacactttaaaatgtttaagatggtgaatgttcttatattttacaactaaaaaaataaaaaataaaactacacatagtgaagaagtaggaaatgaagttgcaaccaaacggatcaatattttgagtgggaaatctaatacttaattcagtgctaatttttatatttttagtagagacaaggtttcaccatgttggccaggctggtcgtgaactcctgacctcaagtgatctgcccgcctcggcctcccaaagtgctgggattacaggtgtgagccaccgtgcccggcctcacgcccttctcttaattccattttctctcccctctgccccttaatacactgcacttaaccttgtcataagccaaggaggacctgaaataagaatactcaaaacacggttgaaataaacaagaagacagaaactaaagccagcattttttttttaatgcttggtaactgtccctttgtgtctccctaagtgcaggataaacttcttggggcaaatacaaacgtttgataaaattctgggccaaggagtcctgcactggatatattcaacaaattacctgccgatgataacagcgtaagtcaaacgagttctaaaagtaacaaatgacttagttatctggataaatccgtccttccttttctttttcacctagcccttttgtcgggcctctaaaatgtaagataactacgtgggaaagcaagcagcggctggtggtgtgtttttaccctgattttatcactccaagtatctaccgtggctggttttgcgaagactagctttgtatcagaatgaggtgtggctggaacgcctgaggaaagcaaaccaagttttccagaggacgccgttgacagcgtctccgcacaccgcgccggggtaggaacttcctcccacctggttcgcccggcggggaaccaataaagttgagcgcgttcaaaggggtcctaatcttccagggtccactgggcaggcctgcaaaataaggcccctagaaactccctgaggttttcaagtcttctccctctcctcggaattttttccccttcattcgcattacttttattctgacggaaacggcgcgggctaggccccaggaggggcgcatttcaggtgcaactggcccggcgatcgcggcgggcaacccctacgaggcccccggttgactaggagctggcggtccgagctgtggcttggaagaccgacgcgatgaagcccagacctgcagggttcgtggataataaactcaagcagcgagtcatccaggtgtgtattctgcaccgcttggcctcgccaagggccccgatcgctgccccagggtgccactccccttttgtcgggtggcatccaggtg

SEQ ID NO: 4026 - DNA, 2300 bp, Homo sapien
aagagcagtgaatactggcaattcagatatgccaaagagaagccatgaagtgctccctttaagtgaaatggtcaaagttcttgacttaaggaaagaaaaaaaaaccctatgagactgctaagatctatggtaagaaccagtcttttatctgtgaatttctgaaaaaggaaaaaggaatttgtgctagttttgctgttgcaactcagactacaaaagttatggccacagtgcctgataagtgcttagttaagatggaaaaggcggcacagcacagtggctcatgcctgtaatcccagcactttgggaggtcaaggtaggtggatcacttgaggccaggagtttgagaccagcctggccaacatggcgaaaccccaactctactaaaaatacaaaaaattatctgggtgtggtggcatgcacctgtaatctcagctactccggaggctgaggcaggagaatcgcttgaacttgggaggtggaggttgcagagagctgaaatggcgccactgcactccagcctgggtgacagagtgaacttcatctcagaaaaactaaaacaacaaccacaaaaaagatggaagaggcattacatttgtgggtggaagacatgaacagaaaacatgtgccaattgatggcaacgtgttgagccagaaagtattgagcctatacaaagacttcagtgagggattccctaaaacgagtgataccaagccacttactgcaagtaatggatagttacatgaatgtaagaatagatttggactgaaaaatataaaaatcactggagaggctgcatctgtctcttcatcttatcacataggcattttatcatcatacatcatctcaaaaagaagggtcagtacaataagatattttgagacagaaagaccacatttacataacttttattacagtataattgttctatcttattattacttgttaatctcctactgtgcctgatctataaattaagctttatcataggtatgtatatataggaaaaaacatagtacacataaggtttggtactatccatcgtgtcaggcatccacttgggggtcttggaaagtagcccctgcaaatacaactgtatttgttaaatgaatgaatggatgagtaagacatcgtattcacttcttaaagatcttaaaatctagagaggagagaaacattgctgtaggagaggataaacaaaggactgtgaaatctctggagaaattgaaatcaggaagggaagggcaaatcgcaaaagtcaagccaggagcattaagttagatttgtgctttgagatgaaaaccccttacaaatcctaagtcagggaatgcaatggttctagagccaactctaaagaaaatttcacacatgggaaatacatcctactggatatccggattaaaagcgttcagtagagactggtgcagtggctcaggcctgtaattccagcactgtgggagactgaggcaggcagatcgcttgagccgaggaattcgagaccagcctgggcaacatggcaaaaaccccatctctattaaaaatacaaaaaattagccaggcgtggtggtacattcctgtaatcccaggtactcaggaggcggaggtgggaggatcacctgaggccaggaggtagaggctgcagtgagctgtgaccatgccactgcactccagcctgggcgacagagtgagaccctgtctcaaaaaataaaataaaatgagaaataataaaataaaattagctgggcatgtcgggaggctgaggtggaaggattgcttgagcccaggaattcgaggtcatagtgagctctatcacgccactgcactccagcctggacgacagagcaagaccccagctctttaaaagaaaagcgttgagtaaatacttgttgattaattccatttctggaaataatcggatttatgaaagaggccctgcccacctctttgatatggacttgtactaatgaactacaattcccagcatgcgtcagaattagggccgtagagttttttaaaatatggactacaactcccggcatgccacaccaggattcgaggaccacacgcctcagccagccccggcaagggcctatcaggggtgggtcggggcatccgagcgggtttgacggaaggagcggcggcgacggaggaggaggatggaggcggtggtgttcgtcttctctctcctcgattgttgcgcgctcatcttcctctcggtctacttcgtatccttgcctgaggcaggcgaacgccttgccgggggacacggctgagggtgggccagttgggcacccgggcaggt

SEQ ID NO: 4027 - DNA, 2300 bp, Homo sapien
tgcttcatcttcaagaatcctcattaccctatttaatattctttttacaagtgagagaaacagatttgtctggcagagcatgagacagaatagcaggagagttacttgccaggtctaatctccatgtttgaataataccttcacttcttttactttcaaagcccattcttctgagaagaaccaaaaccaggtcagggtcacactcccagcaggggcccctcatgtattctccagaatctgtgaactttagcatttatcccaccttctgtacatacagtgagcaataaaacagttccccagttttgtgctctgggatctcagtatctttcacaagatgacacaaggatgattatccagttatactattttttgaatgatgtttattataaagtcttgaagatatgttctttgagttttattttactattcagaagtagttaagttagcctagtggttaagagcaagttctacagctggaatgcctgagtttatatacctacttagcctcttaaccctaggccagttacttaagctttctgtgccttggtttcctcatttataaaaatagaataataatagtgcttacagggttgttataaacattaaaggaagtaatatgtgttgagtgctagaacctgcacaataagagccatatatataatatataacaataacataagaatttgttctgttaataggtaatatatatataggtattgttactttacattttagtaattatatgcaggtgccatattatattaatgaattgagtccactgtagaaatttcttgacatgtattagtaagaagcagatagccagatggtcagtacttttcaattacatttattacaaagaaatgggtttaatattggttgctttctctgttgtatttttaggtatctgatgtgtagccatgcagaagacctacgtgcaaaagcagaatgggaaggcaaagggacagcttcccgatctaaactattggataaacttcagagtaagagtcttaattttttatgttgctgtgttttctcttagattacaaatggatacagtgatcaattaggaagacagatggggaatatctggacatacttttattgagtgcttagaagagggagaatccagtttttcagactctgtcatggagtctaagaagctaacctcaggagtcagtgaaagggcactggttccagagcagcccttctttcatttgtattatgtgatgatgttcccccttaagattttgtttgggggaaaagtactgtgttaagagaaaaaaatatgtaaaccacagttttaagtcacaagtgctttaaagattttgttgatttcaatagtaaggtccaggtttctttaggtaaattgttttattcttccccaaccatgttatgtttattctagattgtaatgcaggtttcatttttgctgtatttttatgtaaaagatgttctctctgaaaattatatgattctataattttgatgttgaaatgacagtgacgatcctaagaatcacaaagccgtgcagttggggaggtataagggattcaaggattgcagtaggttggtatggatatcaaaacaccagttactccctgaattcacacagtatctttggcatttggagcaatttgtacttgatcttagccaaaaggccaagaggcgatttttagagcagtttgatgggaactagaacttaacctattgcaacatttgccaaaattttgctatttgttaagtggagattttacttacacctggtctcctggtacacaataatatctaatattcttttcattgttgtcttctttttcttcattttgttgttgttattcctcacttatcctccctgcccctagaaaatccacatataaagtaaacccctcccaccaaatatatccaattttatgagcagcatagctattgctgctgacaaatattcgtaaagctcacgtatcgcataacgcagaacttctctatttaaggaatagatactattggggtaggaacaagtacagcagaagatgagcaaatgtcttaaataaaagtttacagtttattattatttctcttttttaaaatatcttctattaaagcctatttaccaccatcagtgatgcttcccccacggcgtttacagactctcctgcggcaggcggtggaactacaaagggatcggtgcctatatcacaataccaaacttgataataatctagattctgtgtctctgcttatagaccatgtttgtagtaggtaagaggaaaacttcctatattctgaaacagcctaacatttta

SEQ ID NO: 4028 - DNA, 2300 bp, Homo sapien
ctcaagcagtcctcccaccttggcttcccaaagtgctaggtttacaggcacaagccaccacacctggcctgctagatgttttgatatggtagctgacaaatttcttgttccgattacctttttttttgagacagagtctctctccattatccatgctgcagtgtagtggcgcaatctcggctcactgcaacctccacctcctgggttcaagcaattctcctgcctcagcctcccaagtagctgggattacaggcatgcaccaccacgcccagttaattttttttctgtatttttagtagagacggggtttcgccatgttggccaggctagtctcggactcctgacctcaggtgatcctcctgcctcatctcccaaagtgctgggattacaggcgtgctgattacctttttaatgcggtatctgatttctttgtcatcggaatatcattcacatgatgatttttttcctgctcttgtgtcagaacatataattagtcatatgggttttattctgaagcacaccatgagtttttcacctaaggaaatggcccaaaggtggtgagatgtggaactgggatcagaacccagggtttctccttctcagtccaatgtccttttagttgtaccatgtgactttctgtaaacagaaattcatttaaaactttaagatttaatatgtattttcacaaggacatagaagcaattctaagtcacttttgtaaaattttaaaaatgaacattttaaaatataattattgataataaactttgcccaaaaaaagttgttttagaaacaaaatattcacaatggccaacttctggctgggcacggtggcacacgcctgtaatctcagcactttgggaggccgaggcgggcggatcacgaggtcaggagatcaagaccatcctggctaacatggtgaaaccctgtctctactaaaaatacaaaaaaacacaatagctaacttcctatagcgtttttgagtataattacttacattattaaataagtttttttgatcagttaaagcactatttatgtactaaaaatcaagaggaaaagtagttctgctgtttgggaagagactattaaatcatttagattctaaatgaaatatgctttatgcagttaagaaagggagggagtgatgatactcatgttaactgagaggtatagcaggtcgtagactaagtacttaaaatgcttcatcttcaagaatcctcattaccctatttaatattctttttacaagtgagagaaacagatttgtctggcagagcatgagacagaatagcaggagagttacttgccaggtctaatctccatgtttgaataataccttcacttcttttactttcaaagcccattcttctgagaagaaccaaaaccaggtcagggtcacactcccagcaggggcccctcatgtattctccagaatctgtgaactttagcatttatcccaccttctgtacatacagtgagcaataaaacagttccccagttttgtgctctgggatctcagtatctttcacaagatgacacaaggatgattatccagttatactattttttgaatgatgtttattataaagtcttgaagatatgttctttgagttttattttactattcagaagtagttaagttagcctagtggttaagagcaagttctacagctggaatgcctgagtttatatacctacttagcctcttaaccctaggccagttacttaagctttctgtgccttggtttcctcatttataaaaatagaataataatagtgcttacagggttgttataaacattaaaggaagtaatatgtgttgagtgctagaacctgcacaataagagccatatatataatatataacaataacataagaatttgttctgttaataggtaatatatatataggtattgttactttacattttagtaattatatgcaggtgccatattatattaatgaattgagtccactgtagaaatttcttgacatgtattagtaagaagcagatagccagatggtcagtacttttcaattacatttattacaaagaaatgggtttaatattggttgctttctctgttgtatttttaggtatctgatgtgtagccatgcagaagacctacgtgcaaaagcagaatgggaaggcaaagggacagcttcccgatctaaactattggataaacttcagagtaagagtcttaattttttatgttgctgtgttttctcttagattacaaatggatacagtgatcaattaggaagacagatggggaatatctggacatacttt

SEQ ID NO: 4029 - DNA, 2300 bp, Homo sapien
atttaaatgtcacatggaactggccagagcatgagatgtaatttcttcactaaattttcttagtaattgggaattgaggggcttaaaaaaaaatttcagggcaagttttttatttacttaatatttattttttttggtatcaatcattaggctcctatgcccacccctcccccattccaatgtgtgcagggacagtgcccaaagcgctatttctcccttattttcccaccaagatcttgatacaacatgttactctttttctatggggcagaggtggggcaggagagcagagaaaggctgactaaaactctgagagaagccaatataaacacatatttctgtatatacagggaatgctataaaagtagcacaagagcatttctctatgagtcattttatccagatcaagaccaagaatattctcaaacagatatcaaatcctggtattgtgcatggcaactaacatgctgctggccaagcacagctagagatctgtttgaaagaaaatgtttattctccaaaaaatcagttgaagtatttgacacatacgataagggtggggagtaaaactgtattttacctcccaaaatttaaagcacaaaaatgtaaatataacctcaagaaagcaaagaccctttaattaacaaataatgttaaatatttactgaaaacattgtaaaaatcagacaaaattaaagcttgctgagatggggacagggctctactaatgtttatattttttaaaaaatcttgaagaaataaagacaaaaaaagattaggaaaataaactctcctttatgtctttccccaactcccaactagatctcttaagagattatttctggtctctaatgattttttaccatctctgggcccagcaagatctccttctccattttaatatctaataaatttgaaattgttaagtgactaggatagcttgaatgatagtttcacgtcgtaaattctgctgttgctcccctagtccacccaatactgaattgctttattccttcctttgctcccatattattaaactgaactcaacatgaaagaaaaacccagaaattacgatacttagaaagtctggttctcaagggcggcctcctagctaattcagtaatggttctaactctggagtaaggtcataaccaaatcttatcaattaaatcatgatttctcagagaaaaggggaaataaattatatctaaacttggcactcaaaactcctatttgactttaaaatatactagttaattatagatgccaatttttcttaagcatatttccattatattaaaaaataaccaaatatttctagacataaaaaaagttttctattattggtctcgtatacccatccaaattgcccagaaatggcgaagtatatttgaacccaaactaaaaaatgctgatttggcccggcacggtggctcacgcctataatcccagcactctgcgaggctgaggcgggtggatcacctgaggtcaggagttcgagaccagcctgaccaacatggtgaaaacccatctctactaaaaatacaaaaaaaaaaaaaattagccaggcttggtgatggacacctgtaattccaactacttgggaggctgaggcaggagaatctcttgaaccccggaggcagaggtcgcagtgagccaagattgcgccattgcactccagtctgggcaataagagaaactccatctcaaaaaaaaaaaaaaaatgctgattcatgaaagcaacttctgccattcctagtaccatttaatcggaaaccatttaaacagctggtgcagtggttcacacctgtaatcccagcactttggaaggctggggcgggcggatcacaaggtcaggagttcgggaccagcttggccaatatggtgaaaccccatctacactaaaaatacaaaaattagccgggcatggtggcatgtgcctgtagtcccagctacttcggaggctgaggcagtggaatcgcttgaacctgggaggcgaggttgcagtgagccgagatcgcgccactgcactccagcctgggcgacagagcgagactccatctcaaaaaaaaaaaaacaaaacaaacaaacagacaaaaaaaacaaagggagtaggctgtagagagagtggattgggtcaatgaaaacattcaggcttaaaaaataaagtacaattttagtctagactaagccatcaaatgtgtctgggtatacaattaaaataattacgtttaaagaaaccctaatagttgtcttctaagatattattacaaatttaagcttatattagattctcttct

SEQ ID NO: 4030 - DNA, 2300 bp, Homo sapien
tccttcatcaggcactcccaccaatcctaccttccacccccttagtttttctttgtgtgtatacaaaacggtggtttttgtccaaggtcgctgtctaccttcaccctatgttaggtatacaaggccacctaaattgtatttgaaaacaaatggttcaccagatcagatgtccccttttcagaggcgatcatcttcttggtattaaactgagatttcagactagttagggttaggcctcttgtacacacacacaagggcctttaaacgacatcaacactgtatcttcattattcgcatcagatttattcaacaacctctttccaaatgatcccagcccctccgttcccataaacacttgtaggtgattgtctttcctgattggtagtttgcttgggttgttgtctgccacggttgggggtggggaggtgtcccacaaagatgcctccaagatacacttgaaaaacaaatcctccaaggttcattatttccaccagctctaatccacccctcccccaacacatacagaaacacactcccgcatctgtctttattgacagacaattaagctctgaaggtgcgtggggagaagtcattctttgggtttctcctaacccttcctaacccctcaacgcctgtctcgtctcacaatttgtcagactgattgattttcccctatttcctttcaggtccgctcctcctccccggtcgccctgagccgcgtcctcctgtgtactgggtcctgcgtgcccagcactcattctctttgaccgagctctttcaagcccccctcccccctccgccccttcccctacccccctggagcctccgtccctcggtctgtccatcaccagctggcggtaagggatacttacttgagccctaagccattcaagtgctgtcctattagcctaatgacatcctcatctgactgggagagccgcttcttcttcttgaggctgctgcccagttctggggtggccaaggaagaggaggcggcggtggtggcggaggcagctgcgacggtggctgaggatgcggcggccgccccgccgggaaccccgttattgacattcaggctgttgctattgttgctggcggcggagggggcggaaggcaggagcccattggcgtgggccaggtcccccgcggacgacgacgacgagggggacgactccccgttctgggccgacaagcaggcgagttccggggtctgtccctggcccccgccgccccctcctcctccaccgccgccgccgccacctcctcctcctcctcctgccccattggcctgcatgatgctgccgctgaccaggctgtggccgctacttcggtgggggacagcagcggcggcgggaggggcagcagccgggggaagtcccaccactaccaccacggaggaggaggaggaggaggaggacgaggacgacgaggacggaggggagaggcctgctctgcctgccgaagccccgggctctcctactccctccgccgccgaggctcggggtttcttccgcgggggcggggaggctccgccggtgtccgagtcggaggaggaggaagcggaggccagagtttcctcgccgagagaggccgtggtgggaagccggtggggcgaggcgggggaggggaggcgggggccggggagagggtcggggtgaggggggccggggaggcggggagggggtcagggtaggagggtgagggtgagggtgagaggagggggaggaggaggagggggagaaggaggatccgggccctttcccccccccctcccggaggcagctcggggtgcgcggcccgggggtcgcgccggggggcgccgcggggcggctgcgggggcgcggggcccgccgctgggctgagccccggcagtggctgcggcggcggcggcggcgggcggcagcggaggcagctgccgcctctgtcctcggatccgctccgctctgctccctggtgtgttgattcttcccccagctgctgcctaatggagtccaggcgctcgcgtcacaggaaatgcctatactgccctcctcactcacttccggtggcaggtatggaacctatagggggcctgtcacccagcacgtgcatcgggggctgtcccgggggtcaggggagggaggccagcgggccggcggggtccgccccgaccccatccacgaccccgactcctatccgatcctatccccggccccgctcgggcctttccccttgcgccctggctcggctggctcgacgagcagtaagttcgtagccgccctccgaagccgggcgtgcatgggatggcagagttggcgtgc

SEQ ID NO: 4031 - DNA, 2300 bp, Homo sapien
ggggataatgcacaccatttgccaatgattaagattcagcccagtctttgttgctgcatttctacattcacataaattggtaagtcatgatgacacagaaggctcacatgccacgtaaaaatttcaagcctggatctgaatgggtgcctgaatccttctcagaatgcatattttggaggcaactgtttggtttatgttactgctccctaaactgggcagtgactcaagaggcagctggaagagagaaggaggtgctgggcaagtgctaaaaaagagtgaagcctcaacagcagagtccctccccttctctacacaccacacagcctttttgtgacttcttgtccccataagatatgctcctctagactaactccccttcccagggtggagcagagtctcaccggctcattatctcacagctcccgggatggccccgggtacagcaactgtgtggcacttggctgtggaaattcaagtttttccaccctaaaacaagtaggttgtgaaacccgatttcggtcctggttaccattgagaggggcctaccacagccctgtgcctggaagttcctgcctgtcgaagctcctagccccctgccccatcctcaccttctgcacctgatggagaaggtgcagtccctccgcgcaccttacatgcccatgccacactggtggactcacgcacgcacgccaactctgccatcccatgcacgcccggcttcggagggcggctacgaacttactgctcgtcgagccagccgagccagggcgcaaggggaaaggcccgagcggggccggggataggatcggataggagtcggggtcgtggatggggtcggggcggaccccgccggcccgctggcctccctcccctgacccccgggacagcccccgatgcacgtgctgggtgacaggccccctataggttccatacctgccaccggaagtgagtgaggagggcagtataggcatttcctgtgacgcgagcgcctggactccattaggcagcagctgggggaagaatcaacacaccagggagcagagcggagcggatccgaggacagaggcggcagctgcctccgctgccgcccgccgccgccgccgccgcagccactgccggggctcagcccagcggcgggccccgcgcccccgcagccgccccgcggcgccccccggcgcgacccccgggccgcgcaccccgagctgcctccgggaggggggggggaaagggcccggatcctccttctccccctcctcctcctccccctcctctcaccctcaccctcaccctcctaccctgaccccctccccgcctccccggcccccctcaccccgaccctctccccggcccccgcctcccctcccccgcctcgccccaccggcttcccaccacggcctctctcggcgaggaaactctggcctccgcttcctcctcctccgactcggacaccggcggagcctccccgcccccgcggaagaaaccccgagcctcggcggcggagggagtaggagagcccggggcttcggcaggcagagcaggcctctcccctccgtcctcgtcgtcctcgtcctcctcctcctcctcctcctccgtggtggtagtggtgggacttcccccggctgctgcccctcccgccgccgctgctgtcccccaccgaagtagcggccacagcctggtcagcggcagcatcatgcaggccaatggggcaggaggaggaggaggaggtggcggcggcggcggtggaggaggagggggcggcgggggccagggacagaccccggaactcgcctgcttgtcggcccagaacggggagtcgtccccctcgtcgtcgtcgtccgcgggggacctggcccacgccaatgggctcctgccttccgccccctccgccgccagcaacaatagcaacagcctgaatgtcaataacggggttcccggcggggcggccgccgcatcctcagccaccgtcgcagctgcctccgccaccaccgccgcctcctcttccttggccaccccagaactgggcagcagcctcaagaagaagaagcggctctcccagtcagatgaggatgtcattaggctaataggacagcacttgaatggcttagggctcaagtaagtatcccttaccgccagctggtgatggacagaccgagggacggaggctccaggggggtaggggaaggggcggaggggggaggggggcttgaaagagctcggtcaaagagaatgagtgctgggcacgcaggacccagtacacaggaggacgcggctcagggcgaccggggaggaggagcggacct

SEQ ID NO: 4032 - DNA, 2300 bp, Homo sapien
ctaataaattattataaaccattttgcaaaaattaaattttgcctaaacaacacttttaataataaggttgtctaaagttaatatacaaacagggctctctgagggtgttaactatctagtaattcaggctctgctggatacagtgacagagctctatgaacctcaactagaactcaggtcggcctcaggtgaatataaacactgtatgtgagtcaccttgcaattacagctgccacctggaagcaaatttaagcagtaagaactacaaaaccaaatccctgtaagatcctgcattgaccttcctcttacttcttcctgtctgaggatccataaacctcaggattctttactaatttctcatcagcatcattttttattgtatttccaaatttaaaaacaactgtctccaaaggcctcaaaattactttcagttattactataataaatatcagcgatgtatgatgtattaattagaaactaaggtgttttttttcccctccccacaggaaaactacttcagagaaagactttaaatttctgagaaaatctttatacatattgagtatagatgctatcaaccacatacatgaaaataattgtttggggataatgcacaccatttgccaatgattaagattcagcccagtctttgttgctgcatttctacattcacataaattggtaagtcatgatgacacagaaggctcacatgccacgtaaaaatttcaagcctggatctgaatgggtgcctgaatccttctcagaatgcatattttggaggcaactgtttggtttatgttactgctccctaaactgggcagtgactcaagaggcagctggaagagagaaggaggtgctgggcaagtgctaaaaaagagtgaagcctcaacagcagagtccctccccttctctacacaccacacagcctttttgtgacttcttgtccccataagatatgctcctctagactaactccccttcccagggtggagcagagtctcaccggctcattatctcacagctcccgggatggccccgggtacagcaactgtgtggcacttggctgtggaaattcaagtttttccaccctaaaacaagtaggttgtgaaacccgatttcggtcctggttaccattgagaggggcctaccacagccctgtgcctggaagttcctgcctgtcgaagctcctagccccctgccccatcctcaccttctgcacctgatggagaaggtgcagtccctccgcgcaccttacatgcccatgccacactggtggactcacgcacgcacgccaactctgccatcccatgcacgcccggcttcggagggcggctacgaacttactgctcgtcgagccagccgagccagggcgcaaggggaaaggcccgagcggggccggggataggatcggataggagtcggggtcgtggatggggtcggggcggaccccgccggcccgctggcctccctcccctgacccccgggacagcccccgatgcacgtgctgggtgacaggccccctataggttccatacctgccaccggaagtgagtgaggagggcagtataggcatttcctgtgacgcgagcgcctggactccattaggcagcagctgggggaagaatcaacacaccagggagcagagcggagcggatccgaggacagaggcggcagctgcctccgctgccgcccgccgccgccgccgccgcagccactgccggggctcagcccagcggcgggccccgcgcccccgcagccgccccgcggcgccccccggcgcgacccccgggccgcgcaccccgagctgcctccgggaggggggggggaaagggcccggatcctccttctccccctcctcctcctccccctcctctcaccctcaccctcaccctcctaccctgaccccctccccgcctccccggcccccctcaccccgaccctctccccggcccccgcctcccctcccccgcctcgccccaccggcttcccaccacggcctctctcggcgaggaaactctggcctccgcttcctcctcctccgactcggacaccggcggagcctccccgcccccgcggaagaaaccccgagcctcggcggcggagggagtaggagagcccggggcttcggcaggcagagcaggcctctcccctccgtcctcgtcgtcctcgtcctcctcctcctcctcctcctccgtggtggtagtggtgggacttcccccggctgctgcccctcccgccgccgctgctgtcccccaccgaagtagcggccacagcctggtcagcggcagcatcatgcag

SEQ ID NO: 4033 - DNA, 2300 bp, Homo sapien
tagcaatgcaagaacggcctaatacaaagtcccacattttcattttgcacttggccctccaaagtatgtagccggtcctgacccagaggcaataaaatgtagatcggttcattgctctggtcatcagcctctggatttgctctaatttctccacttctcactgaaaggcatctagtttctaaactggagggagatatgaggccaggcactgtggtgcacacctataatcccagcgctttgggaggccaaggctggaagactgcttgaggccaggagtttgggaccagcctggccatatattgagacctatgtctgcaaacaaaacaaaacaaaaattatctgggtgtggtggtgcatgcctgtagtcctagcaaggagtttgaggctacagtgagctatgatagcaccactgcactccagcctgggcaacacagcaagactgtcttcaaaaaaataaaataaaataaattgaagggcctggagcggtggctcacgcctgtaatcccagcactttgggaggccgaggtgggtagatcacgaggtcaagagatcgagaccatcttggccaacatggtgaaaccccgtctttactaaaaatacaaagattagctgggcgtggtggtgcgtgcctgtagtcccagctactcgggaggctaaggcaggagaatcgcttgaaccagggaggtggaggttgcagagatcacgccactgcactccagcctggcgacaaagtgagactccgtcaaataaataaataaataaataaataaataaataaataaataagtaaaagatgtggccaaatagctgcaggaatgttggggcatagtagaaagagcccaggattaggagtccgcagacaggattccagttctgtcactagaaagctgtatctctatcttgctggaattcatcccttccagctctcaaggcattggaatcacatctgtgaacaggaaaactagcacaccagagtcagaatcaagcaatagttatttatctagttcccaccctgtgcaaggtaccaggtgctctaagattcactccaatccatgaagtgcgtctactctttcaccgagatttgccagtcgtctttcagggtatttttccttgctttctggatttgatgacttgtctgaaactgaagttctctctggaatgactggacctctttcactgcagcgtcaggaatctcttgcaaagcaagcatggtgaacttccaagatgctgggccactgggggaaagggtgcaattaataatccctaccacttattgaacgtataccaagtgctaggttttttacttatgttcccttttaatcctttgaaatggcttgactctactcttatttatgtttttctgataaggaaactaaggattaaagaggttaggtaacttgcagctagaaaacggtctaccttcaaaagcatcctcttgacaattccactaggaccaacaccaataccaccgagccctcgttgctgcctcttcagcgcagaatagcccaccaagtccacgtttccctagtcccaaggtcggatggctggggagggtagaggatgcaacggaaggacgttaatggagaattttgcagggtctgggagcagagcagtaaacgcagccctaagcactgagtatgctacagtttggtaaaatccatccaagcagctttgggatccaaggcttgcactgtatccccaaccaacactaggcaacgccccaagtccccacacttcccactccgataggcgaaactgcaagaaccgggaggggcggctgcggcgtttaggcgcgaggcacacaccatacccttccgcagcttcccacctcctccagacgcacgtgtttaaagagtccctgctccaaccggtcccgccccacctccgctcggcctccagccctgcttgtactgctggcttcaagtttcctccgagaggcgggcgtgcacagctgcagtggcggcggcagcggccaccaagcgcccggcggcgcttcgccacccacctttcctcagcccccggcgctgcagtctccgcccgccggggagggcgcgctcagcggaacaggagtcgagggtggggcgccgagaggagggaatcccgggtcgcaccgctacagttctcgcagtggcaaaggcggcggcggcggcggcggcagcggcagcagcaggtggagcgagctacagcgtttggcctgaaacccactgctgcagccacccgggctggagttggcccgttgggtggagccagtgctcgccccggtccgacccccggtttccgggacacttgggttgcggagg

SEQ ID NO: 4034 - DNA, 2300 bp, Homo sapien
gagatcacgccactgcactccagcctggcgacaaagtgagactccgtcaaataaataaataaataaataaataaataaataaataaataagtaaaagatgtggccaaatagctgcaggaatgttggggcatagtagaaagagcccaggattaggagtccgcagacaggattccagttctgtcactagaaagctgtatctctatcttgctggaattcatcccttccagctctcaaggcattggaatcacatctgtgaacaggaaaactagcacaccagagtcagaatcaagcaatagttatttatctagttcccaccctgtgcaaggtaccaggtgctctaagattcactccaatccatgaagtgcgtctactctttcaccgagatttgccagtcgtctttcagggtatttttccttgctttctggatttgatgacttgtctgaaactgaagttctctctggaatgactggacctctttcactgcagcgtcaggaatctcttgcaaagcaagcatggtgaacttccaagatgctgggccactgggggaaagggtgcaattaataatccctaccacttattgaacgtataccaagtgctaggttttttacttatgttcccttttaatcctttgaaatggcttgactctactcttatttatgtttttctgataaggaaactaaggattaaagaggttaggtaacttgcagctagaaaacggtctaccttcaaaagcatcctcttgacaattccactaggaccaacaccaataccaccgagccctcgttgctgcctcttcagcgcagaatagcccaccaagtccacgtttccctagtcccaaggtcggatggctggggagggtagaggatgcaacggaaggacgttaatggagaattttgcagggtctgggagcagagcagtaaacgcagccctaagcactgagtatgctacagtttggtaaaatccatccaagcagctttgggatccaaggcttgcactgtatccccaaccaacactaggcaacgccccaagtccccacacttcccactccgataggcgaaactgcaagaaccgggaggggcggctgcggcgtttaggcgcgaggcacacaccatacccttccgcagcttcccacctcctccagacgcacgtgtttaaagagtccctgctccaaccggtcccgccccacctccgctcggcctccagccctgcttgtactgctggcttcaagtttcctccgagaggcgggcgtgcacagctgcagtggcggcggcagcggccaccaagcgcccggcggcgcttcgccacccacctttcctcagcccccggcgctgcagtctccgcccgccggggagggcgcgctcagcggaacaggagtcgagggtggggcgccgagaggagggaatcccgggtcgcaccgctacagttctcgcagtggcaaaggcggcggcggcggcggcggcagcggcagcagcaggtggagcgagctacagcgtttggcctgaaacccactgctgcagccacccgggctggagttggcccgttgggtggagccagtgctcgccccggtccgacccccggtttccgggacacttgggttgcggaggccggctggccggagtcacggttggggacgggcgcgcctcggagcgcacggctgcgctggaagccgcgtctggggcgcaggaccaacgggacctacctcctcccggctacctaaagactccttctctcgggaaagagcgctgcccggctctgggatttgggaggagctcggaggccgctcgggcacctcgctggacactatccgtttgcgccccggtggcgcgggagggtccggagcggagcgctcgtctctcctcagcggtttagtggagaaaagcagagagctcttcctggggcgaatgggacctcctccctcggtcctccgtggagtcgtcgcatcgcttgtcgtgttggtctcgaggggctcacagcttggcactaatttgcaggtgttcgctgctgatttggtttcttcttcgatttgcggacggttccctccagcgactctcgacacacgttttcctgtcttcgccggagggccgggtctggggtcgccggagcctgcgggaatccagcgcttattcgctgaccctcgagtcgcttcgctagctgtgcgccctcctgggcactagcctggagaggagcgtgcagacgcggctccttggagggagtgcggtcctctagggaggcatcgggctcctaggggcttcttggcgtgtgtggtgggattggggtccgccggccatggccttcacttt

SEQ ID NO: 4035 - DNA, 2300 bp, Homo sapien
tcctcaaggatctagagccagaaatgccatttgacccagcaatcccattactgggtatatacccaaaggactataaatcattctactataaagacacatgcacacatatgtttattgcagcactatttacaatagcgaagacatggaaccaacccaaatgcccatcagtgatagactggataaagaaaatgtagtacatatacaccatggaatactatgcagccataaaaaggaacaaggtcatgtcctttgcagggacatggatgaagctggaagccatcatcatcagcaaactaacacaggaatagaaagccaaacactgcacgttctcactcgtaagtgggagttgaacagtgagaacacatggacacagggaggggaacaacacacaccagggcctgtcagggattgggaagtaaggagagggagaacattaggacagatagctaatgcatgcgggacttaaaacttagatgatgggttgataggtgcagcaaaccaccatggcacatgtatacctatgtaacaaacctacacgttcggcacttgtatcccagaacttaaagtaaaattaaaaaaaaagtttaatacacttttgccaatacaattttaaagacatttttatgtttttcaatttttttttgtcaaaactgtgaatctgtggatttagctcatttaatttatggaaaatgtctgctgtataatcagcattgtcaaatcaattagccaaatcaggctgactttttatcataaaatctgacttcatttttccattgaaataatttcattaaaaaacatttaaaaaatgattacagaaagcactgggaaagaacgtataaatgcatttaaaaaaatagattactaaaaccaatcaagttaagatgaaatactatagatatactttattcacttttatagtaagttatacaaaaaagaataagcctatataaggtaagggagtgggaaatgtcaaggataacgccagtgatttttggtttaagcaaatagaattgctatttactgagataaggaacactggatgtgaactcaggcggcccttcatagtctgtcttttttgttgatcttattttgttttagacagtctattgactgattttttttaagttacgactctcaactttttggccaattttattcaaatggaaatgattattggcatataaaaacattatttccaaaatgtttttcctttttaaagtgacatatttccttacccccaatacctaaaccctcttaccaaacagcgtctcaaagactcaaattcatacatagattttactgtaatatgccgaatggttatatatttaaacttattaaatattgtaacaaaaatgggaagctgatttttaaaatattaaacacagccttagatgtaataggccccaacaaatctctacatttttttttcctgtggatcccaccaagaaatatgaagtcacccaggtattttttgtgcctagctcagtgcctggcacatagtaagtgctcaataaatattgtagttgttgcgtgagtgaaatatagaacattaacttactaaatttttataagacctttaaaaagaaatggggtattttaatatatatgtaattatttttaccttagaattgtatacctcttagacctgttttattacatatatacgatccttcactagtaagtgaggctttttaatgaaaattcacgcccacgagttgtgaaaatcttaagtgtaagtcacctctttcagaggtctcagagccacctgttctgcaaaggcacacatttctcccgcctttaggccatacctaggtaggcatgcaggtggtagaaaggtcagactagagtctttaacttgggcaccatatctgatctgcctttagggcacacttttgggccacactctgcacccccaacaccccccttacccccagcaccgtcggtgtcacatcgggggccgccgcgtacccgcggtggaatctcgcaagagccagggcccctcctcacctgcccggcacccaggatcccttgcgccgcgttcgggaccccacccccattgtggcctcttcgccagggcgcaggcgtggctcttggtcaggcggttacggccaggaggcgtcggagcctggcgtggtagggctgtgctgcgcggtccttcccattcaccctagtctggcgctcgccggcgtgggcgggccggaccttcgccgcttccaggaagggccacaacggccgtcggaccacggcgcggcgggtaaggtcgtcagcgtcttcctgtcagcggtcggcagagcctcggc

SEQ ID NO: 4036 - DNA, 2300 bp, Homo sapien
caacctttcttgtttattagatgtttgttggtaatgatgagagcatgaatatgtaagtcactccaaagtcaatgctgaggttggggttagcatatactctcttgaaggagctggcaaatgatggcctatcggccaaatctgacctgccacctgtttttgtatgtctacaagctaagaatggtttttacacatgaaaattcacaaccactttagtgataggtaacactaacttcgaatcccagttaagtgagatgttatcttccccaaaagaacactattttgctcataggcctactgtattacaaaaaaaaaatacttaattattattaccacttattgaatttcatcaataaaacatttgtggcaatttgttttctcttttgttatatggtacctatgtaatagcctcaattttgccttttgactcacaaagtctgaaatatttactctttggctctttttattttattttttgagatggagtctcgctctgttgcccaggctggagtgcagtggcacgatctcagctcactgcaacctctgcctcctgggttctagcgatttgcctgcctcagtctctcaagtagctgggattacaggcatgcaccaccactcctggctaatttttgtatttttagtagaggcggggttttgccatcttgcctaagctggtctcgaactcctggcatcaagtgatccatccaccttggtcttccaaagtgctgggattacagacgtgagctacttcacctggccttgttggctctttttcaaaaaaagtttactgactcttgctttattgcaagtccagaatggatttgatttagggattttttttttttaatccagtgccatctacttcccttaggctctgttttttcatcttatctccagttatggtcaaagttgtatccttcagttattggctgcagtgaatgatccttctgtggcctttcttggtattctttgggtcatgactaggactctttctgcaccctgagtctcgtcaataggtagactgtcctacattgatgttatagttgtcagcttcatacctactgtgtagatttctggattttttttttttttttttttttttgagacggagtctcgctctgttacccaggctggagtgcagtggcacaatctcggctcactgcaagctccgcctcccaggttcacaccattctcctgcctccgcctcccgagtagctgggactacaggcgcccaccaccaatgcccggctaattttttgtatttttagtagagacggggtttcaccgtggtctcaatctcctgacctcgtgatccacccgccttggcttcccaaagtgctgggattacaggcgtgagccacggcgcccggctggcatttctattctagtaagaactactcttacccctggcttatttcagtctatcttagttgatttatctgaagcatattcacttgccagctaaaactttttctattctccattgattccagtcttaaatttttgcctttaattcttcagttacagtacacggccatgtagcacatcaactttatttagagactttctgtatcttgttagatttccctcagtcatcagaaagaaactcccctttttatatttcataacccactcccttttgttctattctattctgtctgaagaacgctagtagtatatggatgtggccttttagtgcttagtgaatgatgaaattagttcatcagcttcagctaccacttctgatgactttcctaagttctttttgataatttcccctaagaaaataatcttaaaacttatcattatctttagcatgctatttaatgtaagctaaaattgtatgtacataaaccaatgcatgtaagatggaaacaaattgccatagaaaggaagttagacaatatagagattgccctgagaaggctaactagcttagtgaagggtttggaaattatactgtatataagaaacaaaggcagtcaggatattatattaagcctattgagaagctgggaactatatatgccattttgaataccaattgtcatagctgtcagattgtattgtatattaaatataataatgtgaattttgttacagccagttcctttatagttttgttcagaaaaacatatggagacgtttatacccattgatttgacaactgaaaatcaagagatggacaaggaggaaaccaagacaaaaccaaggtaaaagtaagataaaatataatgagtttttttctaaagtaagatttcagcagtgtatggctggtggtaagccattctgacagtgaaaga

SEQ ID NO: 4037 - DNA, 2300 bp, Homo sapien
agttgctctcataaaaagcaagtatcccatgaaaatcaatgtagcaaacacgattgcaagtatccaatctgatcccaaggtttggtaagtggtgcagtacacaataggcatatctcattaagtaactggctatttaaaaatgaaataaggccaggcatggtggctcacacctgtaatcccagctctttgggagggaggccgggtggatcacttgaggtccagagttggagaccagtctggccaacatggtgaaaacccatctctactaaaaataaaaattagctggccgtgatggtgcacacctgtaatcccagttactcaggaggctaaggcaggagaatcacttgaacccaggaggtggagattgcagtgagctgagattgtgccactgcactccagcctgggtgacagagcaagactccatctcaaataaataaattaatttaattttttaaaaaaattaatgaaataaatttttttttctttcaattcatttgtgtaccttgtttcaagcaacctactaaatcattaagacaaaaatactttctaaactgctttggacctaaaactaacaaaagaaactattagatattccttttggtctagggtcatcatgaaaaaattactgagttactaagggtgcagtgaactgagaaaatttgagaagctgtgttctaagggaacactaatggaaagggaaaggctctggaaattgattttctatcaaaataatgatttggcactctacttgaatcataaaacaaatacaggttcttaggataacaaaatttcttctttaaaaaaacattttcttccacaagtgttatacttttctctctcttgtggatatatgctctctcatctgagacttttgcaaggtagtagcttataattttaaatttttcttttatttttaattaagtttatttttaaaatttactcacttttccagatttctttataatattccctgttgttccagaaaggatttaaaagggctcacaaggatatacacactactacatgatagcatatgttgagagtgagtggaatgagtgaataaaggcaaacaaaggcaaaaactagtgcctgtgtaagagctttgatgactaaattctgagaagatattgtacctgcctccacttgtaattcaaaatcaaaacagcactaaacaattaaaaatgtgtaggaatgagtttttgcttgacaatgttttaatatttaaaaaaaaacataaaattctttacaaaatattgtttgatactttttcattgatagtgctcaaatgtgtttattttgagaattgagttagcactaactgggatataaaatagagtcaagaattcataccacaaagctacaaatagttcataaatgtaactcaaaaccttctagatgtgaacatttatggttagctacacaattcacagtgctcatgatataaatacaaatcaatttctacaaagttcaatttgttttgatacatagaacaaatagcatttctcttaagtacactcataataaggatccagattatgataaacatcatcttcaatcacagtcttattggaaaccataataaacttcagagggatgattcttatataaatcctccatttgggttgacatcacaccaaagcagcatgattcagcaaggccattagcctcagagggaagcatgttcacatgtttttattcttcagttctactatttcatacctaatatgatcagtcattgatgagttttatatcacacttctcatttgattttaattttttaacttctatttgtttttttaatcaatgctccatttttaatcttgattctttttctgcatgtgaaaatacataaaaataatttaaccaaataatatgaacatttaaaatttggctttcagacatttgcaatataaatggaatgaaaaacaaaagttgtgctatgtgtctcaaggaaatgccagctttacttatggctatgagtacttgggctgtacctcaagattggttattacgcctctcacagaccgatgctggctgactctcatggaagcactacacttgaatctaggaggctgtcctgccggtccagctggtacaggaaaaactgagactgtcaaagatctagcaaaagtaagtggtttctgtatccagaataaaaacttttttctttttctgtcacacaaactttgatgttatcttaaatttacaccattcctgctattaagatgttcattgcattaacaagcacattcattaactcacatataattaattcatcaatgatgttttgaatgcctatt

SEQ ID NO: 4038 - DNA, 2300 bp, Homo sapien
tctccatagctggcaggctggaacagctgagtcaatcaaaccacagagacagcagccagccccacctccaggagctccatcccagggagagatcagagttctgtccaaataaccctggggggaggggctgaaacctctgcatggaggccacacccagtgaagacgaatgaattgggggtccctcttaaagaagcagtctggccacaatctggcaaagcagctgtactgtgttgtggggaacccctccttgtcctgaccacctggactctccagagccagcaggctggaacaactgagtcaaccaagagatggaagctgccctgccccctgggaatttggtcccatctcacacagcctccagcctattgccagtggctggctggaattccaagtcagtgggtcttaactcgtgaggtgccttggaagtggggcccagagaacgatgctgtttggctccctggatccagcccttttcctatcagaaattatggatagatctcctgtctttctgagattcctggggccagagtacttaaaactcctaggtctctgtgtgtgcctgagtggctgctctgccaagattccccacagctctgtgtgtgggacccaagcccctggtggcatgggctcacgggggatctcctgatctgtgggttgcaaagatccatggaagaagcagtgagggagtgtgcaaccccacacttggctggggttcccttggctgggggtggaagggggttcctttggctatgtgccactcgcaggtggaccatcacccgactctgcttttcttcattctccatgggtcgagttgtttgcctagtcagtcccagtgagagaaactggatatttcagttgaaggtgctgacttctctcgctgctttcattcctctttgtgagtgccaagggtggccgctgcttctaatcagccatcttggccccttgacagacttttttctttacacttatcattgtttagcattaattttcctgttctgtaaaaaagggatcatatctgttttgttcagaaaaatcaatacataataaccactcaaatatttgctaagtgaactattacatatagctagaaatttcagatagaattgtacaaatgaactgtacattaatgattgctaataaattccagtttagtgacatattttaggtttttcacaatttataaatagttttatggtaatactaaattctgaactatatgaaatgtctttaaatcaggctcaaatctcatgttcagccccatcaccatcaccatagaatttcatgatcctaccaaccatgggtgatctgggttaatccagagtggagaagactctctccagattcagactgcctggctttagccaggttaaactaaatcaacctctacgacttggttgagacaaatacagggtgaatgactattcacttatgtctttccacataaaattaagaattataatttccttttccaaaatacagataaactgtcagctaatgaactgacctaaaataaaaatgaaacatttttatgtaaattaaaatatatacatatattaagcatatatatgtatattaaataacatactaaacatatattaaagtatattataaataaaagcatatatatgttaaataaaaacatattaaaagtatatttgaaataaagtttgactacacaagttttatacatatggtactttaaaaaaatagtaattgtatcatttacatgacaattatcaaaggaaaaaatttacataaactctgaaacttttatgttagtacctaactgcattacaatttttaataatgaaactttaacattatattaaagtaaatttctattcttaaactgctttctaaaaatgttaaccttcatccttccatacctgtctaccccagggatgaaaatacatggtatccagagaaaaatcctgataaattaacaaaaattattcaaaagctttttgtgtttgcctttacttgggcatttggaggagctttaaaccgtgaagatgaacacagagaaaatataccattttgtcccagtcttgaacctgattctcttgcaaaagtaacatacgattttgacaaacttgttcatgaattatttggaaacagttcacaagtaggtaagttctgtgggaaaaatcataactatacttattttaaaatattaatttaaagcaatgcttggcttataatgattaggttcatcttttaaaatgttaagattgaaggaaaaagaaggtttataatatacccaataccctcattatagtgaaagaagctgaagaaaatta

SEQ ID NO: 4039 - DNA, 2300 bp, Homo sapien
catatagatctgattgttcatggtatgtttgagtccacgaagtagaaatgaacaaaaattattgcttagttttcctgatgtcaaatcagttttgttttaaaaatgtcattagtaatttattaggtaaaatgttagctaagctaactctagttaatttacaaagttttggcttcattttgttatgatgagactttataaacctgatctttaaaataaggttcttaaaatttttaaaaatttattttatttattttttgagacagagtttcgctcttcttgcccaggctgagtggcagtggcatgatctcagctcattgcaaccttcacctcccaggttcaagcgattcttctgcttcagcctcccgagtagctgggactacaggtgctcgccaccgtgcccagctaatttttgtatttttttagtagagatggggtttcaccatgttggccaagttggtctcgaactcctgctcaggtgatccaaccgcctcggcttcccaaagtgctgggattataggcgtgagccacggcgcctggccaggtgtttttttttttttttttgaaacgaatcttcttctatttcacaagtggaaatcatccaggaaatgtgcacctcaagggaaatccagtgaaatcttgattctgggtagaacatatgagaaaagaatagtgtagcactcactgcttggctatttgggataggatctgtcttaggtccccataagcgcttttatttctgtgtaatttactgcaaaactctatgaggtaggactaatattatcttatgtcaagggttaagacaattgagacttgggggtttgtcaaaaataaaagattttctgactttggagtgcgatgtgcatttctgttgcacagatctccaccaagggcaaattcgatggcaatgacaatttgatgtcagaacttctcaggaaaggctctgatgaactcattcacactgcatgtgaatgactgagaaaactcgatgtattttcacttttttttttttaagaagtaaacctgggtgttttgtagttctatgagaaaatgaaagctgaagctaggctatagatgaaaagttctattcattattacaatttaataatgcttccaaaatagcaattcacttaaatatacctagttagggtgttaagaaatactttgattaaaaccacactgcaaaatagggaacttcaatggactgctttaaactctcgacctcaaaggaaggaaatcaactaaccgataatgaaaactagcagaaaaaaaaaagcttaggatccgtaacagattcggagtcaacaatgacatgactcagcattttggggttcaattaaaaccaggcttgtaggttgcaggtcaagttgtgtttcggtgtgtaacgcataaaacttcttgttccacgctccgcggtgttggggattttctactgcatctcgacagcatctcgggtaacaaccgagcccctcctcgcagcgtaagtcgtaggagccctcggccattcttccccctccctcccgccgccggtcccagcatcggtccgggttcgcttctacgcaggttcagcggccgcggacacaaaagcgcccctgctcgccttcgatgccgctgcttggtccaggggcttctgtgggattttaacacgctaaggagggcactcatagtgttttaccgagaaacgctttcgagctcggatctttggtgatcacttcaagaatgtattagttttctttgtagcttaaaaaaaaatctcgttcgccaagccacctggcaccccaaacactgctgcgagcgctgggagggaaagggcgggagcgcgcgggctccgtgtgctgcgagggcgcctgggcggctgagataaggcggtggcaaacgtcgcgctccgggccgccccgccagactcggtttcccccgctcaccggcctccccgcccccaggcagggtggggcggggcggacgcgccacggcgcgcgaccaatcgacagcgccggggatgattcaaaaggtcgaggagccaatgggagccccgggcggcctcgccggtggggaggggaggcgaggggaggggagaagcgccgcgaggcggggccggggaggcgcgcgcccggcttgcgggactgcggggcgcgagagcgcggccgggtagcgtcgcgcgcgtggatctgccgccgggttgctgtgcgactattctccgggagccgtccgtgtcaccgccggaacctggcgcaggtgagtgcttccacccccgccctgctcccagctccccgcggcgcgttcttcgaggggccgctgggggagga

SEQ ID NO: 4040 - DNA, 2300 bp, Homo sapien
aaaaaaaaagaggataagtgctgcaaacatacatatagtatgtagaagaagtttcaaataatttttaaattgctattgagatggacataatgcatcatgttaattgtgagctccatttctgtgtgaatagaaaccatatcaaacatcatcagtagaaatgtgtttttatcggacagcttttgaggtacctctaccttatgaataaaggctttctgcagtttgcagcatacagaagtttgttccttatgtaacagtaccaaaagaatccaactggatctcacgccacgtgaaactttacctacacgtctttcctgaaagagatgtttcaatcctgggaaccgagatcctctggagaccagagccaaataactgccacattggaatgcattccgctgggggttcctgtattttatatatgaaagcttcctggccgcatgtgtgttttggttggctttagtggcaggactgaagggttttgctttgcttttgttatgtgaatggggaaaggggctttgccactcatggcctcattaacaacaatggtgccaagatgcggacttttaagtgacttttactttatagattctgaaaacccacaacttgctagttgtgagtgacaagcatctttctgagaactttctgaaaattccccacttccaagtttacacagcctttagtagacttaaaaaagaagagaaaaataccaaacagttcctttgttgagaaagcagcctacatatagatctgattgttcatggtatgtttgagtccacgaagtagaaatgaacaaaaattattgcttagttttcctgatgtcaaatcagttttgttttaaaaatgtcattagtaatttattaggtaaaatgttagctaagctaactctagttaatttacaaagttttggcttcattttgttatgatgagactttataaacctgatctttaaaataaggttcttaaaatttttaaaaatttattttatttattttttgagacagagtttcgctcttcttgcccaggctgagtggcagtggcatgatctcagctcattgcaaccttcacctcccaggttcaagcgattcttctgcttcagcctcccgagtagctgggactacaggtgctcgccaccgtgcccagctaatttttgtatttttttagtagagatggggtttcaccatgttggccaagttggtctcgaactcctgctcaggtgatccaaccgcctcggcttcccaaagtgctgggattataggcgtgagccacggcgcctggccaggtgtttttttttttttttttgaaacgaatcttcttctatttcacaagtggaaatcatccaggaaatgtgcacctcaagggaaatccagtgaaatcttgattctgggtagaacatatgagaaaagaatagtgtagcactcactgcttggctatttgggataggatctgtcttaggtccccataagcgcttttatttctgtgtaatttactgcaaaactctatgaggtaggactaatattatcttatgtcaagggttaagacaattgagacttgggggtttgtcaaaaataaaagattttctgactttggagtgcgatgtgcatttctgttgcacagatctccaccaagggcaaattcgatggcaatgacaatttgatgtcagaacttctcaggaaaggctctgatgaactcattcacactgcatgtgaatgactgagaaaactcgatgtattttcacttttttttttttaagaagtaaacctgggtgttttgtagttctatgagaaaatgaaagctgaagctaggctatagatgaaaagttctattcattattacaatttaataatgcttccaaaatagcaattcacttaaatatacctagttagggtgttaagaaatactttgattaaaaccacactgcaaaatagggaacttcaatggactgctttaaactctcgacctcaaaggaaggaaatcaactaaccgataatgaaaactagcagaaaaaaaaaagcttaggatccgtaacagattcggagtcaacaatgacatgactcagcattttggggttcaattaaaaccaggcttgtaggttgcaggtcaagttgtgtttcggtgtgtaacgcataaaacttcttgttccacgctccgcggtgttggggattttctactgcatctcgacagcatctcgggtaacaaccgagcccctcctcgcagcgtaagtcgtaggagccctcggccattcttccccctccctcccgccgccggtcccagcatcggtccgggttcgcttctacgcaggttca

SEQ ID NO: 4041 - DNA, 2300 bp, Homo sapien
gctggagtagagtggcacgatctcagctcactgcaacctccacctcccgggttccagcaattctcctgccttagccagctgagtagcaggagttacaggcacatgccaccacgcctggctaatttttgtatttttagtagagacagggttttgtcatgttggccaggctggtcttgaactcctgacctcatgtgatctgccccttcggcctcccaaagttgctaggattacaagtgtgagcaccgcacccagctaatacatgtctttcactgggaaaactttgcttgacacgttgatctaccacacaataaatacatgatctaaattgttttccttcatttttctgggagacttagagagatatatttagtgcccaactgtagtcattagatacgtcatcccagagtttcctttggaacagttctgatcttgggccctgtttccttcttgcctttcctatattagatgccccatgttggacttccaggataggtgtcaccctaacccttggagcattatgactttgcaggaggagtagagaggatggcagggttcatatatgccctaaagggttccaaggtccaaaattacaataagtagtggcttgaaggggtaatcaagagagaatagcatcctctgtagttattctccccgtccctaccttattgttatggtaacagggaaggcaggatgtaatctctaagtggattatttgtaagtagaaaaggacctggttctgtaagtaaataagaagatgcttggcaaccctagtttttaaaatatgatttaaggaggactacagaaagaaaactgaaaacaaatttgtacttaaacattgcaaggcttgttattgctgtatatgtatatattttgttgttgttgacttacaaatttgcttaaaaggttagtcagaattctaagacgttcagtttggtttcaccatgacagttatactgtacaaaatgggcacagtcagcctgacaaagtgacctgctgtaccctcagaactcttaacaacccctacagaagggacagactatttctagatgcttcttttaacaattgatgttttctgcttgtgtaactgctcaagctgaaaaagttagcaattaccacccagtgtgcaaaatagcattttattcgttctgaaaacacccctcttaaaccttaactaaaagagcacctactgtttcaggattctgttattaaataaattcttgttcactccctttgtgattttataacatttgaacatttctcttcttgccccccattttgtgggataaaaacaactctacttcaaatcctatggtatttaattatttccgagcgttattttgaggttttactttgtactagtaaattcctttacttcagtgattctcagccttggctatccattgaatttaaatgtgaagtattttttaaaatgctgaagctgggacttactcctccttcatgtttttaatacagccactttgactgtaaacaattaaatgtatgtgttcactgttactgaatttactgtctcaacacttaaggttaatgtggattattttgggtctgatatttcaagtagtactaactgccatcctatatactagtttgttttttcagggacgcttacctctcttccaaattttataagtatttattttgcttatttaccaaatccccatgaaaaaaaaaagtcttaattagatgatctgttgcatagttctattactaaagctctaacctaaagtaagtagttatatatacttggaccttacatttcagtatctttcaaaaactgatctagacttttacaactatgataaattggactcattaagtaaatacatgagtcagtttaatttagcatggcattctgcgtaccttcccacataaaataatatcactcagctctattgttgatggtcttacttaacatttctctctctcaggcattgtcttgggaccacttgcacctccacctcctccaccactcccaccagggcctgcacaggcttcagtagccctccctcctcccccagggccccctccacctcctccactcccatccaccgggcctccaccgccccctcctccccctcctctccctaatcaagtaccccctcctcctccaccacctcctgccccacccctccctgcatctggattctttttggcatccatgtcagaagacaatcgccctttaactggacttgcagctgcaattgccggagcaaaacttaggaaagtgtcacgggtaaatacctttctgaaaaatttttttaatatgtcttattcttcctaaa

SEQ ID NO: 4042 - DNA, 2300 bp, Homo sapien
gctggttgactctgtaacatatccagtgtctccaccgcctacctcagggccagcagctcctccgccgccgcctccactgccttccctcgcatcactctcacactgtggatctcaagcttctcctcctccaagcacccctattgcctcaactccctcatccaagcctagtgttctcccttctccctctgcagctgcccctgcctctgttgagactcctctaaactctgtgctgggagactcttctgcttctgagccaggcttgcaggcagcctctcagccggccgagactccatcccaacagggtaaggctttcattattgctactaacagctaatcacttgaaaatgttatatagcagtgactttaattgcctgaatggatgggtaggatggttttgatccttgaacatttatatgccataatgccatgctttttttttttttaattaaaaaaattaaagtagaaaaatgtttttcctgttggattaattgcatttggaggaatttccttattgaactaggttttgatatcttttatagtatcgcagttaaagatgttttctagtatttaagagcccctcataatacatttctttatttttttcttttttttttttgtttttttgagacagagtcttgctgtgttgcccaggctggagtagagtggcacgatctcagctcactgcaacctccacctcccgggttccagcaattctcctgccttagccagctgagtagcaggagttacaggcacatgccaccacgcctggctaatttttgtatttttagtagagacagggttttgtcatgttggccaggctggtcttgaactcctgacctcatgtgatctgccccttcggcctcccaaagttgctaggattacaagtgtgagcaccgcacccagctaatacatgtctttcactgggaaaactttgcttgacacgttgatctaccacacaataaatacatgatctaaattgttttccttcatttttctgggagacttagagagatatatttagtgcccaactgtagtcattagatacgtcatcccagagtttcctttggaacagttctgatcttgggccctgtttccttcttgcctttcctatattagatgccccatgttggacttccaggataggtgtcaccctaacccttggagcattatgactttgcaggaggagtagagaggatggcagggttcatatatgccctaaagggttccaaggtccaaaattacaataagtagtggcttgaaggggtaatcaagagagaatagcatcctctgtagttattctccccgtccctaccttattgttatggtaacagggaaggcaggatgtaatctctaagtggattatttgtaagtagaaaaggacctggttctgtaagtaaataagaagatgcttggcaaccctagtttttaaaatatgatttaaggaggactacagaaagaaaactgaaaacaaatttgtacttaaacattgcaaggcttgttattgctgtatatgtatatattttgttgttgttgacttacaaatttgcttaaaaggttagtcagaattctaagacgttcagtttggtttcaccatgacagttatactgtacaaaatgggcacagtcagcctgacaaagtgacctgctgtaccctcagaactcttaacaacccctacagaagggacagactatttctagatgcttcttttaacaattgatgttttctgcttgtgtaactgctcaagctgaaaaagttagcaattaccacccagtgtgcaaaatagcattttattcgttctgaaaacacccctcttaaaccttaactaaaagagcacctactgtttcaggattctgttattaaataaattcttgttcactccctttgtgattttataacatttgaacatttctcttcttgccccccattttgtgggataaaaacaactctacttcaaatcctatggtatttaattatttccgagcgttattttgaggttttactttgtactagtaaattcctttacttcagtgattctcagccttggctatccattgaatttaaatgtgaagtattttttaaaatgctgaagctgggacttactcctccttcatgtttttaatacagccactttgactgtaaacaattaaatgtatgtgttcactgttactgaatttactgtctcaacacttaaggttaatgtggattattttgggtctgatatttcaagtagtactaactgccatcctatatactagtttgttttttcagggacgcttacctctcttccaaattttataagt

SEQ ID NO: 4043 - DNA, 2300 bp, Homo sapien
tcagaaatagtttacataggtgaaaagaatcgctttttcatgatgagtagccatagatgcatgtttttacttttttttttttttttccagacaactacaagaacagcaacggcaaaaggagctggagcgggaaaggctggagcgagaaagaatggaaagagaaaggttggagagagagaggttagaaagggaaaggctggagagggagcgactggaacaagaacagctggagagagagagacaagaacgggaacggcaggaacgcctggagcggcaggaacgcctggagcggcaggaacgcctggagcggcaggaacgcctggatcgggagaggcaagaaagacaagaacgagagaggctggagagactggaacgggagaggcaagaaagggagcgacaagagcagttagaaagggaacagctggaatgggagagagagcgcagaatatcaagtgctggtaagaagtttacaaactcttctgtgttcttgtatctgagcttggatgatgtctcttgtgcagtcatgtgttaaaatatttcacatttgagatgtttgggattaagccatacaatttgaaattatgaataaatatgcagcaattactactttaacattttctttttatttctctctgtattgcttttattgcttggagacttaaagaaagctcttggaaatttttattctgccattctaattcttctaacaccctataaaatggctataaagtgtaagtgtgtttttatgggaaattttttatactggatgaacttcaaatatatttccctcatgagatcacttaaattgtctcaaatactatagtactgtagtaccattcagcaagaaatttgcttgattgcattctaaagattttggaggaagaattattttagagaaatattctctaagactagttatttaaatatgctttctagtattatgaaaaattagtgaaaattatggaatctggaatttactgaaagacataagggttaatatatggctgaaagtttgagatattttaacgtttattaaaattaacattcattataggatttaagaatattccttatggcctaattaaaaagtcttaatgtggtttgattaaacagtggttggttggttggtttattaagttaatttatgtatttttagctacctaattattttctggagttatggccaacaaaacaaaacttttccacaagttagcattgaataggagcattgaacccttcatattaaatgttttgccagctttactagttttgctatttgttgtttttaaaaaaacaactaaatttattcttctgtttatggtcctattcatgtgattttaatgtcctttttcttgtagactaaataaaaattaagactaatactagctttttcttgtaaaagaaattagtcaattaaatttattaatccacttattagataaaaggaaacttatttcatccccttctgaatctcaaaatgtatttacaagttaaaatattcttgggtgaaaatagttatttgcgtttgtgcctaattctctgatactaactgtagtctacatttatacattgtgtctgaatgctggttttgtggcttcactagctccctttttctctctccttttttatcctgtcttttgctgctgctttccaccttctgtccagctccatcttcagacagctccctgtataacgctccacttcctgagtattccagttgccagcctccttcagcacctcctccatcatacgctaaagtcatctcagctccagtgtcagatgccactcctgattatgctgtagtgactgctttgccacctacttccacaccccctacaccaccactgcgacactcagcgacacgttttgcaacatctttaggttcagccttccaccctgttcttccccattacgctacagttcctcgtcctctgaacaaaaactctcgaccttcttctcctgtgaacacaccctcttctcagcctccagctacgaagccctgtgcctggtctacttccaatttttcgcccctccctccatctcctccaataatgattagcagccccccaggcaaagctactggtccaaggcctgtcctccctgtttgtgtttcttctcctgtgccccaaatgcctccatcaccgacagcacccaatgggctggttgactctgtaacatatccagtgtctccaccgcctacctcagggccagcagctcctccgccgccgcctccactgccttccctcgcatcactctcacactgtggatctcaagcttctcctcctccaagcacccctatt

SEQ ID NO: 4044 - DNA, 2300 bp, Homo sapien
caaagcaattttgaagaatgaaacaggaagacacactctaatggtcatctagatttcgtataaagctacaacagttaagacattgtagagttggcaaaaaggcatattgatctgtaggtgaaaatagagccttatagacacttgatttatgtgctgcaggcaaacctgcagcacagtgatagtgctggatcatttggacagccatattgaaacaaatagcaaacttgatccctacctcacaccataggcacagatcaattccagttggattggggatagaaatatgaaaggtaaaataataaagcttctacaagataatatgggacaatattttcatgaccttgtgattgagaaacatttgttaaacagggcactaaagcagtaactataaaggaaaagattgctaatttgaacagaatcaaagtgaagaacttacatccatcaagacaccgttaagagtgaaaaggcgattcatagaatggcataagatatatgcatcacagataaccaacaatgatatcatatctagaatatataaagggcttagaaatcaaagaagaaaaaagttgacaactcaggagaaaaatggacaagagacttaattcaagcagatattcacaaaaagagacatctagatacctaataaaaatcagggaaatgcaaactaaaactgcagtgataaagcattcatacccaccagaattgctaaaataaagactgacagtaccagttgtaatgttgcatagtatgtagaagtagcacaagctcttgtatactcttgtggaaatgtaaattactagaaccaatttggaaagctacttggaattttctactagagctgaacatacacatgtcctgtgatatttccactcctgggtatatgcccaacaaaaatgaatgcttgtttgtaccaaaagacatgcagtagaaagttcataacatcgcaatttttaatagcccaaactgcaaataatccaattgttcattaatgggagaatggttaaataaatatgatttatacaaacgactaccatagagcagtgaaaatgaacaaaccacagctgcatgcaacaagtggatggctcttacaattttgaggataagagagcagatacgtttaatacatgttgtataactccatttatataaaatccaaaaacctacaaaactcgattaataataggaaataaatctaatgaaagatacttaagacccctatatagatactcaagaccctcctcagaatgatatgttagtttttggatttcatataaatgtagtaatttatgatgttagaagtgtggctagtaccttttgggaggtgggaggagttaagaagaggggcttctggtgttgctgtttgatttcttaatcagggtactgacttcatgtgaacattcagagagatacactcttaggttgtgtatacttttttgtatttgtaaaacttcagcaaacaagttaaaatatatttaatgaggaaaatttttttttgttttgctgatttactttttttttttttgagacagagtctcgctctatcgcccaggctggagtgcagtggtgtgatcttggctccctgctaactctgcctcctggattcacgccattttcttgcctcagcctcccgagtagctgggactacaggcacccgccactgcgcctggctaattttttgtatttttagtagagatggggtttcaccgtgttagccaggatggtctcaatctcctgacctcatgatctgcctgcctcgagccctcccaaagtgctgggattacaggcgtgagccaccgtgcccggctgatttactgttttatggcagacctttgtaatcagcgaaaagcttaacttctatcagactgatatttgtgtagattttacccagataattgtttaagcaatttttgccaaggtctgttaggaacacatttgaatgaatatatacaatcagcatttgttgacatccttgattttgccaattattggtttgactttataaagaattattattttttaggtcgtgataaactgtgccattcctaaagggttgaagtacaatcaagctacacagaccttccaccagtggcgagatgctagacaggtgtatggtctcaactttggcagcaaagaggatgccaatgtcttcgcaagtgccatgatgcatgccttagaagtgttaaattcacaggaaacaggtaaggtgcccatggtttatttgtattttctttctttttccagagacaaagcaaaactgaagatttacttgtattcttgaactgaagtgccatgtgtatgtt

SEQ ID NO: 4045 - DNA, 2300 bp, Homo sapien
ccatcaactcgtcatttacattaggttatttctcctaacgctgtccctcccccagctccccacaccccaagacattatctcttgaatcttgggaatcttagaaacaatgtagctgcaaaaatattatttgaaaactggaaactactatcctgtattattctagatttgtttattgaattatttacatttagcagtaaatttgttgcttgaattgtaagctgtaagaggcactttgccttggcttgtttcatgtaatctttccatagggttatgtaaatgtcatcacatgcaaaatatttctgttgtgaatgatggagagatttttcaactgctactgacacatgccctttaatctatcttttaaaactaattcaagttttagtcattggcttgttttcattcccagaagtattttaccaaaaatgtcagtgcagcataaaaatgtagacattaccattgggtttgctgcacaaatattgttacaagttagtttttgtaaacatttttctaatggaaaattacaaataattataaccctgttgttctgaagcaattttattactcagtgctgtgacctttttaggccttcagtgatcctctgtcatcaaggacaagaataaaacacatgccatctcctgcaaagttgcatttcattatccctcttggatgggttaagaggtggggcagatgcacgagcaagaggggagagtgtgagggtgactttctgtttgagaatttttaggaaagaaccgacatgatttattgtttaaaatttttgagataaaattgatagaataagcagtgcttttgtgaaggatgtggttgcacgagctacttcagaggatttccattaatgactgttaagtctcaggagtatcagaaggcttgtctattgaggttgagttattttaattgggttaatagcatagagttgatgtgcctattctaatatcctagaatatttgaaagatgaacccattgcttaagatgaaattgagattatctttatattttattttaaatatagagacggggtcttgatatattgcccaggctggtcttgaactcctggcctcaggttattctcccaccttggcttcccaaagtgctggggttacaggcattgagccatcgtgcctggcgtctctattttatttatttgtgtatctcagtctcacttggtaacaaataattgagttagatgaagctaatgtttaaagattctatgacagaattggccttttcccctttaatatttatctttggaggctagaatttaaaatctagtggggtctttagaaattacctcattttacattttcatttttaaatgaagaaatttgaagcacaagatgttatcttgcccaaggcgaatgaggaatttagttacactgccatccattggttgttagcggccactccatgtctcaaggggcagatggttgattatcagacttagttacagactttagggcaagcctgaggataaaagtaattttctcagtaaagaaggtgttatcacagacaggtcatcagtatactaaacatgtatgcaattaagcaaataatgattaatttacacttgtattaggttggtgcaaaagtaattgcagtttttgccattaaaatagcaaaaagtgcaattacttttgaaccaacataatagttgtattcagtttagtgaatgaattagatactcaaatttagaagaaaccatttcttgtgttgcttatctaagtgttcttcgtggatcctgctctccttttggtcttttaattatactttattttttttggtttgtcttcaccattagactgtacacataaagacaggaagcctctgtcttgtccattattgtttccagcacccaataacagcactgatcgttgactgactcctaggtttgtgtggctatgtggaacacttagcatattttaaatattgcaagtttgaatattttattttattttttacagtgaacagagtatctgtcaggcaagagctgctgtgatggtttatgatgatgccaataagaagtgggtgccagctggtggctcaactggattcagcagagttcatatctatcaccatacaggcaacaacacattcagagtggtgggcaggaagattcaggaccatcaggtaaggctttactacaattgttgttaaaaatgatttagtattacaaaaggacttggcatattccgtaaaataaagtagttttaaaactgtaatcaaaatagtctctctctgggaaaaactgaatataaaattgtctctccaccctttctaccttttat

SEQ ID NO: 4046 - DNA, 2300 bp, Homo sapien
actagaacatttgactggcaagtttgttttctctccagtggttggagatccttgaataaaatgccctctgtaatggtaagctgtaattagatatgtgggtggaaattagcgttcttcaagtacaccatgtttaaggcagaggcatcatgctttctactacctgaggccaccttgatcctctgccatagctccgggtcactgcttctatagggctgttggtctaaggctgccggttccaaaaagaaaataactcggtattgagctctgaaaccaggaattttatttatttatttatttatttatttatttatttattttttagatggagtctcgctctgtcacctaggctggagtgcagtggtgtgatctgagctcactacaacctcctcttcccgggttcaagcgattctcttgactcagctgggattacaggcgtgcaccaccacgcccggctgtttttttattttttatttttagtagagacagggtttcgccatgttggccaggctggtctggaactcctgacctcagatgattcgcctgcctcagcctcccgaagtgctgagatgacaggcgtgagccaccgcacccggctgaaaccaggaagctttttttatggttaaaaatgggctacacagttcaattatagacaaatcaggcattgaccacggatcactataacctgtcttttcatttggaagtgtacattatcccaaccttcctaactatcttttgaatggtacctgcatcttaaaacaaaacaccaaaacttttgaatggattcctggagtcatggtaggtcctccattttggatgagatccttcagcaataggatccctgtagcaacaacccttttctatcctcctcaccttttatacagaaagtacatccctgtcttccggactaaaagggggccgtaattcgtacagttaaaaattttattattggatttgtttttagatttaaaaaaaaccgaaaacaaaaccttcaacaacgatcaattctggcttcctggatgccctcctccccgacttgacttgaaatgaaattgcctcgccagtattttatatctactttttaagggaggtgacttcaagaccattgggaatgacgaaaaatttaaaattatcattagttcctctctctccccgccccctgcccgggattccctctttgctaatgacgctggaaagcggctccactggctgcgtttctcttcttccactcttgcggcaacacactgttccgcgcgcgtctcccggcgactgcgtttccccgagagtcggctgcgttcgtttggggatgaagtcatccctatacctagtgtgcacatcaactcgttccatcggcgcagcacgctgggattcctcgggaagaaaaggagcgaagggaacaatgatgaccatattttccatttatatgcccctcctcaactccgcaggaatcgctgggcgcagccgcggcgagggcgggcagttgggctgaccgggatgccccccgattccctcatccccgtcctgagaccgcaacagggcgggctgagcactcgccccgcgcgagggcacccggccgcgagccgacccggagtctcctggcccggccctgtgcccagtcacgcgtccaagctccccacgccggtgcctacgggtctggcgcccaggaggtctcggcgcctcggtctccgcaccgtggccgtgggggaggcctcggagctccccaagcctctggggagcgggaggcgacggggagggggccgacggtcaaggacaaccacgggcgaggaaccccggccgacaactggccggaggtgttgggcgggaggggggggtggtggcccgcccgaatcccagaggggtgcagggggcggggtagggaggcaacaaagagcctctctccgccgccgccgccgtcgcgctcgctctctcccagcctcgctctccgcagtccggcgggggcccggccgccggcgcgggggagtgcgcccggccccccgcctcccctttcctcccctccccccgcaccgccccctcgcccccgggggaaggaggggaggagggcggcgcctgcgtgttcctccgccgcgcgccccgcctcctcccgggttcctcgcggcgatcccgactctcctcccgcggctgcagcagctgccggttgcacacggcctcggcggcggcgcggcgagcgcgggcctgtggagcggcggccgggcgcgcggccccggcgggcacccctcagagggcggccgaggaagctccgggaggaggagcaggaccacgaggaggtgggaggcggcggccgc

SEQ ID NO: 4047 - DNA, 2300 bp, Homo sapien
ttctcatcagaatagaattctatacctggggccctttgaatactgttttgaatgttgaacttcatttgaggtgaaataatgatgctaactcacatttattaagcatttacaatatgtcttgcacccctgcaggcactttatatctatttaatttaatcatataatgcttatctctaataccaaggttacatactagtgagtgccaaaggtggaatccaactcacctttttcttttcttttctcttttttttcctttttttttttttttttcgatggtgtctcactctgccacccaggctggagtgcagtggcatgagtttggttcactgcaatgtttgcctcttgggttcaagcgactctcttgcctcagcctcccaagtagctgggattataggtgtgtgccaccaggcccagctaatttttgtatttttagtagagacgaggtatcaccatgttggccaggctggtcttgaactactgacctcaagggatccgcctgcctcagcctctcaaaattctgggattacaggtgtgagccactgtgtctggcctaacacctttttctttatagaaagctgcctggtttttgaaggaagtcttgaaacaatttttttcttcttaaaagtactttataaagtcttttgattataaaaataatgtatgcttataatagaaattttggaaaatgcaaaatgtgtaaagaagtagtaattctactactccacatgtaactgctgttaatattttaaattctcctaaggtatttttctgcacatttattgataatatttcttttttctccaaattgtgatcttaaaacttttagactttccaaagattttgtaaacttctttgaaataccaggaagcccatctaacccagtgcagcaagtatggacttttgaagttcaaacatagtttggaaaattgaccacacggtttccaagaggaaactaaaattggcaaaatgcccttttccaccctgataggggctttaaatgcctaaccatttgttttgctggcagcaggaccattttttagtggcaaccaatgactattagtgccaataaaagttcttaaacccctcacagcattaatcatgctccagatgttacaaaagttgagtgaccgaaaatgtacatacattgaagtcttcagctgctgcctcaaggtcatggggatttcagcttcattctcttaattcagagttaagccagaccccatcagtgagatttcagcctcattataaaccacagaggcttcattttgcatatatttcagcattttatattttcctttggccactctcatagtgtatgtgttcctttaaaacatctcctctttgatgaatagtccttcctggggcccttttgtaggcatgagagattatactctgttttgattctatctttgcccctgagataccaaccagtagcattcttcccactttgtctgatcaaatggaattatttttagaagaagctgctgtgtttgaaagacagcttataatcttaaaaaagccctttacattgcagacatatgggcttcttgacagtgtgtgtctagaattgcaatgttttctctgcccagaggactacctttgaattcaccctttctgcttgtgtgtgtctgtaaagataaatgaattgctttggcactgaatatagtaactgtagcgtgcatcatttctgacaactacttcctgaacttcttccctgagttttgtaccaactgttctcattggttctccgcagagctcgtggcacagaggaaaatggacataaggtagcggtaacaggctggcgactgtggcttttacacattgcttcacacaaccctgtccaggagttttacacactcactaaacaaacagaagacaccatccaattcactggagccccgttggataaatacggaaagaatgtgggagctatgtcatgaaccacaatggttttgtgttctgtgtaatttgaagacgagattcctttgctgtgtgtcacctcccatattaccactgtcgcccaacatttcataaccatcaactctttgccagtgcccacatgcaaagatgggtttgtattaaaaaataaatgagaacagcacattctgatgtggtgtagtatatcagcattttccatgaaacctcgtctccggccttccccttttaggaaacaaaggacccgtgacagagcctacttatcccgttacagctcctggtgagaagggcgaagccatgtcagaaataatagaaaaggctttttcctttgaaatatctaaacgttcaaagatgggaacagccgc

SEQ ID NO: 4048 - DNA, 2300 bp, Homo sapien
gagagtgaataactgataagagtggagtttctgaaaaggcaagataccatggaaggcattggccttggacagaaatgataagaatagtaacagcaatattaataattaaagaaagtttcttgtgccaggcaccatgtaccttttccattatctctgtttgtttgtttgtttgtttgtttgagacaaggtcttgctcagttgcccaggctggagtgcagtggtgcaatcatggctcactgcagcctcgatctcgactccgcctcaaaaaaaaaaaaaaagtgggggacaatctttaactgaggccctcacaattgctccatgtcacagagctaataaatgatgcagctggggctcgttccatccttaacagaggaataaaggggaagatggactcaggtgcagtaatgttgcaggtttggtgactgtgggcattgtcctctgattacctctatctcctgtgaagtaggaggtaggggggtggtggcggaggggtcaatgggagggagaggttacccaatcacctgtagtgaatgctgtgacagatgagcagctgttgagggccacatctccagtagctccggcagccagcgggcagaagaaggaggagtcggtgacacaggactgggactggttctcacttgtctctccctgtttttaaccttccaaaactgagggaggacctgccttagaggtgtactagctggagtgccaatttagttccagaaaggaagtggaatctctggttacctgccaatgttaatacatgtcagaacaatagtcctgcttgggtcctagaaaattgtggtgcaacacccatgtcattatcgtccttataatttttcataggctttgtagcaactttgtaatttgtgctgaatttcattgacataccaaatctcaacagcacaatactttttagttctgaaatgtttcattcattccatctttcatttattcattccacaaatatttattgagagtcaggcagtggtggccaatacatccaatgttcctgtcctcacaaaccaggaaaacacacctattttaactagactagatgtgcgccccatgaggtcatgggctttgattattttattcaccacttcattctgagtgcctgaaacagtgcctggcatgtaagggatgctcaataaatgtttgtttgcagaggtgcatttatcatgaaactaaacagagtttaagcttcatagcccctcaattgcactgtcctctttcatggctctgggaggggactactgtgtgctctcatggtaatctgtttttataaaaatttcaaaggtaagatactttaactagttctctgtctctaccctaacttcccctctaccactttccgctgatgtcagtgacattggagaggccatgggcattctggatatccagctaagaggaagttgcattgggactacatttagtatgggatgttggggacatatttatgggatgtgggagacgtatgtggtatgctgtcacttaggtagatatgaagttattgctagctagcaatatatagcaatatagctatatcagtacataggtgacgtccaggaatactcctttactcactgtaaagacccacctggcatgtcataaaggtacagggtcagatgtgatgtcacaaaatgagcctgtcctgggctcctggcactagaagtttgggggtggtagagaaacaagggcttttttaaaagaaggcctccaaaattgtccaagcttcaggcccctcaaaatgtgaatctgcccttaactggatatggataaatctaaatcagctcatactttattttctctcacatttacagactacagagcctaagtcaaagcttgttcttggacccaggaaatatgtcaaatccttccagtgaatggtatgtcttcctaaatgacgcacttgtgagaacagctggacctaactgtctaaaggacagctagcttccagcccgattttcagagctgatatatcaaaatctaattccttttacagaatagccaaataaatattttcactgtcaaattcttcacaccaaatgctgtacaagcaaaatcattataccttagataatgactgtattatattcgtagatttctagtggtgttcatttattcactcactcacttgataaatacacgaagtccttactacaagtcaggtattgggggtaatacattaactaagacacagtccccttcttcaaagagtctagtgggggagtgagacatttaaacaggcgatgacaatacatgattcacactaagattggggttgatgatgagcacag

SEQ ID NO: 4049 - DNA, 2300 bp, Homo sapien
cagaaggcaaagttggcattgtcttaacttccattgttttcatcttcagggaaaaacccctacacctgggggtcattctgcccaactctgccctctctgcctctgctcattgctctttatagcttccctcaacacacacacacacacacacacacacacacacgtgtctcattaaatgaggatttgggtccctggctcatagccttctccttcatcttattccttttcttactcatagaagactttgactttgtgtggacaacccaactataaatccagcctcaccagggactattgctactctaaaatgttaaaccccaatatccaatctgactaaaacttatttcctgctatattgaattcagatttcctttaatcctggttccttaacttctctcttttgactcaattaattaccagctatctagcatggatcccataatttatcatttcaatcattctcttgccagtaccacctacaacattcttgaccctttgttcttcttcctcatgtaccctataaatccctaatatctgtcttttccagtccaaaatccaagcttctgggtgttgctggagacagaccctaattggggctattcccagatatgatctccagtttcagctttttactctacttgacatattgcttttgagtttctttttttgttgttgttgttgttgttgttttagagacagagtcttgctctgttgcccaggctggagtgcagtgatatgcgatcttggctcactacatcctccatctcctgggttcaagagattctcctacctcagcctcccgagtagagtagctgggattacaggcacccacgaccaagcccaactaatttttttatttttagtagagatggggtttcacgatgttgaccagggtggtcttgaactcctgacttcaagtgatctgcccacctcagcctcccagagtgctgggattgcaggtgtgcaccaccgcttcccacctgtttttttctaataggcttccttattcatttctcacaatggcttttccaaaccttctcctcaaggatccaaacccatccttgcttcctcaaagatccaaaaccacccttcctatttacgaaggtggtctcctgtcttaggtgacaagaaaatgtaccttcttgccctcgtatctacatgctcacctataccctcacccgacttttccctcctcctcaccccatcaaaggcaataatgcacctgtttttattcatctgggcctttggtcttccccttcatatttcccgagacctcgctttcttctttctcttgtattttttatttttctatctcttatgtgtccttctctaaaagttataaacatgcacaaaatctttccatctcaaaatataataccctttacctggtgtcccctgcaggccatcttctttatttatttacttttgcgccagcgtcttcctctgaagcccaggctgggtgcgtagcgcgatcatggctcactgcagcctcggactcccgggctcaagcgatcctcctgcttggaggatcagattttttatccttgcagaagtgataatatggcttcttcctcatctcctaaacaccagtcatctgacatacactgcagatctaaaatgggcctacgtgttctgcccttccttgcctacctgttgagcttgcaccgcttctgtgagtctccccccacccacaagagatccttcttccttcgcgctccactaacccgacataaatgtttatcatataaagttttccgttgcactcttgtgtttatgtctcctggcttcttcaccaagctgtgtgacagctgggccctgtcgcctccttcctcgtatatgcagcgactatcgcagagccgcttaatctttgttgaaggcagctgcggttcagccctgagggccacgggacggacgccactcattcagccctaccgggggcgctgtggcagccggcattggttgccgtgccctccgcttgtctcgctcagctctcgagccacacgccctgggctccgcccactccctgacaacatccctcctgcccattgggcgagcatggacggggctgtccaatggagcgaggcgttggtgcgaggaggcgccgccatcttggggctgctgggactcgcgtcggttggcgactcccggacgtaggtagtttgttgggccgggttctgaggccttgcttctctttacttttccactctaggccacgatgccgcagtaccagacctgggaggagttcagccgcgctgccgagaagctttacctcgctgaccctatgaaggtaaatcgctggc

SEQ ID NO: 4050 - DNA, 2300 bp, Homo sapien
cattctgtccttgtgttttggttatttttggtaaagaaccttgatttttctttctttatggcatctgacatggtgacttggcaccctctaaattaccaaatggacccttttataaacacgattggccttttttcttttctttttctttttttttttttttttttttgagacagagttttgcttttgttgtccaggctggagtgcagtggtgcaatctcagctcactgcaacctccgcctcccgagttcaagcgattctcctgcctcagcctcccgagtagctgggattacagacacccaccaccatgcccagctaatttttgtatttttagtagagacggggtttcaccatgttggccagactggtctcgaactcctgacctcgtgagtgaactcctgccctcccaaagtgctgggattataggcatgagccactgcacccagccatgattggccttttaactctcatttctcctaaatgaaaccagtgagtgttcctttaactgagagttaaaacttcacatagttgtcatgcttagtatatttttaagtgtttcgtttctagagaactgaatttttaaaatgtgtaaaactgaatttactagataaataaatagaatcaggtattctaaagataattaacctagttactactatttatacctgcttaaatgcttgatgagttccctttcctccttcactcagacaaatcgcatatagtgatgtaacttttttttttcagtctcaggaatgcaaagaccgtaatggggaaagctgtaggttgcagttccattagccctttttatttagtttccagaattgtcttgaggcctctggtgctagattgtaaccattttaaaattatgtttctgttctggcttgtagataagtagcagtttttattttattttattttatttatttattttttttgaaatggagtctcgctctgtccccaggctggagtgcaatggtgcgatctcggctcactgcaagctccacctccctggttcacaccattctcttgcctcagcctcccgattagctgggactgcaggcactcatcaccacgcccggctaattttttgtattttttagtagagacggggtttcaccgtgttagccaggatggtctcaatctcctgactttatgatccacccgccttggcctcccaaagtgctgagattacaggcgtgagccaccgcgcctggccgatacttagcagtttttaaaacagctagctaaacaagagttactgatactggttagggaaaaactgcgatacactgtgcttgaatccatcactgaaaaaaaataatgttcgtggaagtgttcttgggagatgtcttataggaatatgctaatatctaaatgccttggcaatctgtagaatattgaacataaagtattgtgtaacatggaacttcagtataggagttattctggtttttggaaaagttgttggtggagacttcaaggcagaattctgcttttatgtaataatgcgttatgttctaccttcgtgataaagacctgattttgctgaatattttagtctgaatctgcttgctaagatttgtggaaaaatggaaagtgtgagttgcactgacctgcagcactgtttgctaatgaatggatttggactttttaactagccatttctgctaaatgttttcctccctttcctgtcattcctctgtggctaggtgtgttggtgtatattcttattggcaagaaatgccaccttataagtctcacagacattccctgaatgtggatgtgttttgagaatgttcagtacatctcttcaaactggctgcaaataaaatatccaactttttaagtcttaaataaatggtagcaaaggaatgaactaaaatagctgattttttttttaacttcatttcggtttagtttatagtaaaaatgcctttagatgtttgggggtatttattctaaaaggatccttttcagcctacctgaagactaaattatttataagaaatgtcatttgtcttcactgtttctaaatatgtatttttgtttcaggcacgtgtggttctcaaatataggcattctgatgggaacttgtgtgttaaagtaacagatgatttagttgtaagtatacatttttatttgttacatactttcagatttgtttgagttaattatttgtttgaaattatttacttagagtttatggagattacccattaggatgcttattttgcatttcatttaaagatgaagaacctcattctagcagctacttttatagaccctcaggaaattatttaacc

SEQ ID NO: 4051 - DNA, 2300 bp, Homo sapien
gcaacagagtgagactgtatctcaaaaacaaacaaataaataaataaaataacaactgtattgagacataattcacatacccataaaactcaccctttaagagtgtaaaatttcacgggttttggtatatttacagacttgtagtgatgtaaccatcaccaatatctaattttagaagagttttgatgcagggcagctgagaccccagattgggtctcagcccagcagggtttttagctttgtccaggaaagaattcaagagagagcccgtggtgtgagacagcaacttttatggaggtggcggtgtccagcagcagcagagggggcctgctcctgcagtgcagggctgccccacaggcagtgtgctgagagcagcagctctgggcgattctgcagtcatgttgatacccacttttagttacatgcagattaaggggcagtttatgcagacatttctaggaaaagggtagtaacttttgggtcctcgggtcattgccatggaaggggggtgataactccaggggcgtgccctggtaaactgacatggcacactgatatgatgggcatatcttatgctcatcttccacccagtccctgttttagctagtcctcaatttggtcctcaatctggtgtccaagccccacctctggcgttaagtcctgactcctacctgtttcaccatcactgcagttttaagagtaacgaatttgggtcccctggtgaagtggccagaggcagagcttctgtgtgaactatttggaggggaggggaaagaactctcccagactgcaggttctgaaaggaatacagagatgtcagagactgcagttgcaagagaaagcttttataggagggtgtagaattaaaggacaagaggactctacatgtggatggaggagggcaccctgtccggcagtactgcaagagcaaaagtttggaggtgggagtgaggtgagtgcgtctgccggccagaattcttgggccagggtgagcagaaaggttggaggccaagggaaggtgggtggtggtgaaccttatcctgaagtgtgcaaggtgacagtcagaagcttagaactccagccacgggccctgcatgtggcctcctagctgtagtctgtccaccgagatcgtgaggatgctggtggttgaaagaactgcacctctgagcaggtgaagagagaagctaaggaggggtgatggcagaggcgatgggacaggctttctaacgatgaggggctggggatcaacgctctcacggaagctaaaagagccccagcaaccacccgcctgggccctgagctctctccaaagcgggaggggattcactaagaggttgctcccctggcattgaactcagcatcctatactggtcctcaccatgaagacccccaagagtgcttcagaccattgcttctcacattctctgtataaagacactaatttgtttttagatttccaagcatgtcacggaccaatatgtttgttaaatatactaagaatgaattgctagaaagatgaaattaaaaagacatacaccgccaggtgcagtggctcacgcccataatctcaccactttgggaggcggaggtaggtgcatcgcttgagcccaggagttcaagatcagcctaggcaacaaagtgagacccccgtatctacaaaacttaaaaaattagccaggtgtggtggcgcagtctgtagtcccagctattctggaggccgaagtgggaggatcgcttgaggctgcagtgagccgagatcgcaccactgcactccagcctgggtgatagagtgagactctgtctccaaaaaaaaaaaggacatacatcatgcaagtttggatttttgtttttagattcaactgacgaagttacgggatcaaactgctgtaggagctgccaaacgcttctctccatttctggccgcggggccgcggaccgccctttaagtagcccgttttatccctggcagaggtggagccttaggcaggcctagagactttcccgggtcctccaggccggggaacgccccgctcggaggccgggcttgggcggagactgcgccggggctgctgaaaactagccgaggagagccagggagccggagagatcgcgcgcctgccgccgccggagcctgcgagccgagaccgtaagcgcccggggccggccgggcccgcactccccggacgcagacgcggttcgggctccgcgcgggctcggccgccggggtgggcggcgggccggggcgccgaggggtcggggctgcggtcggcccgcaggggtgcagagggacttgtagttgg

SEQ ID NO: 4052 - DNA, 2300 bp, Homo sapien
aagcaaacaagcagcccctttattacttttttttttttttaagatgagggtcttgctatgttgcccaggctgatattgaattcctggccacaagtgattcaccaccttggccccacgaagtactgggattacagtcatgagctaccacactgggccaaagccctcgtattgtaacctccaagatgttttcatttctaaagtcaaaggttgtcagagttgctgttttgcagggagccatgggatggggagtctccgggaaacccaggctggctccttaaatggcatcacccaagttggccatcaagcttccccagactcagtcactcggccccctctttccctggctgtagagcaggggtttggactcgaggctgctgagttcctctccagcttccatgcccagtggcagtgacttatcaactggcccacccggtggatgtaggggtgatgcagccctgctctgtcctcttgagtgctgggtggccatgagagagggaggccatgagagggaggggagggttctcatctgcttagtgccaccccctccccagcccaccccaggtcctctgccgccttgggttcctgcgtgagcagtccttctcactctgggcgatgttcgctttcaccagcccaaccccaagaagtccaccctggggaggacagagggagtctccacggctccacacccccatgctttgtcggagatctggccaggcagagtggtgccctcttgactgagcctcgagcctttgctttccccttactccacataaagccgcagccctggcgagggagcccagaggcctgaggacagcctgctgggtgcctggcactctctagatcctccctgcctgggcggtgggcatctgcaattctccctgtctcgaactgcagcagaatgtgtgggcagggttaggcagatagagagtgggtgcctggactcattggtcagactctaagaccgcccacccccgccgcccccgcagtccttcccaggactggctgacccaccagataggggagggtgttgtttcttattattacattttttgagaaaagctatgcaggcctgggagacgtctgtgccctaggagtcccttctggcctgaagactcaaggctgcaaacaggtgctgagagggaacaagaaggggagttggggtgcaacacacccagtgacagaccaggagtgagtgctgtggccacagattctaatcctcacaactgcagtgtgatttaggctaagccccttgcctactccgattcttgccttaaataagtgaaaaggaaagtcaagtttgatgagttgtggctctttagtgggtggatttgcatgtaccatggattacatttaccagggtctaggaattgtcaagcgcccagcaggctgccatcaggcctccgagctccttcgccaggcggctttatttggagtaagaggaaagcaaaggtttgaggctcagtcaagagggcgccactctgcctggccagctctccgacaaagcagacgggggggtgtggagccgtggtgaccccctccgtcctccccagggtgggctccttgggcttgggctggtggaagtgaatattgcctgcagcaagaagaaggactgttcatgtgggagcgcaaggcggcagcggggttggaaacccacccccacacagtcaacacctgctgtcacaccaggctaatcaagaacacttttctttggtgcattaaccacctgctattaaataaagggctgttactaggtggcaaagtaacacactgcagtagagcctatttgtaatctgagatcagtggctgtaaggcaccatccttgagccaagcaagtactaatattcttgttatcttaattagaatgcaagagatcgtgtttttaaaattctctttgaatctgtcactttgccctcctcttcctgggtgatacacctggtagtgctggtgggggccatcataatgccccttgtcccagattcccttcttttagatgggactcgagcactgatcatttcagccctgtatctctcaggtcagcgtggttcagtttgctgtgcagagtccaggggagataaccacgctgtgcacacatgagattggctgacttggcaggactgtgcaattgtcagaaggccgtggggagtgggggccagtgcctgcagcctgccctgcctctctcacaggcccttagagcatcgccaggtgcagagctccacagctctctttcccaaggagtaatcagagggtgagaacgtggagcctggtggacaggtgaaagcactgggatctttctgcccaga

SEQ ID NO: 4053 - DNA, 2300 bp, Homo sapien
cgcttgaagccaggaggtggaggttgcagtgagctgagatcacaccactgtactacagcctgggcgacagagtgagactgtgtctcaataagtaaataattaattaaaaattaaaaaataaaatagtgattttacaagcacttcacacaactgacataacaaaggctgtggctatctcaactcacatatcgatccatcaaggccttctcttgattttgaaataaccttaacctactcaagaacaaatttagaaatcctttctctctctgaaatctttgtcagtggctccagcattctaattaccaagaccggaaccttgcacttgcctggacccatggcacagaccagacaggtgggggcaccattcattgaggaaggaaggaggacaggcaggtgcgggagtggggagtggaagaaagattggacagggacagtctaaggagccaacggggagtccaggggccacacccaggactctgcagaccgtcagatgtggaggtaagagagcagggaggggggatggccaggcgcagctatggagggacaagggcagagatgatactggcggggggcatagaggaaaaaccctggaaaataactagtggctagagctttggggagagaaggggaaagacagatgggacagaaaagaactgagagaggcaggaagagaccctccccaccccactcctggacagccacagactggcgctagaatcagggacagggaggtaaggaggaatttttttttttttttttttttttttgagacagagtttcgctcttgttgcccaggctggagttcaatggtgaaatctcagctcaccgcaacctccgcctcccaggttcaagcgattctcctgcctcagactccctagtagctgggattacaggcatgtgccaccacacccggctaattttgtatttttagtagagacggggtttctccatgcgggtcaggctggtctcgaactccagacctaaggtgatccgcccacctcggcctcccaaagtgctggtattacaggcatgagccaccgcgcccggccataaggaggatatttttatgccgttacagaaaaagatgaaagctcagaaatggaagggaggtcggagaacctgcaaaggcatgcatgtggggtgaggactgctcagagctcagagaggggtgctggaagggacctgagaggaagctttggtccaaccactcatttcacagatagggaaacaggggcctgcggacgggttggtttgctccttgattcccagggcgcgcggtcctccccgaacccagcctcgcttcccgcgcagcgcccagcagtccctggcgcggcgggccggccctgccctcgcgagcttgcggtccggttgtggaggccaccggctccctggaaacatttggctcccggccgggaggcatgccgcgctctcggacctgggctggagtaggtgcccttggcggccctggctcgagcagtaatggactagccccagggggcgttggaaatgctgcgacccgcccccacatttttgcccgaacggagaccctccgggctttcacggtccggccttctacagcggcgggggagccgtggcctcttgcagggcgctccgcgcggttcccgactacccggagccgaggtgcgggctgaatcctgctgagctccccatgctaccacccccgcaaccccactctcccggggcgggtctaagagctcttcggggaaattcaaagcactacagggaccaacgtttgcagatgctctccctgcgccgcgaccaccctgtgcttggcccagttctcccggaggcgtccagagactgggctcgtgccgggggacggaagagggtgcgccccggcggatcccttcttggagcctggacgtgagctggccggtccggggcttgcagacctccgggaggagctgcggggctgagcggcgaccaggaggccaggccggggcagaggaccgccgagggccaccgcgggaggcgcagtcagctgcgtacaggcttgcgccgccgcgggccaagactccaaattgggaaaggggtggccgcagctctgcgcatgtgcaggaggcgccggagtttcactttgtaacttttaagtggtcggaacacgccccgcgctgctgggtcccgccagacacgccgccgccgcaggtacaggggacagggggcgtgaggaggggcaatgcaccctccgcctttcccgggacgtgcgcgccaggtgtccggttccggaacggctcccagcctacgcagaccccagagcccccgaccccaagcagggggtg

SEQ ID NO: 4054 - DNA, 2300 bp, Homo sapien
tgtctggcaagatgtgcccaccacacaaaggtgctggatgaactgaaacgggtccctattcctggtttgtttcccaccctcctcagcccagacagagccccagggaaggacccctgatgatgccagagtctgagctactttgggagaacaggaagtgcccacacagggggtgcctggaaccaccaaggagccacatgggcccccaggcctggggtcagggaggttgatggtgtgggttggggcagcccaggacacctggactggccttggggcatttcctgagcactctcagaagtatctgcccctgcccaggaagggggcaaaagccaccctggagaccctagatgctgggctctgacttagaagccactccactcctggactcttagctttgctgacgtcagagcccaggcctgagtccagctcatccccatccatggaggccccaggatgacctctgacccccatgttttcccatggctctcacttggcaacctggcctctggttggggtcacatcctggcccaccaggggcaggagggtgttcgagggcaaagggccccactcctcatccaccctcctacctgggccccctccccctctccccagtatggccagaccactgccctccagtgcccttagctctgggccgagggccaggtccaaatgtgctctgagtcagggtagggatcactcattcccttgccccgctctcctcccttagatagaagatctggttctggggccactttaccatctcaagcccaatctgggcagacccaggtggggatggttggggaagccaggctccgtcttctgcatgacaaagggtggggctgccctccctcctggcaacacttcagaccattgtaaacagtctcccaatccacatttgttttatttttcgttgtcagatctagcaaataaaaatataggactctggtgaaatttgaatgtcaggtagacaatgaataatttttttggtataattatgtcccaaatagtgccttgtattttatctggtagccctacccctggctgatcacccaaatgttttatttccccagcaaaactcttcaaccagcttacaaatccacattcaggataggggtcctctgtcttgggggattgtccccctgccccagcctagacctgatcacctggattgagaccacctggctccctttagggcatagatcaaaactaggctgtaaataatttgagtgtgccaagaactttgtgaattgcaagacctgactttatatggacattgatcattaactttgtgagcttcgggaagttgacacctctgagcctcggttttttttcagctcaaaaattgggagaggttgccgtgagccgagactgcgccattgtactccagcctgggcaacaagaatgaaactctgtctcaaaagaaaaaaaaattgggggagaaggtagcctggatattcctttcaactctaaactctaattctgtgaacagcagggatgagggagaggatgaggctccttccttattggacaaaaccccgttggaactaaatgctcctaggctcccttgcctaggaaggtccccccagaacagtgggaaatctggtttcacaactggggaccaccagctcaggatctcatgaggccccgggaccctctgagcacgggcccggatgctcatccctgcagactggattggcccttagagccctggcgttgcctgagccattctggttcctgtcagttgtttggttgcagcaaggaacaagactctaggtccacttaccagcagctgggggaactgagcctcttgcagagaacgagagccccacctctactctaggaaatgagctttttaatttaactggtcaggcctcaacccacattaggggttcatgaccattgtatagacagctgtagccagctgttcacagcccagacagacttgccctatctagacagccccctcctcccagctcagggactcgtctggctgtgagcttccaggaggtctcaggggtgtgacctccctccctccttccctccccactccctacctcctccctccaccccaggctataaagctgcccaggcttggctctcagcacatccagctgcctgagaccctcctgcagccttctcaagggacagccccactctgcctcttgctcctccagggcagcaccatgcagcccctgtggctctgctgggcactctgggtgttgcccctggccagccccggggccgccctgaccggggagcagctcctgggcagcctgctgcggcagctgcagctcaaagaggtg

SEQ ID NO: 4055 - DNA, 2300 bp, Homo sapien
gacacatgcctgtaatcccaggtactcggaaggctgagacaggagaatcgcttgaacccgggagatggaggttgcagtgagccgagatcatgccacttcactccagcctgggtaacaaagactccgtctcaaaaataaataaataaataaaaataagaaataataataaattgatgttttatgaggacaggaacttgtctgttttgttcatagctatactcccagaacctggctcagtaagttatctattatataaatcaataaacctaacattgacctttgaatggttaaatcagtaaggtacatacatataataagtagtcattaaaactgtcttaaataacttttcagtgacattggaaaatgctcatgtctactagagaaatttcaaaactacatgtacatcatttatttccaatgatggagaaagtagatatgcataggacatgatagtgtaaggaaatacaccaaaaatgtttgtaagaaactatctttgggaagtatgatgtggatgattttatttttacttttatctccaaactttcttcaatatgtctgtattacttttcgaatttaaaaaatacagaggccaggtgctgtggctcacgcctgtaatcccagcactttgggaggctgagacaggcagatcacctcaggtcgggagttcaagatcagcctgaccaacatggagaaaccctgtctctactaaaaatacaaaaaattagccgggcgtggtggcgcatgcctgtaatcccagctactcaggaggctgaagcaggagaatcgcttgaacccgggaggtggaggttgcagtgagccgagatcgtgccattgcactccagcctgggcaacaagagcgaaactctgtctcaataaataaataaataaataaataaataaaacatagcattattttgcttaatagtaaatattatatttggtcctcactttaaagggtgcacaaactgagggcctggggacttgctcagggaagttcacagaaagcagccccttgcctgggagtgggggtgtgcattacacggaaaggactagaaaagctagcagagagaccatgggaactaagggtcctcagctcttctgagtcctctaggaacgccaccttcttcctctctacttctgtcatttgttccctgcggccccttatatttactactgatagaaaaggaaacatcacattggtggagcttttaaaagcaagagacaggtcgggcgcggtggctcacgcttataatcccagcactttgggaggccgaggcgggcggataacctgatgtcaggagttgaagaccagcctgaacaacatggtgaaaccccgtctctactaaaaatacaaaaattatccggtcgtggtagcgggcgcctgtaatcccagctactggggaggctgaggcaggagaatcgcttgaacccgggaggcggagattgcagtgagccgagatcgtgccactgcactccatcctgggcaacaagagtgaaactccgtctcaaaaaaaaaaaggcaagtgacagcaaggggctggggggtgcgggatcgcggaagagtcggagactcgaacttgtccttcttgtatctagtttggacaaattcgcgagaaacactcaagttcaagtgaataagccgcggctgaccaccctggtgccgcctcgccgccacctggtctgaacctcgccgccacctggtctgaacctacgccaggagggcctcgttcatccccgcaaatcggcaacctggagaattcctgtgggccttgaggggcatctgatggccagcgccagaaataatattagccaggcctgggccaggcctcagccctgagcccgaggtggcttagggacggcgacctcagccttggggtggggggggggggtgggggcggccgggcgtcctgggccggcgggcgcctggagctcacgccaagctgccacaggggcttccgggactccagcccggagttccgccctccagtcgcgagcggaggaggcgggcacgcggcctggctcgggccgcggattggcctgccccgagatcctggccactgattggtcgcccggacggggcggggccacgtggcctaaggcgccatcagccgcccgggagatatccgccgggggagaatagggttgcaccatcccagaagctgctgttagctcgccggtcctcggcacgccgcccgttcgcccctgcgctgtccgcccttcccctagcgttacttccggtccctcgctgagggggttcgtgcggctcccaggaggcgtgaaccgcggaccatgagcgtggg

SEQ ID NO: 4056 - DNA, 2300 bp, Homo sapien
tgctctccccagtgagctagtggactggctcatgccaccagcactcagctggagcccaggtcatttccagacacagaacaagggacagaaacctagaaaacagaggccaaaactgcccagaggcatggcctgtacaaagccacaggtactgggggcagattgaggtgggagccccccatgcctcctcaaacacacactgtagactggctgggttcaaatatgagacttccatatacatatacatatgcatttgcatatatatgtggtggcatgaagtccctgggctttcatccaaaagaaattccaccttcgagcaccagaagattccctcttcctctgcctgaaatgtttgaggacagaagcagggggatgacatggagagacctgtcagtgacacagcattcccacaaaggggccagagtgcccccatttagaaggtgaagggggatgacatggagagacctgtcagtgacacagcattcccacaaaggggccagagtgcccccatttagaaggtgaagggggatgccccttgcccggcagcccccttggcccagggtccttgtcctcctccaccatccttactcatgcgacagaacatgggcaagtgaggctgtggagttttgggaagagcttccccctgcacatcctcaaatcccctatgccagtgccagaaggagatgcctacagagacagaggctccatttagctcccaagcccttcattgaggttggcgagcaggtcacttccccaggcagtggtctgaccttgcatctgcaagatgcacctgaaactgacacctgcctcctaagggctgtgtgaatacacattcagagcttagaacaatgactggcacatgcactcaggaaatgtgtgctattattgttgttgagagttttataaaaagccacgacctggcccggcacggtggctcatgcctgtaatcccagcactctgggaggccaaggcaggcggatcaccaggtcaggggatcgagaccattctggctgacacggtgaaaccccatctctactaaaaatacaaaaaattagccgggcgtggcatgcgcctgtagtcccagctactcgggaggccgaggcaggagaattgcttgaacccaggaggcagaggttgcagtgagcctagatcgcgccactgcactctagcctgggtgacagagtgaggctacgtcaaaaaaaaaaaaaaaatgcaaaaagccacgaccctgtgaatgcagatttcaggcagataataatgatagcaaacccttacagagtgtttacctgtcactagacactgggtgaaacatcctgcatgtattaatgcatttaatcttcacactaaccctatgaagaagaccttatgatcatcaccctctttctgtagatgaggaaactgaggcactgagaagttaactcacttgctagcaggtcaaacagttagcagatggcagttctcatatttgaacgtggccagtctaaaatgtgtgtttgaagagacacaggggggctcccacctcaatctgcccccagtacctgtggctttggacaggccatgcctttgggcagctctggcctctgctttctaagtccctgtcccttgtctgtgtctggaaatgacctgggctccagctgagtgctggtggcatgaaccggccagccagctcactggggagagcacaccccagaataattctgctgtctgaagggaggactcctgtgctgtggtcacgtgactgcaaaggcacttgctgaaattgctgttcctgggactcctaaagacagtagagctgccagatttgtgtcctgaccgtgtctagacagaggatgtcatggggggagggcaaggacggtgcgacaaccctgagggacccctggtgtggggagaggcagggggtgtgcaaggagtgtaggttggagggagatgaccaaggggcttctgtgaatgtggccagaaccagcaggaaggcagaatccttcccgcccttcctttatgatttgcagacctggacccagcccagcctccagaagagacttaaagagatttaagcagctggctagcaggactttgtttttcacagaatagactcactttttcatagaacagggctggggtaaggccaggaaaattcaacaggcactaaaaatattgtcaagctgctgacagcacagccagaggccccaggcctgggtggcatccagacagccctgtcctttctagacagccccctcctccaggctcagggacctgtctggctgtgagctcccaggaggtcccaggggtgtgacctccctccctcc

SEQ ID NO: 4057 - DNA, 2300 bp, Homo sapien
acttagcgaaaaactcgtctttacaaaaaatttaaaaattagccaggtgtggtggcatgcacctgtaatccatctggagtctgtggcagatcacttgagcccaggagttcaaggctgcgtgtgctatgattgcgccactacactccagcccaggtggcagagcgagtgtctcaaaaaagaaagaaagaaagaaaaaaaagactaatcataataattcctcacaagacacgaagcattatcccgacacaaaaaatgttttggaaacccaaactgacctttatacagttacttgtaggatctcagacctttgaaatggtcatttaaaaaaattatttatttatttgaaatagtcatttttgatcaccagaaggaagaaatcacaaataaaaaaagaagaggcttaaggctcagatctgtagattactttttcaggaacctggaggacagagagctggggagcagactgcagagggacttgaggtttctggagtttggacggcttacatgtaacctggcgacaccttcacgccccagggttgccatggcaccacctttccgaaatactgcttcctaggtacaatatatcttttttttctgaaacggagactctctctgtcgcccaggctggagtgcgatggcacgatctcagctcactgcaacctctgcctcccgggttcaagcgattctcctgcctcagcctcctgaatagctgggattacagacgcgcaccaccacgcccggctaattattgtatttttagtagagatggggtttcaccatgttggtgaggctggtttcgaactcctgacctcgagatccgcccgcctcagtctcccaaagtgctggattacaggcatgagccaccgcgcccggccagtacaatctatctttattatttttttttttgtaatttttatttatctactggcatccccatggaggccctttctctccccaactttccctcgtgtgtgaaataaagaccactgaatctattaacttcccaggccttgaaattccattttcgcacatactgccaccgctaaacgatttctgaattttttgttgttaccccctcagctaggagttccatttgccaagcattttaacagcagagaaggcaattctgtgggccgatgcatttgtgtttagcaggcacagatatctccaaataaccttcctatcttcacactggtggcttttgaattgttcagggttttagaaataccataatctcattctgttaaatattaagggactctttcggattccctgagccttaaggttacgttatgcaaatctgtccgagtgtgtttccatggtgcagaataaaagttatggtagggttttttgaagcagcatgactataaacgtcactcctgtcactgcctttcacaagagcccacttgctgtgaaatattttgaaaacagagctgaagtggagataacgcagtgcacaaacaggcggaaataagaataaaccgtgcgtggcaggcagaaacccggaggttggctgtttctggaggggaagagaaggctctgtaaagctggaggagaaaccacgccggccactgtttaggggcctcctgggggtcgtttcccttgccccctcgggttggggagctcctctaggccaaggaagcggccccctaaaaccgcttccgggactgcagcttctctccccacactctcaaggagcagagccttctcgggccacaattctccgcgacccaaaaataactacacagatgtgaggaaaagggccaaagcctacagcacaaggtggttctcagttaaagccttatcgcttacggccaggaagctcgaaacctaacccagcgccagccttttatagccggtccctcgagccccgccctagcaacttctcctagcaacgcctcgccccgtgctctgccgccttatctgcctccgccaggcctttcctgttcccctcccccagcccgcaccgccccgccgcccggctcacttgacccgccccaggggaggggaggggtgaacggaagcgtgaggggcggggcgttggaagatgctcgcgtcatcaagaggcgccgggcgagttgcggcgcctggtgtctcagagaggcttgaggttcgggtagtcggtgacatggcggaggccgcggcgctggtgtggattcgcggccctggcttcgggtgcaaggcggtgcggtgtgcctcgggtcggtgcaccgtccgggattttatccaccggcactgccaagatcaggtgaggatttcggttcctgttaggaaggagaaagaggcagacaggtggcagc

SEQ ID NO: 4058 - DNA, 2300 bp, Homo sapien
cccatgagggcaggaacactgcttgtgttattcactgctgcattcccagcacccctgaattgtgctgagcagagttggcactcaataaatattcattcagtgagaaaacttcctgaagccactaggagggtaaccagtcacctctccaggtgcttaaatacttgaacctactagaaagaatttgtggcctaacttcatagagataaatattattattcccatttcacaaatggacagacagctgagttagttcaaatcatctaagatcataattactctacctaaaatggtctgacccttggttagaaatattttttaaagccaagaagtagaagctattgaaaaatccagcatacaaagaaaacattacccatgtcatttaacatttcttgaagatatgatgcatttaactaatgcagaacagccttcctggataaatccaacaataaatatttcggtttcctgaaaacaaaacaaaaaacaagcaaaataactcatcttggcttgaattataggaaattctttgctggcagctcggtccaagctgattgcatatgtgcttttaggataggattagagattgcatgtgttctgcacagcaaccatggacacttaacattcatgaaataataatgaaacgggaggcctggatttttgtctgtttgtttctcctaggtctcttcctcacttaagtgaccttggacaaatccatttcttccctcgtatctgatttccatgtatctgtttcgggataatgtttatcactaagccgctttgtgagatcttcagattacaaataattactgcccttcatttatgaaattttcctccttcactaccctacgggatatttgcatgacccttccattgaaaacctttacacacagttgtgaagcgtcaataccatctagggacggttcagaggttccaaagccaatcaactgacaagtcgtgaggataacttgggccatgaaaagtccgtttcctatgctactgagaattggaaaacaggtatatgtactaattcccaaaccacgtttgccttctttctgccgttttcagcctcttctaaactatgcagaagctgcggacatttgactatctatattcggcaattcctttccaaagcaatcctaccgaaaacagatcacacggcccccacgggcgggcaggacaagccaccaggccctggtgcaggagctgcgcgctccacacattgtttagaggccgacgcgacacagccatcttgcgtcgggggcccgggcccgggaggagagcgagccccgtcccctgatcccggaggccaacaccggcgaggggctgccctgcacgcaggcggccggcccaggagtcttagcggatcaagttgtctacggcggactcgggccggtcccgcaggacccggccgcacttggccgagcgcgcaggcgggaaggaggccgtcggtccgcccctcccgctgccgcagcggccaggtccgacagcgggcgcgggacgctggattcctatttgccagcttcctgctggggagcgttttccaatggggcgcggcgacccggccgaccgcgtcctcctcccccactgccgcccgggtctcctcgggggcgcgcgccggggcccgcgcgggggcagcccctccctcccctccccgccgcggcccgagacgcccgcaggccgggcgttcacccgccgcgcctccgcccgccttcccctccccccacttccctccgggcgccccaaacccgggcttcgggggttcgacgccgtgcgcacacggagcgggatgggagtgcagggccgggggcgggggctggccgggtgcgggcggcagtctcggcgggagccggcggcccctcagcgtgtcttttgtgtttgtacacacacggcgcgaggcggcctggaggagggagcgggcggcgcgcgggggaggggcgagcgcgcgccagcgaacgggcgcgcggggggaagggcgggggcggggcgcgagaggagctatgggggcggggccgagccttccctccattgtgtgtgattggctggcgcgcggcgcgggggcggggcggcgtgtgttgggggatagcctcggtgtcagccatctttcaattgtgttcgcagccgccgccgcgccgccgtcgctctccaacgccagcgccgcctctcgctcgccgagctccagccgaaggagaaggggggtaagtttccccgtctgcccgcttccccggaaccgagccccgcttgccgtcagccccgagccgggccctggcggtgccgggaggggacccatagcccctccggcttag

SEQ ID NO: 4059 - DNA, 2300 bp, Homo sapien
ggggcccgcgcgggggcagcccctccctcccctccccgccgcggcccgagacgcccgcaggccgggcgttcacccgccgcgcctccgcccgccttcccctccccccacttccctccgggcgccccaaacccgggcttcgggggttcgacgccgtgcgcacacggagcgggatgggagtgcagggccgggggcgggggctggccgggtgcgggcggcagtctcggcgggagccggcggcccctcagcgtgtcttttgtgtttgtacacacacggcgcgaggcggcctggaggagggagcgggcggcgcgcgggggaggggcgagcgcgcgccagcgaacgggcgcgcggggggaagggcgggggcggggcgcgagaggagctatgggggcggggccgagccttccctccattgtgtgtgattggctggcgcgcggcgcgggggcggggcggcgtgtgttgggggatagcctcggtgtcagccatctttcaattgtgttcgcagccgccgccgcgccgccgtcgctctccaacgccagcgccgcctctcgctcgccgagctccagccgaaggagaaggggggtaagtttccccgtctgcccgcttccccggaaccgagccccgcttgccgtcagccccgagccgggccctggcggtgccgggaggggacccatagcccctccggcttagcccacaaactttttggcccagaaatggaggtgaggagcgagtttccctgttccctctggcggcggcggctcccccgtctctcgccgcctcagcccaacagcagcaaccgccgcggcgccgagcctgctctccctcctcctccccgcgcccctggctcctctttcttcggtgaaatcccgcccgccgccccttccccggaccccaaaccttcaccatgacccgcgcgggcctcttaactaccgcccccgggccccagcccccagttttcgagcgggaaaggggtggaaatcgccgccgcttcgcaccctggggtaactcgctttttgctgcctccccacagttgttgctaagcttcaccatcttgtctctcttctctggtcaccgaccatattttttcccccgtttctctcttccccatttcaaaaaagcaagaatttttaaaagagggacgtttttttcccttttttggagaggcggaaacttgatgcatttgaaatgcaaaaaaaacttttgcattttggagggcggcacgtggcaggggataggggtattttcgagcgatttggtgttttgtctctttggaacggaatcggatacgttttgcgattgtttccattttgttctggtcggggagccgagttggttcctgctcgaggcgctgggagcgaggcgggcaggttgggggaccctgtgccgagggacccgaaggaggcaaaaccaaaagtttatgtggtgcttggggtggaccggtcggcggatgtcgtgcgttaattaaagcctgggtgcggggcactttttatttcactgcgaagcctgtgaggactggacgcgaggacggggctttgtagaatgctcgctggtggtagctgttgttcctctcttgttttttcgagacgcctttttgtcaacataactgtaaagatgcaaaaccaagaatattttcagatatttacagcaatccatcaacagtcagacgaagggggggcagccaaagtgggggggagtaagaccttttttttgctgtaatttgactcgaccttccagtggtttgtgccttttttcttttgacttgtttgtggatggaatgtttacagacatttctaattactgctttaattaaataaattggatcaaaggccgttcgaggtatttttgttttgccgtttgtcgctcagaattggcattttgagaggtgattgatactgctaacaattttctagtactctagtttgtttcaagaagagattttgggtagacgtaatcttcaccctttcaaattatataacaatacgaacattattttttatactgatcataatttccagatttggggagggggtgatcgtggcaggaaaagttgtatgtttggtagttgcatatggtgatttttgatttttcaatgctggtaggtaagtaaggaggtctctgtaccatggctcgtacaaagcagactgcccgcaaatcgaccggtggtaaagcacccaggaagcaactggctacaaaagccgctcgcaagagtgcgccctctactggaggggtgaagaaacctcatcgttacaggtattaaaaaacaggaaaaaaatgggacaaagtctctcttgtatgtatccaca

SEQ ID NO: 4060 - DNA, 2300 bp, Homo sapien
gggctgagcatggtggctcatgcctgtaatcccagcactgtggagggcgaagcaggcggattgcttgagcccaggagttccagaacaacttggggcagcatagcagaacccatctctacaaaaaatacaaaaattagccaggtgtgctgctgcgcgcctgtagtcccagctgttcaagaggctgaggtgagaggatcgcctgaacccggggaggttgaggctgcagtgagctgtgaccgcgtcactgcactccagcctgggtgacagagtgacaccctgtctcaaaaaaaaaaaaaaaaaaaaaagggccgggcgcagtggctcacactgtaatctcagcactttggaggccgaggggggcggatcacaaggtcaagagattgagaccatcctggctaacacggtgaaaccccgtgtctactaaaaatacaaaaaattagctgggcgtggtggcgggcgcctgtagtctcagctactcgggaggctgaggtaggagaatcgcttgaacccgggaggcggaaattgcggtgagccgagatcgcgccattgcactctagcttgggcaacaagagcgaaactcagtctcaaaaaaaaaaaaaaaaaaaaggccgatccaatttgttaaatgtgtgtatgtatgtatttttagtttttgagacggagttgctctgttgtccaggctggagtgcagtggcacaatcttggctcactgcaacttctgcctcccgggttcaagtgattctcgtgcctcagcctcccgagtggctgggaccacaggtgcgtgtcaccacgcctggctaatttttgtatgtttagtagagacagggtttcgccatgttggccaggctggtcccaaacgcctgatctcaggtgatccgcccgcctcatcctcccaaagtgctgggattacaggcgtgagccaccacgcccggccagtttcaaacatttgcaaggtctatatgttgtatatgaattagtaaaagaaacattacacatcaaacctgtgatttcgtataacacctctaaatttgagtcaattaaaacatcgtaataataagagttcagttttacaattagtgctggcaaggcaaaaataacgaaagtggtaggaggtccggggattatgtgagagaacgcatgacaaatgtttagcacagagccgggcacacacagtgagggctcaattcacggtggattttatttggtcatcatcatcacatttggagctgaaatagaacagttctgattccaagtgaaggggaggtagagtggagggggtggggagggctagcttggatttctgctaagatgtcacagcctcggataccctcaaggcatgccatgcccgggcttagctgggtgaggggcctgtgaagcttgttggtgtgtaagagacctcggtggcatcactgtcagcgcagccgaagccaccacgctagctccagactggtcagcagatggccgcgcaccaggcccttcctgcggcccgggcgactcgtctcttagtggaggaagtagccggccccggacacactcctgaggagcgctgcccgcagtctcgggaaacggggcgtggggccagctgctccttccaactcctcctcgggggcagcatgagggagggtcgctgtcagggcctcgaggactaagggttcagggtgcccgccgctcgtcccctcccccctcccccccaggtcgtggaggccggtccccagcatctctccagcgtccccactgtcgtggctccggggcgggcttctcccttttcaggcatttctgaaatcgccgcctcacccgggctctcttcctccggctcgccctccccagccccaggtgccagagagaactttccccaaaacgcgaaactgatcctttcagacgcctcgcgttcgcccaacagcacctctagcctcggtcgttgtcacgtgacgcggccccaaggcccaggccacgcccccggagctcgccacgcccaccgggtccgcccccacgcggccgcctgcacagggggttccagccacccgcgctctcccaggtttgccgaccttacgggcccttctccgccagccctggctgggtcacccccacgacccgggactcccccgccgttccctcccgggctgcctgcagtgaggtccgctcctgaggcctcagcctcgccgggggtagggccctctcccgccgtcgccgcagctcctttccgtcccggggcctggggggcaccgtcccacgggtgagggccgcctccagcgcctggcccagccatgcgaacgcctggagcccgcgagctgcagctgcgg

SEQ ID NO: 4061 - DNA, 2300 bp, Homo sapien
gtggtggcacatgcctgtagtcccagcttctcgggaggctgaggcagaaggattgcttaagcctgggaggtcaaggctgtagcctgactgcagcttgacagatgggtttttctgtagtagctttagcataagtattgatagttggcttatttttacaacctaattcagggtaggcatggtggtccacacttgtaatgccagcactttgggatactgagacgggagaatcacttgagctcaggagtccgagaccagcctgggcaacatagtgagaccttgtctctacaaaaataaaaacattttccacgtatgatggcgcatactcctgtagtcccaggtagttgggtgactgaggtgggaggatcacttaagctcagcaggttgaggctgcagtgagctgtgattgtgccactgcattccagcctgggcaatagagcgagaccttgtctcaaaaaaaaaaaaaaaaaaatcagcataccggatttccgtcttaggttctgttattaataaaatgtagtaattgggctgggcatgctggctcaaatcccagcagttttgaaaaggaggccaagacgagaggcttgcttgagcccaaaagttcgagaccagcctgggcagccctgtctctgccaaaagacaggtttggtggcacgcacgtgtagtccagctacttggggggctgaggtgggagggtcatttgagtcccggaggtcaaggcttcagtgagccttcatcacaccattgcactccagcctgggcaacagagtgagactctgtctaaaaataaaaaaattttttaaaagtagtaattgaaataaaaatttcactattagtgtttgtgtctattacaggcagtttgtgacatgctttgtagcaaagctttagtatataatgctgaaaattatgtattttgcctgtgctaattgttttctttgtgtttctttttcttatagaaaaagatggcaaagcatttcatccaacttatgaagaaaaattgaagcttgtggcactgcataagcaagttcttatgggcccatataatccagacacttgtcctgaggttggattctttgatgtgttggggaatgacaggaggtaacagtgtttttctgtatagtgaatttaatgaggataatgttggcaaagggtacaatgtgtattggttaaggtgtaagtagctggttcattagcttaggataagaactgaacatttttgcttgcagcttctggagtcttcagatatttatctgtttttagcttagagatgtttatggttaaatattgtggaagaactgtattcatctgcttatgaacataagacaagtagagcttcatttgattcttcccaaataatattaaaagtagccatttaaaatatatagtaattgattcccttattgaggcataaaaaaaattgtgacaaaaaaagaatacattgagtatttttgtttaattaaggctcaaatattatataagaaaaataggccaggtgcggcagttcatgcctgtaatcccggcactttgggaggccgaggtgggtagatcatttgaggtcaggagttcaagaccagcctggccaacatagtaaaaccccatctctactaaaaattaaaaaattagccggcggtagtggcacatgcctgtaatcctacctactcgggaggctgaagcaggagaatcgcttgagcctgggaggcagaggttctgctgagccaagatcgcaccagtgcactccagtctgggcaacagagtgagatcctatctcaaaaaaaaaaagaaaaaagaaaaattgatactcttttgctatatgggaatcatcagcaatgcagttgtttggattgtatgtggcgtatctaatttagtaaatcaatacatacttgttaaaacttgaagttttgagccttttgctcccaatagaatcattcattttacttacaattgagaattattcatatttaggtttaaatttaaaagttctcattctactaagaaggggaggtaacttttcttgttattccttacaggagagaatgggcagccctgggaaacatgtctaaagaggatgccatggtggagtttgtcaagctcttaaataggtgttgccatctcttttcaacatatgttgcgtcccacaaaatagagaaggaagagcaagaaaaaaaaaggtgaagtttgagggcatggaatactttattgctgcgcagcccagtgtactgatgcttttgttttgtagagtgtctgttctagttctagatcaggtgtcttgctttccttggatccccatttcttgtggcaattgt

SEQ ID NO: 4062 - DNA, 2300 bp, Homo sapien
ttgtcgcccaggatggagtgcagtggcatgatctcggctcactgcaacctctgcctcccatattgaagcgattctttttttttttttagacggagttttgctcgtcgcccaggctggagtacaatggtgccatcttggctcactgcaacctccgcctcccgggttcaagtgattctcctgcctcagcctccctcagtcctgcaacagagcaggactccagctcaaaaaaaaaaaaaaaaaggaattagttcatttctactcttactctctgctacaatatactttactgaaaaataagttccaagaataaaaatttaagatggaatgtagctatatgaattgtacagaaaccacctgatttttatcaagtggtaatatatcatcactacagcaaactctaaattcaagccggtgatctaaaagtcaaatgatccaaaacccattagccattaccaattccccaagctagttagtacacagagggctcaactcattgtgcaatgaccacgaatatgtcattgaatgtgaaatgatcaaatgttctggaaaatttataaaactttcactagtttgcacaattaaagttattttgagagaaaacaacttccgtgtgtatcattacattgaactactcaactttggctagtaaaatatgtactccaaaaggtactccctctggggaaagtgtcataaatatgctgctctggaatgtacgtggaacctagcaaccacttttaaagttgcatttgctgatgtccctccctgtccattcgccctacaagactaagtatctttaagaatcaaactaacgggctttcatcagtttttcccactgacaaaaatcatgtgattggtctctccaccattcgactaagtgaatcacccaattaaaaaaaaaaaaaaccgcacactacaatcttgctctaagacaagagacatttaacaattaattatgcgaaaagcacagaaggtactgttaggccttactctgagaattcactcttgcacattgcttacaatgtaaaattttaaccacctagaagttactagaacatagtggacatctctcctcaagagtttgacaagccggagaggatgatgagcttaacactttacttcctcctctctgccacatcaatctgccgggggatcaagtcctgttccagtttatggttcccaagaatggctggaaaagctatgtatggaacctcttgacagatttcttccactaagggtaaaaatcggcgggttctgatgtgacaagccatgggaaataggaaaagaaaagcgtcagttaaaaaaataataataataaaaggcaatcccagaatgggatcctttggaagaaagtgggctcattcttccaccagggctcctggaaatcccagaagctaaatcaggtaaaatgtcccggtaacctctgggaggcgggacatgactgctaaaccaaggttgcaggcccgtcaggggtgtgacctagtggccaagcgggtagtgacaaacttcgggtacccccaaggagggaaccccgcttgagtcaccacagcccagtatgagtgggtgagggcaagtctggtccagtcaccctggggaccacagcccacgccgggctcccggggccgggcagaagcggcgggggtggggctggcccggctcacctttgaagaagcgcagtgccaggccgtacaactcctccaggccgaaaccccagcgctgctccagccgccgcgcctcctccgccgcgcccccagccgccgcctccccgggctcgggctgctcccctgaggcgcccgggccgcgaccggatccaggtggcgagggcggtggcagcggtggcggcagcagcggggcgccctccgccccaggccgctcctccgggtccgggctgagcgtgaggccgtcgacggacacctcgagtcgctctgcgttcagcaccgccgccatctccggctgctgcacctcctcagcggggacagacggcagccacgtatcgacttcctgctgacctctgacctccgcttaccgacaccggaacttccgctgctgaggaggctggagggctccgggagaggggctgaggcctggcgccccaccccctccggaatcgtcagttgccctggctcagcgaccacccttcaggctccccaactcccgttggtcccgaactcccctcccccgcaccccatcctttcggatcccagttgctccaggtgggcgggtgctaccacccccaccgctcggttcggtgctgcggctgtcagtgcccagcaggggcggggtcagtggagccccgcgcgggg

SEQ ID NO: 4063 - DNA, 2300 bp, Homo sapien
ttaaaaatatgcttccaaccatcagaagtggaagattataaggagagggatcaattctctcaatgcctaatcaaaatgaaggttctcactcactgagaatctaagtcatatctgcaattataactgcaccatacttcatgtttttatgtgaagcatgcaaaagggaatagattagaaaccctatgtttatgggacaaaaacttatagttgtactacagtgagtctgtctgtatgtgaagttatatgtcttatccaccgtaatgaatgagatcctgtctgaatgcagcatacaaatcttgtcctgaaaaaaaccctcggccaggcgcggtggctcacgcctgtaatcccagcactttgggaggccgaggcgggcatatcacaaggtcaggagattgagaccatcctggctaacacggtgaaacctcgtctctactaaaaatacaaaaaaattagccgggcatggtggtgggcacctatagtcccagctactcaggaggctgaggcaggagaatggcgtgaaccctggaggcggagcttgcagtgagccaagatcgcgccactgcactccagcgtgggcgacagagagagactccgtctcaaaaaaaagaaaaaaactctctagggcttcagtaaaaaccacacacaaaattgtcactgaagcagccaaacggccataaaaatctcatagcacatccatgaaacttgagagaggtttcccaaactgaacaataaccctaaaaaagtacgttaacaatatcagtaatgagttgtgatgctgaaataaatttataaacaattattaagaaacaaatttaatcagccatgctggagaaaagactgatctttctcttttctttatagagaattacaaaatacgccgggcgcggtggctctcacctgtaatcccagcactttggggaggctgaggcgggcagatcacatgaggtcaggagtttgagaccagcctggccaacatggggaaactctgactctactaagtttacaaaaattagccgggcgtggtggtgagcacctgtaatcccaactacttgggaggctgaggcaggagagttgcttgaacccgggaggcagaggttgcagtgaaccgaattgcaccactacactccagcctgggtggcacagcaggactgtctgcaaaaaacaaaaaaaaaaaaaaaaaaaaaaagttacaaaataattgttataggaaaaggcaatcagaagtacgcagccaaaacaaaggtgggaaaaatgatcataaatggtgctcccaaagtctggaaacacaggtgaatatacataatgtcgggggcgacttcaatcttttagaaaaaaataggtttctgggctctcagacgccctgtagaagaatatcaggcagtcaatgaaaatattacggttatgtgtgtgatgtttgtgggttttattaacttttaaaatatcatttgttttttctttctctttctaaatatacattcactttcctacccttctgcgcgtaactttttgtactctttcctaatgagggtccccacaaattgtatgagctgcgcttcctgcaaaaccaggatcagccccgtctgcaacctcaaagtcactgaatttctctgcagtctcagtttccccttttaaaaaaattgggaatttgccctgcatttccttagagttgctgtgaaggccaaacgagatggtggtgggcaaaagagctctgccaaccacgcaggcccctgcaaatgtgaagggcctctgacctggagggttgggtgctggccgacctcgtcaatcctccctactccgacccccgcgcggggctccactgaccccgcccctgctgggcactgacagccgcagcaccgaaccgagcggtgggggtggtagcacccgcccacctggagcaactgggatccgaaaggatggggtgcgggggaggggagttcgggaccaacgggagttggggagcctgaagggtggtcgctgagccagggcaactgacgattccggagggggtggggcgccaggcctcagcccctctcccggagccctccagcctcctcagcagcggaagttccggtgtcggtaagcggaggtcagaggtcagcaggaagtcgatacgtggctgccgtctgtccccgctgaggaggtgcagcagccggagatggcggcggtgctgaacgcagagcgactcgaggtgtccgtcgacggcctcacgctcagcccggacccggaggagcggcctggggcggagggcgccccgctgctgccgccaccgctgccaccgccctcgccacctggatccggtc

SEQ ID NO: 4064 - DNA, 2300 bp, Homo sapien
tcacccaggctggagtgcagtggcgcgatcttggctcactgcaacctctgcctcccgggttcaagcaattctcctgcctcagcctcctgagtagctgggattacaggcttgtgccaccacgcccggctaataattgtttatttatttatttatttatttatttatttatttatttattttgagacgaagtctcgctctgtcacccaggctggagtgcagtggcatgatctcagctcactgcaagctccacctcccaggttcacgccattctcctgcctcagcctcctgagtagctgggactacaggtgcccaccaccatgctcggctaatttttttttttgtatttttagtagagacggggtttcaccgtgttagccaggatagtctcgatctcctgacctggtgatccgcccgcctcagcctcccaaagtgctgggattacaggcatgagccactgcacctggccaatggatgttggctgttttggagatgctggggaattaacttttttttttttttctgagtcagagtttcactcttgttgcccaggctggagtgcaatggcacaatcttggctcactgcaaccaagagaagagggggaaagaaaggagaaggggtggaaggaagatggaagagcaggaggtaagtatatcagctgcccagaagggcctcaggggctacacaggacacagtccctgccaaccccaccccttaccacagccaggagagaatcaagcccaaaattcttctctgcagcagctccaagaaaactttccgctttgccacctggaatgtccacccaggataaaaagatccaagctcttctgagactgtcttttgaccttctagaatgcagagacaggacggggattgtgccctgaaagatcctcccaataaagatctccctttgagtcgaccacagtgagtgatcccggtgaaatcagcgctcaggtgctgggggcaaaaagacctgggcctctgtgttcctctcttgagttcttgcactgtggtggggcagttcccatagtggaccatgggtttctctttcaataaggagagctcagtgacatccaattcgacagacattcactaaggggcctagcaccgcgcctcacgcagaataggtgtacaaagcagacactcaataaactcagaaagggagaggtgggttcctgcttgctaagactttatatctagcagatagagaaaccataaccatagcacaaagtagagaaaatgggagctttcagagccccaaggggcagaggaaagaatgatgattcagggcgcgtggaaacttcatgaggtggctttcatctcctcccatccaatagacgggtcttaagcattgttgagtatctccagaaaggccaaactgcgccgtatcctctgctaatggggcacgttgccaaccccgccctacctagggtatctttattggtgggcccatggacattccagccagacccccccactccccccacccatttaatcaggaggaatgtgctgccccctggatcctttatcttcacccccctccccgcttggattcaggatgtgttagggaggcttgcagaagacaggggccgggctgtttgaccaacctggtacagggtctagcacatagcaggggtggtaaataaatagctttgatgaggacagacgggactagggcaaggctcaaggcccaggccatgtaaggcacaggccaggcaaggtgcttccgccgctcttaacggggatttgacccggagaagagagttctgtcgcctgcggcccgcgcacccgggcccctccgggctgcccctcccaggcaaatagtccttcggggatgtggattgcgccgtccgggcgggtgggcggggaagaacacggagggggccgggacccaagttcacgcctccctcctgcatcccgcagccggcggaagcgattattccccggcgtctggcggggccgggggcgggctcgcacccggaggagacacgggtctccccgagcccacctttgatcgcaccgccccgccttcccagcccctggcccgggagggtataagtgcggcccgcgcccctccgagcggcgcgctgggttccggagcgatggccacagccgagtcccgtgcgctccagtttgccgagggcgccgcgtttccagcgtaccgggccccccacgccggcggggcgctcctgccgcccccgagccctgcggcagccctgctccctgcgccgcccgcgggccccggcccagcgacctttgcgggcttcctcggccgggaccccgggccggccccgccgccccc

SEQ ID NO: 4065 - DNA, 2300 bp, Homo sapien
tcaaaggatggtgaaaaaattattttgctttgtaggaaggaataacctgcaaaatctttgagtcttggaaggtcctgttttttaaaaaatgaaaggtaatttactgtgaaaagaaacagttcctttttctttccttccttttttttttttttttttcagactgggtcttgctctgttgcccaggctggagtggtgcaatctcggctcactacaacttctgtctcccaggctcaaacaatcctcccgcctcagcctcccgactagctgggactacaggctcattccgccacacccagcttttttttttttttttttttgtatttttggcagaaatgaggtttcaccatgttgcccaggctggtctcaaactcctgagctcaggcagtccatccgcctcagcctcccaaagtgctgagattacaagtatgagccactttgcccagctcttttttttgggtgggtggggaacagtctccctctgttgtgcaggctggagtgcagtggtacaatcacagcttagctcattgcagcctcaacttcctgggctcaaatgatcctccggcctcagcctcccaagtagctggatgcacaccattatgcctagctaatttttttatttttagcagaaacaaagtctcactatgttgcccaggctggtctcagactcctgggctcaagcaattcttccacctcggactacaaagtgccaggattaaaacatgagccaccatgcttggccaaaaagaaacaatttttttttcccccaagacggagtctcgctctgttgcccaggctggagcgcagtggcacgatcttggctcactgcaagctcagcctcccgggttcacgccattctcctgcctcagcctcccaagtaccagggactacaggcacccgccgccatgccctgctaattttttgtggtttttttgtttgtttgtttgttttttggttttttttttttttttagtagagacggggtttcaccatgttagccaggatggtctggatttcctgacctcgatatctacccgcctcggcctcccaaagtgctgggattacaggcgtgagccaccgcgcccggcctttcttttttttttttgagacggagttttactctgtcacccaggctggagtgaagtggctcaatcttggcccactgcagcctctgccctctgggttcaagcgattcccctgcctcagcctcctgagtagctgggattataggcgcctgccaccacgcctgtctaatttttgcatttttagtacagacgggattttgccatgttggccaggttagtctcgaactcctgacctcaggtcatccacccgccgtggcctcccatactgctaggattacaggcatgagccaccacgcccggccagaaacaatctaagaacctatttttgaatacagtatacttaatgagaagaaaaaaaggagtggtgagatgaatagattttaaggtttttttgtttttgtttttgttttttttaagatggagtctcactcttgtcgcccaggctggagtgcagtggcgcaatctcagctcactgcaacctccgcctcccagattcaagcgattctcctgcctcagccccctgagtagctgggattacaggcgcctgccaccacgcctggctaatttttgtagttttagtagagacgtggtttggccatgttggccaggctggtctctaactcctgacctcaattgatctgtccgcctcagcctcccaaagtgctgggataacaggcgtgagccaccacgtccggctgattttaagtttttaatctcagcacttgagtccaggaggtggagcccagaatcgcttgagccggagatggaggttgcagtgagccaagattgtgccactgcactccagcctggatgacagagccagactctatctcaaaaaaagaaaaaaaaaagattttaagtttttatatggggtagttatcagtttgtatgttttttataatttattctagatgttcttctgcattttttgaggaagagagatcagcattaaaacagaaacggcagaaaataaggctcttacaacaaaggaaagttgcagatgtttcacaattcaaagatctcccagatgaaattcctttgcctctggttattggaacgaaagttacaggtaagtgaaaacaagctaattactcttttgacttgtaatttttaatcaaggtaatcttttttgtttctttggttcttattttatttcatttttaattaccaagaaatatttacaatagacatcgttaaccctcaccctatccctatccc

SEQ ID NO: 4066 - DNA, 2300 bp, Homo sapien
cattgatttaaacagtagttgtgttgttgcgtgtacatgaaaactgcctcagaataaaaccaggtttgccttggtctaatgacaccttgactatcatgacattcacaaagcttttgcttctcccactctggtaacctctcatgtttttttaatttctattcttccattcttaaagggctgaccttttcttgatctcatctccaaattgatactgaagtgcaagctgctgaagcaccccctaggtgctgacaacaaggaccagtgttttaatcttcttagggagcagatcagagtgtgtttagaaggcaaaggagaggttaagctagctctgaaggaaggattactttgtaaaattgaactttcaccctccctgctcactccctgctctccctcctaccttagcatggcagcacccagttacccaaggcacagagctggcatcagcaatgagacttccttctcctcacacccagtgactcacccaatcctttattttccacgtcttgaaaggtggagtgcatgctgccacctctctctaatactgcctatgctgtggtaatggtggtaatagtggctagctgatgggtgctagcagctagtataaggtccttacatctatcaaatcgtttagccctcaaaataaccctgttatttgcattttacagataagaaactgaggcacagagaattcggttaagaaaccaacgtgcctgagattatacaactagcagcccatctggattcttcccatcgaggccctggggctccagagcccacccgctgcacctctctagctaccagtgcaggcatctctcttctgtcctttgcatgccccaaataagcttcttcctgactggtttctaggctctcatcttgtcccccaccaatccatttcccatatttttgttctaaaacacaaatagaaacgtgcccctcttacacccgacttttccactgctccagtggactaagcaagttcaactccttagcctgggcgggcctctgtgtaccactctgtcaccttagtctaccgccttttaactttgtagttcctggaattcacccacgttgtcttttgactgcttaacggtctcattcctccaacccccataaattcctggagaaaaggattggagctcaatgacattcgttaaatgaatttttgaaaagcaacagtgttttattactggaaagtgttacagacagatattgtgaaatttttccttgggcttctttcaatttcgttcaattctcgtccagtattctcataacatttggatcaggtactttatcaccttgtagtgtcactgttcctttctgtatcctctcgaagcctcctgttactcgttttctaattctcttccagcccactgcacgatctagtgtcgaatggatgaaacagctgagcagaacagttctttagctgtcggcctaaatgaccaacttcatgacctctcaaggtctcgctccccggctgcacgcagctcagcttccaacattcgggaaaggcgtgcccggatcgcgaggggccgctgggaccgagtcccggacgtcgcgacgcgcagggggctgctgcggccggcggtctcgggaaaagtgaggggacggaggcgcccaagcaacgtgggtttcgggaactgtgagtatttcactttgcgtagagccccctcgggcaatgcgacccagaaccgagggcttctttccccccgccggggcctccctcccgttctccactcggaacaaacagcctgcagttcccgcagctgcagcgcgggccgcggaacatgcgccgggagcggggcccgggcgggactccggagctggtactgctccccccgcgctccggcgccgggcctcgccgtgcggcctccttcctcccttcctcccgcccggctcggccggaggcggcggcggaggggcgaggcgcggccccccttcggcggcacctcctccccgggcaggcgcgggcggagccgggcccgcctcagccagccgcggcgggagcagcgcagcgcggcgccgcgggcagcgagctccgcattcgaacctccctcgcaaagacagtctccgccccacaatgcaccgcggcgggcagcctttgaaaaagcggcgcggctcgttcaagatggcggagctcgaccagttgcctgacgagagtgagtagcacctcaaagcaccccccccttttcccgcctgctgcttgcccagcggttgcaccggccgggacggacggccgtgccctccgctgggcaggtgggctgactgccagccccactgtggtcccctagtcctcccactcc

SEQ ID NO: 4067 - DNA, 2300 bp, Homo sapien
actgtgagaaataaattcttgttgtcggctgggcacggtggctcatgcctgtaatcccagcactttgggaggctgaggcaggtagatcacttgagatcaggagttcaagaccagcctggccaaactggtgaaaccctgtctctactaagaacacaaaaattagccaggagtggtggcaggcacctgtaatcccagctactctggaggcagaggcaggagaatcgcttgaacccaggaggcagaggttgcagtgagccgagatcacaccattgtactccagcgtgggtgacaagagcaaaactccatctcaaaaaaaaaaaaaaaaattcttgttgtctataaattacccagtctcagatgttttgttatagcagcacaaatggacaaagacatacgtgtaatcctcccatcacagagggagtcactgaggcaccgaaaagtgggctagattcctgattctagcacttgcttgccattgtctttggacaaattaccaggttgttgggagaatcaagtaagccaatcattgtaaaacctgtcataaatattcaataacgaaacttattgaagagttaggtgtgccttggcttcgatcacacagctaagcgctagatctggggctaggatacagcttcaggctttggatttatgagaagagtcaaagtttttgtttaaaatgcagattatcaggcaagggcctaaaaacattgatttaaacagtagttgtgttgttgcgtgtacatgaaaactgcctcagaataaaaccaggtttgccttggtctaatgacaccttgactatcatgacattcacaaagcttttgcttctcccactctggtaacctctcatgtttttttaatttctattcttccattcttaaagggctgaccttttcttgatctcatctccaaattgatactgaagtgcaagctgctgaagcaccccctaggtgctgacaacaaggaccagtgttttaatcttcttagggagcagatcagagtgtgtttagaaggcaaaggagaggttaagctagctctgaaggaaggattactttgtaaaattgaactttcaccctccctgctcactccctgctctccctcctaccttagcatggcagcacccagttacccaaggcacagagctggcatcagcaatgagacttccttctcctcacacccagtgactcacccaatcctttattttccacgtcttgaaaggtggagtgcatgctgccacctctctctaatactgcctatgctgtggtaatggtggtaatagtggctagctgatgggtgctagcagctagtataaggtccttacatctatcaaatcgtttagccctcaaaataaccctgttatttgcattttacagataagaaactgaggcacagagaattcggttaagaaaccaacgtgcctgagattatacaactagcagcccatctggattcttcccatcgaggccctggggctccagagcccacccgctgcacctctctagctaccagtgcaggcatctctcttctgtcctttgcatgccccaaataagcttcttcctgactggtttctaggctctcatcttgtcccccaccaatccatttcccatatttttgttctaaaacacaaatagaaacgtgcccctcttacacccgacttttccactgctccagtggactaagcaagttcaactccttagcctgggcgggcctctgtgtaccactctgtcaccttagtctaccgccttttaactttgtagttcctggaattcacccacgttgtcttttgactgcttaacggtctcattcctccaacccccataaattcctggagaaaaggattggagctcaatgacattcgttaaatgaatttttgaaaagcaacagtgttttattactggaaagtgttacagacagatattgtgaaatttttccttgggcttctttcaatttcgttcaattctcgtccagtattctcataacatttggatcaggtactttatcaccttgtagtgtcactgttcctttctgtatcctctcgaagcctcctgttactcgttttctaattctcttccagcccactgcacgatctagtgtcgaatggatgaaacagctgagcagaacagttctttagctgtcggcctaaatgaccaacttcatgacctctcaaggtctcgctccccggctgcacgcagctcagcttccaacattcgggaaaggcgtgcccggatcgcgaggggccgctgggaccgagtcccggacgtcgcgacgcgcagggggctgctgcggccggcggtctcgggaaa

SEQ ID NO: 4068 - DNA, 2300 bp, Homo sapien
cttcccaagtccttcctcctagaacctcctggcctgccttagagctgggaggacagggggtcaaaactgggcagtataaaccactggcagcctaagccgcatggacatcagggccaaccccgtatctccctgccaagagctcagcctggcaggaatgctcacgcctgtgctgttgtagagtggagtgttgagttacatcctctaacgggtttaaaaaatggccagggcttgttcgctgtgcttgttgaaatcgctgtgtgatctgacttttgtttatgaggtcactagtgtgaacaacttatgggtgggctcactgagaatgagggacggaggtggagggaaaggttgagaggtgctacggtaagggagaagaggggctcgtttcattcacgttttgaagtcctgcacttcatttccagtctcccacaccttggtctatctgtgattcatagacgttctcagctattctcaaacccaagtcctttcctgtgaaatgttgtttttgttgttgttttgtgtttggtttggtttggtttggtttgagacggagtttcactctcttcgcctgggctggagtgcaatgcacgatctcggctcattgtaacctctgcctcctgggttcaagcgattctcctgcctcagcctcccgagtagctgggactacaggcgtgcacgactgtgcctggctaattgtttttttatttttagtagagatggggtttcaccattttggccaggctggtcttgaactcctaacctcagatgatccacctgcctcagcctcccaaagtgctgggattacaggcatgagccatggcccccagcctgaaatgacattttaatgtttttcactggacaggtaactagtttagcaggaagaaaagggacaggggcgctgcttgctgaaacaagctaaaaggcagctagctggaagtgtgtggaaagcggggtgcccactcctgacctcagcggggtccacgtgggattggggtaaccatgtggagaagtagacacagtggccctcggggcttcatccccagcaccaggggaacctgactctccctgtgaggagggcacatcctgagtccagaagggaatgggttccgggcagtcacgacacatggcagggggcagggttccaggctgcagccctagaagcctcctcctggctgcagctggggctcgtgggtccccagtgccaaggtgtttctcccacttttctgtttctctctcaactgggcagctgtggagccactgctcccagcccgctgtccagcgctgtgcctgagtttcttttccagtagtgagggcggcctgtgtggatggagcccacctcttatttttagtctgtgcgtatgttttgaggggtgtacaattagggaaactaggtattttcttttttttacataaacaccagaattatacagcgtggaaaatgtcgcgcccttcagagctctgccctcactctggccatgctctgccgtcagaacttcttttgggattccttcttgagaattgctttcagagctgattgagggtccataccaaagtcactctgttcttttattgtaccttgttcttggcttgaaatagattatccaccttcttccccagatgtggctccggctacttaattcttgccagaaatcagatcttcccttaggatggagtttgcagtgttgagggtacagggaagcccatgccagggcttgtggatgttattagaagctgttggctcctggtaggtgtctgatgagctgtgagcacttttcacatccttttatttaattttatcaccatagcagttccatttctaagattcttgttcagttctttgttccaagcactgcaggaagtgctggacatgcagaaatggaaaggcgcagtcacggcccccagggagctcagaagggtctattggcaaagccccagagacgatgtctcaggatacagagtgtggggcccattggtacacaggtgtctccacgcaggggctgagccaaataggcagggctgctcgcaaaagggagtgagtgccttttaaggaaggtggccccacttaacaaatggaaaatgaaggctgcagatctcatgcttcttccactgcagcttctcttgatggcaggcagttcccaagatatgagcagtagcaatatttgttggaggtgactgatctgaaagggacagcattgatttgaatgtaagtccataagttcaggagtgtgtcctttttaaaaatagtgttcaacacttgaaaactcttggttcttttccaggtgggaacccaggggtgcacttaa

SEQ ID NO: 4069 - DNA, 2300 bp, Homo sapien
ccgcctcagattcccaaagcgctgggattacaggcatgagccactgcacctggctaatattgatatgttttccctctctctgccgcatcagcctgtcccactgacagagttgaggatgctcaaggcggctcaacagagggtacctggagcaactcacactgcactatcagagagacacaagtgcaagcacactcagccacagctgcagctcaccaatcagcctgctgaacagacctgaactttagctgcatttttggggcagagcatatgggtgccaggatgggaccataatcttatcaccaatgagtggccatttagggatgatatagttgtcaacccagagatggcatgatcatgccttttgacttggtcattctctaagtaaaacttttatttgttccatcatattttccacttattctgtttaccttcaaaatatcttttttttttttttttgagacagggtcacactgtcacccaggctagagtccagtggcactatcatggctcaccacagcctcaaccttcagggctcaggtgatcctcccacttcagcctcccgagtagatgggactacaggcacctgccaccacccccagctaatttttgtagagacaaggttttgccatgttgtccaggctggtcttgaactcctgggctcaagggatccggccacctcagcctcccaaagtgctaggattataggcatgagccactgtgcccagcctaccttcaacgtatctaactggttactaacttttaggattcggcctatgtctcacaaccttcttgcttactcaacatccttgtctcttaagccactagcttcttctctatggttaacactttttatgagttttattcatctgcttatttttcttatcctctataccagaattgaatattttcaaataaagcacactcatgttacaatctttgaaatgaaaaaaaaaaatgcataggattagaaaagaaaccaattttaataaactatattttgaagtatagttctatattaaacaacaagatctaggccaggtgcagtggctcatgcctgtaatcccagcaatttgggaagtcgaggtgggaggattgcttgaggccaggggttcaagaccagcctgggcaacatggagagattccccatctctttctttacacacacacacacacacacacacaaaatatctgatagcaacaggtgcagtcattaccacaatttcgagtagtgatgagcttaataatatttcgagttatcaccaacaactgtaaagtaacatgaaaacgtctgtgatgactattgcccacaaagtcacaggtactgctaatactcctggtatttgtagtcaaattcataataaaggaaatgctaggtttcagttggtattttgtcccgacggtctgtggacggcaggttagaacgcccgtccaagccaggagggtggacctagcactgcagggtccacctcgggccaatcaactatattcccgaggcgggggcctgcgcttcccggacccagctgccctcaggggagagaggacacacttaagagtttggggccggcgtggtagctcatgcccctgatcccagcacttcgggaggctgaggcgtgaagatcacttgtagcaggagtttgagaccagtctagccaacttggcgagaccctgtccctaaaaaaaatttttttttaattagccagttgtggtgagcgcctgtagtcccagctactcgggaggctgaggtgggaggatcgctgggctcaggagttccagactgcagtgagccatgatggcggcactgcactccagcgcggtgagactcagtctcaaaaataaaagggggaggggttgggggtaaaattagttgtgaaatcaagtaagacttcctgggacagaacaatcaaaggggtggcgccgggtcctccaaagagctactagctcagcccaagccccgcctcggcccccagggcagcggcccgcagagctccacccggcaggcgcccgggaaactccgccccccggccggcagggggcgcgcgcgccgccggccccgccccgtggacgcgggttccgtgggcgttcccgcggccaggcatcagcaatctatcagggaacggcggtggccggtgcggcgtgttcggtggcggctctggccgctcaggcgcctgcggctgggtgagcgcacgcgaggcggcgaggcggcagcgtgtttctaggtcgtggcgtcgggcttccggagctttggcggcagctaggggaggatggcggagtcttcggataagctctatcgagtcgagtac

SEQ ID NO: 4070 - DNA, 2300 bp, Homo sapien
cacatgctatgtatcccttttctaggaacgtgtccatttcgtggaagttatggaatttgttggcataaaactttttctactttcctcttatctttttaatgtctgtcaaagctgtaatgatgtctcctctttcatttcttatattgttcatctgtacattccttttttccttaccgctcttgcaagaggtttatacagcatctacttgacattgtgattgcagctgatgtttgtaggagagtttaagatctaaggtatttcagggaggaagaggcttccgaataaaagttaaaaccttaaatgatcatctcaaaaaatcagacacaaacgcaacaggggaaacagaccaaacagttcattacatcagccaaataatacatctgggccaagcactgggtcatgaagataaaaatatatttcttggccttgttctgtcatcagatgaataaagtacatcaagttttggacattttttagctaaaataaaaatttgctgaagtcagcttccaaactgcatgaggaattcctattccaacctggaagagagcttccaggtggttcctttttggcaaagactggcatcatagcatcagcagtggaaagacaaactttgtttgaagctctgagcctttgaaaaagttttttaacctctctgagcttcggtcttcaaaattgtaaataatacctagctcatttgtgtataagaggattaagtgagataatacgtataaggcactcaataagtaaatggcaactgaatcagaagctttttcatgccaagtgatggaacacaactcaaatttagtttatggggaaaaaagtatggatgtaatgtctttttgatgtatcaacttggctaggctcaactctagcccacagaattccctttctagttagtttccatttatgttgggccaatgggaatattcttgctcaagagttggaaggcagaagggaggcagcagccattttgtagttttcacacacttctctgaggtatctaatcaaatacaaatctgggtgtttccgtgaaggaattctgcagatgtgatttaaagttcccaatcagggtgggcgtggtggctcacacctgtaatcctagcactttgggaggctgaggcaggtggattgcttgagctcatgagttcaagaccagcctgggcaacatggcaaaatcctgtctcttcaaaaaaaaaaaaaaaattagctgggtgtggtgatgcgtgcctgtagtcccagctacttgggaggttgaagtgagagggtggtttgagcccaggaggcagaggttgcagtgagctgagatcacgccactgcactccagcctgggtgatagagccagaccttgtctcaaaaaaatgaataaataaaacaaagttcccaatcagttgactttaagttaatcaatggaacctgggcaacatggcaagacctcatctctgccaaaaaaaaaatttttttttaaattagctgggtgtggtagcacatgcctgaagtctcagctactcaggaggctgaggcaagaggatcacttgagttcaggaaatggaggctgcaatgagccatgattgtggctccgcactccagcctgggaacagagcatgaccctgtcttaaaaagaaaaaaaattaaaaagttaattaatgggagattatcatgggtgggcctgacttgagctccttaaaaatgggccttctctgagggagatcctccaagtagctgctgggtcaacaattgctctcctttccccttagaactttcttcctgactgcagctgaaggacatcatcaagcttcagctcttgccatgggcttccagcctacctgtgaccttcccttgcggctgcctgctgcagaggaaaagttaaatattaaatttgaactccattgaacgtggacataaacaatggtcactaagccccagaacagattgcatgagccccttgaggcattcatccagcaaagtttcggagaaatctgctcctgtacgttagttattgaaaaacaacggacagctgcaaaaacaagttgacctttttgtgttccttgagcccagtcatgaagggccctcatgactgggcctcatgccaaacaactcgttacaaaagagctaggttcccaggccgtgctgaagctccatgagacctttcctcgtctgtgcacagactggcagccgactctggaacccagattgttgcttcccggtctagtgatccttcctccatagtctggtgagtgtaaatatatatatacatattttttcccttctcccctttccgctgcaatttgcattttatatca

SEQ ID NO: 4071 - DNA, 2300 bp, Homo sapien
agaatattcacagaatgtgggttattttctaggtctctgaataaaatactggttatatagaattgattctggagccagattgcctgcattcagctgccagctctaccactgattagtgggggactttgtgcagcctgtttaacttctctgtgcttcaattgccccatctgtaaaatggggtaataaataatccttactttgtagagttatggtaaggattaaaagagttaaaatgtgtaaagggtttttagaatgatgcctggcagagagtgcttgggtaaataagtgtttgttgaaaataaaacaaatctgcaaatagttaactgtagtcattgctcaagtccctttgagtatcgccttctttgggacacctccccgaggcctcccccacgctagctggcttcacagataggtccatgttgtcgcagcacctccagcacatcacagctgcaacattcctcactgtttctgtaagtctatctttgtagttgtcagtatctctcagctcatttcttagattcttgaaggcagaggctggattttactcatttctctctccctggaatctaagtcttagtaggccttcaataattgtgtattaaatggaagcttgctatgattttaaccaacacagtaactccaggccagaaaaggctaagcgagttcttctaagccatacaggttttagtggctgaacaaagactaaaatttttaaccctgttcttctgactgccaaacctaagctaatgactcgtgtgtgtgtgtatctgtgtatgtgtacacacgcatgtgtgtgtccaccagtatcatcactaacccctggccatttgcttttaaaattattttattcagagacttatacaataagtataagtatacaataacccatgttcttttagcctcttctgagaccctgggttgtttataataataatcactattattcctgaagggaggctattgcacccttccaattattcagacgatttgctgactgtctggataattccgaagcctttaacccctccctaacgttagaggcggtaactttcatccgtttactttttccaggtgcggaggcgaagcagccttattcagaaaatcgaattcaaacaggacctcaagctgccggctgttgcttctaccaactgccccattattaacgccagacggcgctgtgtcctcactggctctttaaccaccacgtcgggctcacagaaggctcaggtttcctccagtatagttcaggggatggtgaacgcttcccaacaagcctgcaacaggcgcatttctttctgcttttggtgcgtgtgtgtagggaagtgtcccatcttttaactagtcttgcggagacctggcctggtgtttgcaaatctgtttcctctattatcgatccgatctctggattgctttttctctgacacttgaaacaaattcactcctatatattttttaagtgattttttttttttttttttttttttacaaaatagagctggggcgggggggggggggtctcgctacgttgcccaggctggtttcgaactcctgggcacaagtaattctcccaccttggcctcccaaagtggggaatacagacgggagccactgcgctcgccccaaacaaaatcatttaaatcacaatgcactgaaggccgactaggtgtcaggcgccgcgcggtccgtcccttgtccccatgtccctggccaaaggcttgctctagatcaggggactcagcctcgaggctttcccgacggtgtcagccaagcacacactcccagttcgcagggcttcgtggtcaaggttcctagttcacctgtctgggagggcgaggtgtgtccaccccttccagcacctgggcaaacagctccctttgcggtcctcttccactgctttccctccgccctgattttccattccttgtgagcggtggttttggttggggggagggggcggggaaggggcctggcgaggaggggcgtcagagcgctgtcaccgggtgtcgcgccgccctccccgcccctccgccgggcgtgtggggacgccggagggcgggagtctccgcgagccgcgcggcgcacggagcacggcggccgcctgagctcggcgcggagcccggagcccgcagccgacagtctcctgctcccgtacgctgggcgccagctccggccgtgctgcccggctgcctgagagcgcgcccggccatggagccctcgcacaaagacgccgagacggcggcggcggcggcggcggtggcggcggcggacccccggggggcgtcctcgtccagcggggtggt

SEQ ID NO: 4072 - DNA, 2300 bp, Homo sapien
tttggaagcctctgtatcttcaaggtgtgggaacagatttggttttctctaaaaagctagaaccttctgctgtgtgcagcaggcatcctccaggctggtgctggctgctctcgaggaagctgcgtcagagtggagctgcccctctactcagataaaatagcttcagctgcaggaagccgccccctcccatgcccaccagcccacagcccttcaccccacacagcccccagagtttgcccgacaccccctgagtgatgacaggtctcaggagggggccgcccccacaaatgggaggcggaagcttattttccccgcttgggctgggggcggctgctgagggggtgaagaagagatagcaatttatgtcgcatgtttagtgacacaatccagatgcaggtgggactttcttgagtggcaggtgtcaccctgggtcccgtgtgggatggtttaatacaggggtttgtgtgtttgtgtgtgtggagggccactgcgcccccagatcctcctctcccccgagggctgcgtctctaaacctgggaaaacatcagcctcaggaggaggcccctttccgggtaactgatgtgtgggagaagccaagaggcccctgcctgtctcctgaatgaggctgtgagggttgccatgtgggcgggaccggttcaaaatagcgcccccgcccctctaaattagaccgtggtctcagcatgatcatcttcagtagataagggacagtggctgatttactccaaatagttccagctggccactcagaccagggccagagttaacttctcaaacaccagccagctgaaaattagggttctcgtgcaggcaagtgcatggttgacacacagccctttggtgacaaagctgggctttgcctgcatagtgcagacaaggctgttggttcagaggctgcagggcacattccaggttggggccttttgtcggtcggaattcaataggacattccctggctgtgggtgtttagggcaggaattacaggcttgcagagaaagtcagaggcaatgagatgctcccagtaccaaactgtgacactgggatcagggtggtcattcccttgggtcagagtgggaccctagagccagagtgagctgtgggtggcctgggtgtgtcctgtggacggcggagactgttgatttggatgttgagctctgagtcagtttcagaaccaaggatctcaggctgagaaggccaggtccccatgggagcggcaggagtctgatggctctgctgccagagcctaccccagcctgccacgccgctgaccttcccatggtaaggaaggggcaggcagcatggttcccaccctcagctgccccagacccacacatccagccccaagagcagcctcacccaggcacagtgcagggcattttagctcctgggaggggagatgcctttgtgagtttcagatgtcagaggagaagctccgagagagtaagtcatgtgcccccaaacactcagctcctaagtggcaggacaggcaagtggccaggttgggccgcccccacagcctgtgccgtccacacactcactacagcactcccagaagaaggagcagaatcgcatgcagcccagagcaggtcctgtggaggggtcctcacccctcaggagtaatagggtgattatgtcacatgtttagtgatacaatcccacctgtgtctggattgtgtcactaaacatgcaacataaattaccatctcttctccatcccctcagcagccgcccccaccccaagctgggaaaataagcttctccctcccatatgtgggggcggccccctcctgagacctgtcatcacttagggggagttgggcaaaacctcctaggaaggtcctggacgcctccaccctgccccacaaggctccgtactcccacctgcctgggcagccctcacacccatgctccctcctttaggcaggcccagaaaggtgccccttcctgagggtgttgggggatggcggcagagagacagctggtattaggagcttccccatcctaatgtgcaggaccaagttgcccgctctgccagccaggggctccagccatgctggcacaggcatctcagaggtgtgagatgaactccgcctcatgcaggatgcccagggctcggaagcagtaaggaggatgctacagaaaggaactgcagaaagaaaaaaagccacatggttaacttttcccctggagggcaaaggggtccggctctcaaaaagaaaagccaggcacagatcccaacaccaagtgtaaggcagcacaaagtgggtctgaaaccccaggac

SEQ ID NO: 4073 - DNA, 2300 bp, Homo sapien
taaaccgcagaagttaaaagccttttttgttgttgttagctaacaatggaaacttttttttaagtgtttccctccctcgtcttgccaagcaatagaaaaaaaaaaaaaagaagaaaagaaaaacttgttccgctgagttcaaccccagacaggctcacaacttccttcctgctttcctcccccaagcctccgcctttctccctcctccctcctccactacccccccccccaacaacttttctttctttcttttttttttttttaatcgtgcattgaacaaacactgaagtagcccggagcagacactgacaggggcagtatctccacggtcgaaaagggcgtgcagggccggcttggcgtcgccactgccgggatcgccgggcccctgaaccgaagagctttcccccctctttcgcactcctcttttttgtcttccatagcttgtgagaaaataatttctgagcatttttacttttaaagccatctcgtccctacgaggtttgcgcctctgggcatgtagtctacacaggacctgagaatctgagaaactgcaggtaagtttggcggccttttaatggctctcgcctctgaacaaccctcttttccctcactttctgctctggagcgaatctcggcgttcctggttccgaaacagggcaaaggggtgggctggggaggcagggaagggggtttgattttggagggtgacatggagtggcggtggggagaaaatagggagagacgaggtctccgcatttctcctacccgccttccgggccgctcactccgcgccgcctccctcagcgcgctccaggagtccccaggctggggtctcggggcggctctgctggcgccgggcgaggctgcccgggatgcggagaagccctgcgctccgcggcgctgccctggggtgttagagcgccggctcctgggaggtttgcagagctagaggctctgtgcacctagggctgctgcccggctgcagccatgcacgcccctaagttcctccgagtgggcgcgggtccgggagcccgcaggggcagtcgcgtcctcggcaacagggcgcgctgagagcggactcgctccgcgcgcgtgcggcgtatacacacacgcgtgtatacacacacactcacagacacccccccataggggacgacggcaggggggcagcaagtactggttccggtaaagagaacgtgtagaacctcggtgcgcccacactcacaaaacacttgtctagggataggcgacaaggctagccctgaaaaatgcttcggctgcggccccgctgcccgcccaggccttcgtaggccgagagacacagccccaaggctagggtcaggaaggtaaacggcgggcacgcgggcgccctcccagatccgggcgctggcagcggctcgggcaaggcaggtcccgcttaggttccctccgagccggtcggtctctgatgccccgagagggtggagcagggagaccctgaagcccagggcgagggctgccgggttgccctggatagccaatgtttgctcaggctggggagacccggagacggtggctggggtgtcctcagcccgggagagctgagtcagccgcgccccgcacacagcatacttaggagccaaggacttggacctcgcttctcgccggtccgcgagacgagtattaggattgggatttgaagggacctcataaagcgcatcgcagcctggggcgaggtggggggcggggaagcacacccgaaaccgcgctggcgaccgaggcagccggggcatgccctcgccgagcctcgccgtccccataggtgagatgtccggtggcgctgggtcccggatagattgtgttcccggggctctctctgggttctgcaggcgacccccaactccccccgcgcgccctccagggtcctgacttttctccttgtatctccacagccgcacggttgtttatggagctttgggcgggggctgagcccgcggtcgtgcccccagcccgctgcccaggccatgccgccccatctgcgcgcggagccgcggctgccgggcctccggggctgagccgggagcgccgggaggaggaggcgccggcggcggagcaggagcgggagccgcggcggcgggcagcgcgggacccagtactatggctgtgtactgctatgcgctcaatagcctggtgatcatgaatagcgccaacgagatgaagagcggcggcggcccggggcccagtggcagcgagacgcccccgcccccgaggagggcagtgctgagccccggcagcgttttcagccccgggagaggcgcctc

SEQ ID NO: 4074 - DNA, 2300 bp, Homo sapien
gctggctgcgttctgaccaataattcttcaggttgactgcacattcaagaagtctaagtttctcagctacggaagcctgatgatgtcaggctgtgaggtggcagtgaggtttcccagggattgggaagctaagtgtctgtgcttaatgtatgcattgctaggtccttcagtttcttccaccatgacacctgacatgggtattggcctctactagaacaaaggcccctcagacatgaactccaatgactgggtctcctgaaaactggcaactcctcttttttgcccctagggaaccaaattagggtcaaggagagggctggcttctctttcttaggaactgctcagatcctgaataactgctcagagacctgaataactctgggctctttttttttttttttttttttttttttagatggagtctcactctgtcgctcaggctggagtgcagtggtgagatcttggctcattgcaacctccacctcctgggttcaagcgattctcctgcctcagcagccacccaagtagctgggattacaggagcgcaccaccacgacctactaatttttgtatttttagtaaagacagggtttcaccatgttggttaggctggtctcgaactcctgaccttgtgatctgcctgccttggcctcccaaagttctgggattgggcttttttttaaaaaagccccattgagggtaggagggtaattaggttcaattcttccatttctaatttttaaaaattataaagttttcaacagtgtgtgattctcaggtattcttggctagaagatctcttgatttcagatttagcatgagcctcttcctgatggagcagcaggttgctttgctcacttaacagtattgttacataaacaagcaagagatctgtgtgctacaagtaaagtcaaaatttccatctgaatttcagctaatcatgatataaggaccaattcaggctttggatgtttcagtctcctgagccgtgcagctgtgttttccctcctttcactaaatgctgtagtttaagatttagagaattatgtaaaacacactggcagtgccagggcttagaaggggtaggatcccctgcccagtaatgttggctgatgttctttctcccttttttgctgatagtaggggagaaagtttcttgaaaatgatccagtctacaggagacagtctacaagggtctacaggagcaagaggggtttcagacgttacccaagccttcttagtttcaggactatgctttttcttaaaataattctgagaattaagtgcaaaaatatgcgaatgtcacatgtgccgtgtgcatttataaataaatgtgacatgtaaaggtgtatttatatatctaccaattgcactgcaaaaccatccccagctcatagaccaaccagtcttccaaaatactactgtgatgcacttaaaacctgcaactctgcaggaaggtgacctcaatgtaccttctttgaatttgcagaactgtgtacaagaacacaaactgtttatacaggattgtagccttttttaaatgctaaaaaggtccccatgatttgctttgtttaagacatacactcaaaactttattaaaaacatttttcaaaaatagtttcataaagctagacacatcagcaagcctcgattgaggggtggaaaatgaattgtatatctttaaaccgcagaagttaaaagccttttttgttgttgttagctaacaatggaaacttttttttaagtgtttccctccctcgtcttgccaagcaatagaaaaaaaaaaaaaagaagaaaagaaaaacttgttccgctgagttcaaccccagacaggctcacaacttccttcctgctttcctcccccaagcctccgcctttctccctcctccctcctccactacccccccccccaacaacttttctttctttcttttttttttttttaatcgtgcattgaacaaacactgaagtagcccggagcagacactgacaggggcagtatctccacggtcgaaaagggcgtgcagggccggcttggcgtcgccactgccgggatcgccgggcccctgaaccgaagagctttcccccctctttcgcactcctcttttttgtcttccatagcttgtgagaaaataatttctgagcatttttacttttaaagccatctcgtccctacgaggtttgcgcctctgggcatgtagtctacacaggacctgagaatctgagaaactgcaggtaagtttggcggccttttaatggctctcgcctctgaacaaccctcttttccctcactttctgct

SEQ ID NO: 4075 - DNA, 2300 bp, Homo sapien
gggttccccaaatagttaaacactgaaggctgggcacggtggctcatgcctataatccagcactgtgggaggccaaggcaggcagataacttgagttcaggatcaagaccagcctggccaacatggggaaaccccatctctactaaaaatacaaaaattagccagatgtggtggcacacacctgtaactccagctactcaggaggccgaggcaagataattgctcgaacctgggaggcagaggttgcagtgagccaagattgcggccactgcactctaggctgggcaacagagcaaggctctgtctcaaaaaaaaaaaaaaattgaattaccatgcgatccaacaattcaacccctatgtatgtaccctccccaaataaaaatgggctctcaaacaaatacatgtacatgcatgttcatggtagcattattcacaaagccaaaagatgcaaacagccccaatgtccatagatgaataaactgtggcatacatgatacacacacacacacgcacacacatatacatatacacacacaaacactattcagtcataaaaaggaataaagtctgttacatgctacctgaggatgaacctcgaaaacatgctaagtgaaagacacaaaagtccacacactgtgattccgtttatatgaagtatctaaagtaagtaaatatagagacagaagtagactggtaattgccaggggctgggggggaagagggcattgggaagaaacttctcaatgggtatggggtttttctttcggaatgaggaaaatgttttggaactagacagaggtggtggttgcacagcattgtgaattcactaaatgccactgaaatgcccactttaaaatggtaaattttatgttatgtgaatttcaccttaagttaaaaaaaaaaaagtaaaactactcagacaacgccaaattattgacaatctcaacctaccccacagaccccaaatcctggaaccacaaccccctaggccaattctcaggtcaggcagcaatttattcctgttcaattttatgcagagctcctggtggctctgaagcgccctagggaacagaccaggaacattctcatggtgttagctcacattgggccattagtgctcctttaatgtgagaacaaccgggaggaggaggggatgtggacccaaaactacaagaaagagtgtcctcgaagcctatgtcctaccgccccacgctgctgccaggcccgcaggaagatgacaggcccggcctccactccttctaaggtcgtcgcttagttccgacgtcgggatgaccctgtcatccacgcggcgtgaaggccaccctccccgcgcgcccgggactccaggtggggccccagtggacgagggaacgcggcgtcgcccaccgggcgtggcctgggcgggcgtggggcggggcctgggccggcgccgggtccggccgggcgctcagccagctgcgtaaactccgctggagcgcggcggcagagcaggtgagcgggcggtgccggggggtgcccaggccagggccctgtcgcctgcggcgctgagggcccggggtggggctgcgccctgagggccctgccctgccctccgcacgcctctggccacggtcccttccccggctgtgggtctgcggcccctgcgtgcgcagcgctcctggcctctgcggccagcgcgggggcggagagaggagagtgcccggcaggcggcggctgggccggcccggaactgggtcgtggaaggatcgcggggagcggccctcaggccttcggcctcactgcgtccccacttccctgcgcccgcctgccgccgagccccggctgggggtgggcgcggcgcgagcggttaaagggccggtgcatttaaaggagcggtgcacgtgggtctctgaggcgtgtagcaggcgggggcgttttgttcttcttctctctcgccggagacctccgttgcgccgagtccattcggcctctagcaccgggtcctgggcatgctttccccgggaaggaggcgcgcgggggctctgcccgcacgtgaggggcagggccgcaggctcaagcctagagccggtttctgttagcagcggtgtttggctgttttatcaggcatttccagcagtgaggagacagccagaagcaagcttttggagctgaaggaacctgagacagaagctagtcccccctctgaattttactgatgaagaaactgaggccacagagctaaagtgacttttcccaaggtcgcccaggtacgatatagcagagccaggcttcgaccccagtgtcctggcttctagatctgc

SEQ ID NO: 4076 - DNA, 2300 bp, Homo sapien
gattgtaacgttagaaagagtaggatatcgttgggagagccacttagttgtgtcctttctctcccgatcagggcagaacatctgaatttgcctgaaccctgttctctgttttgcccattatagaattaaaaaatgtctctgtgtggactgttttcttgcagccagtcttaatcctgcttgctgaaatttgagctcacttctccatgttctccttgagaacggaaccatcgtccctaagccctgagtgaaatcacaccagcttaaggccactgctctgccactcctcagccttttcttgtttgttatctccgggaagttttgtacactttggttgtttcagtttctgttcatgagtagtcttctttcttggctgaacgtctagattgggactctctctgcagagaaccggtactgaagcaactgtcattttcagtttttgtttcatttggctttttctttagctgttcacctcattagcaaggcagcccatgaccttgacttgccacagttccaaaacacaaattcttacagatcggtttgtgctagtgtctggcaggtgtcctgccctccctcgttacctcctcatttgtgcctgcccaccttcccagagcctgcgtcttctcagatgcttaacacctgtttagcctctctagttcagagctacaaatttacatgcttgattctgtggggcagaaagttcaaagtaatttcttcctctgcaaattcccagtatcttagtcacacgcaaagagagtgtccctgtgcactgactcctctagctagtgatttgtcagccaaaaatgtttatttatctcctggcctgtttcctcccatatcagtatggccacatgaacagaattgagtgacctcctgagtccctgtattaggaaggggaaagatcttttgattcattaaccattaagttgattcattaaccattaagtcttgggcctgcagaccatagcaaccttccttccttcatttatggtgcttcatccagctccaaatcttctctactttgtcctcacaaacttttcatatgccctagtagctcatagactgctccttatatctggaaagcaacattcaaacttctcatttctggttccaaaaatccgtgcattacatggataggctgccgtgggggacattctgcggccctcacgatgtggtttcccacagagaagccaggagaacgaggaggacggtgaggaggaccctgaccgctatgtctgtagtggggttcccgggcggccgccaggcctggaggaagagctgaccctcaaatacggagcgaagcacgtgatcatgctgtttgtgcctgtcactctgtgcatgatcgtggtggtagccaccatcaagtctgtgcgcttctacacagagaagaatggacagctgtgagttggggggctggggggagcagggtggggtgagggctgagttgccagggggtggggggcgcagcagcctgtgttggtcactgtacctgcagctccacaccagcagcggtaaagagcagggatgaagaaccgcccaggttcatggcctggctcactgcctcctggattgtgacctacttgggcatgcttttaacatccctatgcctcagcttccttgttcgtataatgggttgataacgcagttactgggagaattaagtgagttaatatgagtgaagggcttagaagagtgtctactgcacgtgagtgctcaggcaagctggatcctgctgcagaaagcaagctcttgatcctgggcatggctgtgccactgatccctgtgtgactgcaaacaaatcacttcctctctgagtctctgcttccctgaatgtgaaacaaggtggttggaccagatatttctcagctcacttccagccttgtgaggaagacttataaagcctttcgtttattttagtaaaatacatgcagaggcagcagcgtagaaaaatgagaagcttcctccacttcttccccctcccctttctgtggtcctcactgctaagcaccttctgtaaacttttttttttttttttaaagttagggatttttgtttcatttcgtgtgtgttggttttttttgttgttgttgtttcttttaaagaaaggaataaggccaggtgtggtgtctcatgcctgtaatcccagcactttgggagactgaggtgagaggattatttgagcccaggagtttgagaccagcctgggaaatgtggcgagaccctgtctgtacaaaaaatgcaaaaattagccaggtgtggtggtacatgcctgtagtctcagctacttgggagactgaggtgga

SEQ ID NO: 4077 - DNA, 2300 bp, Homo sapien
gatgctccagtgtccagaaggttttctttttgcccacaagtatatcagggatgggatggtggacccaggctcctccaccaccagactgccttacctgagccctgctggccccaaagatatagaaggcaccctggttccctgtgctcacctggaccactgcctgcatcagctgggtcaggggaggatgggcagcccccacacctgcttcccaggggcaggttgcctggcggctctgattcccttggtgccagctgctgagaaccttactgccatttcagttgagcccacctagctctcatataaatacatgttccctgagggcatcttaccatcccatgtgaccactccagccagacaggggaggcagcacggcctcggggcacagcactgctccaggagtcaggaggcctgccttctggttcactcactaacaggtgaggtgatctaatgggggtgagaacttctgcccttaacacctcaagagctgttgcaggaccagggaagataatggggtgtctagcgccgttatccgactggtcctcgaacaagctcctgtgcccagggactagaccatgactcacagctcctgtccacaccagggatcaccacgctcaccctcccctccatgtcctgcagggcttgtgtctgaccctcctgctgcttgctgtgttcaagaaggcgctgcccgccctccccatctccatcacgttcgggctcatcttttacttctccacggacaacctggtgcggccgttcatggacaccctggcctcccatcagctctacatctgagggacatggtgtgccacaggctgcaagctgcagggaattttcattggatgcagttgtatagttttacactctagtgccatatatttttaagacttttctttccttaaaaaataaagtacgtgtttacttggtgaggaggaggcagaaccagctctttggtgccagctgtttcatcaccagactttggctcccgctttggggagcgcctcgcttcacggacaggaagcacagcaggtttatccagatgaactgagaaggtcagattagggcggggagaagagcatccggcatgagggctgagatgcgcaaagagtgtgctcgggagtggcccctggcacctgggtgctctggctggagaggaaaagccagttccctacgaggagtgttcccaatgctttgtccatgatgtccttgttattttattgcctttagaaactgagtcctgttcttgttacggcagtcacactgctgggaagtggcttaatagtaatatcaataaatagatgagtcctgttagaatcttggagtttggtccgttgtaaatgttgacccctctccctgcatcttgggcacccctgggataacttgtgctgtgagcccaggatggaggcagtttgccctgtttgaaggaacttttaatgatctcgcctctctgcacacatttctttaactagaaagtttcctaagcaaaggagttaggagagcagggtggcctgacatctgccagccctgagctgtaaggctgtggatgctgagcaggtccctggactcagttgtgcacggtggcacagacactgccaggtggttgccaaaacatccagtggttccttcagcaagtgttcaccctctgcagaagcctgtgagggcctgagctcagaaaccactctcctttccttctctggctttggccctgggcactgtggtgggagagtggacagtttggctttgccttctctgtacatcaatcatgggttgcaaagagaatctcagaagtgcctcttcctgagcacagtggctcacacctgtaatcccaatacttcgggaggtcgagtcggaaggatcacttgagcccaggagtttgagaccagccggggcaacatagtgagactttgtacaaaaaaaaatttaaaaattagccaagcatggtggcatgcatctgtagtctcagctactctggaggctgaggtgggaggatcacttaagcccaggaggctgaggctgcaatgagccgagatcaagcaggtgttaggtatatcagacagctgagaagacgcaagtgtgccctggggttcaaactggtacccctgtctccctgttccaggaataacatgagtgccgggacaatgcatctttattatgagaggaatgagaattgtgtatcttgacatttgacaggagcttgctttcccccaggctgtttgaggaagggcagaggaaaatgtggtgccctaagaaggaaggacagaggaggccgaacactggcgggtggaatcccactgattagtagt

SEQ ID NO: 4078 - DNA, 2300 bp, Homo sapien
accctcctgctgcttgctgtgttcaagaaggcgctgcccgccctccccatctccatcacgttcgggctcatcttttacttctccacggacaacctggtgcggccgttcatggacaccctggcctcccatcagctctacatctgagggacatggtgtgccacaggctgcaagctgcagggaattttcattggatgcagttgtatagttttacactctagtgccatatatttttaagacttttctttccttaaaaaataaagtacgtgtttacttggtgaggaggaggcagaaccagctctttggtgccagctgtttcatcaccagactttggctcccgctttggggagcgcctcgcttcacggacaggaagcacagcaggtttatccagatgaactgagaaggtcagattagggcggggagaagagcatccggcatgagggctgagatgcgcaaagagtgtgctcgggagtggcccctggcacctgggtgctctggctggagaggaaaagccagttccctacgaggagtgttcccaatgctttgtccatgatgtccttgttattttattgcctttagaaactgagtcctgttcttgttacggcagtcacactgctgggaagtggcttaatagtaatatcaataaatagatgagtcctgttagaatcttggagtttggtccgttgtaaatgttgacccctctccctgcatcttgggcacccctgggataacttgtgctgtgagcccaggatggaggcagtttgccctgtttgaaggaacttttaatgatctcgcctctctgcacacatttctttaactagaaagtttcctaagcaaaggagttaggagagcagggtggcctgacatctgccagccctgagctgtaaggctgtggatgctgagcaggtccctggactcagttgtgcacggtggcacagacactgccaggtggttgccaaaacatccagtggttccttcagcaagtgttcaccctctgcagaagcctgtgagggcctgagctcagaaaccactctcctttccttctctggctttggccctgggcactgtggtgggagagtggacagtttggctttgccttctctgtacatcaatcatgggttgcaaagagaatctcagaagtgcctcttcctgagcacagtggctcacacctgtaatcccaatacttcgggaggtcgagtcggaaggatcacttgagcccaggagtttgagaccagccggggcaacatagtgagactttgtacaaaaaaaaatttaaaaattagccaagcatggtggcatgcatctgtagtctcagctactctggaggctgaggtgggaggatcacttaagcccaggaggctgaggctgcaatgagccgagatcaagcaggtgttaggtatatcagacagctgagaagacgcaagtgtgccctggggttcaaactggtacccctgtctccctgttccaggaataacatgagtgccgggacaatgcatctttattatgagaggaatgagaattgtgtatcttgacatttgacaggagcttgctttcccccaggctgtttgaggaagggcagaggaaaatgtggtgccctaagaaggaaggacagaggaggccgaacactggcgggtggaatcccactgattagtagtgcaggtcagagacctgggatggggggcattgccgtcatggaagccacagcggggagcgggtaaagcagacagggatggtccctgatggtgacaactcgcaagaggttaaggggaaagaaaaactgaaaagcttattcaatttggcaattatggcagtgtttatcttcagaagagcagttttagggtggggtttccaaagatgggattggacatatattttgaatcattaagcttgaggtctttcaaaggcctggccaagggttgctgggtggagaccacattcagaggtaaaggcagaaattgggggcccttaagtagacagcgagggaggaagaaatgaaggggcctggtgatggttagggtgaagtgttaagactgagaaaacaaggacatgtgagaagacgagggaagagcattggagagaacaaagacactggaggagatgctacttggaggtccccagagagcagggagacaaatgaacccagaacacaaatggcaaagaagaaaaatgagagaatttgtaaaagacagcattcgaacatgccgaacaagagcagggtactggtgttcaaacacctgtatctcccccgtgtaacccgtcaactaatatctttccatatttgctccagatttgtctttagaaat

SEQ ID NO: 4079 - DNA, 2300 bp, Homo sapien
gaggaaacagggagggaacagcataaccgtgtaagggaacagttactgtaggaggaagcaacggccacccttgaaaggccttgaggcttggtctttttctcctatgtggagaaagggagccagctgacctaatcaaggcaagttgtcaactgtttggggcagttacttgaaactttagccaaaataactccttaattgtcctttaaaatttactttgtatttagtgtggtggagatgggggaggcagaacatggactgcggggagggcatgtgaatgtgcagagaggagcacccaacagccgaccagtgcccagccacagacgccacaaggcacagtctccattctccttggaagaaaggcctcccctacccctaggaagaacggagcctgacacagagcttgtgttcgcccatatcacacacacttagaattctgttcttgggaactcaggcagatctctggggagccgatgggggactgtgaaattaggttcacttctggatttcattataataaagcaggcccctatccccaattttaggcatcaacatagaacagctaactttaaatttttccaagtgataatataaaacaaacgactttcaattaagttaaatgtcaatatttgtgaaccgaaaagtacctgtatcagtttagaaatttatgttgcgaaggtgaaggactcgcgcccagaagacaggtctgtgcctttctccaaagatgattttgagggcttcaatatttaaaggggaaaagcaggctggagggggaagatggaaggtatgttcacattattgaagccacatgttgcgataaagggagcaggtagggcaacagttatgtatttggcgctcagtaaatcggcactttacacaagataaggtgaacatagagtggagatacttcacctttaatctgtagctatctgcttaggaacaaaaggaaaggcagttgcatgactcagctttcagtttaattttttttccttttggcagagtgaattttcgtttcacaataccaaaaaaaaaaaaaaaaaaaaagcggggggaggctcagaataaggaacaatcctttggcttgagtatttcatttcatgaaaaactaaattgttatttcttttttccacaagaacgattaacagagctgcagaccagtgtttggggtcatctgagtggaaattgtcgagccgactttggctcatacgttccttttctcgttaaggagggagtgacggggcaaatctgcgtgctgctggtggcggtgcctcccagggctgctcggcggggacgccgagggctgcacccgagctccatcccgtgttggctgcgcgccctccaaaaccccggctgtcagcgactgcgggcacctgcacgccgacgagaccggcgggcggacagcgactccggtgagggtactatctctctaccctcggggcgcgggtggcagaggcttcctgttttgaggatggcgccacacaaaacaagcatccttagcctgaagggccccggccgaagggccggaagtggaagtgcgcggccttgcccgccgcgtttcccctcctcggagtgctttttgtggaccctgggcaaggggctcttgctacatagagaggagcaaagaacaggcatcgcccggtccttaaagcggcggcaccctccacgccccgcagtcgcgtctgcttggtccacagcctcccctcccaggcccgcgcagaggcccagcaagcaccagtctggaggcaacaagcacgcaggggtgcctttgcggccacgcacactgcatcgcagtgaaaaaggctcccgttctcaaggcgcatgcgcgcaggccagcaactccaaagccaggcctccagccccggtttgctagagagaaaggtagccgggaggtggggaaaaggagaacaggagggccctgtccgctaaggtagcctcccattggctcctcttgctccgctctcggtcgcgattggctacgggccgggagcacgggccgagcacgctcccacgcgcagagcggcattcggcaggcggacggcggtgcagccaatgggagcggcccgcggggcggggcttgtgagctggggctcccccggagcgggcgagttggtaaacagatccggagcgcgtggcgggcgtcagcgcggtggccagcgcgcagaggcgggcgcggaggcggctagaaggtgaccgcggatcccagcttcctgcagccaggtaaggctgccacccgccggcccgccgcgtgcccaggcgccgtctggctgcggccagagctggggtcaacacccacctcagccctt

SEQ ID NO: 4080 - DNA, 2300 bp, Homo sapien
gaggtttcctgagtggccctgacagtgtgaatgtgggagcagtttgattttgtgtcacttaaacaagacggactgttactgcttttctggagttagaatggttcatctaagaacatacagggaaggtccaggggtggggttaaaggaactcctgaactggtggcagctaagtagttattcggagaatacttccggttccaatggcccatggaattgacatttgtggctgatactgttatgttggtttactgtagtgtcagctgtgcagtgctttagaacagggcttggcaacccttttctgtccaggaccagttaagaaatccttgtgcctttgtgtatatagtttgctgcagctccccggctctggcatttcagtgcaaaaacagtcttagcctgctacgtacataaacgagagtggctgtgccccaataaaacttacaaaaatgcagtgggccagatttggcccttggaccatcatagtttgccagcccttcgtttggtccccttagtgtagactgtaagactagactgtcttgttccaaatcctcattctgccacttaacctctgggcctctttttttttttttccctctgtaaaaaggcccacttggagtgtcaggagttaatgcactcagaatctaacttctagcctatggtttagtgttttgtccttatgagtaaccgccaaagcctacagtaacaaatatttttttgttgtgtggtgtccagcccttcactagatgttagggacacgaagacacagaccctgggaaaatcaagccatgatttgccatgttctcatgccccatgtctcagtgtgaatgggtgagcacggggagtcattcatcacaatactgtaaaaatcaaaataggtacaaaagaataagtatgtgtggccagcttcagagccagctttacttggggattaaagtcatttgcaatccagtgatccccactgtcttcacagggagggctctagttctcagccggctctcagacttaggacacacaaaccacattccagttttcccttagaaaacttctcctgttccagcagttatggtcgtggttcctggggaagcaaatgctggctgctgttgttctcctctcccttccccccgcatgctgctgcttgacttgtttggcttgttgttcaagaggaagaggagactgtgagagccctggctggggctggcctgggttcttcccctgctgtttactctgcagggcgatggcttcagatctgagtgctgcagaggagtttgctagacaacagcaaatacccttaagaagagggccacaagagtttcagccagggatctgacagtggtgctgggcgccgctgctagccaggcagcctcacggacgccacccaggcctctccatcctgtcccggagcccactgggtctgctactcggcaatcccaaatttcagaaactatattttctttctttaagaaccctgaaagcctatacctctcaaagcctcttttgggcctgtgcattctgcagatgcactttcaactgctcacaggtccgtagaaagggccccagctcagtgtccagtgtgtcctgttatctaggaatcagtctggccccaggaaaagccacttttcaggacgtggtcctcaactgcagctgatgtctagagaggagacgtctcactgtgatgcagacctggcatcagccgtgctggcaggtgtcactgtcctcccagttgccaccatcaccaggtacagcagcttcagcagtgtggtacagcctcccgggggctggggcagtgacaccgcaacctctcctcctgttctccacccctcccacctcccttcttacagggaacggggctgagccttccaggttcagggccaagggcctcacgctgaaccagtcccaacccttgcaaatgggctgtgacactgaacctgctgaccgtcaggtcagaaaagaaccaccaccacgagctagaagatacgggtcgtcattctccagaatacagaagagggtacacgcgccaaagcacttcccatgagcatttttattaaattgaaacaagttgttgattcgataattacaagacttgtacaaaaattcacagcgcctgtgaggagcctttggctggaactggtgacacctgtgcctctccggacagaggaaggaagtcccaccccgccttccagcagcagcgagcctgtgtctggcattccctgttccgctgctcccaccctcactgtggggcagcagttctttaggaacattcagctgtcaaaggtgagaaccagccccacaggcctgggcctcgc

SEQ ID NO: 4081 - DNA, 2300 bp, Homo sapien
gatacttattttgttgcttccactgccctttgcttgtaagtaaaacaaatcataacttgctagatactccacttaaaactgaattgaaggccgggcgcggtggctcaacgcctgtaatctcagcactttgggaggcccaggcgggcggatcacgaggtcaggagatcgagaccatcctggctaacacggtgaaaccccgtctctactaaaaatacagaaaattagccgggcaaggtggcgggcgcctgtagtcccagctgcttgggaggctgaggcaggagaatggcgtgaaccccggggggcggagcctgcagtgagccgagattgcaccaccgcactccagcctgggcgacagagcgagactccgtctcaaaaaaaaaaaaaaaaaaaaaaaaagtgaattgaagttgtgtgtgatgactcatgcctatagtcccaactactcaggaggctaagacaggaggatcattttgaggccagcctgggcaacatagcaagaccttctctttaataaataaataaagtgcattgagatgtttggatgatttttgtcatcttgcctctctgctggtttcacagtatccatcagtgatatgtagtccatttatagagatggtaactgtacctctcttagattgttatagaaaaataaaaagcactccataaagttaactattgttattttagtagtagtttaagtatatgtaataataactcctaaaatttacctttaacttgtacttttttagtcattgaaaaactccattttcaaggattggtagagtttgccaaaccgaagatgtcaggtagcttaatgcccactagtgacccttgcaacagaaatttcaaggcagataccaagttgcagtgggatgaagagcaaaaaactctagaaaccactcttttagaaaatctaaatcaatcattttattcacaaggttagatgcttcgtctgttgcttctttttttgatcactaatgtcaatacagaacagcagtaatacaagtaattttttaaatatttactatgtctcattaaaattgtcattggtaagcaaatgaatcagctacccaaatgataaaacagttatttaaaataaaattggagataagcattcatctaacatagcatcttgtatgcagtgagtgttacgaattttctttttgttaaaatgaatttttatcaaacgtttcttttttccctctaaaagtgtgtggattctcatgccatataacttgtgtaaacaaagctccaaccacttgtccagttcctcctgaacagacaaaaggtcccctgggtatagatcctcagaaaggaataggaacagcatatgaaggtcatgtcagggtaagtatgattaagttgggtttagattaatcctttaagatttattaatgaattaaaatcaaatccagttagtttaagaggatagttcttgatggaaaattaaatgaataaaattcatctaataattttatttcatctagaataatgatttgcaaacaaaaacctagcttttacatggaaataagttataaaatgtctcaagtttttccatattgttcctatcttgtgatgaaatcttcataaaggagtttgtggcccctgctcttgcaagagaggtggcatatggttatgaattatgagctattaaggcatagtcttgttatcttgggtagtatttacaatgtaagctgaacttcatcttacaccaagtttgacttttatgctatttagaaagaaacccatgagtgttattttaatgaaatatgagtgaaagttaaaatggtaccattaaaatgtttctcagaataaaaagtcattctgtatttgaagaatgtgttctcacattttctcatagcttaatgatatgtgtctcatctgctactttaccaaccagaatggcagacttataaaacgtgtacattatctgtaggtcttcaccatgcaattacatatgtaatttaagggatattttcatttgagttgttttggctgtttgtctgtctaaaacaaaactaagattcctaagccagctggagtgaagaaagggtggcagagagcactggctatagtgtgtgacttcaaactctttctgtacgatattgctgaaggaaaagcatctcagcccagtgttgtcattagtcaagtgattgacatgaggtaagagtttgaaggtaaaattatttgtatcattgcaacataggaattttaaagtttctgattttcaaaaattgtgttgccatggtttatttaaatgaactaatttcgtattttctaatttgctaatattgctatag

SEQ ID NO: 4082 - DNA, 2300 bp, Homo sapien
tgtggtgtctttttgtcttgcaaaagttttgattttaaaatagtcagatttatcagtctttttctttatgacttctgctttttatgtctttttaaaacagttctctatgcagagattataaagattttcttctatattttcttctaaaagtttttaaattttgcttttacttgtttaggaccttaatcaaactgatatatattgttatgtataatgggaaatgggcttctaatgtctttttcccatgtgaacaagtgaccctgctatatttccccccatcgatttgtaatggctatttctgctttatatgcatggatctgtttggatactctcaattcttttccattgttcttttggtttttcctgcattggcagtaaattgtcttaattacaattactttcactctaaaataattcctgatacctggtatggtgagccatcccacataccttcttccttttcttcttgaccttttagtttttcatattacttttaaggtcagcttgtcaaatttcacatggggcttttgattggaattgcattaatgtatagatctatttgaggagaattgacatctttcatgatactgggtattccatctatgaacatggtatacatattagggattctcttatatccttcaataaagtttcattattttcagtgtatttcatattgcttgttagatttgttcctaggtaccttaaattttttgttgctgtggtgactgggattctttttaaatacattttcttactgtgcattgccttgtctttataaactctagatcttgtatccagcacccttgcttaattttttttaattctaataacctttggactttctatgtaaatttgacgactttgtttcctattgttttttattaacttttgtatagattttcagtgttcctctcttttatctttcatatgtatcttttcaaatgttaaattataagtttggtttaaaactttttcaagctatttaaaagtaaataaaatctaaattagagctaaactcacaaacagaaaactctgagaaactcaactgaattttgttttaaggctgtagtgcttataaaatattctgtttttggaggttgtatggtaacaaagatagattgttgtatagtaacaacaaagatgaggttgtataataacagcaaagaaaggaccatccatttttcttataatattttaaaatattctgttctttatacaaagactagcgttttccttttatttttttgcttggcatcctgaaaggaagttactttccatgtcttttttttttttttttttctcactactttgctgattaagcagtggctcttttttccccataataacatccagtggaatgattggttctttgcattcaaagaaataatattacaataaaaccccataaaagaagaccatattttacatagctacctaagaaagatatggtatgtgactaaatttgtattaaagtcagaattccaataatattaaataattacaataaaattaaataattcccttctttggaaattaatttctgcacaaaaatcccagtgtcagtctctgtctatgtattcacatccagagctgtgttctatatatgtaatatatgttctatgtatgaaagttgagtagttaaaagaatcttctaaatattttattataaatcattttgagatactttttagaatatggcaaattcagatgaatgtaaaaattaatatcctcatatttatgtaggccacatgctatggctttttttatttgaatcatttgatccaaatgatttatttttatatttccagactaaagtaacttactaattgaacaaatatttcattcgtagatattgcaggcagagatttaaattatcaacactatgagaattttagctttattgaggttttctttattattaattagtagaactttttgccttattgatgttttgttttatttattttggcttctttctagttatatttgaaattaatggagtgtttcatgacatttatttccttttttgctcctgggttcagactgtagactccactccactttcagttcacacaccaaccttaaggaaaaaaggatgtcctggttcaactggctttccacctaaggtactcaatctagttataagcatagtgtgttccaaaaaaaatgaattttatctgctctatgcatttgctgtgatttttttgatattatttcttcaaatttacaaacagaaaaacttataaaataaattatgtgtgaatgcaaataatcaccaataggaaaggtagggagag

SEQ ID NO: 4083 - DNA, 2300 bp, Homo sapien
tagaaaagcggccagaaaccaaccaacataaaattctaaaagcaaccagagaagaaagacacattacgttcaaaggcatgaaacttcaactgaaaactgacctcccaacagaaaaattaaaaacggaattcagaagaaaaagaatgtcctaaaagtgctatagtaaaataactgccaacttacagtgttatttacagcaaaaaatgccttccagaaatgaaggcaaaaattcagaatgtggaaaactgcaggacaacctacattctttttttttttttttttttttttttttgagacagagtctcattctgtcacccaggctgcagtgcagtgacgcaatctcagctcactgcaaactccacctaccgggttcaagcaattatcctgcctcagcctcctgagtagctgggactacaggcacatgccaccacgtctggctaatttttttttatttttagtagagacggggtttcactgtgttacctaggatggcctcgatctcctgacctcgtgatccacccgtctcagcctcccaaagtgctgggattacaggtgtgagccaccgtgcccagccaggacaacctgcattcttcaagtcaaaagaaaaataaaggtgttgcaggggaacctataaataaaatagacttaaaagatgtatcgggccaggcatgctggtgcatgcctgtaatcacagtaatttgggaggccacagcgggcagatggcttgagcccaggaatcttgagaccagcttgggcaacatgccaagaccccatctgtacaaaaaaatttaaaaaataaaaaaataaaaaattagctggatactaattttttttagctgtaatcccagctactagggaggctgaagtgggaggattgcttgagcctaggaggtggaggttgtaataagctgagatcacaccactgcactccagcctgggtgacagagtgaaaccctgtctcaaaaaaaacatatatccagccattaagctgggttttcttattggtatcatgattcagtttaataaacaagttttgtgatatgttgaagtaactggaaacttgaactattactatttatgtgatattaggaaatttgtgaaatttgtagtatgatgctatcgtggttatattttaaaagagagatccttattctttagagatacatacagtgatatgtatggataacattgtatgatgtctagtatttgttcccgaatagtacaggaggaggggataagagaacaggcgtataggccaggcgtggtggctcacacctgtaatcctagcactttgggaggccgaggtgggcttatcatctgaggtcaggagtttgagaccagcctgaccaacatggtgaaaccccatctctactaaaaagacaaaaaattagccgggcgtgatggcgcacatctgtaatcccagctactggggaggctgagacaggagaatcgcttgaacccgggaggcagaagttgcagtgagttgagaatgtgccattgtactctagcctgggcaacaagtgcaaaactctgtctgaaaaaaaaaaaaagagagagagaacaggcgtacaagtgaaacaagattgatgttgaagtaatcattgttgaaattaggtagtggggctcatgggaattcatttttattttccttttctgtatatgcttgaaattacatgctattttaaagaaaaaatgacataaagacatttttggagaaaaaaaaaagctattaccaacagaaatgggcaattcttaagccaagtagagaatgttcacagaaccaagtcactgtaggttgtaagggaaaagcaaaggtagcaggagaattcagagtacttgatatccaaattcagtgagcaaaagggattattataataagacaggcatttttgggtagatgatgttgagtaatcaaatttgacaatacctgtctgaacacctcgaattcttggtcctaaaagtcatgcatgtcttaaaactatctttcagcttactactttgtatgagaacttaagtatacacaaccagcagttagaagaagaggttaaagatctagcagacaagaaagaatcagttgcacattgggaagcccaaatcacagaaataattcagtggtgagtgctcttttaaacgtttttttgtggatgattgtgagtatgtggccaagttggtatgaattccaggtggctactaataatggtttttatctcatttgtcagatgtgataaataagttactctgaaaagcacagttttattactgatctgttgtgttctactgtgttttctgttacattcctc

SEQ ID NO: 4084 - DNA, 2300 bp, Homo sapien
ttggctgattgtgttccctcttatgtgaattatctgttaatattcttagcctagttttgttggattgtttgtccctctcttaacaattggaaggggctctttattttaggattatatccttgacctattatgaatattacctctcagtctatgttttttaaaaacttgtataaatataccttagctacattgggtaatattttaaaagtagtttgtgattaggagtaccaaatattcaattttactataaaattaaccaatcagaacaatatgatataataatataggaataggtaaccatagcagaatagattaggaacagatataagtatatttgggatcttaaaatatgacgaagggacatttcatttgaattgaggagaaagaatggattatttaactgttactttagacttttagtcttatagactctgtctataagaaaatagtcttcacactttaatcaaaagtaaattgtcaggatagggtcagttcaacgttagggtaccccgacgtggtggctcacgcctgtaatcccagcactttgggacgtccaggtcaggagatcaagaccatcctgggcaacgtggtgaaaccccgtctctactaaaaatacaaaaattagctgggtgtggtggtgcgtgcctgtaatcccagctacttgggaagctgaggcatgagaatcacttgaacccaggaggcaggggttgcagtgaaccaagattgcgccactgcactccagcctggcgacagagcaagactctgtctcaaaacaaacaaacaaacaaaaacgttgggcctagtaaatacagcaagtaggccaaagacacaggattttaaatatattctgcttccctaattttcaaggctttaaatatgcgaaattagtttctttggtttaacacacatttcctatgtttgtaattttaacatatagtaataaaaggaatttgaattttttcaagactctttaaatcttaatgtcaactcagtaatatccctgaaacaatatcttcattctgtaataaaaccttaatttcaaggcattcatgtgtcttgtactcactagccttcatgctaagtgctacattatcattattgtagttaggtagatgagaaaatgaaatgtcacagagattaatttttcaacatccacttacaacatggagtcagtatttgaatacaggtttctctgactacaaaacccatttttccactatgtctagttttctccctcacttaaaaataatatataatgtacacacaaatacacatgtatatgtaatacatgcttataaagcaatgtagaacataaagttataacatcagctgtaatctaacaacctacagaatctcagtgaacagtttgatgtactcttctcatcgtttctttacaccacatacatacccataaggatccatatctaaaattagttggcttctgtttattatatacacctgagaaaagcccattctgatatttttacagtattagaaatgggaagagacacatatggtgataattactatattctacgtagtagtggtttctaaatgctgatctataggctgatgctggttctaataaagttcttactgatccaaggtgaaataaggaaaacataatgataatatgaatttctttcaatgtagggactatcctgtattccaagttttttctttcattgtttttttgggggagggggtggattcaaatgttcattcttctaaaatcttggaaagctgtgttccattgttgtaggtgaagatgataataatgatgatattagctctttgcaaaatacaacaatggtaaccctgtgttgttctctgccccagtctttaaaaattttgttttactgctgtatgaaatttagaagttttgtaatgactgctgatcatcatcttacacagtttcttgttaattagcagcatatgtaattaactgcataaatatttgacccagtcctgttgaccttgggatacagtatattgatttttcacccttattagtttactgagtacattttatttttttcattcacagtacctggttatggattattatgttggtggggatttgcttactctactcagcaaatttgaagatagattgcctgaagatatggctagattttacttggctgagatggtgatagcaattgactcagttcatcagctacattatgtacacaggtaaaacagtccttcattgtacctggctgtgagttaccatgtaatatctagcaacagaggcctatttcttgccagatttattaattatggtcttggatacattt

SEQ ID NO: 4085 - DNA, 2300 bp, Homo sapien
cattgtgccactgggttacaagtgtgtgtgcgcatgcacacaggggtgtaggtttgatgacagtggtgaactgccttgactgccttcacaggctgaatcccccgcaggcagtaaccatggctagggaaaaacaggcagccgcgaggacagttccggaggagacaacaccaggctcccgtagggaaacttttgggaatggagatgggggattccatcctttgcgtgcagacccaagacttcgatggtagctcggacaagtctgtcattgtttttgtcctgggaaatgacacacgaagtgctgtaattagacacctaagaaacgattactctggagtgtgcgcgaaccgaatctggggggccggtggggagcaggtaaggggctgaaaggcaccgtctcctccagctctgtcggaagcctaaagccctctgcttctgggcgcccttaacaaacgcgccagacaggtgatgtctccgaggacgagcaggagccccccttcgcgatctgcaccagaagcctcggggagccggggccacggcgcggcggtggcgcagttcccagcctgcgcccagtcccgccgcagctcccggcgcggcccggtcatcccgcctccatatgctccgccaccgccgcccgggcctccctcagccctcccgcagctccgcattccacgctgcggcagccgcagcctcgccgcctaggcagtccacacccctcccctcgggctggcgcagccactcgggccccgagcccgcgcccccttgggggcctccgctgggcgcgccggccggaccccgcccggcttggccgccggctggggctgaggctcgggcagggcgggggcggggagtggagggcgtgtgcgcgcgcgtgtgccggggccggggggccaggccgccatattggatccagactcgtccgcaagcctccgcctctgtgcggcgggactggaggagcctcgctgagcccagggcgcgagcgcgagaggagagggaaggcgggggagggctggaagggagaggaagggagtggttgggagccgggctgccgcagcctctagtctcctcagccgcggaagcgacccctcctcctgcgccgggccgcctccctcctcgctgtggaaagatgcccttagcccaggggtgtgaagaagggggagaagtagctgccagagccgcccgcgccgccgccgcagctgctgctgcttgtgtcctttgaattcagagaagcacccccccgcctggggcgtcgggagcctccggcgcggcggcccggtgcgggtgtcggggagaccgggctctctgcccggcgcggcgcggcgcggctcggcccacgagcgaccaccgacatggagtgggctcgggcggccaagtagccgcttctccggagcccggtgccagtgccgcccgcagcccgccttccacccccggccgcgccgccggtcaggccctagggtgaagccgggaggaaaatgaagagttttcaccggaatccgttgaaaataggactgactgcaaagccttaaagaaagaaggacctcgggaggagaaacgaaaagccgcctccgggcaagacttggcgtgctccgagccgaggggctgcttcagggacctcgccccctccctttcccgctggagaaattgccgctgatgcattatccaagtggtggttgggaggatttgcagcaacatttttggttttccctcccccttctatgcattctgtttttttcctcccttttctgtttttcttcttcccgggaagtgaattgctgatgcaaatcggactttattcattaatgatgcaaccggattcgtttcaggattacgttgcacgagttgaattttgaatgaaggagaagagtttttttttttttttttaaagaagtgttgactctctagttcgttgtacttttaattattattttatttaaatatacgacttaattgtattcttttaaaaatgcattaagtatatattttatggtaatttaccctcaaaatatatgtatatgggtgaaattgaagacgcttcagttaagtgaggttactggtgtgttggatgtttaattcagcaccagcattgcatgacagttgtttgaataacaagtggtttatttttaaaaccataccttttaaaatttaggttcagataatagtaaaagtcatcataataatttaaaggaaaaccagcagaaatcgaagcaaacatgtctggagaagtgcgtttgaggcagttggagcagtttattttggacgggcccgctcagaccaatgggcagtgcttcagtgtggagacatta

SEQ ID NO: 4086 - DNA, 2300 bp, Homo sapien
ttgaattattcaagcaaaattgattgggttcaagctccttccttctctttgtgtgtgtgttttttaaaataaaaataaattctgctctctactttctaaataatgtggaaagggttatttagcaaccatcaataccctggactgtgggtggtacccaagcgctaatagaataggtaaagaactgacagcttgactcttttgttaaaaaaaaaaaaagtatctacatctcatatacttccattgtcaattagcatttagtgagacctaacatgttttaggttctcctttaaacttctttctagttatttgtaagttggaaaagcaggtatcttggagccatttctttagttaaccgtacttgaaaaagcagaagaaattgcttccttctttgctaccgcatcttatggtcaaatgaaactgttaaaattggcttcaccattaaaatccatgttgttgaagaatgtttgttgaactgaaaaaatgtccataatatattgctaattgcaagcaagaggctataaaactcttttattatgtatcatttttgttaaagtgcataggaaaaagacttgaataataaacaccaaaatattgcttattatctgtgttaggattaaacttttctactacttttagaattagacaacacacacccatataaagatgtcatggctggaaatgactgaccttttgtttgaatctaagtatcattcatgtcaagaccgcattgaaaataatgctgttcttaagccaggcaagtgtagacgttgtagatttcataaaagattcacactatttcatgaatcacaacttgaatcgacttctgttagccttcattttacgtctaggccctcatttctaattcttcctcagcttccatattatcaagatgtaagatgcaattgtggacatgaacatagaaacacaaccgcctcacaggtgtggggaaggaatataaaataattgtattttagagaacgaccataaaggagatggcaattttgagagaaagtaacagaactgcaatgacctagttttgtggtgttaatttaaatgtggcatcttccatgagaattttataaagggagctctcctaaaaccgagattcacaaaaacctggaagggccctacagggatcaggtgccctagctattcagcgatttgcctttgcttccctaattcctgcattgtgccactgggttacaagtgtgtgtgcgcatgcacacaggggtgtaggtttgatgacagtggtgaactgccttgactgccttcacaggctgaatcccccgcaggcagtaaccatggctagggaaaaacaggcagccgcgaggacagttccggaggagacaacaccaggctcccgtagggaaacttttgggaatggagatgggggattccatcctttgcgtgcagacccaagacttcgatggtagctcggacaagtctgtcattgtttttgtcctgggaaatgacacacgaagtgctgtaattagacacctaagaaacgattactctggagtgtgcgcgaaccgaatctggggggccggtggggagcaggtaaggggctgaaaggcaccgtctcctccagctctgtcggaagcctaaagccctctgcttctgggcgcccttaacaaacgcgccagacaggtgatgtctccgaggacgagcaggagccccccttcgcgatctgcaccagaagcctcggggagccggggccacggcgcggcggtggcgcagttcccagcctgcgcccagtcccgccgcagctcccggcgcggcccggtcatcccgcctccatatgctccgccaccgccgcccgggcctccctcagccctcccgcagctccgcattccacgctgcggcagccgcagcctcgccgcctaggcagtccacacccctcccctcgggctggcgcagccactcgggccccgagcccgcgcccccttgggggcctccgctgggcgcgccggccggaccccgcccggcttggccgccggctggggctgaggctcgggcagggcgggggcggggagtggagggcgtgtgcgcgcgcgtgtgccggggccggggggccaggccgccatattggatccagactcgtccgcaagcctccgcctctgtgcggcgggactggaggagcctcgctgagcccagggcgcgagcgcgagaggagagggaaggcgggggagggctggaagggagaggaagggagtggttgggagccgggctgccgcagcctctagtctcctcagccgcggaagcgacccctcctcctgcgccgggccgcctccctcctcgct

SEQ ID NO: 4087 - DNA, 2300 bp, Homo sapien
ccaggccgggagaccaataaaagcaaaagcacagggatagattgataagtgtagaggaaatcaaatagtctacttaataatgaagtgtagccatagtacagctatcttataacttgtacctgggcattatataattcttgaacaaccccaaaaacgtgtatataaaaatgaaaagtcaccatcacaaaaaacaaaagctagattttggtaatgtcttgatagtttagatcagatatgagaagcaaagcagatagaatggaagtgattgtatttgcatttaaatatggttgtgaagtggagctggagaataactactattttggttccctttgggaaaaggctgtcattcatgaaattatgagcaagtgccacacttcaggaaacaataaataaaattacaggacatttctgagggggaagaaaagcaagctagaatttgaagctgagaaatcactatcgaacaggtggttaaaaggataaagctgacatgaaaagagtaaagccaagaacttgggagttaaaatgaaatgtagatcgtatgtggaatgtggagccccttgttaaaaagcagacagaaaaatagtgcataaaataccagctcagcaggtttgtcgatctttatctctggagcgaacatgaatatacatagagaaatatttgcattttgcagctgtaccaaagcatctgtcagtagctccattatcattttcttgtgtatatattttcatatccacatagaaacatttgagtaggtaaaaatatatgctctgtgtgttcaaatatactaaaatatttacttaatggttagcattaaaagttcctagtaattgtttttctaaccccacagcttcctactagctaagggcacatttcttagttcttcctttttttctctaaaatcctgaaaataagatccaatatagccaggtgcagtggctcatgcctgtaatcccagcactttgggagggtgaggcggacggatcacctgaggtcaggggtttgagactagcctggccaacatggtgaaactccatttctactaaaactgcaaaaattagccaggcgtggcgggtgcctgtaattccagctacatgggaggctgaggcaggagaatcgcttgaacccgggaggcagaggttgcagttagccgagatcacgccaccgcattccagcttgggtgacagagtgagactctgtctcaaaaaaaaaaaaaaaaatccaatatagctaagagaagacacatagctattataaatagagatatgtgatcacctacccatccaagttttaaaaatagtcttaagtgctattccctcgaagatctgtagaatttgctttaaaaataaatatcggttgggcatgatggctcacatccgtaatcccagaactttgagaggctgaggtggaaggatggcttgaggtcaggagttcaagaccagcctgggcaacatagtaagacccgcccccccaccccatctctccaaaaacatttttaaaaaattgaccaggcatgctagtacatgcctgtagtttcagctccttgggagactgaggcaggcagattgcttgagcctgggatttcgaggcttcagtgagttatgatggcaccactgcacccagcctgggcaacagaatgagactccatctccaaaaataataaataaataaataaataaataaataaataagtattcttttttatagtgcaatgatctgtgattttatatatctgtgggtgcaattgtatctctttatgattcctaatatagtttatttgtgctcttttgtttctttatcagtcttattaaagattgggtaatcaaaccggatttttttcttaaaactaactttcatttgtatttatttactctattttatgactttggtttctatttcagccttttctgcccttatttttactgatgcctccttctgttatgggtcaaattgtgccccctgcccaaagataggtttaagtttcaatctccagtacttcagaatgtgactttatttggcaacggggtcattgcagatgcaattagctaagttcagatgaggtcatagtggagtagggtgggcctctaatccaacaagactggtgtccttaaaagaagagggaaatatggacacagacatagacacagaggaagatgatgtgaagacacacagggaaaacatcatgtaaagacaggcttggagtggtgcacctacaaggtgaggaacatctgaagctgccagaagttgtgagagaggcatggagtaattcctttcctagcaccttcagagggagcacggccctg

SEQ ID NO: 4088 - DNA, 2300 bp, Homo sapien
ctgcagcaccgccagttagcagcttcccagctcttccgcctggcagccaccccatcagtagcccagctcgctgcccggggcggggcggggagggccgggccggggccaacctcgaaggctcaggggcgggttccctgccgtccagggtgtcttccctctcccgggacgcccagggaatttaattcactcatccagcgccgctggcactgtccaagccgggggaaggggcgggcaggggaagcgggccccacaagacaccagccaagacctccgctccagaacgcatgggctactttccccaggggaaggacattgccttctccagccaccaggaaaaccgtccctgtgcactcggaatcccattgccaccaacttcgtataaactccattccggaggacacgagacagacccaggcctctgccccgtgggcatgctcggtgccacagctctcgctagagggacggttgcactctacaaatctcggggcccaccgcaccaagaggacagggaggagccaacaaaggaaaagtcctatgaaacgcaccaccaaagcaaccaatccaacaaaaaatacgtctcagggctctgttgggtcactccgttagcccttccaccctgttctggcccagcccaagcaccctccaccctaccctgtcctgctcaaaggggccctgtctaccggagcagaacactccctctccaaggctctatggctctgtaagtccctcatcctctctcttcttcttccccctccacctcgtgctctttctgtagccttctctctctctctctctctctcaatcctgactcactctgcctctctatcactgtctttctctccctccgtttctatgtctccatccctctctcttgctctccttcaagctgcctgtgtctgtgtctttgtctgtgtgtctgtgtgtgggtgtatgtttgcaggaggggcagcgaggtgtgtctgggtgcgtctcagcccctctctcccgggatccagggtgtgtgtgttggggggaagctgtggaaagggtgttgaaggaaagtgacaatcagcttcctgaagggcactgacaggccattattcctgtggcttggcaaattttctgtttgaacttatttcttgttaagggtccaagtgtactgactatggagataagaaaagaatagctctaagtagctgaagctctgtgaggtacggaagatttttctggcccagagagacttgagtatgggatttgagacacatctccacaccctttcccaggggcaattgtttaaaggtatgttgttcctaactagctgtctcatctggaatttgtgatacaaagaacaatgtatagccagtcagtgacttctggattttaatgtaaatttttgatgaaaattttaggaactgcctcttttcttaaaacccacttgtaatggttactagttggaatgtataatcagggcaactttagtctatgctctcaggtaggtatcctaaacatatgcttttgaatatacttttgaaaatagattctgacttttttattatgatgggttgacaggggactggcctgggacacctgcctgggtgtaaataccccaaccatgcgctgccctgcccagcagaagaggcgggtggacagcaggccccctttggtcagaaacacatgcattgcatagctgttctggacctgggtcctgcttgcaaggacagttccacaggcgcaccggaatgcgcctcccctttccacccgccagcattcccaagcacgcctcggcttctgactgttctgtgctttgggaggaaaactcatcttcaggtttttctccaacagaagatgatgatgacgttgtttagacactcaggaacagagattgcagattggcttaagagtgcgccctttattaaagatggtatgcatggaaagacatggaacaattttggaaggatacaaaaaaaattgcccattttgttaatagtctcattcaacccctttgctgacctcatctcctgtcactcataaccaaaggaggcgggtcctggagccctgtccaatcagggacattgacgtgggaactgtccaatcaggagcgcagcttgagaggcggagggggtttccgggatctggcggggcctttgtcttgtgctccagctggagctttggtcccgtattctcggctatttatccccagctgcgggaggccctggtgactctgctgctgcagtgtctggtttccctgtgacctgcaggtactgggagttacatagctaagatgccaggacaccccgaaagccggaaaacggtgagagttc

SEQ ID NO: 4089 - DNA, 2300 bp, Homo sapien
agtcctttgacataaaaccctgagtacacttcactttggtatagcttatatttgagaagctgttttccaaatttaacatataatgtgtaggtagatatataattttagagagtggacatcactattggagatacaaatttgagtctcaggaggtgaaagttggtatttaaagccacacttatgaatgaggtcacctagggaattgataagaatctgagaagtccagcagttagaattgtgtatacagcatcagaaatcatgaaagtgaggaggacccagtataggggtatgcaaagggggtggtcctgaagttgggaggagaacaagggatttctgggtatcacattttacctgcttagttgagaggcaaataaccctctcctgctcctacaagtagccgatctaggaaaaccttctcatctttaaagcagaagaatgagaaaaataccagcatgagaggtccagtgttataagaagaaaataggtaaaatgaataggtaatgcaaatggcaggtcaagagcacttagttgaaaaatacaagacactaagtgaattttttactaaatatttctacatgaatttaaaaggccaggatcagtggctcatgactgtagtcccagtactttgggggatggagtcagaaatatcattagaggccaggggtttgagatcagcctagtaagatagcaagaccccatctctacaaaaaaatccaacaccaaaaaccaagtgtcgtggtgtacgcctgtaggcccatctacttgggaggctaaggtgtgaggattgcttgagcccaggagattgaggttgtagtgaactatgatctcaccactgcactccagtctgagcaacacagcaagactctgtctgtttctctcttttttaaaaaaaaaaaaagcaagaaaaacaatttagcattagataatctattagtgtaattaactcaatagaaaaagaatccacatacttataaaaagagtacccattgatttttatgaaatcttatggcactaggatagaaagttatttaccttagctgggtgcggtggctcatgcctgtaatcccagcactttgggaggccgaggcaggcggatcacaaggtcaagagattgacaccatcctggccaacatggtgaaaccccgtctctattaaaaatataaaaattagatgggcatggtagtgggtgtctgtagtcccagctacttgggaggctgaggcaggagaatcacttgaacccaggaggcagaggttgtagtgagccgagatcacaccattgcactccagtctgggcaacagagcgagatgccatctcaaaaaaaaaaaaaaaaaaaggaagaaagaaagttatttacctttacatgagcatctcataggaaatacttatgtgtggttcatacatatgattttttttcttacttcagctgtccagatagttgatgacataattgagaggagccaagaaagtcacagtagacatttgtggcaagttgtaattaccaaaagtaaaccatcaattgagaagggagtggaatcaggaaaaacatgtagtttgacttcaaaccatgtaccagaactgattagaaataatggaaactattcaggaaagagatctgaggagtttaatgtatttcagaacatacttctttctggtgatcctgatgagatggaagcttgagtgagatctgatgcttatgatttaaatggaacatttcttagaggtcatgagcatcttaggatcacaagattcaaattggactacagtgttttgaatatagtggacggaggaatgccttcaacgtggaggctatattaacacataagagtgcttctatgggaaagacctcttgtaaatctaataaatgtgggaaagcctgtaatgagtcagctactattgctcaagagctaactcaggtagggaggaaaacttttgaacgtcatgtatgtgggaaaatattcagtaagaagcataaagtcactgaacataagaaaatacactcaggaaagaaaccttataaatatagtgaatatgagaaagccttcattagccaatcatgtgttacaaaacatcagagaacacatacagaagagaaaccctatccatgtgccatatgtgagaaatccttctgtcagaaatcaaatctaagcgtttatcagagaatccacacagagggaaaatcctattttgctaaaaacattttggcagcagtcagcactcagggtgcatcagagaactcacacaggggaaaaaccctatgaatgtaatggatgtgggttgaccttctaccataagtcaaccc

SEQ ID NO: 4090 - DNA, 2300 bp, Homo sapien
gcagggttttcatgtgccctttagcagtctgagcatattccctcctgttcttatctcgttgaatgttttcatcataaagatgctggattttgtcaaatttattttctgcatttgttaagatggtcatgtggttttgtttatgattgtattgatatggcatattatattaaatgatttttggctgttaaccaatcttgtattgggaggaatccaactttggcatggaagataattatttctatatgttgctggattctgtcttcttgtacttttttgaaaaatgttccatctttagtatggggacaagagtcactcctcttagattctaatctgccacactgatgcctaactaagcatgagtctgggagtgcctccaagatgtctagttgaagtcgtactctatgtagaaacacctatctaccgtaagtctcgccattcctccaaaacaaccctcgatgctacagcatacatcataaactgtgatgcccatagcactatttcagttgcctgcacattccttccaggacacatatactttttccccaaaaatatataagccctgagtctagggggtaacagtgcagagatctacccgtcttgtggctgcccaagaccatgcttctgtgagttccccaaaaaatcacctccaagtgacaaactggatttgtctgcctcattctttggtttctcagttccttctgtgtttgggagtcactttgcatatatggcctcttcagaaaacatagtctcaaaacctcacaccaaagaccaatgactagcagaaattcttgagcttgcaggatggcacataagaaaataaacaacttgctgaaaccctgaaactcccccatgttatgatatcaagaaaaaaaattgagggagaaaaaaacagggagacactgtccctacaaaaagtaaaaataagtctagcgtggtcgggcatgctgtggtcccagctgttagggaggctgaggtgggtgggtcgcttgagcccaggagttccaggccactgtgccccagcctgggcaacatggagggaggctgtctcttaaaaaagaaaaaactgcctgaaaccaattggaaccaatatggccagccggaatttccacagaatgagcttgttgacttcatggcctgaatttcgatgcatgtttcatactaactccccctcagtttgcacatgggacccatgaggtgacgtgaagagataactgcacatacctgggaacttctcagacctcctcgttttctttttctttagagacagtctcactccgttgcccaggctggagtgcagtggcacagtcttggctcactgcaacctccgcctcccaggttcaagcgaatctcctgcctcagcctcccaagtagctgggattacaggcctgcgctaccacgcccggctaacttttctatttttagtagagacgggggtttcatcgtgttggttaggctgatctcgaactcctgacctcaggtgatccacccacctcggcctcccaaagtgctgggattataggcctgagccaccacgcccggccattcagtgtattttctaatgtcccttttcatttcttcttcgaccttttcataagtttgaagtgcactgattgattccacatatttaagttgcctggagttccttctgaacagacagcagcctgccgggctgggagaacaaggacctggggttgtacagtctgtggcgcacagagtccctgctggaaccacaggcggtgagtcaacgggcacctccgggctaggaggttttcccaggctcgcctcattgctcctgcacctgcagggttcgctggaccctgggcgtcccgctgcccggaacacaagggtagggaagggttgttactgggtttcttggctggggctgcagggccggtgcttgccaccggagcggggggggcgggccccgctgtgctcagaagggacctgaagccagggaagccccagggtcgtcctgggccccgccgcccgccctgcctgccccgcctgcccctcccatcccgtcctctccccgcctccctcccagccccgccccacctggctctcccgccccggtcccgcctccttcctcccgcccctgccctctcgatccagcctcccgccccctccccgcctgtccctcccggccccgccccgcctcccgccccaacctagtgcccgacaggaaacctcccacctggcactgcccccaaccaaagtcatgagggcaaggctccggttcctgccctcacagggtcccagaagcaagggcagtgaggacctggcccacgtccctggcacgg

SEQ ID NO: 4091 - DNA, 2300 bp, Homo sapien
tgaggttgacactctggagcatggatgagcaaagggaaggatgtggccttggatgtggctctcagggatgccccagacctgggatgtgggcttcagggtagctggccaaggagctgccccttcggctgggtcagcaggcggaaaggcacaagcatgaggatggtcttggtccctgggggaggcaccttctccggaggccacagcccccaggatgcagggagcctggttttgccacagccagcaacaacttgacctggggctcctgtctccacctccatggattccagccaatcacaattgcaagcccagggcagggcaggcacgtgctggaggagcccctaggccccatcatgttccctcactctgtgtcctcccaggctagagtctgtgcagacagcagggcctgacttttccagccttcctatgggggcccacaggtcccactccccaaggaatctgggccactgcacgccctcacccaggcatggtggggtgcacagccattgtccccacacttgcaagtatatccatctatgtgcagctcccacgtagccttaggtcttgagcatctgcattgtttctctgacccctttcctcaggaacactagttagctgcagcctgcctgtcctttctcacacttgatagggatgacacgcaaagggcaggggctaaccaccgcacatctgcagctcctcacctcgtaccccaggaggttggttcccagggagacgtggcctgtcaggcctcttgcagaggtgaaattccctttgcgaaggccctcacatgtgctgacagcatgcctccccaaccccggacaggatcccagggcggcatacttgggaaaggggcatcctgcctgacacttcaaactgctgtctagccacactctgcacagcggctgccccacaacccacctggccctggtgtcagcattttttttttttttgccaatctggagtgaggtatgcaaaaggagtcatggtcattgactatggagtcatcgatgccggctgcagttcagccgttgccctgtggagggctctatctccccccacagagcttctggcatttgctgtttttgctgcatctgtaacagccccagcctgagattctcaatgcctgctttaaccaagaaaaagtgactgaggctagcagggctctcgggagcgtctgtgcactgcctcctgactgcggaagcatgagggtcttcacatacagttcaggagcgcaggaccaagcagcctggatggtaatgggctgcgacctgtgctaccttgtgctgccagttcgcactgggccctggctgccctggggtccacagtgctgccctcatcatgacagaagctgaaggacaggtcacctcagctgcctgctggcagtgtccgaggcacatacccccactcttggcctcaggtgtgcctgtgtggcagggtgccaagaggcccaagctcagaggttaccggaggggctaaatgggtgagccacgcccacactcagcctgggcctggtcctggcaaggctgcagccgtgcatgtttgctacctccccctcctccccgacaaagcacctttgctgcccgtggtttgggcagcgccagctccatctgtaggaggccggatgtctcagggcattcccgtacagaccaggggtccccgggagctagcaggggggcccagcatacaggtccctggaaagctgttggctggagcgcattcattcgacagacacatatgaagcacctactgtgtaaagctgcctttgcaagcacttcacatgattcactgaacagagcagacagaaacccctgcccttcttgggggcttccatcctagacaagtgccagcggccccagttgatgccacgggcaggcaatgtgcatagccatggcacgtgccgtccctgtggattcggatgcctcctcccctgctggggtgaggcagccaaccaggggccaactgaaaaaatgctggactctcggtcaaggacagggctgggagagtgccagtctccacaaactgtggatccactagagggttcaggcctggggcatcctctgcaagaggatcccacgagagtccattccccaccacaggcctccgctgctcactgctgtgccttgatcggcctggacgagcccgcccacacctccatcatacccagtgtgaagaggggctggggacccaccactcctgagaacagcatccttgggaagacccagctgtgagtgcacagcaggcacagtccctcaggcccaggtgaggattcagcagcagatgggattccaccccatctgtggcct

SEQ ID NO: 4092 - DNA, 2300 bp, Homo sapien
ccagtcgggcatggagtccctccactcgctgacctcctcctgcacggcgcatagctcctgctgcaagaagcgccacatgttggccaggttgaagccattgacccagttgtggttgatggagatggtgtcatcctggaaggggcacagtgcaggcaggcctgagcccatggcaggtgccccctgaccaacccacatctcctgcgccaggaacccactgtggggtccagccctctgcagccaagagggccctcctgtctcccagcagggcttgctcagcagggaagtgggtggcgggctcggaccacctcaggccacagtgaacccagagcaagtagacccagggaccggcagtgggtgaaacagaggctaggcctcagcgacaccaccttgtgaaggggtcagcctcacccatgagccaccccattccagcccagctctggctgggagagtggggaggtggtgctgccgtcttcctgcaggaaggcccctgatagggggcaggagaagcagcacattaccaggttgtgcacctggtggtgccagccactgggcacaaacaccatctcgcccgcttcctgcgtgatctccaagggtgggccagcaagctggttccgtgggtgcaggtgtgtgtcgcagagtgctggggaggtcacgtcgtagggcaggttgccgtggcggtcccgcagggcctcttcctgccctggggggaagaggagccacttcttcctcccacagacattgacagaccagctgaaggagcggaagatgtcagcatggaacggggacctgcggcagcaagagcgcctggttcatgcctgtaggggctggtatgggctttgcttggcaccccagaggcctggtccaactgaaggaggggtggccccttggtctcaagggatggcacccactgtgaggcctgtgccaagcagcccccctcctgccaccctgggcctcccagtccgttctgtcaccaggccccttcgggttccactcccacatccgtggcctcaccagctgcccgcaggccccgcgtagacaaagcggtagtcatccacatccagtgcatcccagaactcattcagccagtcggacgagaagtacacaggcagggtgaaaacgtcctccaccggaaagtccctgtgaggagggcgcaagggcaccaccgacagcacgtgaggcacgaggagactagggcagcacgagtggggcaactgagaccaatcggctccagtggagcttccagatggctgcagcccccaaagagccccagaccctcctctgagccagacgctgctggcgggggagggggcggggcagtctgactacaatggttctgcttattagaaagtactgatcatgcctataatcccagtgctttgagatgctgaggtggatgcatcacctgagctcaggagttcaagaccagcctgggcaacatggtgaaacctagtctctttaaaaaaaaaaaaaaaaaaaaaaaaagccgggagtggagacgccttcctgtaatcccaggtactagggaggctgaggagatctctctcaaaaaaaaaggaaaaaaaaccatattgacctcccaaagaacaacacttgcagccatgcggaagacaatccagtttcttttaaactgattaaagtgcctcacggggaaaaatagctccgttgtgcacccaggggccaccttcatcagaaaggcctctgggttcacgcagcgctagggaaggcagcgcctcggtgcgtcccaagccccattacctgcacaagtgccagtctttgaggtagagacagcccctgggagaggagtagcccgcctgtatgtactctttccagtaggtgatgtagtctctgagagtcatgtgctctttggggttcgagttgtattcctggaccccacagtttgcaactggtacaaccacgtctcctgaaatgaaaggcacggtccatgccatctccctgggccccgtcctcactccaaaccgtctgcagaggaactctccaggggccacgcgcctggcctccctcaccctccctggtgcccctctctaggcgggggcctcccgggcctgggtcccgccggcctttcctccccgcccggggtctgcggccgccgccccaccgtaggtccgtagcaggtggtcgaagtcgggcctccccgcgggcgtcacccagcgccgccggctgccccagccctgcgtgaaggcgctggaaaacacgcagggcaggttgggcagcaagaagccccgcacaaagtcggcgtaggagaaggcgcccggctccgagacgaaggctacccggcccgg

SEQ ID NO: 4093 - DNA, 2300 bp, Homo sapien
gcacttctttctttggtatcccaactggtcccacctgaggatagtgtggggaactcccttgccgccacttttggggtaactccagttgcaagtttggcaaaacactcctcatgtcactactccgatgtcctcccacttcagccctgctcatgtgtacacagccccaaatccctacccacactcccaccacaccttcatttcacaccctccctcattccccaccatcttctccagacacccgtcatcccctggggccccttgccatgccctccaggtcccctgtgggccccattcgcccatctaggttaccctgccccctccagccctcccaccattttcctccaggtccccaccatcctctctagatcccatgtcccctccaggtgccactgatccctccaggaacccactgtccccatcccttccaagtgctaccgtcccctccaaatccccactgtcccctccaggtcctcaatgtccccatctcctccaagtgccaccgtcctctccaggtccccaccgtcctctccaggtccccactgtacccatcccctccagatcccaccgtcctctccaggtccccactgtccccatcccctccaggtcccaccgtcccctccagatcccgtctccatcccctccaagtgccaccgtcctctccaggtccccaccatctcctccaggaccctaccatctccgctagatcccaccatcccagggccccccagctctccctctgggtcccaccgttctctccgggtcccatcatccctgggcgcccccgcaccgccgcactcccgcccccagaaccgcctctgtccccgcccctctcccagcgcagcccgcataccccccaccccccggggatgcgggaaggagggctcgggctgtgtcagccacagcgcgcggactgagccgagggcggacgctacggcttggcttgggccgggcgcccaacagaccaacaccgtcgctcacctgagggacgccagacgagtcccagagccgaccgcggcgcctcggccgctcggcgcctgcgcagtgaagaccgcggcgagccgcgcgcatgcgtgcaggcccggagccccaggcgctggcggggcagaaacgcggcgccctgcgtcttctggttccgaggctggtcctcaccgtttccgctccggcggaagtgaggaggagggtccttcgacccgtgctgagctggatggaccgcgagacgcgcgccctcgccgacagccacttccgaggcctgggggtcgatgtccccggcgtcggccaggctccgggccgggtagccttcgtctcggagccgggcgccttctcctacgccgactttgtgcggggcttcttgctgcccaacctgccctgcgtgttttccagcgccttcacgcagggctggggcagccggcggcgctgggtgacgcccgcggggaggcccgacttcgaccacctgctacggacctacggtggggcggcggccgcagaccccgggcggggaggaaaggccggcgggacccaggcccgggaggcccccgcctagagaggggcaccagggagggtgagggaggccaggcgcgtggcccctggagagttcctctgcagacggtttggagtgaggacggggcccagggagatggcatggaccgtgcctttcatttcaggagacgtggttgtaccagttgcaaactgtggggtccaggaatacaactcgaaccccaaagagcacatgactctcagagactacatcacctactggaaagagtacatacaggcgggctactcctctcccaggggctgtctctacctcaaagactggcacttgtgcaggtaatggggcttgggacgcaccgaggcgctgccttccctagcgctgcgtgaacccagaggcctttctgatgaaggtggcccctgggtgcacaacggagctatttttccccgtgaggcactttaatcagtttaaaagaaactggattgtcttccgcatggctgcaagtgttgttctttgggaggtcaatatggttttttttcctttttttttgagagagatctcctcagcctccctagtacctgggattacaggaaggcgtctccactcccggctttttttttttttttttttttttttaaagagactaggtttcaccatgttgcccaggctggtcttgaactcctgagctcaggtgatgcatccacctcagcatctcaaagcactgggattataggcatgatcagtactttctaataagcagaaccattgtagtcagactgccccgccccctcccccgccagcagcgtctggc

SEQ ID NO: 4094 - DNA, 2300 bp, Homo sapien
gtttggtctggaatgagatagcccagtgtccagattttacaagacacagtcatggtctgatggcccctagaatgtcatcagacctccaaacctaactcaaaggcctcgcactgtgtgcaaaccagcacaagctgcctctcatttctctgggagagatgagcggttctaactgttcctccttccacctccctgtcaagacgcctgggaaatgctgcccagactctgcactctctcgcagagcacctatgtgcacacagcctgccaggcttcgggggcaataaatctgctatctttccttctgcatccatgtgggtagctttgagctgatttctccagcacaccaagacatacatcacatagggtcccccatggccccactttcgtgtcctggccgaaaatcacagagtaccctgatccctctgtgccccaaccacaggttttccccaccaggcttcaacccaatccagggcctttaacatttccaggcatggaagaaagtatctaggtttactacaaagaaaacggccttggccctgagccaaattcctgaaaccttcctataaactccataacccacaccccttccaagagacatacctagggaggacatcccttttcccttactgcccgtctcgaggactaccgcagcccactctatatgaaagttcccctaacaaaacctctaggcagggcctggcgcagtggctcacacctgtaatcccagcacttagggaggccaaggcagaaggattgcttgagcccaaacgttcaacaccggcttgggcaacacagagaccctgtctctacaaaaaaaaaaaaaaaaaacaaaaacaaaaaaacaaaactaagctgggcatagtggctcatgcctgtagtcccagctacttgggaggctgaagcagaattaaagaattcatcaagcccaggaggtggaagctgcagtaagctgtgatggtgccactgcatactgtctcaaaaaaaaaaaaaaaaaaaaaaaaaaaaaaaaaaactgctctgggcttaccatgcatttagcacttctttctttggtatcccaactggtcccacctgaggatagtgtggggaactcccttgccgccacttttggggtaactccagttgcaagtttggcaaaacactcctcatgtcactactccgatgtcctcccacttcagccctgctcatgtgtacacagccccaaatccctacccacactcccaccacaccttcatttcacaccctccctcattccccaccatcttctccagacacccgtcatcccctggggccccttgccatgccctccaggtcccctgtgggccccattcgcccatctaggttaccctgccccctccagccctcccaccattttcctccaggtccccaccatcctctctagatcccatgtcccctccaggtgccactgatccctccaggaacccactgtccccatcccttccaagtgctaccgtcccctccaaatccccactgtcccctccaggtcctcaatgtccccatctcctccaagtgccaccgtcctctccaggtccccaccgtcctctccaggtccccactgtacccatcccctccagatcccaccgtcctctccaggtccccactgtccccatcccctccaggtcccaccgtcccctccagatcccgtctccatcccctccaagtgccaccgtcctctccaggtccccaccatctcctccaggaccctaccatctccgctagatcccaccatcccagggccccccagctctccctctgggtcccaccgttctctccgggtcccatcatccctgggcgcccccgcaccgccgcactcccgcccccagaaccgcctctgtccccgcccctctcccagcgcagcccgcataccccccaccccccggggatgcgggaaggagggctcgggctgtgtcagccacagcgcgcggactgagccgagggcggacgctacggcttggcttgggccgggcgcccaacagaccaacaccgtcgctcacctgagggacgccagacgagtcccagagccgaccgcggcgcctcggccgctcggcgcctgcgcagtgaagaccgcggcgagccgcgcgcatgcgtgcaggcccggagccccaggcgctggcggggcagaaacgcggcgccctgcgtcttctggttccgaggctggtcctcaccgtttccgctccggcggaagtgaggaggagggtccttcgacccgtgctgagctggatggaccgcgagacgcgcgccctcgccgacagccacttccgaggcctgggggtcgatgtccc

SEQ ID NO: 4095 - DNA, 2300 bp, Homo sapien
cttctaccttcctgtaggaggccccagccttgatggtctcagctgtctcggcacagcgggcttcctgtctgcctgggtcccaggtggatgctacacacatggtggatcagtgtcacagctggagagccccgggttcaggaactcccccatgctgtaatgggcatgtcagcaagacaagcctgcttacctctgcccccagaggagacggcatccttagtacccggctcacatcctctctctggccaagagggagaaaccagtcgcagccccaggctgctcgccacgcaggcattctggaaaacagtctgggccaaagctgccacggacactcagggatgtgaggagaggtgcatcccatccacatccacccagtctcatcctgtctaggcttccagcgggatttctcattgattagcctggctgggaccaaatctgtccagtcacagggcattcagtcaaggctgccacctcagccatgccccaggggcccagctgcgcagacatctgaaagccccaaacatccatcccattcactcagtgacaggttgttgccaaggagggtaattaatgaaatggggcccttcccctctcatgacttccagccagatgagcaggcggcaccctccatgtgctgagtgccatgccccagaaggaggacaggtgtgggagaaggtgggtggggctccatctgtggccacatgggtattctgtggactggggacctagccaggcagcccccacagtccagccacacctccttccctgcagtggttgcacaccctgtggtctgcgtgtgacgacatattgtgcgttctcagatggctgtgtcctcatacaattaaggtcccatttgatgcaagctcttccaatgcaggtgtggcttttcagtgtgtcttgtctagacttgtgttgggggcatggtgtccagtgcagcagttacatgaaagacctggctcttaagagtgtaactgcatgagctgcaggaaccagggacggatcagggtaggtggtgcccagcagataatttggcacatagcaggactcatgaacgtgctgccagaatgaggaggaccccacagcctctagctgtgccatggaaagcccacactttttgatgtctggggggattacactggctggctgtcctgtttgtataagtaaagtcacgttacagtgaaattctgtgagagaagtgggagaaatgccaccctacccttggacctttctctgctgtcagaaccttggtgaggcatccccggcctggctctggccctggcagagtcctgcactcgtgcctggatcttgcacaaggccctcttgttttcttaaccttacattatctgtacgatgagacagttgggctgcatgttccatgaggattcgttcaaatctatcatccaagactttccaaactgtactgataaatgtagatgtgaaaacatgataggacaccttcattgcttgcagctatgtaaaactacatacgcacaataagttagtacgcgtacgtgttactactcagttctgtagaacgctataaggttaggtggggttatgagaagggaaaacgcttgtctgcaggattgttttctctatgcaatgaagttgatgaatggaagtttccaaaggggaatgtgcatctagagggaacattatggccaaaagacagcgctccttggaacggtctgagagtacgtcctgggactgaggtccgaggcccagggccctggcaaagtctccagtgatgtcctcctcaagtctcgtccagcagtggacactgatccaagcagggtggctttgctgggtgcaggggcacagagtgtggtgagggggatgacagtgtgaaccctctgcctgggggatgggcataagtctgggactcaggggtcctggttccaaaccagccctcctgctctggctgctcttccttcacctgctgagagggtacatgggcttcgtcatgcagccacaggtggatcgagagtcagccacgtgctgcagcctgtgtgagcccagagccgcaggggaggcagcatccttgtggggttgcttgtgtctccagtccatgggtgacggcagaacgttactgtctcttctccttcagaggcagaagaggcctggaccttggcgcacacagacccaggaacagatgagcagggatgtctgcatccacacctggccgtgcacctactacctggagcccaagaggcgatgggttactggacagctgtccttaacatcgctgtcgctcaggttcatgactgacagcactggagagattctggtcagcttccccctct

SEQ ID NO: 4096 - DNA, 2300 bp, Homo sapien
cccaggacgaggaactgagggtcccagtaaacagcccatgggtgatacctcagccccacacacaccatcttaggaaaaacgaccgcgacaaaaaaggcaataaacaagcaccttgaaaacccagaaaccataagcaaaacaaggctattaataatatccaaacacagaagatgctcgggccatgacgcaagacccgaaggtttttccaggaaactggaggaacacaaaagagttctaagaaattacaagtacaaatgataaatggtaggaagataaaaaccagaaacacacactagaatagcaacactaaaagaaagccaaatacgaaaggagtacccaaacagaagatagcaggactcagaaagcaaaaatcggacttggaaaaagaaaagcattcttaaacaaactgaagaaattttctggacatacactaggattttcatactaagaaacataacagaagaacatagctcatgaacaaatggccaatgctgacaggagacacctcactcacagagactgtcaccaagacagacctcactccaccctctgtgacctcagaggccagggcccatccccattaccacataggagccacagatgctgacaggagacacctcactaacagaggccgtcatcaagacagacctcactccatcctctgtgacctcagaggccagggcctgtccccatcaccacataggagccagaaacagaggaatgtgtacaggaggtcacagcacagtctctgcttgctgggtgtggactcagcatggtgcagtggacggcagtggtgccaggcacccagtgagccagcactcactcagatctcacggtgtgtttccagcagagtgtaccgtgtattcacagcctcgctttccgagtgctggatcttaatgtgcgtacccactaagcatgtacagcaggtgcacagccaggatctcagaatgctggatgtgtgcaaatatggtgcagtggcctggaacagtgcctgtgagcctccacacatgtgcatcttactctgtgtgtgccttgcaaagtgtacacagcaagcccacctgtccgccacctccaggtctgactccatcttgtccaggcctctcatgacgctgtccagctgctggccctggtggtgcaggaccctcgccgtgtcctccaggcgtttctgggatccagccatgagtcccgtcagctcctcgccccgggtccttgggacagatgcgtctgccacggctccaggctgagacagcagcagctccctccagaaatgctcgatgatgctgaagaccacatttcgacttggccgcagggagctgaaccagtgcttggcatggcccttctccaggatggtgatggagctgaagataaaatgtgaagcctccttcttgatctcaactatgctggagagggggaagctgaccagaatctctccagtgctgtcagtcatgaacctgagcgacagcgatgttaaggacagctgtccagtaacccatcgcctcttgggctccaggtagtaggtgcacggccaggtgtggatgcagacatccctgctcatctgttcctgggtctgtgtgcgccaaggtccaggcctcttctgcctctgaaggagaagagacagtaacgttctgccgtcacccatggactggagacacaagcaaccccacaaggatgctgcctcccctgcggctctgggctcacacaggctgcagcacgtggctgactctcgatccacctgtggctgcatgacgaagcccatgtaccctctcagcaggtgaaggaagagcagccagagcaggagggctggtttggaaccaggacccctgagtcccagacttatgcccatcccccaggcagagggttcacactgtcatccccctcaccacactctgtgcccctgcacccagcaaagccaccctgcttggatcagtgtccactgctggacgagacttgaggaggacatcactggagactttgccagggccctgggcctcggacctcagtcccaggacgtactctcagaccgttccaaggagcgctgtcttttggccataatgttccctctagatgcacattcccctttggaaacttccattcatcaacttcattgcatagagaaaacaatcctgcagacaagcgttttcccttctcataaccccacctaaccttatagcgttctacagaactgagtagtaacacgtacgcgtactaacttattgtgcgtatgtagttttacatagctgcaagcaatgaaggtgtcctatcatgttttcacatctacatttatcagtacagtttggaaa

SEQ ID NO: 4097 - DNA, 2300 bp, Homo sapien
cacagggcaccattttgacatttcacatccatctactgcatcaaaaatcttacagtcacttagagataagtcagggcaaggaagccacggagtgctcactcatctaccttcatcaaaatcccaaacgccagtcagcaaactgtgcaccttttgttttaatttggataatgatacataatcttgactaagaatggcctataagaaatgcaggatgtgtactgtaaactcttgctgaggtcatataatgtcttcccattgatgtatgggatactgaagccaacggcaggtctagtaactgcagttattttaaagcaggggttaatgtgatatattgagatctgcaataactaatgtgatgagacttctgttggtgacagtcaaaggttcaactaatactgaagctgtctacagtcaggatggaaggaaatgccacattcaactggaagttagtgaaagtagccatgattttccccatgtaatcttgctaataattctaataggctggcccatggcagttagcttaggtgcagtgccacaaccatggcagccattccttcaaataagcccctccttctctccccccagcatacccactgattctgttctctggagaacctgactgacgcagtcaccctgctgggcagcatggggaaagaaacaaatgagctcagggtgctccaggaacagcctggacgtttctggatctgccccaagggaagcccttagctcctgtagctgcaggacagagctttgtgaaaacagaatctggagtctcctgctgcagatggctgaattctaactgtgcatggcatctgctgtgacattgagggcatgaccgagaaggaatgggaccctgagaaccccagtgtagacgcatggctgcagtctgcagaagctggggacgctgagtccctgaaggccacagaaacttcctggccagtagaggtagcccttcctcccagtctagggagattcatcctgcaagacgtgccgggttctcctcagcttctgtccccacacctgtagatgctcaactagactccaatcccagcagaggctgaaagacagggtgcagagtgtactctgaggaggaggtgcagtcggcaccaacaggaatctggagcatgcggacgagagtgggtgttgagagtgtgggtggtggggaagcatctaatgctgagtctggctgaggctgggggaaggggcctgctaggcagagcttcagttgtcacgtgtgcctgctacagtatggacagcgcagacgtagaacattccatcactgcagaaaggtctgttagatagctccctagacagtaagtacaggtttcattttgaatcaagatgacccagatcaaggcagcagggtgtgggcagagtgatattctaggcagaaggtgtgcatttttgctgtctttttgctggttggctttgcatctagatgaatgttctcactgctggcccccagctttctcttctcacactggagataaaagtccctgtgcctcctgcttcatggagtgcttgtggaaatgaagtagagtaaaatggcaacatgctttacaaaggttaaaaccgttttccaaaaaaaaaggtattactccttaaaaatgaactgatccagttttccatgttttgtttgctttttcagattgctgacagaactggaatctcctgcttggtggccctttagctccaagctttggaagacaccaccggaaacaaagcccagggaagatgtctccatgaccagttgtgaaccctttgggaaagaagggatactgataaaaattcctgctgttatttcccacagaacagagtctcacgttaaaccagggaggctcaccgtccttgtgtctgggttggaaatacatgactccagttctttgctcatgcacaggtttgaaagagaagacgtggacgacatcaaggtccactcaccttacgaaattagcatccgccagcggtttattggaaagccagacatggcctatcgtttgatatctgccaagatgccagaggttatccccattttagaagtgcagttcagcaagaagatggagctgttagaagatgcattggtgctcagaagcgcaagaacctcttcccccgcagagaagagctgctcagtctggcatgcaggttagtgaccgacaaggcagtgagcgcgtgcacagacttctaaaattacaggcagactcagcacgcctgtgggaaatgcctaacagatgcgtcacctagagcagctgctggcctccagcttgctagagacagctcgtttgtttatacataaaaacaattcc

SEQ ID NO: 4098 - DNA, 2300 bp, Homo sapien
cctcatatttaggtcatgctgatgcaagaggtgggttcccatggtcttgggcagctctgctctgtggatttgcagggtacagcatccctcctggctgctttcacaggctggccttgagtgactgcagcttttccaggtgaacagtgcaaggtgtcggtggatctaccattctggggtctggaggacagtggccctcttctcacagctccactaggcagtgccccagtgggggctctgtgtgggggcttcaaccccacatttcccttctgcactgccctagcagaggctctcaatgagggccccacccctgctgcaaacttctgcctgaatatccaggcgtttccatacatactgcgaaatctaggcggaagtccccaaacctcagttcttgacttgtgtgcacccacaggctcaacaccatgtagaagctgccaaggcttggggcttgcaccctctgcagccatggcctgagctgtacctttgtccctttcagccatggctagagcagctggaatgcagggcaccaagtccctaggctgcacacagcatgggggccctgggactggcccaagaaaccattttttcctcctaggcctccaggcctgtgatgagaggggctgtgagaaagctctttgacatgccctggagagacattttccctgttgtcttggccattaacatttgtttcctcattacttatgcaaatttctgcagccagtttgaatttctcctcagaaaatgggtttttctttttctatcacatcatcaggctacaaattttccaaacttttatgctctgtttcccttttaaaactgaatgcttttaacagcacccacgtcacctcttgatgctttgctgcttagatattttttccaccagatatgctaaatcatctccctcaagtttaaagttccacaaatctctacagcaggggcaaaatgctgccagtctctttgataaaacatggcaagcattacctttactccagtccttatctccatctgagaccacctcagcctggatttcattgtccatatcattatcagcattttggtcaaagccattcaacaagtctctaggaaattccaaactttcccatattttcctgtcttcttctgagccctctaaactgttgcaacctctgcctgttacccagttccaaagttgcctcctggcagggaaattgttttgggatgattcaagcatattacatttattgtccactttatttctattattattacattgtaatatatcatgaaataattatacaactcaccataatgtagaatcaatgggataaattttagtagatataaatgaaggcttaatgaattttttttttttttttttttgagacagagacttgctctgtcacccaggctggagtgcagtggtgtgatctcggctcactgcaacctctgcctctcaggttcaagcgattctcctgtctcagcctcccaaggaaccaggatttcagttgcacgccaccacacctagccaatttttgtattttcagtagagacagggtttcgccacattggccagtctagtctcaaactcctgacctcaagtgatccatctgcctcaccctcccaaagtgctggcattatggtgtgagccacggtgcccagcctatttctttttcttttctttctttttttttttttttttgatagctgggtggcagatgtataaattgtcattgacctaacagaattaagctgggccatggagaaaactgagaacatcacgattcaaaacacagaattctcaaatggaccagtgtgtttagacctgactgtggaatggaatgccacacctaggcatatgaggtatggttggggcactgtcacatgtccagcttgggagccatcatgtgcccaggtcgggagaggtaaatccacgagacacagacatgtgctgggggtgcagtcgcatgtccaggtcaggtgccctcacttgctgggagtgccatctgctagtgggagccagtcacatgttggggtgcaaccacctgttgggggcgcaatcctgtgctggagacacagtcacatgtcgggagctagtcacccgctgggggcgctgcctcgagcctcatggctgcccctgcttccgtcatgggcccactcgggccctctgccctgggccttctgctgctgctcctggtggtggcccctccccgggtcgcagcattggtccacagacagccagagaaccagggaatctccctaactggcagcgtgggtaggccctgccccaggggcggatgggcggctggagacagtgcccttggggc

SEQ ID NO: 4099 - DNA, 2300 bp, Homo sapien
tgtgatgcacatttacaatctcacacgtcttcttggaggcagcctccatgcctttaagcatgccatcattgcaggggggtgtgtggggggtggggagggtctcccgtcctgtctgcttccctctgctgcctctcacttcctggtgctggagccagactttgggggctcactggagcccatggccgtggggcgggtgggcctcccactggggtcgctgcagcctgggtgggctgggctgccgtctgcactccctctgctgagtcagccccatttcaagggaggtggcccagccccctgagcaaaagaggacaaacaagtgccctctccccacaggaggggggtcctatggatggggaaggatgtgagaccagtcacacctagtggaaaagcagaaccaggggccagggctcccacacaggacatcatgccttggagaaaagccaccactcgctggagttggatgggtctcagatggggaaaccgaggccccgagagggagtgactgctcaggcccggtctcctcccttccccacccttgctttgccccacatgcacctgaagctcacctggcaaactggccatcagacactcagaaagggtatgctcacaggggtgacccacatggccaggctttcccagggaagcagggccgggagccctaggggtggcgaggttggctcagatcctcgtgggggccattttctgctgctcctatcttctttgtttttcctctgaggaccctcatattcgcctctgtcactgccactggcgggatttcacagccttccgggggcatgtgctccgccccccaggttctgcggtcactgtgccagaatcagtccctgcaggcacagagggcactgcctagagacctggcaccgcagcccaggtctctgaggcccctgcagcacgtggctgggcaggctcgctggccctgtgtcctcagccttggcagcctagcccgtgttggaggcaccatcctgcactgaccagggtctgcaggtggcaggcatgccaccgccagcctggaccccaagccctgttcttgtgtcccttgttgcatggcacagaggccccatccagggaacttataagccttctcctggatgccacccccaggtctgtctggaatgtgtgcacctgtatcctaatgccagctctgggtcctctgacaccattctgcttcagaagcagctccgaatccgtatcgcagaggggacgagtccccgggctgtgactgagcgcttccagctgcctgggtgtgcaccttccatcccaggagtcctctttctccccgtcccggccaggacacaggctctgagaagggcgttgcccgatggctggtgtttcattgacttagccgctagctccactcccacaatttaagaatggggagaccatcaggaccccaaaaggtagagctactcacctcacagccccagcaggctacgtcgcttcattcccaggccgaaagcggccacagtccctgccagaaaggagcgattctctggccccgctccttgagggggtcagcatgcgcaagaggcgcaggcatcaccggctggcccgactcctcctcaccaagcttcccccggagcagccgcgcagcgcccagctcggggcagacggctgggtcctctgtggaaccatccccgaccgtcccggcctggagccccgccggcggctagcccggcggccaacgcctcccctcccctccccctcaatcccgccccgggggccgccccaagctcccactgcagcgcccccaacgctctacccgcttcccgatgcccgcctccggccccccaatgccgtcccgccgtggtcgccccgggttctcgcacgccccgccctcggttcccaccgctctccgcctccccttcctccatccccgccgggcagggcgcgcccgagacccgcgccgggagcggcggccggggccccgagtggccgggaggggctggcgggctggcgcgcgcggctcgggtttcggcccgcccccggcgccggcgtgatcccctcccgggcgcggggcggggccgggcccagctggccgcgctccgggcgctataagagggcggcggccgcggcgcgccctgcgcggagctgggagcgcgatggtcggccgccgaggcgcggcaagatgctggatgggtccccgctggcgcgctggctggccgcggccttcgggctgacgctgctgctcgccgcgctgcgcccttcggccgcctacttcgggtaggtgccttcggcggccggcgcgcactggtgggcgggggcggcggggccggggcggggtc

SEQ ID NO: 4100 - DNA, 2300 bp, Homo sapien
cccaggtcttgcctcacactggcctctctacatccagctcatgcctcacggtggcctctccaggcccaactcctgtcccaggacgtcatctccgggcccaaaacttactcaagtcagactctctagtcccaactgctgcctcctggtggcctatgaaggcccaaaatctcctcaagtggacctctccaggcccagctcctgcctcctgtcagcgtctacaggcccaacctctgcctcatgggggcttctccaggcccacctcttcctcttggctgggtctacaggcacaactgctgcctcacaacagccttttttggcccagttcctgtccagctcatggcggccaatgtaggcccaaaacttcctcaagtcaaactctccaggcccaccttctgcttcccggtggcatgaacaggcccagctttgacttgagaacagcctctgcaggccctgctcttgcctcccaggggctttttccagacccagctcctgcctcatggcagctgccccaggccaaatttctgcctgcctgccagcagcctcaacaggcacagctcctccctcacagtggcccatttaggcccaactcatgactgtcgggccatttccaggcctagtgcctgcctcgtggctgactcttgaagcccaaaacttcctcaaatcagccttttgcccaacttctgtctactgtcggactctacaggccagcctctgcctcacagtggaccctccagacccagatggtgtctcactgtggcatcctcaggcgaagctcctgcctttccgcagcctctacaggcccagctcctgccttgcagtggcctctttaggccaagctcatgccccatggcgacttttccaggcacagcttttgccttttgcagcctgtcgaggcccagaatgtccttaactcggcatctccaggatgagctcatcctcccagtgcgtctacaggcccgtctcctgcctcacaacaacctcctttggcccaactcctgctgagctgctggcagcctctgtaggccacagaattcttaaggtaaagctttccaggcccacctttggcctcccggcaggctcagcaatcaaactattccctcactgcggccaccgaaagccaagtttctccctgcctcacggcatcctccgaaaactgagcatttgcctcacggtggcctccccaggccatgaatctgcctgcctcccaggcagctgctgcctcacaatggtctctttaggcccagctcatgctaaaagatggactctccaggcacagctcttgcctcctggcagcctctgcaggcccaaattctccaaaagttggcctctcctaactcagctcctgcctcatgtctgcctacacaggcccagactcttaccacacagtagaccctccaggcccaccacttgcctgatcatagcctcctaaggccaagctcctgcctttcggcagcctctacaggccaagctcctgcctcgcaattgcctctgtaggccaagatcatgccgtgaagtggccttccctagcctaacttttgctttttgacgcatactccagtcccaaaacttcctccagtcagccggtccaggccaagctcttcctcccaaaggcttctgcaggccaaaatcatcctgaagtcaccctctgcaggcgcagctcctgcctccaagtgctgtgtaggccaagctaatgcctcacagcacactttccaggctgagcatttccttttgtgcatcctctccaagccctgaacttactccagttggcctctccagaccaagctctccctcccagtggcctctacaggccaaaattgtcctcaggtcagcctctccagggccaactcctagctaccggtggcttctgcaggccaaaatcgacctcaagtcagcctcttcacacccagctcttgcctctgagtggcctctccaggagcaaaactttctcaagtcggcctctccaggcccagcctcctgcttcccgagggcatgtacaggcccagcctctgcctcacagcagactcttcacacccagctcttccctgtctgcggcctctccagtccaaagctgctcctgccttttggcagcttgtacaggcccagctcctccctcacggtggcctctttcggcccaactcatgcctcttgcaacgtgcccaagtgtcagctcctgcctcacactggcctgttgaggcccagctcatgcctctcgtggcctcaacgggcccatcccctgcctgtcggcggcctctacaggcccggcctctacctcacagtgggctctccaggcccacctcttc

SEQ ID NO: 4101 - DNA, 2300 bp, Homo sapien
gggcctgatgggggagaagaaagcagccaggaggaggggcttgggaaaccaaggggcaagagggcaggactgagcaggctgcgctcacctgcccccttcagtgaggtcacgaggcccatcctgtcggtgggcagagctggcatcctctagggggctctaatccccgagcctcatttctggggaggtgggggtaacaagagtctgcgtgcctcaggctgggctcaggcgcccaccccacctgcagcccaggttttccccagtaccacaattgggtgggatttttgctgcaaggccaagtccagaggagcacaaacacgctcctcccctccccctccctgaccccaccgccgcttcattccagagctcttccctctttccctctgagggtgggggccccgcagtgcctgggagaagcgggtgggcggccgggcatgcgtagcggaaactggattcccaaggtagtgaggagcaaagggaactttttttcaaagagaaaggctgtcactctgaattcaggactcctgacatagtcaccaggtgacccctagggccggtgtccacaggaccacaggctccctctgcaaacgcagaaccaagttgtgagtggggcacactgtgggaagcagctgcctccatcagccagccagtgacacacctggggacatctcagccaccccctccctgagaagctgcacagaagcggccacatgcccatccctgcctctccatgcacctccctcccgcaactctgcagccgcacaggaggcctagcccacaggctgggcagtgcagtatccccagagaacacaccacggatgagtctggagttgcttggagctctcagaagctcccggagcctccttcctcaattccaacgcggtaaccaagattcctgctgagcttaggtcacagtgtgactgcaggaggaccagccgcgatgggagagtgcctcttaaccatcccagttatcaggtcccccgggggaggctggggacacttcccctctgcaaattacaatctccccaggcggctcccggggcaacacatggatatgcaaatgactgggagctggagagttgactggtcactgggtgaccttgggcaagtcactttccctctcaggtcttcccctctccatcagcaaactcctaaagcttaactaaacagtcagaaatccctctgtcggaacaggctgcatagctctgggcagacctggaggttggtggtcccagaacctgggggcagcactgcgcttccccaccgtcccatcgcgtcaggggcttccactgttctcttccctggtggagtgatggggagaaaaatggaggggtcaatccctgcgccacagagagagtcccactcgtccccagctgtgacccacagacgcgtggctgcaccttggaggtccacctggccgctgtccccattgcaggctgcacccatcccggaccctttctatccgccgaaggcgcaggcagctctggtctcagcggaaggagtccggccgcaggcagacggggccaaaggacgtgcacccgacaaccgtccgctccctccccaaacccccgccccgagaaggttgatggatgaaggggagccctagcccagccacctcgggggcaagagacggagctcgccacagaccaggagcgagagggggactgcgggtcccaccgtgagcgcagggcgcgcggggctggaaacccaggacgcggcccgggagctccaggagggcgcctgcggatcgcgcggccccgggccggccgcctgcccatctggcgcaccccagcgcgccgcgcacacctgggggcccgcacaccagcacgtcctcagacacaccgacacccacggcagcaggcgggggccaacgccgccgccgcggttcgggctcccgtggccccgcctgcccctgcctgccccgcccgggccccggccccggcgggcgccccccgcggcgctgccccgcccccgccgccccgcgccgccccgggcctcggcccgcagcccggccgccggcccacctggcgcagcgccgccctcggagcccgcgcacacccgcgcacccgcggccgcaggagggcccagcgacgccgccgcgccagctcccagggcccggccccccccggcgctcacgctctcggggcggactcccggccctccgcgccctctcgcgcggcgatggccccactcggatacttcttactcctctgcagcctgaagcaggctctgggcagctacccgatctggtggtgagtgagcctcctcgcgttcgcccctgcccctgtgcgccgcgcccgcag

SEQ ID NO: 4102 - DNA, 2300 bp, Homo sapien
ctcactctgtcacccaggctggagtgcagtggcacagtcctactaggtcactgtaaccttgaacttctgggcccaagcgatcctcccacctcagcctcccaagtagctgggactacaggtgtgtgccaccacacctggctatctttgtaaaatttttgtagagattatgttgcccaggctggggaaggtacatttcttaaccctagggctggctatacaggaatccattttattactttttaaactgtgcatgtatctgacatacactctttcctgtctgcattttttcacattaaaaaatatatattttaaaggggccaggcacggtggctcacacttgtaatcccagcaccttgggaggccgaggcgggtggatcacctgaggtcaggagttcgagaccagccatggccaacatggtgaaaccctgtctccactaaaaatacaaaaattagctgggcataggggcaggcgcctgtaatcccagctacttgggaggctgaggcaggagaattgcttgaacccgggaggcggagattgcagtgagccaagattgtgtcactgcactccagtatgggcgacagagcaagactccatctcaaaaataaataaataaataaaaagtattttaaaggaaggggaggcaggctctggttcccacacaatccccgctcagtgaccctggagccacccctggccacgctctgccagcagagaaccaaagccaggtcccttcagccctaaagaggccataaccacatgtaacccccgtgaaatgtccgcacatggccccgctctggctgagcagggagaggcagcacaaccagaaggttccacaggcatccacaaccctccctggggctttccaagagtatctgagatgcctgtagggtgggagacgtccttcccctaaacagacaaccctgccacagcttcacagaggtgagatttcggaagggagccccaggcagaaaaagggactaaatttgggggcaggagggtcaccgcttttggggaccttcgtagcccccgcaggtgcagccctgggggagagatctgcccatcgcagcctccagaggcagtgaggacgccctgcccaaggggcaagcaacgtaggtgatgggggcagcaaaggggcgcaggaggcctgggccaggcccagtgatcccacccctcaggccctgcccccgggcctcggcctgcacaaatcaggttgattcccgacctccacaatacccagggcactgtgctgcagggacactttcccacaagcccaacccctcacagcagcacaagggaagaggcaagaagacctgagggtggtgggcagagccaggcctccagcacacggaacacagagggactgcaacggtcctctgttcaggtgcctgagagcgggatctcctccgcctcaactggatctcagcttaaaggccagctcattagagaccactgtgacctcccttctgggcggccgtccccaaccctgggccccacccccacggcccccgcctcaccccggggtccccaggccacctcctcctttgcttcatctgcggccagctccccggcgtctgctccgggcccaggtatgagcccgcgcgtcactgcggccgccggggcgccgaggccagtgcggggacacagcaagcctcccgccttcggaccttccgccgtggccccgcgagtgccacaggtttccacagggccggggcacgtggacccgcgcagcctgggagccaggaaccccaaccccggcgaggggcgcctcgcacccccgtcctcacgcagtccccgaggcctcccggtgactgccgggtgtgggaggaggaaggtggcaaccagccccgcagctccagttgctgcaggagccccccgggcctcagtctccaaatacgccaaacgggcgggagtgagccacaggctgtcttcgcggaagactcacaggcgcaggcgcagacgggtgcgcgcccctagggtgcgcgcgagctaagaccgcggcccggggcagggtgtccccggccccgccccctgcagccctaccggagccagcgcgcctgcgtcgcgggcgcacggtgggcggagttcccggcgtctccgccccttacccggcgtgccccgcgcccggaggcgctgacgtggccgccgtcagagccgccatcttgtgggagcaaaaccaacgcctggctcggagcagcagcctctgaggtgagggcgaggggcgcgggccggtgtgggccgcagagacgttggagccggcgggggctggggactggcctcggggcgacttgaggttcgcgaa

SEQ ID NO: 4103 - DNA, 2300 bp, Homo sapien
tgggaggctgaggcaggagaattgcttgaacccgggaggcggagattgcagtgagccaagattgtgtcactgcactccagtatgggcgacagagcaagactccatctcaaaaataaataaataaataaaaagtattttaaaggaaggggaggcaggctctggttcccacacaatccccgctcagtgaccctggagccacccctggccacgctctgccagcagagaaccaaagccaggtcccttcagccctaaagaggccataaccacatgtaacccccgtgaaatgtccgcacatggccccgctctggctgagcagggagaggcagcacaaccagaaggttccacaggcatccacaaccctccctggggctttccaagagtatctgagatgcctgtagggtgggagacgtccttcccctaaacagacaaccctgccacagcttcacagaggtgagatttcggaagggagccccaggcagaaaaagggactaaatttgggggcaggagggtcaccgcttttggggaccttcgtagcccccgcaggtgcagccctgggggagagatctgcccatcgcagcctccagaggcagtgaggacgccctgcccaaggggcaagcaacgtaggtgatgggggcagcaaaggggcgcaggaggcctgggccaggcccagtgatcccacccctcaggccctgcccccgggcctcggcctgcacaaatcaggttgattcccgacctccacaatacccagggcactgtgctgcagggacactttcccacaagcccaacccctcacagcagcacaagggaagaggcaagaagacctgagggtggtgggcagagccaggcctccagcacacggaacacagagggactgcaacggtcctctgttcaggtgcctgagagcgggatctcctccgcctcaactggatctcagcttaaaggccagctcattagagaccactgtgacctcccttctgggcggccgtccccaaccctgggccccacccccacggcccccgcctcaccccggggtccccaggccacctcctcctttgcttcatctgcggccagctccccggcgtctgctccgggcccaggtatgagcccgcgcgtcactgcggccgccggggcgccgaggccagtgcggggacacagcaagcctcccgccttcggaccttccgccgtggccccgcgagtgccacaggtttccacagggccggggcacgtggacccgcgcagcctgggagccaggaaccccaaccccggcgaggggcgcctcgcacccccgtcctcacgcagtccccgaggcctcccggtgactgccgggtgtgggaggaggaaggtggcaaccagccccgcagctccagttgctgcaggagccccccgggcctcagtctccaaatacgccaaacgggcgggagtgagccacaggctgtcttcgcggaagactcacaggcgcaggcgcagacgggtgcgcgcccctagggtgcgcgcgagctaagaccgcggcccggggcagggtgtccccggccccgccccctgcagccctaccggagccagcgcgcctgcgtcgcgggcgcacggtgggcggagttcccggcgtctccgccccttacccggcgtgccccgcgcccggaggcgctgacgtggccgccgtcagagccgccatcttgtgggagcaaaaccaacgcctggctcggagcagcagcctctgaggtgagggcgaggggcgcgggccggtgtgggccgcagagacgttggagccggcgggggctggggactggcctcggggcgacttgaggttcgcgaagggcacgtcgacccccgcggcggcggcggcgacagggccgggccgggggcggacgcagacgggccgggctgaggctggggcccggccggagtcggggctgggcggacgggcgggtcggtgagctcctcgcacccctcacaggttcccgaagtcgctcgcggccgcttgtcctcctctgcctgtccctgcccccgcccgtcgcccggaagtccgcttggacgccgggctcttctccaggaaacctgggcttcctgcttccctcgcctctgcctttctcgtttcccgaggccgcccgcgcgtggacggttgggattagcggccgcgggggccggtgggggtcgtggggcctcccccacccgagtacaggcgagcgagcggcatccgggcggacccccgcctcggggaccgggaaactgaggctcgggcggcctgagacgccgtcaaggtcatgtaggtggtgggggcttgcatcttcgcctcccgactccat

SEQ ID NO: 4104 - DNA, 2300 bp, Homo sapien
ttcccctgggatctccactgcccctccactccctgaccgccaccctcctgggtccagcttcgctgctgtcacagaggacaccactgtgaccagtgcccccagctgggcctccacccagcaggcacaggccatgcaacctccaccctggtgacccctcctcctgtggcctacggcttgtcaggctaatgggctcaaaactgaccaggtcttccccacaaacctggtcctcatgttgacaggtggctgcttcatcctcacagttgcccagaccagagcctcagagccgtcctggactcctgcccaatgtccacctggccctgctatcccctctccaccacacctgacatccagtcagtggtcagactccacagctgggccctgcccacatggcccaagtccaccctggcctggcaagctgcaatggcacccaggagatgatgccctacaccccagggagccttcctgggagtcggccagtcaccttctgtgtgcctggctgtggcctgctgctctgccctcgccatgcacctgctccatgatgaaagctcatgcagtgcctcatgagggagatggcagccagtacttgctaagtagatagatgagccagacgtgtggctgtctgccagcctgctctaacagcctgacccatggactgggtcactaagaaacagaaatttcccacaggacagtagacctgtatttcatccagttcaacctgtggctggaattgccccaaaagtggtggcagtagagttcccacaagggagtgccccacaccatcctgagatggggctggttaggattctacagattgagcatgccagggtgattcgcccagagcatttattcgtggggcttttgtacagagtgggctgcagcagttcttgcaataggcagtgagagaaatgaagttctctctaggtatgtccgtgggggagggggttggtgaatggaatttatatgagggtttgaggaatctggctcaggctgagtccagtttctttctgtgttttgagcaacaacctagttactgtcatctgtgcctgggaacgttcatggctatggctcgggttcaagtctgcagaggaaattatacagttggcgaagtcacagagtggccaagggactctgtttctcagtcagcactgggaatgaaagtggaaaggggaagcaggggtacgtcacaacctccaaaatcagggtgcccagcacgctgaggttctggtaaggggtttcttccagactgcagacttccttcccgctgccttcacacagtagaaagctgcacaaagctcttggggtcccttttatgaaggctctgtcctcatgacctagtcacctccgaagcaccaacgccttggggtgaggatttcacatgggagttagggtgcacattcagtttaacacggcagggataggaccagtgctctgagggtgtctgggtagctgctggttcatccagaagtttactgggtaatactcagaaattccacaaatcattaaggtcattaccttgttaagctcccgatatggaatcgcgactagcagtgaccaattggcggtgttaactaggcgcatcttgtgtgttttcttttttctttttttatgagacagggtccgctcactcgttcaggttggagtgcagtggcgcgaagtcctgggttcgagatcctcccgcctcagcctcaaagcgttggggctacaggggcgcgcgcgcgcctggcccattttaacttcttatttttgagacagtctcgctctgtcgcccaggcgggagtgcagtggcgcgatctcggctcactgcaacctctgcctcccggctcaagtgattctcctgcttcagcctcctgagtagctggaattacaggtgtgcaccaccacacccggctaatttttgtatttgagtagagaccgggtttcaccatgttggacaggctagtctcgaactcccgacctcaagcgatccgcccgcctcggcctcccaacttgctgggattacaggcgagagccactccgcccggccccgttttaaccatttttaaacttccagttcagaggcgttcccgcgcccggcagggtaggcgcagtgcgcaggcgcccaaagccgacgtggaggtgatgcgcgggagcacagatccggggcagtgcgctgcgcagaggcgcgcggcgaagccgagtgggcgcgggagtgacgtcacggcgcgcgacgcggaggcggggtcgggcctgggtccgacggtagtgggtagcgggtctcgggttgcgggttgcaggttgcaagccgcaggccccaggcaact

SEQ ID NO: 4105 - DNA, 2300 bp, Homo sapien
gaaggcttagatccaaaactgactctaagcaccaaaattagataggactaaccagtagtgtgtttttattttttaaatttatttttttgagacagggtcttgctctgtcaaccaggctggagtgcagaggcacgatctcggttcactgcagccctgaccccctgggctcatgcggtcctcccaccccagcttcccaagtagctgggactgcaggtgcacaccaccatgcctcactaattttttgaaagatatttttgtagagatggggtctctctgtgttgcccaggctagtcttgaactcctgggctcaagcgatcctctcacctaggcctcccaaagcactgggattacaggtatgagtgagccatcatgcctggccttgtgtgtttttaaaaacatcaaatctggggaaaacacagaacaatttattttaaagattgaaagctttgaagggagagaccaataagaatgtttgaaaattaagctagcataggatggaagacgtaagttgagaggaaggccttgggctgtccccccagtagctctcaaggtccctcgatccacatggacgaaacttggtctgtcccctgcagatgcccatagatctggacaccctgtctcctgaggagcgccgggccaggctgcggaagcgtgaggctcagctccagtcgaggaaggagtacgagcaggagctcagtgatgacttgcatgtggagcgctaccgacagttctggaccaggaccaagaagtgaccgtggctccagccaccccgggacattgctaagatgggagggctgttcttaaatcactcgttcttgaagctgccacctggagtctgtgtctgtctccccacttggtgtgtgccccagactggcagctcatcccctgaaaggcatcagctcaagcacagagagagctcagtggactagcagggtgagggttggtgtagatcaaacctgtgggttttggacactgctctggggctgtggtgcacgtggacaaccatgtgggcagtacccaacaccaccaagctctaagctctgccctcccagcctcaggggcaccaaggtgactgcccttctgacagcacagtggccctcaggttggttcctaggaggggctgggtgttctgggactcaggcatcaaccttggtggggcagtcctaggaccatctggaccacagcctgcagctccctgccctggccctgcattcccaggctgccccagggaaggtcctgccctgggagggtccccagaggagcagccagccctggttgtccttgactcttaatggggtctgcagagcactgcagttacacacagcccagggagatccacggaccctgcttcatctgtccagaggctgatttaactcaggaccagctccagctaatgtgcaggcaccttccacacgcacaacaacccaggttttggacagctcagggcccagactgcttcctgtccctgtcctgggatgttactgggtcccacctggcaggctgtctctctgacacctggagtgcccgacaaagacttcttgcagtggtgttctgggattgccagggaggtgtgggagtgtgttctgtcatgcccctgtgatgacagtgcttataactgaggagcctgggcagtgtccccaccttgcaggcccatcccttgccccttaagcttgttcctggccctctgctcatcccgctggccttcagctctgctgagaagagcctgcaagggatgtcctctggccctgcccctgtccttgtgaccgagcagtgcctgacctcacgtggatgggctgtgtggctgcctgggactctgccttgcagggttacttcctgagcagcctccctggagcccccgtctctgaagttgtggctcaatccctgtggcatatagagccagctgcccggccactctgtgcactcacttggccccccccctccactacccagcctcctcccactatagtgggttcccctgggatctccactgcccctccactccctgaccgccaccctcctgggtccagcttcgctgctgtcacagaggacaccactgtgaccagtgcccccagctgggcctccacccagcaggcacaggccatgcaacctccaccctggtgacccctcctcctgtggcctacggcttgtcaggctaatgggctcaaaactgaccaggtcttccccacaaacctggtcctcatgttgacaggtggctgcttcatcctcacagttgcccagaccagagcctcagagccgtcctggactcctgcccaatgtccacctggccctgctatcccctc

SEQ ID NO: 4106 - DNA, 2300 bp, Homo sapien
tgggattacaggcacacaccaccacgcccagctaatttttgtatttttagtagagaggaggtttcaccatgttggtcaggctggtctcgaactcctgacctcgtgatccgcctgccttagcctcccaaagtgctgggattacaggtgtgagccactgcaccccacccacaatcttttatcttaacccagacattcctttctgttaatcccaggtcttcaggtaaattcaaccaattgtcaaacagaaaatttttcaatctacctataagctggaagccagcacccttgacccctgcttcgagttgtcctgcctttctgaaccaaaccaatgtaggttttaaatgtatttgattgatgtctcatgcctccctaaaatgtataaaaccaagctgcaccccaaccaccttgggaacatgttctcaggacctctgtcctgagggctgtgtcacaggccatggttactcatatttggctcagaatatatctcttaaaatattttacaaagtttgactcttttcatcaacagcagcaagccaccagcattcccagtgagggaagggtaaagggaactttttatcagtgaaaagggaacttttatcagcgaaaagggagcggttcacagaagctgcttagaaagagttcattggttccaggggcccaacgccaaagctcaaagttgtcctcagttcattggtggcgctgccattactgggcaagtgtttattccgagcatcttaactgaattactgcagtcctaaagatggtctaaattttgtcaaagtaggagacccgtgaatgacacaaaagggtttcttgtggggtttttagaaagtccttgcgaataattcttatctcagacactaagcctgagcctcctgttcttcccagccctgtttgtctgggcctgacaaagtgatttcactccttatttgtaactttcacaaaacaaaggccctggtctcatgaactcattgcacaaagtgaccctggttcgctgaggcagataggcgatgctatctgcctgccctggtccaaacatctcatctggaatactgcaggccagtggaaatgcccggaataagctctgtttacaaggtaatagcgagcctctctggcatttcagaaatgcgtgacagctgcttccttagggccctccccactccattttggttacgttgtgacataaattactccattttgctgtgaactacagggtcatttctcagcccccgccaaccccgcggatcccccctcagccccgctgtatcagcctttcggatcctccttcagcctctcaggtcctcctcagcccgctgcgtgcctcttcagccccccttgaacttccgtcatccccacagatcctccctcagcctccctagattcccacctcagcgcccatggatcctccctcactgccccctgggacctccctcagttctgcagattccccccttagcctcctgggacctctctcaccccttctagatcctctctcagccccgcagatccttccgcagctccccctggatcctccctcagcccagctggtgcccactcagccccgcggatcctccttccctcagcccccgcccgggtgctcccgcagtccccctgggtcctccctcagcccagctgatgccccttcagctccgaggatcctccctcagcccccctgcgtcttccctcagccccctgcgtcctccctcaggacccctgggtcctccctcagccctccgggacctctatcagctctcctggatcctccctcagccctgcggatcctccctcagctccccaccccgggtcctccctcagcactcccccactccgtcctccctcagacccgcgggtccccctcgacctcgccggcccgccctggtcctcccggtagggacggaggtcacctgctcgccggccccgcctgggttcttgtaccgccacagcgcccccgcaggccccgcccacctaggcttcgtcccgcccccgagattacatcacgccgcgccggccccgcccaacaggggcgtatatcttcgtgtctcaccgcccactcttgcctctccctgccatggaacacgtcataccgcgcgacgcagcgcctgccagtgacgtcgtgggctgcagcgcagcagcacccaacgcagtgagtaccttgatctcctgcgtggcctcgtccctggtcttagttccaccgggcagcgggagtcaggaccgcctgtcctcagacccctccgcagcgactgtggcggccgcaggttggcgcctcgtgtgggccgggaacagaggcgggaggcgctgta

SEQ ID NO: 4107 - DNA, 2300 bp, Homo sapien
ctcgttctcctcaccttacaaaacccatggttctgctatcgcccaggcaggggctttttttttttttttttttttttttgagatggtcgcgctctgtcgcccaagctggagtgcagtggcgcatctcagctcactgcaagctccacctcccgggtccacgccattctcctgcctcagcctcctgcgtagctgggactacaggtgcccgccaccacacctggctaattcaggcaggggcttttattctattttgtagaatgaaggctgcctcaattcatgaatcacgaataaaagccagcgagacctatgaatacatatgacataattttgcctctgacagtgaacttcccctttttttgcctaaaaagcttctccttgcccacctcccccaatgcagcacctatggtatgacatagcacatgtattccaggttacaatcccttgtccaacaaactgttttattattagtatttaaaaaaaatagagacaaggctttgccatgttgcccaggctggtctccaactccggggcaagtgatccatccgccttggcctccaaaagtgctgggactgcaggcatgagccatggtgcccagccccaacacatttttttgaagttgtattttttaaagttttactttttttcttgctctcctgcagttcacattcaatactttttttttttttttttgagacggagtctcattctgtcgtctaggctggagtgccgtggcttgatctcggctcactgcaacctccacctcccaggttcaagtgatcctcctgcctcagccaccccagtagctggaattacaggggcccacgaccacacccagctgattttgtatttttagtagagacagagtttcaccattttggccaggctagtcccaaactcctggcctcaggtgatctgcctgcctcggactcccaaagtgctggcattacaggtgtgagccactgcacccagccttcaataaatcttttttaaaaatttaaaataatttttagaaatagagtcccgtggccaggtgcagtggctcacgcctgtaatcccagcactttgggaggccaaggttggtggattacctgaggttaggagttcaagaccagcctggccaacatggtgaaaccctgtctctactaaaaatacaaaaattagctgggcgtggtggcgggcgcctgtaatcccagctactcgggaggctgaggcaggagaatcgcttgaacctaggaggcccaggttgcagtgagcagagatggcgtcactgaactccagcctgggtgacaagagcgaaactccgtctcaaaaaataaaaaaagaaagaaatagggtctcgctctgtcacacagactggagtgcagtgacacgaacaccgctcactgcagcctcgactgcccaggctcaagcgaccgtcccacgtcagcctcccgagtagcaaggactacaggcacaaaaaagtttttaaattttttggtacagaaggggtttccctatgatccccaggctggtctccaattcctggcctcaagcggtcctcccggctcggactcccaaagagctgggatcacagacgtgaaccacgcgcccggccacattccccaattaatggtttttggagagtggccggtttggaacgggctagcggagtcgttcgttagttaggtccctgcagtgtagatggaggacggaaacggcgctgtgacataagcgggaggaggcgggctgaggcagcgctgtgacgtagcagatgaaagccgggcccgcgctgcactgaggtacttctctgagtgacaagcgggacaagtacgccgtgggcggggccggcgggtcgtgatgttagttcgcgctgtgtggaggcgggccggcgtggcgctgtgacgcagcgggagaagacgggctgggagggcgctgtgctgaacgcccctgcggtcgcgacaggccagcgcaggtggaggcggggctagcgaggcactgaggtaagtacttccctaaggggcggggaagaacgagtgagacatgggcggggcagtcgcctcatgacgtcagtctcgcgcgcgggcggaggtgggccggtgcggcgctgtcacgtaggttcagtgggcggaagaggtggccccggatgctgcggcgcccgctggccgggctggctgcggccgccctgggccgggccccaccggacggtgagtacgacaagcgcgatcgcgagggtgactcgggtcgaggcggcagcggtccctgcgctttgcggtcgcccagtccacgccgcctccggatctcctcctagccgagacgccctg

SEQ ID NO: 4108 - DNA, 2300 bp, Homo sapien
gtgggatcctcagaaggtgtggctctcccccttctgaggacgcaaaaactcccagagtttttggcgattgatgtgccacgtgtgccttgtgccctgtgctgggcgagtgtaggcacagctgtgcagacgacgcccttggcaaggctggagcctggacccctgcctggcagcagctgggcgaactggtgtcttctgcctgtgggcccagcttcacttcactagcttagcgctccctcaggagggaggaggggaggcctggtcagtggaggtcaccactgtgtttccttctgtgtgggtttatagtcacgtagcatctaggttcagacccgaagagcttggagccaggggctggggggaacagggcaggaccggccttggggcagccctgtcaggcccaccagtgccatgctggttgtgggttggcagggcagagtgaccttaagaagggccagctcagtggagcaacaggacagaagctcacatggggtccagcccacaggaccatttgagtagctctcccatatcgggtccttcgaagcacatgatttagctttactttttctccttcgtattagaaaagtcaccataataccatcaagtcataatttctgtgatctcagtgcttcaagtaggtgtgtagcaattgctggatgtgtcctgagaactgtaccccttccaccctggcgagaagcaggggccagaaattcacacaagtggcatggctcattgattgtgggagactctggggggctcctagctagtgcattatgggaaccaggctgtggaggttgcagggctcgctggctgggagaagctgaatggataaagaaccctggccactgcagtgcgtgctgatggttggctggcacgtagaggaggtggcagggctgggtgagcagcaggagccaggttagtggggaggcccgagctaagcgcaggggcaaattctgcgggtgggagagccaggagggcatggggtgcatggtgagatgaaaacgatgtgtgcttgtgacaaaaagcccagaagaggcagtaaggagggaggagtctatcccttatggagagcacatggacttctgggtgggtgtcctgcagttcccttcctcttgagtctttttaactgggggtccggtgtgtttgtgatcaatgacatgtatgcgtgtgcatgtgtacctttgcaggtacacatgtgtggtgtgtgtgcatttgcttggtgtgcgtgcatttgtgtgtgtgtttgtgtgtgcatgcatgtgtgtgtgtttgtggtaggtttgtgcacacatcctgcatacctttgtgcctgggagtggcatgtgtgtggtgggtgtcgctgtgcatgatggagttgcagccgtggtgcatttgtgagattacctcggtggcctaaattggggattaggagggcatcctcaggtccttcccactgtctgctcgtctgcccacaggcggctgtgccctaaacaggaggaggccattcacgcctcgcctgagttgtgtccaaggtgtgcgtgtggccaggggtccatccgcttccctctagcccagcccctgaacacagctgcagtgcacggccccactcctcagctctgctccccatcccaactcgaagacgctgccctggccctgtgtgtgcagctcatgtggactgggagggcagggcaggtgcaggtcttggggcaagagctggagctgtcttttccttcctgcacagccgcagagcaggtggatggggctgcttccctgcaagggcccagggccaggccccctggggatttattcgtggcttagaagggtggggccagaagcaggcgtagtggggattagggactcagcacccccagctctcagtccagcagacagacccaccccaggctgactacagaggctgcacctcagcaaacaggtaggccctgttcttggggaggattcccaccaggcaaaggccagctcccgggccctcacctgccacgtgtccaagctaggatcctgtttgcctttcccttgggggctgggagggaggcctccaaccccctctggcattaccagcatcacagataggagtcccaagtcctatgagaagttcctggaataggtgtagattcagtagatctttacaagaccatatctgcagggcaaggtaccagaggacagaggcggggacagggacacttccattccagacctagcagcccagcactcagcaccatgcatgggagcaaatggctggactcctgggtggggtgggggtctcagagcaggctcccagagggcttggaggtgactccaccaggtgggga

SEQ ID NO: 4109 - DNA, 2300 bp, Homo sapien
tgatctcagtgcttcaagtaggtgtgtagcaattgctggatgtgtcctgagaactgtaccccttccaccctggcgagaagcaggggccagaaattcacacaagtggcatggctcattgattgtgggagactctggggggctcctagctagtgcattatgggaaccaggctgtggaggttgcagggctcgctggctgggagaagctgaatggataaagaaccctggccactgcagtgcgtgctgatggttggctggcacgtagaggaggtggcagggctgggtgagcagcaggagccaggttagtggggaggcccgagctaagcgcaggggcaaattctgcgggtgggagagccaggagggcatggggtgcatggtgagatgaaaacgatgtgtgcttgtgacaaaaagcccagaagaggcagtaaggagggaggagtctatcccttatggagagcacatggacttctgggtgggtgtcctgcagttcccttcctcttgagtctttttaactgggggtccggtgtgtttgtgatcaatgacatgtatgcgtgtgcatgtgtacctttgcaggtacacatgtgtggtgtgtgtgcatttgcttggtgtgcgtgcatttgtgtgtgtgtttgtgtgtgcatgcatgtgtgtgtgtttgtggtaggtttgtgcacacatcctgcatacctttgtgcctgggagtggcatgtgtgtggtgggtgtcgctgtgcatgatggagttgcagccgtggtgcatttgtgagattacctcggtggcctaaattggggattaggagggcatcctcaggtccttcccactgtctgctcgtctgcccacaggcggctgtgccctaaacaggaggaggccattcacgcctcgcctgagttgtgtccaaggtgtgcgtgtggccaggggtccatccgcttccctctagcccagcccctgaacacagctgcagtgcacggccccactcctcagctctgctccccatcccaactcgaagacgctgccctggccctgtgtgtgcagctcatgtggactgggagggcagggcaggtgcaggtcttggggcaagagctggagctgtcttttccttcctgcacagccgcagagcaggtggatggggctgcttccctgcaagggcccagggccaggccccctggggatttattcgtggcttagaagggtggggccagaagcaggcgtagtggggattagggactcagcacccccagctctcagtccagcagacagacccaccccaggctgactacagaggctgcacctcagcaaacaggtaggccctgttcttggggaggattcccaccaggcaaaggccagctcccgggccctcacctgccacgtgtccaagctaggatcctgtttgcctttcccttgggggctgggagggaggcctccaaccccctctggcattaccagcatcacagataggagtcccaagtcctatgagaagttcctggaataggtgtagattcagtagatctttacaagaccatatctgcagggcaaggtaccagaggacagaggcggggacagggacacttccattccagacctagcagcccagcactcagcaccatgcatgggagcaaatggctggactcctgggtggggtgggggtctcagagcaggctcccagagggcttggaggtgactccaccaggtggggacggcagctcccaggtagggtgtcatcagagtagacagcattgcttgctagggacccctggggaggctgacagggtcagtgggtttcagttggggggctcccctgctgagaacccagtaaagccggccttccattcgtctcccgtgtgcccagagcctggtctgagggccgccctgtgcatgccggcccttccaacgtggcagagctcagggggaagaacacccaggctctcaggagactctcaggccaatgtctccatccctgggtcagccctttcctgccatgaattcaggaaggcagaggcagctcagcagatggggactagaggccgcactgctatccacagcctctcttctcacccccaggcatgtcgggccccaggcctgtggtgctgagcgggccttcgggagctgggaagagcaccctgctgaagaggctgctccaggagcacagcggcatctttggcttcagcgtgtcccgtgagtccagggctctcgtggaggggtgcgtagacctcaaggctgctgagtagtcctagcaccgtgagcaggccaggagcccaaacccaacaggcacacccaccctgcagactgtccgaactcttgcacactc

SEQ ID NO: 4110 - DNA, 2300 bp, Homo sapien
ggagcagcggctgcggcagcgcaacactgaaaccgaggagagcctggtgaagcggctggctgctgcccaggccgacatggagagcagtgagtgtgccgtgggatcaccagggaatgccaggaggggagtcagggttctgaggtctgtggcaccagggaccctgtgggtccccagacctcctgacacctggagtccctgtgagggtcctcagacctctcaactacctcccaacacctagagtccccgtgagggtccccagaacccacccccagtcaccaagggtctcattgagggtcctcagatttccctctgttacccagagtctccgtgagggcccccagaccccccatcgcccagggtcccatgagatgtccccaaccttctagccccgggggtgtcatgtgcatcctcttacagctgttgcctcttctctgggtctgactgcagcccacaagaagagggcatttaatgttctgctgtgtgtgtagaggatagtgtagcccctaaccagagtcctgatgggtgctggtgtccagacccaagttctggggctccagagagagcaggagtggtgcctgaggactgaggcccagggggcggcccttccctaccctgcacaggcccggctgggctggaaagctgtcccacagccgcagtgaggacagccgcaggccagtgggctgctctgggggtcgtgtgggacctggggtggggctgcatgggctcactgtgccctgaccccaggccccacccacaggcaaggagcccggcctgtttgatgtggtcatcattaacgacagcctggaccaggcctacgcagagctgaaggaggcgctctctgaggtgggcccatccttgtgcctacctgggcaaggcccaaggggaggcctgggggccaggcctttgttgtccatgaggccactgaggttagatgggacagtcctacccaagcactggcatgagacaccgaggtccacggtggagggagagcaggaagcccagcccttcctggataccagccctcccaactccctttcttcctcactggcaggaaatcaagaaagctcaaaggaccggcgcctgaggcttgctgtctgttctcggcaccccgggcccatacaggaccagggcagcagcattgagccacccccttggcaggcgatacggcagctctgtgcccttggccagcatgtggagtggaggagatgctgcccctgtggttggaacatcctggggtgacccccgacccagcctcgctgggctgtcccctgtccctatctctcactctggacccagggctgacatcctaataaaataactgttggattagaaactccataaatgagtggaatgtggccccaaggttggtggggccccatcatcccgatcgggccctgagctccggcagcccaccctaaccaccagccccaaggagggccacaagatggcctctgcctaggcatctgctgcctgccggctcgtggctgctgccccagggcagcatgatgcttgactggcaggcagggaaggtggcagggctggtcccaacccacctggcaggctggcaagtggggagcaggaagcggctgcatggggcagcctgaggctgcaggggtgggccctgagggctgcctcttggtgcccgaccctgtgggtctggcatgggccagaggttccaggagaggcccctgagctctggcagctggaggttctagatctcgaggtctaaggggttccctgagggagatgcccctcccctagctgccccaggggctgtgtgtggtgtgtgaggagcctcctctgctcaggctgcctccctccttccccagtgctcccccagcttgcctgtctaaggcagcacagggccgtgctgccagccacccctagggtcagccccagccctgttctgagcctaggtgaggtgcctctggggtggggtgtagacagatgggtgggagagaaggaggcaggcagggtgcccggccggaaatgggggcggggagaagagtccccgcccagagcccagactgccggaggatacaggccagagccgcctggactgggcggctgggcaggggaggggaggggagggcccaggcagcccccggtcgcttgctccagggcaggtggactgagcttcggaggctggggctggcctctgacctgcttgggcttggagagccctgcccgctgccctgccccccaggacaatcagggattcagaccctgaggccgaggggggaacaatggggcccttgagggcccctcctccagcccccattgtgcttggtggtgagagg

SEQ ID NO: 4111 - DNA, 2300 bp, Homo sapien
aaactccggctgggatctggaactttctcctaggcccatctgtgcacttgcttggaaaatccagttttagtaagagccctactgagtcagtttagccagaaccccacaccctggatatctcaccctcgatgacatccaaccaggtccctcatcctccaccatcacctggtgacgtctgatcaccctgcctgcctagagcaaggaccctgtgaggtgggtttagccagacccctcagccctgatgtctccttagtcattcccacccacagaccccacgctgctcctcggcttctccaccctctgccctgctgtgttggggttgagctccatctcccccaaggccgccaggcagggccccacaccacatgatgcgccttggtgcagtcttcctcactgatgttactacgcatcatgaggaatttttttattcaacagatacaaagacctctgcttgctgggactctgcaccataaggacacattgagtaagtcttctttggtgctttgagtggagggcagtggagaggggaatgtcaacagggtgcatgggccccaggaggccagcaaggcagggatggcttggaccagggcagtcagactctagggctgaaggctgctggggccaccttgtagatgtgtcacctactaccagggaaagtggccactgtacagggctgctcagcagggggtatgggacatcactcctcgagaaagcacggtggggtggatatgtcatagcagtgtgtggttcctgcctaaattgtcctctgtgagttcagctgtgaagagaggacgagagttattggaaggacgtcctgtggtctggaaggacgtcctgtgggaggacaggctgggctccaggggagcttggaatcctgcactgaagaggactatagacacatgatgggggtgaccctggcctgaaaaaagcagaagttaccaaggatgtgatttgaagctgtgattgtgtctcatcatgtcacactgattaggggtgcggaggggttgtgggctggatggtgcctgtccttatccgtggagacacttggggatggagcctcctgccacctgcagctgaagtcccaatggtccagcaaatgaaaaaaatgacacaacagccacacgtggacgctggcgaactggtaggaaagaggaagcggccgggtgcggtagctcacgcctgtaatcccagcactttgggaggccaaagccggtgaatcgcttgagcctaggagtttgagaccagcctggacaacatggggagaccatttctacaaaaaaaatacaaaaattagctggtgtggtggctagcgcctgtagttccagctactcaagaggctgaggagggaggactgcctgagctctggagcttgaggccagcctgggcaacataaccaagaccctgtctttacaaaaaataaaaataaaaataaaaataaaaataaaatgctgatacatgctagaccgtggatggactttgagaatactatgctgagtgaaataagccgtcgcaaacgacaaatcccgtaggattctgctcctgtgaggtccctagaggaggcacgctcatggagccagaaggtacaatgggagctccagggcctcgggagtgggtgtttaacagggagtttcaggttgggaggatgaagaggttctcgagatgagtgacggtgcccgacatgggtgggtgaaaacgaggaaggccaccgaatgggacatgggatggcgcttaagaggccggcagaaacctcgttacctaccgagggtggagcctgcgtgctgacggataggccgagtccccgccccgaaacacaccccgcgcacgatgctccgccccacacgcatgccccacccacccagcaggcacgctcgccccgcccgccccttccagctcgggaggccctgctcctcacgcacgcactctcagtcggcctcaaccggcgctgctccgcccctcaggcacgcacgttccgttcacccctcacgcacgcactctgcgcccgccccttcccgcctccctccggcggccaccgccaggggccgctgtggcacccgcccctcccgcttccttgggcccttcccgctgccccactcttgtccaagatggcgaccgcggcgctgcttcgaggcgccactccggggcgcggcggcccggtctggcgctggcggctgcgcgcggccccaaggtgccgcctggcccacagctcctgcagtcctggtggcgacccaacggccggagcggcctgggcctgcttccggctggacgggcgcaccctgctgcgcgtgcgtggccccgacgcg

SEQ ID NO: 4112 - DNA, 2300 bp, Homo sapien
tgatgttactacgcatcatgaggaatttttttattcaacagatacaaagacctctgcttgctgggactctgcaccataaggacacattgagtaagtcttctttggtgctttgagtggagggcagtggagaggggaatgtcaacagggtgcatgggccccaggaggccagcaaggcagggatggcttggaccagggcagtcagactctagggctgaaggctgctggggccaccttgtagatgtgtcacctactaccagggaaagtggccactgtacagggctgctcagcagggggtatgggacatcactcctcgagaaagcacggtggggtggatatgtcatagcagtgtgtggttcctgcctaaattgtcctctgtgagttcagctgtgaagagaggacgagagttattggaaggacgtcctgtggtctggaaggacgtcctgtgggaggacaggctgggctccaggggagcttggaatcctgcactgaagaggactatagacacatgatgggggtgaccctggcctgaaaaaagcagaagttaccaaggatgtgatttgaagctgtgattgtgtctcatcatgtcacactgattaggggtgcggaggggttgtgggctggatggtgcctgtccttatccgtggagacacttggggatggagcctcctgccacctgcagctgaagtcccaatggtccagcaaatgaaaaaaatgacacaacagccacacgtggacgctggcgaactggtaggaaagaggaagcggccgggtgcggtagctcacgcctgtaatcccagcactttgggaggccaaagccggtgaatcgcttgagcctaggagtttgagaccagcctggacaacatggggagaccatttctacaaaaaaaatacaaaaattagctggtgtggtggctagcgcctgtagttccagctactcaagaggctgaggagggaggactgcctgagctctggagcttgaggccagcctgggcaacataaccaagaccctgtctttacaaaaaataaaaataaaaataaaaataaaaataaaatgctgatacatgctagaccgtggatggactttgagaatactatgctgagtgaaataagccgtcgcaaacgacaaatcccgtaggattctgctcctgtgaggtccctagaggaggcacgctcatggagccagaaggtacaatgggagctccagggcctcgggagtgggtgtttaacagggagtttcaggttgggaggatgaagaggttctcgagatgagtgacggtgcccgacatgggtgggtgaaaacgaggaaggccaccgaatgggacatgggatggcgcttaagaggccggcagaaacctcgttacctaccgagggtggagcctgcgtgctgacggataggccgagtccccgccccgaaacacaccccgcgcacgatgctccgccccacacgcatgccccacccacccagcaggcacgctcgccccgcccgccccttccagctcgggaggccctgctcctcacgcacgcactctcagtcggcctcaaccggcgctgctccgcccctcaggcacgcacgttccgttcacccctcacgcacgcactctgcgcccgccccttcccgcctccctccggcggccaccgccaggggccgctgtggcacccgcccctcccgcttccttgggcccttcccgctgccccactcttgtccaagatggcgaccgcggcgctgcttcgaggcgccactccggggcgcggcggcccggtctggcgctggcggctgcgcgcggccccaaggtgccgcctggcccacagctcctgcagtcctggtggcgacccaacggccggagcggcctgggcctgcttccggctggacgggcgcaccctgctgcgcgtgcgtggccccgacgcggcgcccttcctgctagggctgctgaccaatgaactgccgcttccgagtcctgcggccgcgggggccccgcctgctgcgcgcgcgggctacgcccacttcctgaacgtgcagggccggacgctctatgacgtcatcttgtacgggtgagcgcgtgctgggagggcgctcgggggcgggcacccaggggagtggccagggaccggcacccagggacagggcgggcgcccggggcctgcagagggcgtggggggtgggcacccggggagggccgggatggggtggaagctcaagggtgggtgggccagcgactggcactcagggtcaggcacccaggagattccacttgggatggacacccaggggaagctcacccagggcccagcacccgggggag

SEQ ID NO: 4113 - DNA, 2300 bp, Homo sapien
acaggggtcctgtgaaggaggcagaaaatccagcctgaaggctggcagtggtgtttggagatgcagcggagcaggcagcagtgaagagggtcaggagggcaggccactcctggaggctgtgggggcattgcttctcccaggtccaggaggccctgcaaggggctggcccgcacagccatcttctctgcaccctccacggccctgtccgggagggggtggggcacgtattcgagcacacacaatgcacacacacttctgcatggctggggcagctcagggccaagctcctggtgggggagtgggctctccttccagcctttcctttctccctggtgctgtggactgaatgtgtgtcccggagattcacacgttgaaatgctcacccccaaggtgacaggattagaacgtgagcttttggaagtgatcagtcatgagataaggctgcagaatggcataaccgttactccagagacccctcaccctccttctgattgaggacacatgagagatgttggccattgcccggaagagcctgaggtacgctgtgaggacacatagaggcctggcactggatcagggatggggcgaagcctggaggcacagagcagattctgagcacccccatcttccccaccctccctcctgccacagcctgagctgtcctcctgggcccagctccagatcctgcccggccggccccttctttggctccctggtgctggtagctggggccctgttggcagcacaccgcaggataaatgcccccaggtgcggggtgcagggtcccgcctcacatgccgtcctggctccctcctccctccatggaggcctctgtgggtagagactcggctcctcctctggacctgggccctccatggaaaggcacagggctcccactgggtggccctctctggctgctcttcccccgttggggcctgcccagtgcccggtccacacttcttcctggccagggccgtggggacagggccagcccctcttgggtatgaagcagggtgccatcagcatcccctccccagggctggtccctccccccggtcaggctgggttctcacaggacactcctgtgctcccatgtaaggatgactctgagacccagctgagtgttccaggagagcccccgggtgggcagtggcctgggcctggccaagcagggtgcaccaggctcctgcccccatccctccaccgctggccctcaggtgggtcctgggtcccctctgggggcagtactggggctgcctcaagatccatcctgggctcctcttggggtggtcccttgtctccctcagagccttcctgggtcccccaggctccttcctgccccacatgccaggatgctggtttgaaggggagagtaggccagctacggcccctggcccgcatcactgctaaggacatggggtccccccatccctggctgtggtccccagcccgcatcactgctaaggacaagggtctctcggtccctggctgtgggccctggcctgcatcactgctgagaacacaggcaaccctggcctccatcactgctgaggacacagggtccccccgtccctggctgtggcccccggcctgcatcactgctgaggacacaggtgttccctgtccctggccatggcccccgaccttcatcactgctgaggacacaggtgtctgttccccatccctggccgttgccccctggctggcatcactgctgaggacacagggtcccccatccctggctgtgacccctggcctccatcattgctaaggacacaggcatttgtccccctctcccttgctgtggccccaagcatctgccctttgcctcccacagggccgagggtgaaactgaatccgggacagtgacacccgggctattttggggctgggctgggccggcctggccggcacagggggtggggtgggggcgggcccaggcttctccagctgacagtgtccgcctgtccttttgtccccgtccagtttgaggagcggccggagtgtgggctgctggtaggcagcctgctggtcctgggccctcggagggaggtgagacccggcagcccctgcctcccagcctgtgcccccagcctgcgtgctgcccagagcccccatagagagaggtgaggagacagagccgggcagggtgggggctgttctgtgccctggagggtggctccactaaaggtcatgtctggggagtggggaagccttcagggtctggccacagtgcagctccctgtggcggggctggggttccagcctctgctccctctgagccccggagctgggctgct

SEQ ID NO: 4114 - DNA, 2300 bp, Homo sapien
aggctggcgggcacctcccggatggtgagcgtgtgccgggtgcgatcacagtggatctcatacacactgctggccttcagggcctgcccatccaggaaccactcacccgctgaggccaccgtgaggtccacggagaaagtgacctcgccaccctctaccgcctgcaccgccttcagcggtgtcctcacggccagcttgggggctgtggggcgggcagcgtcagaaaggggccgaggaggagtggggagtgctgaggaggtctctgccttccccttctcttcctacagagcctagacctaaatgttcctcctccaggaagcccagccaacacacagagcgaccatagcatgagtcaggctcatgaaggaacaaggacaaggtacagctgccctgagacccctccagcatcctacaagccccaccagagtggggcagccctggagccccgtcccctgggtctgctggagacaggcaggctcccaggggccctgtagtggggtcacctatccttcccaccacggacactgcaccagggcaaggccttggcagcccccctccccacagaaggtccccatgaggccactctggcctcccctgaagctggacctgggggattccggggcaggtgagcagccccgtaggttgtaacagggaggtcccacttacccaggtggacagtccccgggaactcgaggtagggactctgaccaaagctgttgagagcggacactcggaactggaagttcccctcctccgccacatcagccacggtcagctcaggtgtagccacccattcagcctcgtggcacctgatccaggtgtaggtgccaagcttcttcttctctaccaggtagccgtcgatagtgacagggcgttccccatggggtggtggggaccagctgagaatcacggaactctccatcctggcctttaccacaggatccacagggggttgcaggggaggcttcctgggggctgtgtagagggtgggcagaggtcaactactgggagcctcttcctgagccctgggtctggaatcacctggaggggtgtcacaggatccccagctctcttggggctgctctggggacctggaccactggccacaacctccagccccagacctgcagccacttctctggttgcagctgaaagactgcgcgggggctcagggagcctaacgttggagggccagggctatggtcttgcccggcggccctcggtacagcaggctgaagcccagagagctgaggtaatggagggcaggggactgggaccagggagacagcagggaagcgatgccatcctgggagcaccctcaggccctcacccgacacgcagaactgggtggacgtctggcagtcgccagccataaaggccacctggcccacatcctccaggcagcactgggagatggttagtgtgtggcgcgtgccctccgcggagatggccacgcggccccccgccaccacttcctcctggttccgcagccagtggacggggcccaccgggaccgccagctccacgcaaaacatagccgtgtcgcccacgcgcaccgccgtcttccgagggagctttcggaggaggtttcctggggtggagggagccgggccagtcagaccagcccctgcacgccccgctccagactcgctcctccgcttgccccctgtctcccggttcccaactgcctccgattcactcccccgcgcaaccccttacctgtcccgccggcccaagtcccagctcggtcccacaagacccctgcccactccgtctccccttccccctaatcaccaccccgtgcccggcccgagcttgctcctccgcccccaccttacctgcccttcccgccccagtcccgcccctgcctgccccagtcccaactcgtacctcgcaagcccagtccgtctgcaccctgcccgcccccgtgcccgcccagcccgtgcggcctggctcccccctcccccgcccccggctcccttctcggtgcctccttgcccccgctacctccccgaagccgccctgtgccccgccccgtgccccgccccgcctgccttggactgcgagctccgccaccgtgcggctgccctctggcgtctcgcagatgtacaccgcgtcgtcgtcggccgagacattgcgcacggtcaggcggcgctcggtgccctcctcctcgatgccgtacttggcgctcgcccacaaccgcgtctcctccttgaaccacgcggcctcagtggacggctggggcacctcacataggaacgtggccgactccttctcccgcacctccagatcttgcagcc

SEQ ID NO: 4115 - DNA, 2300 bp, Homo sapien
tggtttcctcgcttaaagtcgcacccgggagggtgcgcagctgcggcccgcgtgtggccagggccgcgctgtttggattgggatcccggggcgcggtgccggcagctctgcctgggcccggctcagggcaggcgccggggctgtgcgggccctctgtaccttggcttgtccgtggaggagggcgagggccgccgtgacctcccctctcctgcgaccccagaggcgcctgtgctgttcaaaaagaagctggagccgcagacggtggaggagcggagctcggtgaccctggaggtggagctgacgcggccgtggccggagctgaggtggacacggaacgcgacggccctggcgccgggaaagaacgtggagatccacgccgagggcgcccgccaccgcctggttctgcacaacgtaggttttgccgaccgtggcttctttggctgcgagacgccggatgacaagacacaggccaaactcaccgtggagagtgagccgcgggcgggaagggcggggcatcgaggaggagtgaggagggaggcggggcattgaggattagtgaggacgtaggcggggtgctgaggggaggagggaggaggggcactgaggaagagggagcggaaaagagaggagggaggtggggcgctgaggggaagagagaggagggaggtggggcactgaggggaggagggaggagcgaggtgggacactgaggggagtggcgggccctctggaagggccgtagggttgggagaggggcaggtctcccgcccgaggggcgagcggtgggggtaggcgtggggcggcttcccggccctccccgagctcctggggaagccggctgtgccccagggttctaaaggcggtggtctcagagcagcggctgacccgtgacaccgcgtgtgcaccgcagtgcgccaggtacggctcgtacggggcctgcaggcagtggaggcacgggagcagggcacggctaccatggaggtgcagctgtcgcatgcggacgtggatggcagctggactcgtgacggtctgcggttccagcaggggcccacgtgccacctggctgtgcggggccccatgcacaccctcacactctcggggctgcggccagaggatagtggccttatggtcttcaaggccgaaggagtgcacacgtcggcgcggctcgtggtcaccggtgcgttggggggccggcagggcacagcacagagcacgcctgcctgtcccgagggggccccgggaaggtcggtgggttctctggggacctagatgagccagctccgtataactccgtccagctggggcactgccccacccctgtccctgtccccatcctgaaggcttctccaagccctttttctcttcccacctcctccttcctcctccccagagcttcccgtgagcttcagccgcccgctgcaggacgtggtgaccactgagaaggagaaggttaccctggagtgcgagctgtcgcgtcctaatgtggatgtgcgctggctgaaggtgcctccctgccgaccccactcggttgcctcctcccctcctctcatgtgggcgggcccaagcagaaccccagggctggaccacctgagtgcctgactcggcctctgccctgcacaggacggtgtggagctgcgggcaggcaagacgatggccatcgcagcccagggcgcctgcaggagcctcaccatttaccggtgcgagttcgcggatcagggagtgtatgtgtgtgatgcccatgatgcccagagctctgcctccgtgaaggtacaaggtgagggctgcgtggggcatgtggggcatggcaggtatgggcacctcctcctgtcctccgtgtcccccagccaggggcttggcagctctactttcacctgcacaacccttggcatgctggggcactgggtggggggtgctgggagcagctctgtgtgtccgggtgtggcagggcctcccttgccaccctaggccgcaacatccagatcgtgaggcccctggaggatgtggaagtgatggagaaggacggtgccaccttctcctgtgaggtctcccacgacgaagtgcctggccagtggttctgggagggcagtaaactgcggcccactgacaacgtgcgcatccgccaggaaggttcgaggacaggcggctgtagcaggcacggcccggcccccaggtcttcctctgcccccgcccatactgagccgcctttgtccccaggaaggacatacactctcatctaccggagagtcctggcggaagatgcaggagagatccaatttgtagccgaaaatgcagaatcgcga

SEQ ID NO: 4116 - DNA, 2300 bp, Homo sapien
catgaggtcctgtgggggaggcatggcaggggcggggggttctacctggtggcagcgaggaggaggatcagggaaagtggtgctggggtggcagggagggaggctctgcagacaggtggggtggggatgggccagtagggctaatcagaggtatgcggggagggacatgagttcctgggactgagctagggtatgtggttatggttcggaagtgggggtttggggagaggactgcagggggtggggctacatggggcaggacctaccctgctcttggtgggccgggacagcgggtaggacctgggcagtggaagtgggagtgtgggatatgggagggcagggcgggcagaggtgggcgcactccccttgcttgtggtctgctctgtggagcaggtcctagcacagctccaagggggacacttggcctgaccacctgctggcccctggcgggcagacatgggctgttggggcctagtggggtccaactgagggcccaagaccctcagtgccttgtcggagcctgggcctgggagcctggagcaccatctctgatccaccccatgcccccaccacgttcacagagctgccagtgaccctcgtgcgcccgctgcgggacaagattgccatggagaagcaccgcggtgtgctggagtgtcaggtgtcccgggccagcgcccaggtgcggtggttcaagggcagtcaggagctgcagcccgggcccaagtacgagctggtcagtgatggcctctaccgcaagctgatcatcagtgatgtccacgcagaggacgaggacacctacacctgtgacgccggtgatgtcaagaccagtgcacagttcttcgtggaaggtgcaggcagggagggcagctctgcaggttgcttttgttggggggagtctcccaggtccatggtttgccctacactcctggagacgctgggtctgggcagctcaggaggatgctagcatgcatctagcagggcgggggcttgttcccaggaaggaaccctgccggaggggcagcatgtcctatccgcgggatccgccagcgactgctcctccccaacagagcaatccatcaccattgtgcggggtctgcaggacgtgacagtgatggagcccgctcctgcctggtttgagtgtgagacctccatcccctcagtgcggccacctaagtggctcctggggaagacggtgttgcaggctggggggaacgtgggcctggagcaggagggcacggtgcaccggctgatgctgcggcggacctgctccaccatgaccgggcccgtgcacttcaccgttggcaagtcgcgctcctctgcccgcctggtggtctcaggtgagcactcccgccccggtgggtggacgtggggcagagccacaagaggacaaggttcagggctgttgggaggcctggacagggctgtgggtgggtacagggcagggccatgggaggagaaggctcagggcagtgacaacacagttcagggccacagatggatatcaattagggccaggggaggacacagttcaggactgcagaggacacagctcagggccaggggaagacatagttcagggaatggtggacacagctcagggccaggggcggacacagttcaaggccataggtgagcaggctcagggcttggcaggcagggcagggtgattggttcctgtggtgccgtggcccagcctctccccactccctgcagacatccccgtagtcctcacacggccgttggagcccaagacagggcgtgagctgcagtcagtggtcctgtcctgcgacttccggccagcccccaaggctgtgcagtggtacaaggatgacacgcccctgtctccctctgagaagtttaagatgagcctggagggtcagatggctgagctgcgcatcctccggctcatgcctgctgatgctggtgtctaccggtgccaggcgggcagtgcccacagcagcactgaggtcactgtggaaggtggggcatgaggggcatggggctactgagagggttttggggaggggttgcctggtgatgtggacactgaggcccggtgtgtctcttgcagcgcgggaggtgacagtgacagggccgctacaggatgcagaggccacggaggagggctgggccagcttctcctgtgagctgtcccacgaggatgaggaggtcgagtggtcgctcaacgggatgcccctgtacaacgacagcttccatgagatctcacacaagggccggcgccacacgctggtactgaagagcatccagcgggctgatgcgggcatagtacgcgcctcctc

SEQ ID NO: 4117 - DNA, 2300 bp, Homo sapien
caagttcatccccctacggagcagaactcgggcccaggcatacagggagcgagacatcctggccgcgctgagccacccgctggtcacggggctgctggaccagtttgagacccgcaagaccctcatcctcatcctggagctgtatcctgccctcagcccctgagacggcttgaggaggggcaggcagggccaggccggggctcagaggagccatgtgcacggtgtcccctgcctggctgggtggtggcgacagccacccagccaggaatttgggtggggaggcttctgttccacggagcagtaactggagtccccaggggctactggtggctagctggccctgatgacctgatgccctcagcagggatggcgggggtcctctcccactctgtagatggcctcttagagagaaaggagctgcctggcccggctactctggggctcaccccgccacccacatggccttgtcttggggggtctcctctggtgctcttgacagggcgtcagctggacacatggccccctgcccaaagtcggtgtcctctttgcagggagagggtgctggatgggctctgtacagaggggacaggatgccccctcccaccgtgccactgcagtgagtggccttggtccccagggtcagcctgcagcccctccctctcctcagggctgggtgccatctggggttcagaggggtccccgctccaccctcctcaaccctgagcatcatcccctgctgcctccagagatcagatgtacccatagacctggctgcctcactgtgagtgtgggtttctggggacaggcaggtttcagcctcccaagcctgcttttccttgatgggatcccaggtgctcatccgaggagctgctggaccgcctgtacaggaagggcgtggtgacggaggccgaggtgactgggctgccgcccgccactgccccagccatgcaccctgccccagcccccgctcagacatccggtccctgcagatacagtcccagccacagccttctctagctcaggggcctctggggctccccagggcgtgttgacccctcattgggctctacacagcctgccaccccgcctcacctggccagctgaccagccctgcctgcccctcccccactgaggttcacaagtccattgtatcctccccacctttgagggatctcctggcttaggggcacacggggcccaggagcgctttgcatatcagctgccgaagccaggaggaggctgggcttaaagtggagagggaggctggggctgggctcccgcctgaatagcggcccttgccgcaggtcaaggtctacatccagcagctggtggaggggctgcactacctgcacagccatggcgttctccacctggacataaaggttcgcatgtcctcacccctgcaccccagagcctggggcctgcaggccaggtggggcaggcccaccactcccagtctgagaggacttgcttgcctccagggacagggagctcaccacctctaggcagccctttcaggtggggcgtggctctggtggagcagaggctgtccccaaatggctgcaccgggtgctccccactgtcccaccctgcccccgggcctctgggtgtccccaccaggcctatcagccccaggagtcacccccttagggcacggctctcacccactcccaactctccccaacagccctctaacatcctgatggtgcatcctgcccgggaagacattaaaatctgcgactttggctttgcccagaacatcaccccagcagagctgcagttcagccagtacggctcccctgagttcgtctcccccgagatcatccagcagaaccctgtgagcgaagcctccgacatttggtgagtgggtggctgggccaacgggtctgggtctgcaacttctccgggaagccagttcccacagatggctgggccctctcctctgccccggggaggcagcaggcagcctactggtcagccaaggggtcctccctgaacctgtctcctcctgcagccctgggctccccacttccctgtgtgtgtgcctcttacctgacagccaggcctggggtgacacacagtgtgcgcttttgtcttgcagggccatgggtgtcatctcctacctcaggtgagcagagccctgccccatcagctgcctcctccaaagctgacatgagacccctcccttgtaggcccaccgagggcatgtgcactgctggctgctccccatatcagaaacctgagacccaaggggctactatcttgggaacaggcggtcagccaaccctgataagaggttc

SEQ ID NO: 4118 - DNA, 2300 bp, Homo sapien
gtacaggattttcactgcttcctggtatgcacagcatgaggaaccgtgggaatgagaattaaggaccaagaaagcagaatggaggtgtacccatcctggagcttattacagtgatagctgatgaagctgaaaatgcacaaggtcccgagtggcttggagaaaagatagggtgggtagccaggcatgtctgtccgtgctgactgtcctaccaaaacaccatggtttgcacatggcagatgtatacaagctggagactcacagctctggaggctggaagtctaagatcaagccctggcaggtttggtgtctggtgagggtgcttcctggttcacagacaacaccctctcactgtgttgtcatatggtgaaaggggcgagggttcctttataacactaatcccattgtggcggcactgccctcctgacctagtcacctcccaaagcccccgcctcctaacatcatcacactgggtgttgggatttcaacctatgaatttgtgggggcatagggcagaatttttggaccccagcataggcttggtccaaggcccttatgtgagccagcaggtgagaaggaagaggaggaggagtagacactggcttgggaacaggagagctcagcaccttcagagccagcttggggacagatggggtgggcagccagaacccttgaggtagctttgcaaaggggggtgaggcctgggctagggtagcaaggtcgaggactagaaatgccccatatgagaaaaaggaaagaatgtggctggggctgtcagcctctggcaagaggctgcccacctaccatgagggctcacgcttattggagggcattgagttccctgattcaccaggcagatttcagtttgtccccattgtctttgaggaggggacagggtgtcaggtgcaaaagggcaggcttctgtgacaggactcatgtctcatggtcctgcctggcctctcccgcaggcgaagctggagaagtcactggagcatctccggaagcagatgcaggatgcgttgctgttccaagcccaggcggatgagacctgcgtcttgtggcaggcaggtgctggggctcccagggtcctgggtggcagggtagggggtgaaggtcctgtataggagaccccagggggcgatgctggccaggcacacttgcccttggcgccccaggaccagtcactgcttcagcctggccccaccgagcccactgaagggctggtcctttcccacgtgcacctgtcctgccaggtcgtgggcgtgggctcccatactgcaagggccccatcctggggtcccagcatgcttgggtggcaactctcaggtgtatttagggtctgggccctggaggtaaatttggaggttttgagggactaggtcatagatgtgggattcagccatcctgaggagtagatttgggatctgtccagttctggggtagatttggggtctgggaggctctgggtggtggatttgggatctgggaagccccaggggagaatttggaggtcaggagggaccctgggtggtagatttgtagtccagctggccccaggtggtagatgcagggttctaccaagccaatgggtggatttggaagttggggagggactagatagtggatttgggatctagtcggccctgggtttagatttggggtctagccagtcctgtgtggtagaatgggatttggctctccctgagtggtggatttggggtttgggaggtgccacaggtgggtttggggtctggccagcaccaggtggtgggtttggggtcctgccacacctggtgctgtgctttggctttagcaggccccgggggtggggttgggtgcagccaggcctctgggtgggcttggggtctgaccaaacttggggtctggctgggcctggggtctggcctcagctgtccttctccctgggctccacagaagatggtggagagccagcggcagaacgtgctgggtgagttcgagcgtcttcgccgtttgctggcagaggaggagcagcagctgctgcagaggctggaggaggaggagctggaggtgctgccccggctgcgggagggcgcagcccacctaggccagcagagcgcccacctagctgagctcatcgccgagctcgagggccgctgccagctgcctgctctggggctgctgcaggtgagctgggcggggagcagccatggtggccacacgggcatggcctggccacactgggggagggagaaccagaaagtgcaagaagcaggggcagagaggttgtctgggctgagaggtgaatggcatggctggatgtg

SEQ ID NO: 4119 - DNA, 2300 bp, Homo sapien
ttggtgtgtggaagcatcaagtaaccccagattcacagcaggggaggcctctgcggagttaggggaccattggccacatccaccactagggcccggggactcccacctttgaccctgaatgccccacacctctccccatctctccaccaccacgcccatctacagaggatgtggtgcctgatgccacctccgcgtacccctacctcctcctgtatgagagccgccagaggcgctacctcggctcttcgccggagggcagtgggttctgcagcaaggaccgatttgtggcttacccctgtgctgtgggccagacggccttctcctctgggaggcactactgggaggtgggcatgaacatcaccggggacgcgttgtgggccctgggtgtgtgcagggacaacgtgagccggaaagacagggtccccaagtgccccgaaaacggcttctgggtggtgcagctgtccaaggggaccaagtacttatccaccttctctgccctaaccccggtcatgctgatggagcctcccagccacatgggcatcttcctggacttcgaagccggggaagtgtccttctacagtgtaagcgatgggtcccacctgcacacctactcccaggccaccttcccaggccccctgcagcctttcttctgcctgggggctccgaagtctggtcagatggtcatctccacagtgaccatgtgggtgaaaggatagacacagaccgggggactcgggcactgctcctggctctgcagaaggtgtgggccttctgcttactgcaggccacctgccagggttctctggcatcacgctggcagccattagacacacaggggggtttctcaaattctaaatataattgtgattagaactgtcaaacattaagagggtatactgacagatgcttcctagaggaaacttttgaaagcccctgcgttctgagtggaccgatttctaaatccatacctacacaccaggaacagcgtggtcacgttttttttagccatgcccccacccccactttggaatgacaggaatctgtggctcccagcccccccaggggtttaggttactctgtcaaagaagtagaaatatcctatggtggggaggagcgggggtggttgctgtgtcagggatggtcccaggctgcccatagaaatgtcctatgcatcctattgggtccttcgatgggggaaaatgggaaaggctgaacccgtaaaaagcctcagagctgcccacccccatcccgttcgatccccaaagttgcacgagcaggggcaaaatcccaaagagattaggatttatgtaggggcctcttttccacagcgcccttaccttttccaaggaaccccccacccacccctgcagggtcaagcactttaacagcctgtgtcagtcactagcaaggcagaattccagagtaagcgtactcctacctcgacaaagccggagtgtctgcgcgaggggctgcctggaacagcatgcccctttggagtggttcccgcagaaagaatgtgggcctcctggagagctggtcctggagggatgcccccgtcccatcccccaactccaatcattctgaccttggcctgccaaggctgtgagggccgggccttccgaggatacccgccctgggaagcacgggctgagggggtgaggacgcactaggggtatggcgaagggctccaatgccccaggctgcggactcccttagtccttgcagttgcttccgtgtgccccgccctgagtccccatccctccttgccctgccccctgctccatccctcccctgcgccccgccccctgtccccatccctcccctgcgccccgccccctgtccccatccctcccctgcgcctgagtcctccccagggcaggggtaaaagacctggccacaagaaccggagcggtggtgacgccaggtcagcaagtgaaagctctccaattccgtcccgcccgcgggccgcgtgactggcagcggccaatcggaggcaaaagcgggttgttccaaaaaaaaaaaaaaaaaaaaaaaaaaaaaaaaaaaaacacacaaaacccacccagtcgcttcctgcttccgcctcggctcctcttcctgccggcatccgggatccctacgtcccgcgtcccccgagcgctcggagcctacgcgcccagcgctaccgaaacccagagtcctgcgccctggagtccccgcgccccggagcccgagcacccgggagtcccgagcctcgcgccccggagtgcccgagcctgcgccgccgcacccggataccccgcgtccccgcgagctgccga

SEQ ID NO: 4120 - DNA, 2300 bp, Homo sapien
gatgactaggcgtggggactcaaggccaggagaaatggccaccagtcaggacctgggcagggctgggggcggcattttggctgaaaccgtaagagacttttaaaccagagcaactccatcttgtatagaggctgggtaaaataattctgagacctgctgggctgcattccccagaggttagacattccaagtcacaggatgggataggaggttggcacaagatacacgtcataaagaccttgctgatgaaacagtatgtggtgaagaggccagcaaaatcccaccaaaacctagatggcgaccagaataacctctggttatcatgactgctcattatatgctaattttaatacgttagcatgctatgagataccctcaccagtgccacaacagtttacagatgccaagacaaggtcacagttaccctatatggtctaagaaggggaggagccctcagtttctggaattgcccttccttttctgggaaactcatgaataccccaccccttatttagcatataatcagtaaatagccataaaaatgggcaacctgtagccctgggggctggtctgcccatggagtagccactctttattcctttactttcttaataaacttgctttcactttactctatggatttgccccgaattctttcttgcccaagatccaaaaccctctcttggggtctggatcaggacctgtttctggtaacaaaaccacctggggtgtcggcaagacccaccccgtcccgcctggttctaggggacctgacctgccaggtggtccctccaaactggtccgcccacaggattgggacgcccctccctgtaccctcagcctgatgctgactgccaaccatgtgggcagacctggcggctgactggctgctcctggggacccccttcatagcttctcaacaggcactcgctcctgctgcctcgcccccaccccagcccacacaaactcctctccatcccctaccccgaccaacttagcccctcacctaaccctccagcctggggctcgcgtgccctcccgcagccccaaccccaggttgagaagcctcttccaatcccactccccccaccctgacgctcgcctgcccgcccctagccccaccagctgtccccattccactccccacccccaagtaaccccccaactccccaccctccacactcccttaacctcccctaaaagtcccaccccaggccaacaagactcctcccttcgctgggctgtggaccacatcctccccaccgcccagtcagcacccgctgcgcctgtccccggctcgtccagagccttccaccccctgccgccttccttccccaagccacccccaacctctcctaagaggcgccgccccagtcccggccgccgaacactccctcgcccagcattcccctcccccgccgccccccagcccccgctgacgccacaaagtccctaggcctcccgaccccaggtccccacgccccgggccgggccgcagcctcctgggcttcgtgggggcagacccagcctttcccggcagcgagcgctcggccaggtgcactaggcgctgtgcgggccccccttccccgcggtgagtagcccccaccccgccgcctaggctaccctcctgtggcgcctgggccacgacctaagcctaacccggtcctcctcgccctccaacgcccggccttcccgcctccgccggccgccgcgtccctggaggggctagcgcgcttcaacaaggtaactctaccgggaccctagcggaccagagcgggaaggacagccatcccggcagccagagccagagccccaggcccgctgccgctgtccctgcccggcttcggtcagggtgggctgggtgcctccgttagggctcttggggggagtcggagggctggcgccgggtggttggcgtgcagaaagctccgagaaactggacgtgggacagagccggggaagtctgagacccctagacgccctcgctttaggggatggcagaacggaaggggagaatcgtgcttgcagtgtagacgcgattttcaactccttctgcaactcggtccccatagcaaccccgtggcgtaggcgaaagtctgtagatctccactgcgtggggtcgcgagtgttgagattgcagggggcatctatgtgcatgcttgtgtgcctgtgcgtgtgtgcgcgcgtgtacctgtgtgtacatgcatgtatgtttaccgatatgtgcatctgtgcctgtgtgtgctgtgtttgtggatcagtgtttctgtgcgtacatgtttgtatttgtgtggtgtgta

SEQ ID NO: 4121 - DNA, 2300 bp, Homo sapien
ttatctacctatgacctggaagccccctccccacttccagttgtcccgcctttctggatggaaccaatgttcatcttacatatattgatcgatgtctcatgtctccctaaaatgtataaaaccaagctgtgctcggaccaccttgggcacatggctgtgtcatgggcgtgtgtccttaactttggcaaaataaacttcctaattgacttaaactagcctcagatattctgggttcacaagggtaattcacttaatcggccagtgtgcgcagccagcccgcacctgacagcacacagacccctttgtgtgtgcgagtgatgagagaccacagaagaaacactctaccgagtgagcccagggaaagccagccatctatgcctgtggccagctgtctacacccgcacacccaggagattgcagaatggtgcctcttagccttcaaggccctgttttcctgcctgtctgcaccccctgtgtgggccaagccttagtttcttcatctgtcctctctctccaatcccaggactctgactcagggcacgcaggcctctggctcctgttcctgaaagcaggagatgaaccctccatgtgaaaggtgcatccctctactggaggatgaagcgtgatgactaggcgtggggactcaaggccaggagaaatggccaccagtcaggacctgggcagggctgggggcggcattttggctgaaaccgtaagagacttttaaaccagagcaactccatcttgtatagaggctgggtaaaataattctgagacctgctgggctgcattccccagaggttagacattccaagtcacaggatgggataggaggttggcacaagatacacgtcataaagaccttgctgatgaaacagtatgtggtgaagaggccagcaaaatcccaccaaaacctagatggcgaccagaataacctctggttatcatgactgctcattatatgctaattttaatacgttagcatgctatgagataccctcaccagtgccacaacagtttacagatgccaagacaaggtcacagttaccctatatggtctaagaaggggaggagccctcagtttctggaattgcccttccttttctgggaaactcatgaataccccaccccttatttagcatataatcagtaaatagccataaaaatgggcaacctgtagccctgggggctggtctgcccatggagtagccactctttattcctttactttcttaataaacttgctttcactttactctatggatttgccccgaattctttcttgcccaagatccaaaaccctctcttggggtctggatcaggacctgtttctggtaacaaaaccacctggggtgtcggcaagacccaccccgtcccgcctggttctaggggacctgacctgccaggtggtccctccaaactggtccgcccacaggattgggacgcccctccctgtaccctcagcctgatgctgactgccaaccatgtgggcagacctggcggctgactggctgctcctggggacccccttcatagcttctcaacaggcactcgctcctgctgcctcgcccccaccccagcccacacaaactcctctccatcccctaccccgaccaacttagcccctcacctaaccctccagcctggggctcgcgtgccctcccgcagccccaaccccaggttgagaagcctcttccaatcccactccccccaccctgacgctcgcctgcccgcccctagccccaccagctgtccccattccactccccacccccaagtaaccccccaactccccaccctccacactcccttaacctcccctaaaagtcccaccccaggccaacaagactcctcccttcgctgggctgtggaccacatcctccccaccgcccagtcagcacccgctgcgcctgtccccggctcgtccagagccttccaccccctgccgccttccttccccaagccacccccaacctctcctaagaggcgccgccccagtcccggccgccgaacactccctcgcccagcattcccctcccccgccgccccccagcccccgctgacgccacaaagtccctaggcctcccgaccccaggtccccacgccccgggccgggccgcagcctcctgggcttcgtgggggcagacccagcctttcccggcagcgagcgctcggccaggtgcactaggcgctgtgcgggccccccttccccgcggtgagtagcccccaccccgccgcctaggctaccctcctgtggcgcctgggccacgacctaagcctaacccggtcctcctcgccct

SEQ ID NO: 4122 - DNA, 2300 bp, Homo sapien
agagtgagactcaggtcaaaaaattaaaaaaaaaaaagcatagtggccgggcacggtgtaatcctagcactttgggaggccaaggtcgggggatcagttgaactcaggaattcaagaccagcttgggcaacataatgacagcccatctctacaaaaaaattaaaaatttaaaaattagctggatgtggtcccagctacttgggaggctgaggtaagaggggcctgggcaacagagcaagatgaaaaaaggagggaaaggaggggaggggaagggagaagaaaaaaaggaagggagggagggagtgaggaagggagggaaggagaaaggaagggagggaaggagaaaggaagggagggaaggagaaaggaagggagggaaggagaaaggaagggagggagtgaggaagggagggaaggagaaaggaagggagggagggagaaaggaaggaagcaagcatagggcccacctctgcttctggtgagggcctctggctgcttctgctcatggtggaaggtgaaggggaacccatgtatgtgcagaggtcacagggctgccgcgagagaggacgccagagagagaggggagaggggtgccaggctcttttcaacaccagctcttcagggaaccaacagagtgaaaactcaccctaaaggagggcaggactctattcagagggtgacaccccaggacccacacacctcccactggcccccccctccctgggctccaactttagggatcaaatttcaacttgagagttggaggagatttggaagcttccacctcccgtccttgatgataagaacgttcccttgcttttactataaggagaacatctttcatatgggaatttcatctcttgtatttaagaaacaacaagaaattcagaatgatcttcctacacctgcttcttcttttttttttttaagtgcctttatctcaaaatagacaatatgccagaaaggcacatctttaccttcttcagaatcctaaggctcatctaagccgtacaggtaagggagttctttgcaggtcataaaaagtgggagattcctttaactctggctgcatcccagagctttgtcactgtgtaaaagtggaatgccggccgggcacgctggctcacgcctgtaatcccaacactttgggaggccgaggcgggcggatcacgaggtcaggagatcgagaccatcctggctaacatggtgaaaccccgtctctactaaaaatacaaaacaaaattagccaggcatgatggcgggcacctgtagtcccagctactctgtaggctgaggcaggagaatggcgtgaacccgggaggcggagcttgcagtgagctgggattgcgccactgcactccagcctgggcgacagagagagactccgtctcaaaaaaaaaaaaaaaaaagtgaaatgccagctgggcctggtggctcatgcctgtaatcccagcactttgggaggccgaggcgggtggatcacctgaggtcaggagttcgagaccagcctggccaatatggtgaaaccccatctctattaaaaacacaaaaaattagccaggcatggtggcggacacctgtaatccctgtaattccagttactcgggaggctgaggcaggagaatcgcttgaacctgggaggtggaggttgcagtaagcagagatcacgctattgcactccagcctgggcaacaagagtgaaactccatctcaaaaaataaaaaaataaattaattttttaaaaaagtggaatgccatgtgctggcttctggaaggctcttgccacccaagtcatggggaagggagaagaggagcgctgagaagacatgaggaagcttgtgctggagagagatgatccccaccaccgcggcctacccgcatcaacccttcacaatgctggtgccagctctggtggccacgaccaacaggcatgaatataagggagaggcgcccgagtggagttccctgtgggccaatcagagagcagtgggccatcacgccacctgaggccagccaatgggaacgcggcaagctctataaaagcgagcaatccgctgaggtctgggcagaggacaccgcggggccaacagtttcggattcatggcccgaaccaagcagactgcgcgcaagtcaacgggtggcaaggcgccgcgcaagcagctggccaccaaggtggctcgcaagagcgcacctgccactggcggcgtgaagaagccgcaccgctaccggcccggcacggtggcgcttcgcgagatccgccgctaccagaagtccactgagctgctaatccgcaagttgcc

SEQ ID NO: 4123 - DNA, 2300 bp, Homo sapien
gttcaaatagtttcatagcactgggatattttctaaagacatgcagatttgtggttagctggtgtccaggaagccctgacttgagtagacccaattttagtagggtaaatataaattatataatattcctgaataattttactggcctgtatttattattacaataaatacttaataattgctaattaccctgatctgataataaatgtattcaaagtatcactatgtaccccatataatatgcaattgttaggtgtcaattaactaaatactagcactttggggattaaagaaaaaataaaaacaaagtaggaattatccatattttgagaaatagattaatgaaaactgtacagataacaacagaagaataacactttctgagctctgattttgtggcaaacattttttaagggattatcgtggattaaatcaatgaacctctctcctccaggatttaggggctattaacacagccatttcagttaatttgcctggaggtctccgacgctcttaaaccctccattttataaggaaaaatgtagttacaaaccgttattttcctaaagtccacatgtatcatcattcatctggttctaacaatactcattttaaatttgcttaactcgcaaatttagttttccttttcaaaaacagtgtacaaattattttgttctccaattttagcaatcaatttaaggggatctttgattaatgtttgaccaacccgaattaaacaaactaaattcctttaaataattatcctattccaaattaagtcttcttaaaaggtttatacctttcagcatctactaatctggttccttttaagtactgaaactttcctcatgacctttagaattcccagccaaataaattaaatcttaacactggtggagctcacattgttaaaacttagcaatttaaatagaaatccatagacttactcttcagaattaaagtgcaaactacttagagatcataaatacttttaatatcagataaatcattaagaaattgcattctgtacttgatgaccacacgggaaccttgctagagtcaagagaacttgtcactagtaattatgaagacacctttacggtgagcgttattaaaaccctactagaggttttgggtgggactcaagagcaaggggtggccacctgtggacgagggttccctgttgttaacagaacacgttgcccacctcgcaagtatgcagcccaatcagtccccagggtctcggttcccgttgcgcccttccccatggccactgcgctcattcatgagcctagggtgatcaggcctccggcctataaagaactgcaggatcagtgcggctcttttctcgagatagtaggtggctctgaaaagagcctttatgtccatcaaaggggccccgggggcggcgggcggcctcacttgcccttggccttgtggtggctctccgtcttcttgggcagcagtacggcctggatgttgggcaggacgccaccctgcgcgatggtcacgcggcccagcagcttgttgagctcctcgtcgttgcggatggccagctgcaggtggcgcgggatgatgcgcgtcttcttgttgtcgcgcgccgcgttgccggcaagctccaggatctcggcagtcaagtactcgagcaccgcggccagatagaccggggcgccggcgcccacgcgctccgaatagttgcccttgcggagcaaccggtgcacgcggcccacggggaactgcagccccgcgcgcgacgagcgcgacttagccttggcgcgcgccttgccaccctgcttaccacgaccggacatttccgagtcaaggaaaaaagacaacggcaaccgaaaagcgagactaaaaacaagagggcagtgaaggccagcgagcccttatgtatggtacagaggtaggctagaccgcggcgttcgattggatggctatggtagccaatcagaaaaagaacctggcactcctaatttgcgtattcctttcccagcgatgacgtagaacaacgtttgatccaatcagaagtgagcaaatcctgagccttcatttgaatacaaaacgtacaaatagagttactccgagcgccgcgcgtttctgtttggagagactcagccatcatgccagacccgtccaaatcggctcctgcgcccaagaagggttctaaaaaggctgtcaccaaggcacagaagaaggacggcaagaagcgcaagcgcggccgcaaggagagctattctatctacgtgtacaaggtgctgaagcaggtgcaccccgacaccggcatctcgtccaaggcc

SEQ ID NO: 4124 - DNA, 2300 bp, Homo sapien
gctggaaatggtgacacaaacgctcagtacttcgaattttcacaacggtttgaggaagcaattactggaaatcttctttttctaaagaagaaaagccaagtcatgaaaacgtaaacgatgccctttccaaagtgaaaactcttcgtgccaaagagctttcctgcgccaaaatggcactccccaaataaatgccgtgaatttggagggggtaggaaaggaattctgcgttgctaacgcctcgcagaaaataatgtggctaaagagggaggcagctacatttgctcagaaaaagggaattcttttcctcctaaattaaccccttcccccacccccactcccataagggttaaagttaccggcagctggggtcgcttattacatccggctcccccgcgcaggacgctgctttgacgccgtgcttcgattcggtatcaaacatcctgccatcgcggtatcctgccaggaaaatatcctcccggaatgttcattgcttaaatctaaacatgtctgtctggtccaggcagggatggaaaagtcttaagcaaatgcagagccaggcaccaccgccaggggaaagtgacaacacccatggcctcagagcccgtggtcttgcgccacgtctggcctcgcccatggggggcgggtagggttggggaggttggcacagggtcttttggggggaggtgacccgcactcctcacctgcacggcgcacgccaacctcatttggacccggtcctgaaccgggcgcaagcgctcaacatccaggaatgcaccacttgcttataaaagacatttggggccaggtgcggtggttcacgcctgtaatcccagcactttgggaggcagaggcggatggatcaccaggtcagaagatcgagactatcctggccaacatggtgaaaccccgtctctactaaaaatacaaaaaattagccaggcgtggtggggcgtgcctgtaatcccagctactcgtaaggctgaggcaggagaatcgcttgaacccaggaggcggaggttgcagtgagcccagattgcgccactgcacgccagcctagagacagagcgagacttcttctagaaaaaaaaaaaaaaaaaaagaaagaaagaaaaaaaaaagaaatctcgtcgtgagttaatagctctgcgcggagggaggggatggagagggggtccttgatcgcctcccaacattactgagctacatcacctgagcagtttctaccccgatttctgtaacgagcagtttttctcgttctgtgccggcgcgcgcgcgcacacacacacacacacacacacacacacggctcagattcggccgcacccggcaaccgctagggtgcatggagacacattaggttacataacccttcaccgtgttcgaaaccctttcttgatcgtgtgggtggctctgaaaagagcctttgggttcaggacgccgaggaacgcctcacttggagctggtgtacttggtgacagccttggtgccctcggacacggcgtgcttggccagctcgccgggcagcagcaggcgaacggccgtctgcacttcgcgggacgtgatggtggagcgcttgttgtagtgtgccaggcgggaggcctcgctggcgatgcgctcgaagatgtcattgacgaaggagttcatgatgcccatggccttggacgagatgccggtgtcggggtgcacctgcttcagcaccttgtacacgtagatagaatagctctccttgcggccgcgcttgcgcttcttgccgtccttcttctgtgccttggtgacagcctttttagaacccttcttgggcgcaggagccgatttggacgggtctggcatgatggctgagtctctccaaacagaaacgcgcggcgctcggagtaactctatttgtacgttttgtattcaaatgaaggctcaggatttgctcacttctgattggatcaaacgttgttctacgtcatcgctgggaaaggaatacgcaaattaggagtgccaggttctttttctgattggctaccatagccatccaatcgaacgccgcggtctagcctacctctgtaccatacataagggctcgctggccttcactgccctcttgtttttagtctcgcttttcggttgccgttgtcttttttccttgactcggaaatgtccggtcgtggtaagcagggtggcaaggcgcgcgccaaggctaagtcgcgctcgtcgcgcgcggggctgcagttccccgtgggccgcgtgcaccggttgctccgcaagggcaactattcggagcgcgtgggcgccggcgccccggtctatctggc

SEQ ID NO: 4125 - DNA, 2300 bp, Homo sapien
gtctcgttttattttcctctttcttaactgggcagagtgtacatttttttctcatgtgtgttcaatcatttgtgtgcttttttttttgtgatttgaaaaatcccatgacaaggtgtattttccatcatgcttttccttacctaattttataaactctttgtatatttgtggttacaatgttcctaatttggctatttgcctttaattataatttttgatattttctcattcacaagattagttcattatgaagtttgctcattttttatattttttacttttctctccagcaagttcctagttgactcaacaatatcagcaaggctcggctggaagcctctaatctttactacacagaaataacctcggtttactattcatgtttcccacgggcatctagtgcatttccaagtcgatttaaaaaatcttcacaaagacaaaaatacctcattagatcctgcgcttgcttggaatacagatttataaaaatttttttttgtttttgttttttaagacagagtctcgctctgtcgccaggctagagtgcagtggcacgatcttggctcaccgcaacctccgactccctggttcaagtgattctcctgcctcagcctcctgagtagctgggattacaggcatgcgccaccacgcccggctaatttgtgtatttttagtagagacggggtttcaccatgagccaggatggtctcatatcttgaccttgtgatccgctcgcctcggcctcgcaaagtgctgggattagagacgtgagccacggcgcccggcccagattaattttttaaaatgcaaaacttgcacaatcttattttaaccatgcttgcttgttttcaaaataattaaaaaacaaaaacacaagattgctcttcccaaaggcttatttctttcctttaaatttattttttaaagaaaagctaacggccgggtgtagtggctcacgcctgtaatcccagcactttgggaggcagaggcgggtggattacgaggtcaggagttcgaggccagcctggccaacatggtgaaaccccgtctgtactaaaaatacaaaaattagccgggcgtcgtggcaggcgcctgcaataccggctactcggggggctgaggcaggagaatcgcttgaacccgggacgcggaggttgcagtgagccgagatcgcgccactgcactcaagcctgcctggcaacagagcgaggctgtctcaaaaaagaaagaaaagcaaagcaaagctaacaaatgctcttctgtcatgcatcatcacagaatcaatgagagctccccccagccaggagacagcggacaaccagggtagcttcccagggggccagagggaggctgcgcgagaagaggctcagcgggatgggtccacgcagggagatcccacgcagggtgggcgtatacgagtgtccacgtccggagggccgttcaagggcgggtccctgaaggaagggtgcacgcagggcacgtccacgcgggcaggcccgtgcacgcagggcgtgcccatgcagggcgggtccgtgcaggatgagagcagcggaggaggcccacgcaggccatttcccgccccgtccccagcccacgcgggcgagctaccgcgggggtacgcgcagctcagatcctagcagcttacaaaaacaaccttttaaaaatggaaccttcaagtaaaaataaaactttgtttccctctttcgcaggagttactgaagtaggaagggacagcccagtaagatttcaggatacgacttgggccggtccgcaggcagtagagtgaagcgcgcagctgccaggacttgcgcggtgacgtgcgccgctgccaggaccttgcaggtggagagcatagttgccaaaatcaaggcggaggagcgcaccgccgctaggatccaggcggagaagcccaccgcggccaggacctaaggatgcagtacactgctgccaggatcttgtctgtggagcgcagcgcggccaggacctccggctgcagcacaccgctgccaggatcttatcggcagagcgctccgcggtccggaccccgccccgtgcgcgtccccgaccccgccccgtgcgcgtccccggcgttggcgtcttcgtcctgttgctggtctccgtccggtcgccggccgtctaggtctccggccctccccagccgctcctgcgcccttgccggccccgccgcccgcagccctggcgctccctgcgggccccgccgaggccgcctgcgccctgtgccagcgcgcgccccgggaaccggtgcgcgccgactgcggccaccgcttctgtcgggcgtg

SEQ ID NO: 4126 - DNA, 2300 bp, Homo sapien
taaccatgcttgcttgttttcaaaataattaaaaaacaaaaacacaagattgctcttcccaaaggcttatttctttcctttaaatttattttttaaagaaaagctaacggccgggtgtagtggctcacgcctgtaatcccagcactttgggaggcagaggcgggtggattacgaggtcaggagttcgaggccagcctggccaacatggtgaaaccccgtctgtactaaaaatacaaaaattagccgggcgtcgtggcaggcgcctgcaataccggctactcggggggctgaggcaggagaatcgcttgaacccgggacgcggaggttgcagtgagccgagatcgcgccactgcactcaagcctgcctggcaacagagcgaggctgtctcaaaaaagaaagaaaagcaaagcaaagctaacaaatgctcttctgtcatgcatcatcacagaatcaatgagagctccccccagccaggagacagcggacaaccagggtagcttcccagggggccagagggaggctgcgcgagaagaggctcagcgggatgggtccacgcagggagatcccacgcagggtgggcgtatacgagtgtccacgtccggagggccgttcaagggcgggtccctgaaggaagggtgcacgcagggcacgtccacgcgggcaggcccgtgcacgcagggcgtgcccatgcagggcgggtccgtgcaggatgagagcagcggaggaggcccacgcaggccatttcccgccccgtccccagcccacgcgggcgagctaccgcgggggtacgcgcagctcagatcctagcagcttacaaaaacaaccttttaaaaatggaaccttcaagtaaaaataaaactttgtttccctctttcgcaggagttactgaagtaggaagggacagcccagtaagatttcaggatacgacttgggccggtccgcaggcagtagagtgaagcgcgcagctgccaggacttgcgcggtgacgtgcgccgctgccaggaccttgcaggtggagagcatagttgccaaaatcaaggcggaggagcgcaccgccgctaggatccaggcggagaagcccaccgcggccaggacctaaggatgcagtacactgctgccaggatcttgtctgtggagcgcagcgcggccaggacctccggctgcagcacaccgctgccaggatcttatcggcagagcgctccgcggtccggaccccgccccgtgcgcgtccccgaccccgccccgtgcgcgtccccggcgttggcgtcttcgtcctgttgctggtctccgtccggtcgccggccgtctaggtctccggccctccccagccgctcctgcgcccttgccggccccgccgcccgcagccctggcgctccctgcgggccccgccgaggccgcctgcgccctgtgccagcgcgcgccccgggaaccggtgcgcgccgactgcggccaccgcttctgtcgggcgtgcgtggtgcgcttctgggccgaggaggacgggcccttcccgtgccccgagtgcgccgacgactgctggcagcgcgccgtggagcccggcaggcccccgctcagccgccgccttctggcgctcgaggaggcggccgcggcgcccgcgcgcgacggcccggccagcgaggccgcgctgcagctgctgtgccgcgccgacgccggcccgctctgcgccgcctgccgtatggctgcgggccccgagccgcccgagtgggaaccgcgctggaggaaggcgctgcgcggcaaggtgcgcgccgcggggtcccgtgccccaccccggacggtgccctgcgcctctccgcccccgccccggtccccctgagccctgggcccttcccgtctccactgttcctgtccccggattgtccccgtccccggattgtccccctcccctcaccgccacgggtcccctctccagcgtgtgctgggcccctccctcctgcggcttgcctccccatatttcctgcgtctcttcggagtctggtccccttccccgtcttggtgtcccctgctgggcggtgccttatctccccaccccctaccttctacgaagtccttcccccaccagcgcccatctttgtggtcccatcactagctgtgccctgtctcgccctcatagaccccctctagttcctacagattgactcctccactcactcttcccttgggggagacatcacgcctcttgcccctctgtattccactgtgtccacaggcctggcccaccttctcgtctgctccccgggccacccagccctcgcctgcaccccctgtcccctctcccatcttt

SEQ ID NO: 4127 - DNA, 2300 bp, Homo sapien
acatcctaaaaaaaataccctgaagctcacttaagtccagaggcccctcctccaaccaaccagctgagcagttcagaggcctggcccacttggcctggtggtccctttgtctagagccctgagcccacagtcccctcattccaggctgccccaggtccccccacttgccttccacactgcagctgctgactctgcctggccatgcaggtcccgggcgtcattcaagtcctttctcatgatttccacagaccccttgttctcctgtaaagaaaagaaggtcaccaggggtgggcagaagctctgggtcccccaacccagcccagtactgagggacatcaccccagctgactgcacacagtctgaccatcccagagataacctcgaagcccggttgtctagggcaggaacgcacaggcagtcaaaaggtttcttgggcttcacacctattcagaaggatctgggtgctggggctaaggggactgtctaggtgggtttaggagttctgtgtctgtaagtggccctgttcagtgtgagttcggcctgtaccaaaggtctgcacagcctgccctacaccctgccctgcctgagccggatgggggtcgctctgcccggtggcaggacccccaatgcaggaggagcacccagggacacagtctggctggcttcccctcccctgtattgaagagcaggaccccaggctggctgttgtctcctattctgtgtcccacaaccaacccgccatgggcaaggctccagactcccggacccgctgctgccagactctcagagcgggtttctgaaagatgggagaggggacagggggtgcaggcgagggctgggtggcccggggagcagacgagaaggtgggccaggcctgtggacacagtggaatacagaggggcaagaggcgtgatgtctcccccaagggaagagtgagtggaggagtcaatctgtaggaactagagggggtctatgagggcgagacagggcacagctagtgatgggaccacaaagatgggcgctggtgggggaaggacttcgtagaaggtagggggtggggagataaggcaccgcccagcaggggacaccaagacggggaaggggaccagactccgaagagacgcaggaaatatggggaggcaagccgcaggagggaggggcccagcacacgctggagaggggacccgtggcggtgaggggagggggacaatccggggacggggacaatccggggacaggaacagtggagacgggaagggcccagggctcagggggaccggggcgggggcggagaggcgcagggcaccgtccggggtggggcacgggaccccgcggcgcgcaccttgccgcgcagcgccttcctccagcgcggttcccactcgggcggctcggggcccgcagccatacggcaggcggcgcagagcgggccggcgtcggcgcggcacagcagctgcagcgcggcctcgctggccgggccgtcgcgcgcgggcgccgcggccgcctcctcgagcgccagaaggcggcggctgagcgggggcctgccgggctccacggcgcgctgccagcagtcgtcggcgcactcggggcacgggaagggcccgtcctcctcggcccagaagcgcaccacgcacgcccgacagaagcggtggccgcagtcggcgcgcaccggttcccggggcgcgcgctggcacagggcgcaggcggcctcggcggggcccgcagggagcgccagggctgcgggcggcggggccggcaagggcgcaggagcggctggggagggccggagacctagacggccggcgaccggacggagaccagcaacaggacgaagacgccaacgccggggacgcgcacggggcggggtcggggacgcgcacggggcggggtccggaccgcggagcgctctgccgataagatcctggcagcggtgtgctgcagccggaggtcctggccgcgctgcgctccacagacaagatcctggcagcagtgtactgcatccttaggtcctggccgcggtgggcttctccgcctggatcctagcggcggtgcgctcctccgccttgattttggcaactatgctctccacctgcaaggtcctggcagcggcgcacgtcaccgcgcaagtcctggcagctgcgcgcttcactctactgcctgcggaccggcccaagtcgtatcctgaaatcttactgggctgtcccttcctacttcagtaactcctgcgaaagagggaaacaaagttttatttttacttgaaggttccatttttaaaaggttgtttttgtaagctgctaggatct

SEQ ID NO: 4128 - DNA, 2300 bp, Homo sapien
cttgggaggctgaggtgtaggaggattgcttgaggctaggagttcgagaccagcctgggtaacatagtgagaccaccatctgtacaaaaattaataaattagccaggtatggtgttgcatctgtggtcccagctacttgggaggctgaggtgggaggatcacttaagcccaagaggttgaggctgcagtgaactgtgatggcaccactgcactccaacatgggtgacagagtgaggccctatctcaaaaaaaaaaaaaaaaaaaaaataaagggagatgggttaatgggagaaaaaacataggattttttttttttgagatggagtcttgctctgttgcccaggctggagtgcagtggtgcgatcttgcctcactgcatcctccacctccttggttcaagtggttctcctgcctcagcctcccgagtaactgcgactacaggtgtgcaccaccacgcctggctaatcttgtatttttagtggagatggggtttcaccatgttggccaggctggtcttgaactcctgacctcaagtgatccaaccacctcggcctcccaaagtgctgggattacaggtgtgagccaccgtgtccagccaggcatattaatttaacacaagttttatacagcacaggctcccttataatgaaatgaagactcaaagtggcaaaattaaatcacttatatactgacttggacaaagactagccacttgtaaaaaagcaactacatgatgtggggatgcttgaaagagttgttttcacaaggtctgtaccaaattctgtcggccttgacttcctgtcgtccttgatgataaaatcattttatttgatatggggagggcgtctttcacttgggaatttcatttgcttttaagaagcagaatggaggtcagggtgatcttgcactgttttttgattttttttaaaaaaggccttgctctgttggcccaggctggagtgcagtggtatggtcatagctcactgcagcctcaaactcctgggctcaagcgatcgtcttacctcagcctcccgagttgctgggaccataggtgtgcaccactatgcctggctaatgtttttgatttttagtagagacaggttttcactgttgcccaggctagtctcgaactcctgggctcaagcaatcctcccacctcagcctcccaaagtactgtgattacaggcatgaggcaccgtgccaggcctcttctgttattgtttttttttttgttttttgtttttttttggctcaccgcaacctctgcctcccaggttcaagcgattctcctgcttcagcctcccaagtagctgggactacaggcgtgcgccaccacgcccagctaatttttatatttgtagtagagatggggtttcagcaggttggccaggatggtcttaatctccggacctcatgttctgtctgcctcagcctcccaaagtgctgggattataggcgtgagcccccgtgcctggctttttttttttttttttttttttttgagatggagtctcgctctgtcgcccaggctggagtgcagtagcatgaactcgggctcactgcaacctccgcctcctggattcaagtgattcacctgcctcagcctcccgattagctgggattacaggcgtgccaccacgcctggctcatttttgtatttttagtagagacggggtttcaccatgttggtcaggctggtcttgaactcctgacctcatgatccgcccgccttggcctcctggagtgctgggattacaagcgtgagccactgtgcctggcctaatagtcgatgtgcctgagcagcatgttttggagtggcatgttcttaactccttcaagagcaaacaggttccccttcccctggggagggtgggtgaggacacaggtcttttcctgccacccgtttgcagggacacgtgatggaccgtaggaagaaggcactgaccgactacaagaagctgcgggccttctttgtggaggaggaggagcatttcctgcaggaggctgagaaggaggaggggctccctgaggacgagctggctgaccccactgagcggttcaggtcactgctgcaggcggtctcggagctggagaagaagcatcgcaacctgggcctcagcatgctgctgcaggtgcgggagccccgctgggtctgcccaccatcgggccagggtggacgcaggcagcagcgagccattgggggaccattgcccgaagtcaaggcttaaaagcccagcctgactcccactgccgtggccttgcagggctgaatttcgggaatgggtgggtggtcagggaag

SEQ ID NO: 4129 - DNA, 2300 bp, Homo sapien
cgtaggctcctgcctttcttggcacctccctgtgctctgggtgccttgcggcgggccccgagatttgcagagcgcgcccgcccgtttggcgggagccgtggcaccgggcgggcccggaggcctgggtctctggcgagtcctcgggactggagtcgtcgacacgaagcggggggcattgggaatcccgggtgcacagggcctgttttcccggtggctggcgaagcaatgtccttcccccgggtaaagcagcccatgcgttccggagccgacgtcttggctggcgtctgtggcacccgctgcccctgcccgccccttcccccggtttggaagggtgcgacgacggcgcccgatgggtgaattgaatcgcctgggcgttccgggagcgggaaggcaccgcgaacggcagggaacccagcggctgcgcctttggggtccggccccctgccctcccaggctggagccgggctcctggcggggcggcggcgaggcggaagcggtgggatgctgctgcccggccggcgtgcagtaggggcggacccccagcaggaggaccccggctgcggctgcggcgggggtgtaggtgggcggtaaagggggagcagagtcaggggaggttgggtagcatggcgactgtggggggaagggaggcagcggggaagccacaaaagcctacagcaggccgggcgggcgcggtggctcgcgcctgtaatcccagcactctgggaggccgaggcgggtggatcacgaggtcaggagctccagaccatcccggctaacagggtgaaagcccgtctctaggaaaaatagaacaaagtagccgggcgtggtggcgggcgcctgtaggcccagctactcgggaggctgaggccggggaatggcgtgaacctgggaggcggagcttgcagtgagccgagatggcgccactgcactccagcctgggcgacagggcgagactccgtctggaagaaaaggaaagaaacagcaaaaagccaaagaaaaagcctacagcacccggtattcccaggcggtctcccatccaagtactaaccaggcccgaccctgcttagcttccgagatcagacgagatcgggcgcgttcagggtggtatggccgtagacgctgaaggaggcgcctggctgccccaagagcccggcccggcccggccgtgcccgccggattgcagccgacaccgccagcccggggccgcggggctcggatcggggacccccgagccgctggcccgcggccttcccccggctcccgcgctcccgagcttccaccacatcgggcccgctcggagcagggagtgctccgaggcgtcagggcccagggcccacgatcctgggacgccctccggtcctccgccctgtcgcggaggcagcgttttggatccctcgccgcacaggggctcctgcgaggccccctcttgccccacccacccagagccgtcagggctggccgaaggcgaacagccggcccagccgcgcggggcctttctctcacaacgcccccaccacggtcgcttgtcccgaccaagacccggccgggggggcaagagggcgtggggtgtagcgggtcggggggtggccctgttttgccccgggctggcactagaggcggcggcctgatctcgggtgagagggcctgagagaaacccagacacaccccaccgccaccaggagcaaatccactcccccacacacagacacacccgggcgcgctcgcacccgcgcgcgcggacacacacacacacacagacacacacgcacacacgcacgcgcacacgcacgcacacacacacgcggcttgaaggagagcaaggacgagatggatggagagatagaaaccgagggagggagagagacagcgatcgagagagacaggggagggcgagagggaaggagacagacagagaggctgagaaagagagaggcacagagaaagagagagagagagacagagagacagagggaaaacgacaaaagtagcgcgaggtccagggggaaacccagaagagagaggcggagggagctagagagcgagagcgatagagccttagagaggaagcgcccggctccgttaggcagcgccctcttgagcaggccgggatagggtggagggggcttgggctgcgcccagaacacgggggccaggcggtccgtgcgagaggaccaacggagcgctgaggcgggcgttttcttggatgaattgcttgctttggaggtgggtttcgtaggctcctgcctttcttggcacctccctgtgctctgggtgccttgcggcgggccccgagatttgca

SEQ ID NO: 4130 - DNA, 2300 bp, Homo sapien
ggggcggcggcgaggcggaagcggtgggatgctgctgccgggccggcgtgcagtaggggcggacccccagcaggaggaccccggctgcggctgcggcgggggtgtaggtgggcggtaaagggggagcagagtcaggggaggttgggaagcatggcgactgtggggggaagggaggcagcggggaagccacaaaagcctacagcaggccgggcgggcgcggtggctcgcgcctgtaatcccagcactctgggaggccgaggcgggtggatcacgaggtcaggagctccagaccatcccggctaacagggtgaaagcccgtctctaggaaaaatagaacaaagtagccgggcgtggtggcgggcgcctgtaggcccagctactcgggaggctgaggccggggaatggcgtgaacccgggaggcggagcttgcagtgagccgagatggcgccactgcactccagcctgggcgacagggcgagactccgtctggaagaaaaggaaagaaacagcaaaaagccaaagaaaaagcctacagcacccggtattcccaggcggtctcccatccaagtactaaccaggcccgaccctgcttagcttccgagatcagacgagatcgggcgcgttcagggtggtatggccgtagacgctgaaggaggcgcctggctgccccaagagcccagcccggcccggccgtgcccgccggattgcagccgacaccgccagcccggggccgcggggctcggatcggggacccccgagccgctggcccgcggccttcccccggctcccgcgctcccgagcttccaccacatcgggcccgctcggagcagggagtgctccgaggcgtcagggcccagggcccacgatcctgggacgccctccggtcctccgccctgtcgcggaggcagcgttttggatccctcgccgcacaggggctcctgcgaggccccctcttgccccacccacccagagccgtcagggctggccgaaggcgaacagccggcccagccgcgcggggcctttctctcacaacgcccccaccacggtcgcttgtcccgaccaagacccggccgggggggcaagagggcgtggggtgtagcgggtcggggggtggccctgttttgccccgggctggcactagaggcggcggcctgatctcgggtgagagggcctgagagaaacccagacacaccccaccgccaccaggagcaaatccactcccccacacacagacacacccgttcgttctcgttccggaacccgcacgcgagcacgggtgcgcagacgcacgcacacacacacacggtgaaacacagacacacacggcttgaaggagagcaaggagaagatggatggagagatagaaaccgagggagggagagagacagcgatcgagagagaccggagaggtggagaggtaaagagagagaggctaagagggacagagaaagggagaagtacagaggtacagagggaaggctagagaaataacgcgaggtccagggggaaacccagaagagtgaggaggagggagctagagagcgagaacgtttgagccttagagaggaagcaccctacttcggtaggcagcccccttttgagcagtccggaatagggtggaggggtttgagctgtgcctgagcagggcggccaggcggcccgtgcgagaggaccaacggagcgctgagacgggttttttcttggatgaattgcttgctttggaggtgggtttcgtaggctccattctttcttggcacctcactgtgctcttggtacctcactgtgctcttggtgcggtgcagtgggccccgagatttgcagagtgcgcccgcccttttggcgggagccgtggtaccgggcgcgtccggaggcctgggtctctggcgtgtcctcggtactggagttgacacgaagtgcggggcaataggaatccgggtgcacagggactgttttcctggtggttggcgaagcaatgtccttcctcccgggtaaagcagtccatgcgttctggagcggagatcttggctggcgtctgtggtacccgctgcccctgcccgccccttcccccggtttataaggttgcgactgcgccggatgagtgaattgaattgcctggtggatccgggagcgggaaggcaccgcgaacggcagggaatcctggcctgcaccttagtgatctgaggcgtggtgtttctgctggatccggtttcatcgtgttgcgccgcccatcctgaatagttgtgatgttgttgcctggctgtgctgcaggttagcccacactaagcggtcccgggctgttg

SEQ ID NO: 4131 - DNA, 2300 bp, Homo sapien
ccctttgatcacttcttcagttttgtaagatattttctataagaacaataggaagttacttcacacacaggtgaacttgctttttgttgtactactacagcctcatgtccttacaaacatgggaattcagatcattcatttcatgtgatttttctccaaaaatgtatgatgcatttgtaagtgtatctgctgcatttagagtacaggtacatttctgacagcagacaacttctgttttgatcaggtttagtagagagaaccaaaccttctctaacaatgttgtgttttcttctgtttgtttctttttgagacagtgtctcactctcgcccaggctagagtatattggttgatcaagggctcactggagcctcgacttcccaggctcaagtgatcctcctacctcagcctctggagtatttggattacaggtgtgagtcaccacacctggctaatttttttatttttggtagagacagggtttcgccatgttggccaagctggtctcgaactcgtggcctcaaccggtctgactgcttcagccccccaaagtgttgggattacaggcgtgagccaccgcaccagccgatattaggtgctttatgatggaaagaattgccagactagcttccagctctgcccatctcaagctctgctactcttgctactggaacccttctagtgttggggaaagtaagacagttaagggcaccaatgtgactctcacagagggtcataggtatgtcagtggtagccattcctatacctggatggctagcaacaacatatctacataggagaactgtaaaccacataaatatatcctgtcatcacagccagggcgagggagaggcaagtcaggtacctgaggctcaaaacttaacattggcacttgcctgaccctgagagtaagggccctctaaatttgttgttttttgatattgcctctgaatgctcaatttgtcataaattttgcatccttgacatcccccttatctcaccttcatcctgattctgtatcccattacacccaaacaacctgtttgggtctccccaacttcactttctttggctgatccccaaaatcttcatggcctcttcaaagtcactcaatatgagggtaagttacagtttaaaaagacagtgaacataactggtggtgattaaaatacttttttttttttcaaaatttacagaaacatattaccacgtgtacacattgctaggtcttccaatgtgaaagtgtcctttgcaagtcaggggtcctggattcaagcttctaacttcttgataaatccatctctgcattctgaccatggccatacgttcaagattacgtttatcatactgacttatttttgcctccaggattttggttagaagctcaggctctggggctagactatttgggtttggatcctggcattgccacttactagcttgtggaatcccaaaacgttacttaatatctctgtgcctcaggtgttctcatctgtaagtaatgttaagattaaaagaattagttcttgaagagtgcttacaacagtatctgacacattatgaaagttcagtatttgttattgttatttttactaccactagtatcaatgtgtattaataatatgtggcccttctcacaccacgctgtacacccccaggactcttggtattctgacttggctaagaggcgtcctttttctgaatagactgttgaccacatgtagaaggaaggcagagagagaaatgaatcaaagggaaacggaatattttttcagacatattaatgtctccgaattacctttaagtaaatgaaggaattgggggtataaaaaaatttctggagcatacatgtataaaggttcacggcatgccgaaagacaaagtcaaaggagcattcacaatggagctggcatccttttgcttcaaaatgagaaaaaatcacacgatcagctgcagttagacttaaggaaaaaagctgtctgttaattcaatctcattcgcaggacaggcctccaggacacttcatttttccccctgggtggagccgtggccagccgggggctccacggagtgaataggaggcggctcaggcttcctggctcgcgtgggcgccagaaagcggaacctcccgggccagtcgcgcggtggtcaccctcttgggagctggggaggaggctgcggaggctggcccggctccttcgggcgtcgcttcccggaccgggtgcgcggggtcccccggaacgtgtgttccaggtcctcccgcgccagtgttcgcagtccccgcctggtcgcggcggcgcct

SEQ ID NO: 4132 - DNA, 2300 bp, Homo sapien
tcacagttcccatgaggaggggctgcatcgcaccgagtgggccatatagggaagcaccacggtgggccagaaggcagaaggaagggggctatgggccagagccttcattgtggtttttgtgagaagtgtgtgaggcagggtaaaaaggcttaggattggctagtctgaataaatttcaacaggctctggggcatagggctgttcttaatctgtacctggtcctggggtgatgaaggcaggggacagtggcctagaatgtaaaagccccatagaggagctgctgagaggctgggccctgcttcggttggtttgcataggaaaggcatgcttgcagcttgcaggtgagccctttgctatctccagggattggttggccctgggaggggcagcccctccagggtcagcaagacccctgatgtcaaagcatcagaatacaaaaaacaaaaggcatgggtaatacagagaggcaggctcttggctgaatactctgggatctctgttgagggtatttctgcatccagccaggctgaagtcagcctgaagagttctgttcctaatgggcacatagagcagaaacattcagtgggagagcatctccacaagatgcagaactattgccccaaccctacttctcctaaggttccctgggattcttcagcgacagatttatcaggtcagtgttccagcctgtatcagccacaccacttcacacctttctgaaagagtgagcgggcccatcagcaggggccagcagccaacaggcattgacagctctgggtcaaatgtcactggtggtgtttgcagaacagtccaatgtgacagccccctgtatcgagtccaggatggctgcccttgtgtttccttcacagcctctatcctgtacttttctcccaggaaggaagagctcagctaatcctatgattttgtagcctagcttattttctaaacacataccggaaacaaatgacagacttgttctttggtcagcctcatatcacaggcagaggcccaaccaaaattcataattgcagcttgaattatacacagcgctgcaccacccgtcccgcacttatggagaactgtgaagaaaaacacacacgagcacagaataggtgtcattggaggatctgggatggttactgaaagcatcgccttccccactgagctgctagaaggtagcatatagaggcccttgtctgctccaaaaaaaacaagcccttgtttcatctctccctgctctgtccagccccacccaaccccgatccctcccagacgcatgccagatgcatcctgatgaatgtcatcccatgatcaatgatccccccactgtgaacaaaccccaacccatttattctgtggttaatccatgttttaataggtgtaatgattcaactgcctccactaacaaatgagttcactggaatgtaagaatttgagtggatccattagaaacatctgtggatagacacagacccatggcatacatcctctatacattgaaatgcaggcaatgcaaagatgaagagaaaagatgtcagaggcaacaagcacagacgctcccccactgggttagagttctggcctgaagtggggccatctcaggcacccacacctgtgtctgctgtgcagtcctctaggactcccctgggagagttgtcggacatgccccagggccagctccctgcctgcccttaccttaccttcgatggcatgtggtcatttcaaggtgccgtctctgtttcagacccagctcaaggtcagcgctcgtaggccctggtatccgtgtccgtggccgtgtcagcacagtccagatccagcatgcccctcactgtcagtcacttcctctgccacaagcccccttaccggtcattttcttttctgcacaagaagcattttcctcactgtccctgtgctgaaggccccttccattattgctttccaaatttttgagagtcagggtctcagtctgtcactcaggctggagtgcagtggtgcaatcatggttcactgcagcctcaacctcctgggctcaagcaaccctcccacctcagcctcctgaatagttgggaccacaggtgcatgtcaccactcccaactaacttaaagaaaataaaatctgtagagatggggtttcgccacattgcccaggttggtctcaaactcctgggttcaagcagtcctcccgcattggcctccaaaagttctgggattataggtgcgagccactgtgccagactcactttccaaattttcaatgtcttccctgatagccacttactttcctatcctaaattctaact

SEQ ID NO: 4133 - DNA, 2300 bp, Homo sapien
caacatggctgtttatttcacctgggcgcaggcgggctgagtccaaaaggagagtcagtgaagggagataggagtggggccgttttataggatttgggaaggtaatggaaaattacagtcaaagggggttgttctctggtgggcaggggtgggggtcacaatgtgctcagtgggggagcttctgagccaggagaagaaaattcacaatggtggaatgtcatcagttaaggtggggcagggccttttcacttcttttatgattcttcagttcaggccatctgggcatatacgtgcaagtcacaggggatgcgatggcttggcttgggctcagaggcctgacattcctgccttcttatattaataagaaaaataaaacaaaatagtgttgaagtgttggggtggcaaaaatttttggggggtggtatggagagagaatgggcgatgtttctcagggctgcttcaagtgggattaggggcggcgtgggaacttagagtgggagagattaagctgaagggaggtcttgtggtaaggggtgatattgtgggttgttagaagaaacatttgtcgtatagaatgattggtgatggcctggatacggttttgtatgaattgaaaaactaaatggaataagagaaggagaaaagcaggtataaaaggactaagaattgggaggacctaggacatctaattagagagtgcctaaggaggttcagcatagtcctgccagcaaagattatttatttacttcaagagttaagagtggcagtttggggatagcacggggagatatcatctgtgatggcttggagaaacagtgtaaaccggcagtgtaaacaagagcagggcatgtatgagtagttgagaatggtgaataggagtatgactagacagaagatagtagggatgacaagttatttgggggcacagtctaagttggtctggtgtctggaatgagattggggcctaataaaaaggagcgtctatacaggagtttaaatgggctgtaccttgtagcattttgaggacaggtctgacttctgagaagggaaagtgataaaagtattgtccagtcctttttaagttggtggctgagtttggtgaggtgtgtttttaatagaccattagtctgtcactgaatactaagagcctgaaaaaatgcttggctgatttgactaataaaggctggtctgttatcagactacatagaggtgggaaggctaaactaaggaattgtgtctgacagaagggaagaaatgactgcggtggccttctcagaccctgtaggaaacgcctctacctatctagtgaaggtgtctacttagactaagaggtattttagtttttgtgactcagggcatgttgagtaaagctaatttgccagtcctgggcgggggcaaatccttgagcttgatgtgtagggaagggagggggcctgaataatccttgaggagtagtagaatagcagatagaatagcagatggaacactgagaagttatttccttgaggatagatttctacgatggaaaggaaatgaaaggttctaagaggcaggctagtggcttgtactatagcatagcctgcctttgctggtgtgtggtgatcaggcctggtggaactggcatcaataaatcaagcgtgatcagggtgagaaacagggaagaaggaaatgtagggaaataggatgaacatcaggtggatcagagagatgcagtcatgagggtcaggtgtggtatctggaataatgtgggaggccggattgaagtctggggcaggaacagtggtaactgtgggacttaacaaagagtgagtacagctgaaggagctggggagcagaaattatatgcgtcaggtatgaggaagaaaatagactttggaagttatgagaactgtagagagtgagttgagcatagtttgtgattttgagggcctctaaaagtattaaagcagcggcagccactgcacgcagacatgagggcgaggctaaaacagtaaggtcaagttgtttcgacagaaagcctacagggtgcggtcctggctcttgtgtaagaattctgactgcactaaccatgcctaggaaggaaaggagttgttgttttgtaaaggattgaggtttggaagattaatcggacacggtcagcagggagagcacttgtgtttttatgagaattatgccgagataggtaacagatgaggatgaaatttgggcttgactgaagtaatgggggctgtctgtgaagccctgtggcagtacagcccaggtaatttgctgagcctaatgggtgtcagggtcagtctaag

SEQ ID NO: 4134 - DNA, 2300 bp, Homo sapien
agacgataactggagaaaaccacaaattaatcttccaatatttttttcttccatataatcagcagtgcctcagaatcaaagcagtctctaaaaatattttgaagaaatttattttcttggatcttcaaagatccaaagttactgagatgcaaagaatcttccacagtatcatccaaggatactgaagggctccttcaaacctcgcccttgtatatttcttcttccagttgtgatactgcagttacatttgcaaaccaaatgatccctttgggtggtttttccaaaacaaatcgtctttcccaaaggcctacctaagtcttcattttccacaaagtagaaaactgcccacagctttgaaatggcagcataatttgtatttctaccaccttgtccaggtttcagggatctctggtccagtttcagtcaataatgctaactatcactgcagctcactgacttctttcttgtacatagcagtttttcgcaggaagaaaacaaatctaacgaataggaataacttcaggtgatgctgttttcttcccgcttcctgggatcactgtctttcctctgaaatggttttaatcagaaccaatctgttatactcaggagcctaaatcaaacacgacatgcagagagacaaacaagaaagcaacaaatgatctgagccactgaacaagaaatatatataaaacagttttaggaattacagctgtcacaacttttcaccatggggccttctctgtgatttagaaaaaactgcatttatttgttattaggatcggagacaagagaaaaataccgacccaaatagccactggggaagagggaagctctgatgccaatttatgtggaggatggagccaaactgactcacacacacacacacaaaagtatgtactggcattttccacacagtccaggtcacttgggagcttagccaaggatattttgagcattcgactacctattgtgaacaaggttgggaactatgaggcgctatgtggccctgatcaagctcagatgggccaaatcctcaaccaaaattctctttcccataaatgtttatctctacatttcccacagaaggggattctaactcagttttgcttctgaaaccaaactatccaaggccaggtgagatgactcatgcctgtaatcccagcaatttgggaggccaaggagggaggatgcttgaactcaggagttcaagaccagcctgggcaacataacaagaccccatctctacaaaaaatttaaaaattggcgcggtgtggtcgtgtgagcccctagccccagctactcaggaggctgaggcaggagaatcggttgggctgggctgacagtgccagaccctgttaaaaaataaaaattaaaaaaactcctaaatttggaaacacatccccagctgagggccgggagatacttctcaaccgtaatccagaaccctctaaaatgggatgtggagaggctgcagcctgtagtcttgcgatgaccttttagcacctgggcatcttgcgcttctgtcattccgcccacacccgctcagctccatccaagagggcccggcagtttggagtgaaagcttagcttcccaacgggtaaatgaacctgcctcccattcacagggcggcctctggctggacacctggggcctactgcctccttgttacacattaaccaagttctggcctccatcgtaacagcgtcagggaagttttttcctggctgacagccgcagatgatgaccgaagacaacgtcttaactgagacgggccaatttggcaaatggactgctttcctccccagtgcgggcaccttcctcctctgtccggcaactggaccccactgtccccagccctctgtcacccccaaacctgcccaccgcccgcctctacccgaccctccctcagggaaatcgggactcagcccccaacgcccccacctgccgctctgcccacctcagcgcacaccgccagagcgcccagcccgcgcacgtgcttccggcgcgcgccgaagtcctcacgcgccccgccccggcctccccgtgcgcacgcgcgaacgcggggtgggccgggcctcgcgtagcccatctcctcttcctcctcgcggtcgcggccggacggagggtggagggccctgcgcctgcgcggagctggagtccggctgggccgcagccgctgggagaccggcggttgccgtggggaccggtcgggcccctccctcctccggtcccccgccccaggtccttccccaccgagacgcgccggcggaccgcgggcgagtgcagccggtgacccggc

SEQ ID NO: 4135 - DNA, 2300 bp, Homo sapien
gtataatgaaagtagaactttgctagttcctgaaaatttttaacttatttgtatttcagttcagcagcatctttatgtagattgtgatatttaagaattatctgggctgggcgagggtctctttttctctttcagtgatcatctaggcagttattatttaatagtttaatagctcaagtacattccaatagacgaagtgcacacaacacaatatgtgtgtacagtagtagtaaagtttcttttgagtagtcaaagactcactttttttattgcctttttttttttttttaaagaatacatactgtggattcagtcccttgtcacacttgaccttttggcatacacccactgtggacttttgcctcttctgtaatggctggcaatgacatttcaaacttacaatctggaattgcacttggtacattggcattgcttgttccactgggatggggaccagtgtgaagatgcctgttagatagactgcccacccctactttctctttttctttatagcacttaacaataacaaagtcttgatgatgtacagtattcaaactttaggttgaaatacgttactctttgattcctagccagtagatcttatctacactttaatgggagagaatggtggtgtgtgggtaggcacaaatttatgtaaatagtgctccttctctttagtatgtttgctttgggggtagaaaaatggttttaacaaacactggtttccatcaaatgaatgatgtcttctccatcctgtggagacaagaatctgctagaaggatatgtgctaagttccttataagagataatggtgctctgcctatgccagcttggcacccgaagatgtgtgagtggacgtgaggctgagtattaccttagtatttttctctgggtctttggaaaaccatagtcaatttttagaacatattgctttcattccccataaactcttcacacatgataactgtttaagctttgaaaacacatactgaagtattgtgagcttaaaaaaactttttaaatatttgcatagttttgaggtgaatttgtttccttacagatctctcctaatcattgagatgtatatttcaaaagaggaaattttacatgttgtccaaaacagccttgctagtaactggtgaattttggtattaactattattaaagtctttaaacgacacaggtacctaaagatcaccttaatgtggcaatttgtgatggtgtagctagctgattgtgaaaactgttcctttaaagtcgcttcttgcatgttcggtgttagtcatccagctcaggcttgtgttgcagctgacaatctaggaaagacggccttagagagtggtgcaggccccacactgacggactgccttagaaacccgacttcctctagactttgaaccgccagacttttctcttgtttagaaaacaaacttatatttaatgtacttactacttaaaactccagacagagatataatgtagaaggcaaatattggccaattttttcctctttttaagtggaagacaaatgaacgggatttttaaagtgcttttaaagtgcatgaatggttaataaatcagtatgaattgtaagccttcatcttacatccaagtccttagttggttagggtttcttttctttcttttttaaagagtgtcaattaccttttgaacctgtgaaaatttgatagttgttaacagtctgatggtcctaattctttcttttcattctagaaatgaatgtggttgtaatcatgttcctaattcttgggacaacctgcaagacagtgagacagtttaaaaattacctttcatgttgaaaaagtctgaaacagagaacccaatgatatttaaaataaatgctacataaaactctttttaaaattttgattttaacttaattaaaacaatgtcataaatatgctttttgattttgttactgcttttaatattaaagtaatagaatattgaagcaatattgtctagcactctgctggacattaagtccgcgggaggagaagtgaacaggaatcgattctttgtcttttaactgcccttagttaggagatgttaaaatacttggcacctctggttatatgtatgttatgtgtgttctcccccctaaaatttctaagcacatttattcacttttaaaatgaatctttaaaagattatagttagtagttatagttaatattctatttacttggaaaaatgtgaataaatggatcttcaaaagattcattttaaaaatgaataaatgtataataggctataggtgatcttacttgcgtattagg

SEQ ID NO: 4136 - DNA, 2300 bp, Homo sapien
cctcctcggcggcgcgcccctcgaccccagcagccccggtccccgcctctgctcttggtcccggccgccgggtgaggccgcccccgccccgccccctccccgccctcgccgggacccgccccctgctcccgtccgggcggggctccgggtttaaacgtcgcggcgggcagggccggcggaggggcggggcggcctctgtgtcgtgtaccgggtcccgtaggctgcgggcagcgaggagcggctggcgctcgaggcggcggacggcaccatgtccccggggagcggggtgaagagcgagtacatgaagcgctaccaggagccgcgctgggaggagtacgggccgtgctaccgcgagctgctgcactaccgcctaggccgccggctgctggagcaggcgcacgcgccctggctctgggacgactggggcccggccggctcctcggaggactcggcgtcgtcagagtcgtcgggcgccgggggccccgcaccccggtgcgccccgccctcgcccccgccgcccgtagagccggcgacccaggaggaggcggaacggcgggcgcgcggggccccggaggagcaggacgcggaggccggggacgcggaggccgaggacgcggaggacgcggctctgccaggtacccggcccggaggggagcgcgaggggcctgcacgcagggacggtttgctctaagctctgagcagctgatctcttatttcttgcgccactcggggctggctcttccttttttttttttcggttgacagaatccgtctctcttgacaaaatagggaaggtggcagcctttgccaccctttatttccttaattaggtggctttcggtcgagccagcggtgaactcaattgaagcgccgctggctgagtctggggtctttcctcgcgggcctctgcggcttggcaaacctctgaatcccatcttatttcttggcgaaccactgagtcccatctgcttatttctaggcgcccatttttgatcagaggagccccagctttaatcagattctcaaaggtaacccaaaaggttaagaaccacagagctaagctttgtctgatgaatggggccattgttttccgtattaactccccgacctcgctacgctgtccctaaagaatattttgcatttgtttacgtggagtgttgaataacttggctgtgagagcatctttataagtgctagggcctctccccttccgtccctccccatcctccctcgcctgtccagatccgaaagcgccggtggcgctgcgcgtgttttcaaggcatggccccttcaccttctttcctgcccagaggcttgcagggctggggacccagttgaacgcctcagtacagcctggagtaaccaatggttccttccagatcactggattttaaaaaggctcgagtgaggaaaacatggaaaatgtattgggagcctgttagacattcagtcactgatctgggaatatgtatgttgtcatttaatattcaaaacaatcccaaaagagaccatgttgtaatctttttttttttttttttttgagacggagtctcgctctgtggcccaggctggagcgcagtggcgcgatctcggctcactgcaacctctgcctcccggattcacgtcattctcctgcctcagcctcccgagtagctgggattacaggcacgcgccaccacgcccggctaatttttgtatttttagtggagacggggtttcaccatgttggtcaggctggtctcaaactcctcacctcgtgatccgcccgcctcggcctcccaaagtgttgggattacaggagtgagccaccatgcccggccctaatctcagttttatagatgaaaaaacggaagctcaggatcagtgactttattcatttatgtgtttatttttgtttacccgattgcaagccaatcagactcttcctggcttctctgtgagaggctgaggaggagatgaaatttcggctatgagccgggttgctttgctcttggttttaccatcttcagctattttcagctcatcatcggaggcagggctgcctcctcccatcatgatgttacttgtgaatccccacaaatcctgatgcttcagtgatcactgctagaaatgcaaataacagaaggtggagggggtagggaacatgccttccagattattcctgtgggtactgatctgctagctaaattgagatgtactttatcaggctaaatggcttttctctccccgatcttttattgtttgtgatggagttgtcaaatatttgcatgcaatataaatacaatttttaggcagcgttg

SEQ ID NO: 4137 - DNA, 2300 bp, Homo sapien
tttctttgaacgtgagaatgcagcaggagatgtatatgaccttgagatgccagtccaggcttctggaggatgtgaccaagacggcccagcccacagcccaccccactgccagttatgtaagggaggtgtactagtttgttttgtgctgttataaaggaataccggaggctgggtaatttataaataaaacaggtttatttggctcatggttctgcaggctatacaggaagcacagtgtcagcatctgcttctggtgaggcctcagggagcttccaatcatggtggaaggggaaggggagctgtcatgtcacatggagagagaaagggagtgagagagagagaggaggacatgccaggctctttttgaacaacaagctctcatgcaaactaaaagagtgagaactcactcgttactgaagaatggcaccaagccatgcatgagggatctgcccccatgacccacacacttcccactaggccccacctccaacattggggatcaatttcaacttcagatttggaggaattatcccaactatatcaggaggtcatcttgaaacttccagccctgctgtctctccatcagaatccaactgcggaggaactgcccagctaaccctcagaatcataagaaataataaatcttagctgttttaaaccactgagttttggagtgaattatgcagcaaaagctgaaaccgatggtgtcctgcatgtcccatagaactacatataaccatttccccaccttattcaatctttattaaggctactttggttgcaaacatcagaaaccaaccccagccagcttaaacaaaaggaaagtgcattagaatgtccctaatgtaagtcaaggaacagaaaataaagttgggaaggggagaaatcatggcgtccgcggactcattagcagcagggtatcctggagtttccgtccagaaaactgccattaacacaatcccgtgctaatgattggactagtaacttcaagttttcagagcagacggtctgacccgccccatttgggccagtagccgcctctgaatcatttagctatgatgaggtgggcggtggtggtgggaggcaggatgcggacacgtagaaagtaggtgaattcgtgggaatcctgacgtggaagccgtgagcgctactcacggcctgggcttgctttttaactgctatatatatatttagattttccaaaagttttttcctttcaaatctttttgcagctactgtatcaaggctctttttttaagaaagggaaaatagtgcaggaccacttctgaaactgtaacaaatggggcaacgttgtattcttctgtacaatgtaactggatctgtgaaggtttttattttttattttttattttttttgagacggagtcttgctctgtcgcccaggctggagtgcagtggcgcaatctaggctcactgcaagctccgcctcccgggttcacgccattctcctgcctcaggctcccgagtagctgggactacagccgttcaccaccacgccgggctaattctttttatttttatttttttagtagagatggggtttcactgtgttagccaggatggtctcgatctcctgacctcgtgagccacccgcctcggcctcccaaaatgctgggattacaggcgtgagccacagcgctcagccggatctgtggaggttttatgagcaaaaagggaaaacagtgcggggccacttttgaaactgtaacaaatggggcaacgttgtatacttctgcacaaagtaactggatctgtgaaggttttatgtgtaaaaagggaaaagagtgtggggccacttttgaaactgtaacaaatgggacaactttgtatacttctgcacaacgtaagttaatctgtcaagcttttatgtgcaaacgaatctctgagcgagtgaaatggttttgatcaaaatctaaaagaatttggggagtgtagatataaaagggagttaaagccagagtaacaggtgttgtgaacacagagaggaagaaccggtaggtttcgagtgaggacagagagtgtcgcccccggccgcagcctgggggggctgcatatctggagggatcatctcttgcccctaactgacgactcctgcagagtgacgcgtgcctgggacagcgtctgctgggaccagggtggacgggcacctcaaataagtgggccagggacctgggcctgggcccctcggactggcaggcacgcccgcacccccgcgcctcgcgctctctacggaagcagccgcccccacggagcgggcggaggcccgggggccgggagcg

SEQ ID NO: 4138 - DNA, 2300 bp, Homo sapien
actgagcaagagttttgaaaaatagtgacaatcccattctcctttggaatgcgcacaaatattgaggtatccagtgaacggcagcaaatttcctaccttcaaggcccaaatgtaagctagtccccttacgttacatgcagctcatttgctaagtggtttttttctagtatctccactactcgctgacacaggaggacacaggatgttaaaaaggaaatacagttctgtcaattattcacttactctccaaaatacttggaagaactaaatatggaaccataggagactttatcctcaccgcatagtccctatactagtcaaactccttattttttaattgatcatttttaggaaggtagcattttattcactagaacatttttgttaatacttgtttatttttgggatgaactgccatgatgtgggctacagaggagggtcgcatatgcttccatcccccttttagagaatccacacctgtcccagttgctgggttccactaccaaaagtgaattgcaactattttaggagcacttaagcacatccgaaaaatgagtgattctgttctggcccacaccacatcactgatgtacccccttaaagcatgtccctgagttcatcacagaagactgctcctcctgtgccctccacaaggttagaactgtccttgtcttagggaaaaaggagagagagagagagagagagagagagagagagagagagagagagagagagggacaggcaccaactgggtaacctctgctgacccccactctactttaccataagtagctccaaatccttctagaaaatctgaaaggcatagccccatatatcagtgatataaatagaacctgcagcaggctctggtaaatgatgactacaaggtggactgggaggcagcccggccttggcaggcatcatcctctaaatataaagatgagtttgttcagcctttgcagaaggaaaaactgccacccatcctagagtgccgcgtccttgtccccccaccccctccaatttattgggaggaaggaccagctaagcctcatctaggaagagcccctcacccatctccacctccactccaggtctagccagtcctgggttgtgacccttgtctttcagccccaggagagggacacacatagtgccaccaaagaggctgggggagggcctcagcccaccaaaacctggggccagtgcgtcctacaggaggggaaccctcaccccttcaatccctttaggagacccaagggcgctgcgcgtccctgaggcggacagctccgtgtgctcaggctttgcgcctgacaggcctatccccgggagcccccgcgcctcctccccggcgctccgccctcgcctccccccgccagttgtctatcctgcgacagctgcgcgccctccggccgccggtggccctctgtgcggtgggggaaggggtcgacgtggctcagctttttggattcagggagctcgggggtgggaagagagaaatggagttccaggggcgtaaaggagagggagttcgccttccttcccttcctgagactcaggagtgactgcttctccaatcctcccaagcccaccactccacacgactccctcttcccggtagtcgcaagtgggagtttggggatctgagcaaagaacccgaagaggagttgaaatattggaagtcagcagtcaggcaccttcccgagcgcccagggcgctcagagtggacatggttggggaggcctttgggacaggtgcggttcccggagcgcaggcgcacacatgcacccaccggcgaacgcggtgaccctcgccccaccccatcccctccggcgggcaactgggtcgggtcaggaggggcaaacccgctagggagacactccatatacggcccggcccgcgttacctgggaccgggccaacccgctccttctttggtcaacgcaggggacccgggcgggggcccaggccgcgaaccggccgagggagggggctctagtgcccaacacccaaatatggctcgagaagggcagcgacattcctgcggggtggcgcggagggaatgcccgcgggctatataaaacctgagcagagggacaagcggccaccgcagcggacagcgccaagtgaagcctcgcttcccctccgcggcgaccagggcccgagccgagagtagcagttgtagctacccgcccaggtagggcaggagttgggaggggacagggggacagggcactaccgaggggaacctgaaggactccggggcagaacccagtcggttcacctggtcagccccaggcctgc

SEQ ID NO: 4139 - DNA, 2300 bp, Homo sapien
tgtattttaaataagaattcctaaagaatagactcaaatgattttgattggagaggtctgattatgtacctttagtgataaatattccaagggcaaaaagaactacaaagcaatcttgacctttacacagtgggtttgttgtaggtagtgtggtataggtgcaataattctgaactattttgtgtatattgtagatgaaaacgattacatatagtacagttggcccttcatattcttggattccacatctgcagattcgaccaaacatcaaaaatatttggggaaaaaagaattaaaaatattcaacaacaattaaaattacaacaagagaattaacaaaaaaattaaaacaacaaaaataatgcaaaattaaaacaaaataatgcaaattttaaaaaaccaatacagtataacagctatttacttagcatttacgttgtatgaggtattataatctagaggtgatttaaggtatatgggaggatgtatgtgggttatgtgcaagtaactaccgtttttatataagggagttgagctttttggtattcctatgggtcctagaaccagttgtcagcagatactgaggcatgatgctattattttttagaaccaaggagagaggagtacaaatatagaaagacagtgaagaaaaactctgtattattgaatttgaattggaaataccagatagaatctgatttttaaaaacaatatattttcttgcttgaggtgatgggtatgctaattaccctgtgatcattacacaacatatacatgtattgaagcatcacattgtaccccataaatatgtataattattatgcgtcaattaaaaaaatacatcagctgggtttggtggctcacgcctgtaatcccagcactttgggaggctgacgtgggaggattgcttgagcccaggagattgtgccagcctaggcaacttagtaacaacctgtctctacaaaaaatttaaaacttagccaggtgtggtggtgtgcgcctgtagtcccagctactggggaggctgaggtgagaggatcacttgagcccaggaggttgaggtggcagtgagatgtgattgtgccactgccctccagctggggcaacagagcaaaactctgcctcagaaaaaaaaaaaaaaagtctctctctatatatatgtagatagatagatatacataataaaatgtgtgtgtgtatatataaaattgtgtgtatatatatatacacaatacacatatatatacattttatctatacacacacacacatacgtatttcttgtctctgcagtgacaccccagtagcatgagtatacctagttccatatgttggtttctgactaccgttttccagtaaaagaagtgagggcttattgaagaaatcttggagagtcttattgggccagaaagcaaggttaatgtagagatactaaaataatacaagagccttgaacagctcccactgttcaagtttggggactatttgaacatcaaaagattggtagtaaagggtatattccacagtttataagacaaaaaaattcatgagtctacagtgattttcaaaaagggagagggtcagtgaaatgcttctttacaggagaatgccaactaataaatgtgaaaacaatggcagaagtcactattacaaccacggtgaataactggtcaccagaggatgctgagaccattgagtttaggggctaggggaacaggatattcccgtggttttggagtatcagtagacaaatctaatagaccctgtcatcaaccacaaaacaaaccacattgtgtaccactcctgaagcaatgtactaccatcacgtgtgtcctgttcttgccaaaatgttcacccttattctaattacaagagaacaatcagacataacctgctggtgggacattgtataatacagttgccctagactcttcaaaaactttaccaacatgaaagacaaaagacaggctgttttagatgaaaggaacctaagagccatgacacagaagcaaatgcagagcgagattcttgatcctgaatcaccctcaaaataaccgtaacagttatggtgaatgttttggaaacaagtgggagaaagtttgaacatacttagtattagatgatataactgtattgatgttaaattatataagcctgataatcgtattgtggttgaatgtccttgtttttaggagatacatgctgagtatttagaaatgaaatgtcatgatgtctgcaaccttcatatgctgaaaaaaaattacctatatacatagagaaagcaaaagggacagagtgtt

SEQ ID NO: 4140 - DNA, 2300 bp, Homo sapien
tcctccttggcttcatttgctgaagaaacagatgtaccatgacccgggccattatgtgaaaatggagagtgtccagcagcagtacatatttcataggcacttgagtttcaacgtatccaaaaccgagcttatcttctccaaagcttattcttccatccttaccccctgctccagtgacaagcactaccatctcttcagttcaaagcaacaacagaggagtcattcttatacagttgttcccccttacccacagggggatatgtcttaagacccccagtggatacctgaaattgcatatagtactgaatcatatatatacgtttttcctatagtacctatgatgaagtttaatttataaattgggcatcctaagagattaagaacaatagtaataaaacaaccgtaacaatatacaattgacctttgaacaacacggctttgaactgtgtgggtctacataatatgcaggctgttttcaaccaaatgcggatcaaaaattcacagcatgttttcaaccaaatgcggatcagaaattcacttgcttatgcagaaggtcgcctttttgtatgctggagctccacagagccagctgcaggacttgaatatgggtggattttggtgtatgttgggggtcctgtaactaatcccctgtgtatactgagagatgactgtactgtaataaaaatatgtgagtgtggttggtctctctctctctctctgtctctgtcatctgttttcagactgcagttgactgcaggtaactgtgactgtgggaagtgaaaccatgaataagaggggactactgtacatcagatccagcagtaacctaactggatttttctctttcctgtcttttcctttctgcagtaacctcctaactggatttttctcttgtctgatctgacatctgatcccctctccatatgatagagcaatcttttgggacactggaacagactgtgacactcctttacagtgcctgtccattgtccttggtattaggttcaaaccccataacatggtttacaagaccgtgtcctctaattttgtgattcatcccttctcagtatccctcgtttcttcatgtgtgccatagttaatcccctggtgggttcattgacaccctagttgtcccctaatctctctaagttagaagagtctgctgctttttatgggcttacccttcctttaattggttatcctgcaagttttttccaaactcttgctccctgggtgatctcagcctctcccgtagcctcagttctctcctgagatagaggcttacttgcggacggatgtggatgtatgttctgtgtgcagctgtatacccctcccccagttctccccagccttccatgacctcctctttacctgttaggaagttttccctgtctctctcggtgtttatcacctgtgtcattgcttgctcaattgtctggactatttttaagtctttttatctttctgtgtccagagccgagcatgttctaagtattcaatgtgtatttattgaattaatgaatggataatagttttctcccttttaattaaataaattttattaaaagtaactttgagccaaaacctataaatggtttttaggttacatttaacttcacaattaacttaaaattttttttttatttttatgggtacatagtaggtgtatacgtttgtggggtacatgagatattttcatacgggcatacaatgcgtaataatcacatcagggtaaatgggatatccgtcacctcaagcattcatcttttttgtatgttgtgaacattctaattatgctcttagttactttaaaatgtacactaaattattgaacatgtaaagtttgttacatgtctttcgtgcctgacttatttcacttaacatgtcctccagttccatccctactgttgcgaatgacaggatcgcattcttttttttggctgaatagtagtccataattaattttttcttggtgagttttgaaaatattttgcctcccttaatacttgtgttttccaattttatttcagaaaagatttaggtcatgctcaaatggtggttgatgagctcttttcctctcactctgatttggattctgattctgaactagacagggcagttacccaaatcagtgtagacctgatggatgactacccagcatctgacccacggtgggctgagtctgtccctgagggtaagaatgtttcaattatggaacggtgtgttttgaacatattctggtttctttattagaagcatctcttaaagcatattttttagcttctcaaacaatttaatat

SEQ ID NO: 4141 - DNA, 2300 bp, Homo sapien
gccgagatcacgccccggcactgcagcctgggcaacaagagtgaaactccgcctcaaaaaaaaaaaaaaaatgttgctagtagtagtattagatgttttagaagagctaaaataggaaccatttaatttattgggagcaacaagtttgctagacttaaggaacaaataagctttaagatgcaaaatggtttgtttttacatatatagcagtttgaaatttctataaccaatggctaaaaagcattttaaatatatatgtttgtttttaaacattagagacagggttgccctgtttggtcttgaactactgggctcaagcgatcctcctgcttcagcctctcccaaagtgcttggattaaacacataagccactatgcctggcctaaaattattttttttttgagttagagtctcacactgttgcccgggctggagtgcagtggtatgagcttggctcactgcaatctctgcatcgcaggttcaagtgattctcatgcctcagcctcccgagtagctgagattacaggcacacgccaccatgctgggctaacttttgtattttagtagagatgggattttgccatgttggccaggctggtctcgaattcctggcctgaagtgatatgcccacctcggcctcccaaagtgctggggttacaggtgtgaaacaccacacctggccttttaaatttattttagagatatatggtctcacagtgttgcctaggctggtcttgaactcttgggctcaaatgatcctcctatctcagcttcccaaagtgttgggattacaggtgtgagccatcgtgtctggaggtaaaacttttttaaaaatgtttttcctctggacaaaagcaagtaagctttaaataactgagtacatcagggattggcaaaccttttctgtaaagggccaaaagtaactgttttaggctttggcggccatgtagtctttactgcaactactctatttcaccaatggtatcatgaaacatccctagaaaatacataaataaatgcgtatggttgccttcgaacaaaacttcatttataaaaactggtttgagatcagtttcactggagggctgtactttgccaatccctggatcagatggttgttttgatctttttttaaagtcagatttattgagctataatttatatagagtaaaacttaccctctttagtttataattccacaagttgttttttttttctttttttttttaagatggggtgtcactctatcgcccaggctggagtgcagtggtgcgatctcagctcactgcaacctccacctcccgggttcaagagttcttctgcctcagcctcccaagtagctgggacaacaggcatgtgccaccatgcctgactaatttttatagagatggttttgccacgttggccaggctggtcttgaactcctgatctgaggttatgtgcccaccttggcctcccaaagtgctgggattacagacgtgagccaccgcacctggccctaattctacaaattttgacagatacacaatttagtcatttaaccgtaacaatcaatacagaacagttttataaccccccaaattcccttgtgctttctgtaatcgacccctccatcctctagcccctggagatcactgatgtggtttctgtccctatattttgccttttgcttaatgtcatagaaatggaacatacagtgtaaagccttttgagtctggtttctgtcacttagcataatacacttcaaattcattcagtattttttttttttttttttactactgaatagtgttcttttgtatggatataccacagtttgtttatctattcagcacttggaagacattgggttgttttcagttttaggcaattatgaataaagccactacagtcatttgtacacaggtttttgtgtgaacacagttattggttttctgtttctgtttttaaattttctcttggataggtgtccacgaatgggattgctaagttatatggaagcatatgtttaattttataggaaactcctaagttgttttttagagaggctttacatcttccttttttattgattagtgatgggctggtgattttggcagcagcatggcactcagcagacaatccatgtctcatctattactctctgataacaatagaagataatggttgccaaatgtcagatgcagttactgtagaagtcactcaatataatccaccttttcaggtaagatttatattggttaaattacaaagcaataatatgttgagtatttttctaaccatttcagggtcttatttat

SEQ ID NO: 4142 - DNA, 2300 bp, Homo sapien
ttctacctttctgtaagtaaagagcaaagctcaacttaataaaatttccagggctgttaacacatttgtggaggtttaccaccaatacttaagatatgtgctaatttagttttgtcacttaatagagaacgtaactctttgtctccatgtactaaataatttatcattcctttaaggagctcttatttgaaaattatgtgcttttggtcctccaaaagcacattgttttccttgaaatgttttatatagttaatgagtttgttatttgttttactttatcgatataattataaatgttgctaaatatttcttttttgtttgtttgttttgagacagagtcttgctctgttgcccaggctggagtgcagtggcgcgatctcagctcaatgcaacctctgcctcccaggttcaagtaattctcctgcctcagcctcccgagtagctaggattacaggtgcacgccaccatgcccccatgcctggctaatttttttttctatttttggtagagatggggtttcatcatgttggccaggctggtctcgaactcctgacctcatgatccacccacctcggcctcccaaagtgctgggattacaggcgtgagccaccctgcctggcctctcttttgttgtttctgcttacttattttttgatatggagtcttgctctcttgaccaggtgggagtgatgtgatcatggtttactgcagcttcaatctcctgggctcaagtggttctcctgtgcctcagtcaccctagtagctgggaagtgcactgccaagcctggctattttttttttttttttttaagagagagagtctcactatgttgcccaggctggcctcaagcagtcctcccagggtggcctcccaaaatattgggatttataagcatgagccactgtgcctggcctaaatatgtcttataggaaataagctatctggtctgtttgtaacaaaaaattaaggaatattaaatgtcccaaatacactttttgcctttagatatatttcttttttctttcttttttttttttttttttttttgagatggagtctggctctgttgcccatgctggagtgcagtggcacgatctcggctcactggaacctccacctcccaggttcaagcgattctcttgcctcagcctcccaagtagctgggactacaggcacgtgccaccacactcagctaattttttgtagttttagtagagttggagtttcaccatgttagccaggatggtctcgatctcctgacctcgtgatcctcccacctcggcctcccaaagtgctgggattacaggcgttagatatatttctaaagttggttatcagagttaatagatctattgtttttggtgttgataattttggaatattcaaaagtatttgttgtgaggtagtcgtttctgagtgtgccaattacttttttttgataaagcgtgtggtaataaagatttatactataagattaatcacccacctcattttttcctttagtcgatgaccagctgaccattaacatagatgaaggtggatgggcttgtctggtgtgcaaagagaagctcattatttggaagattgctctgtcacctattactaaggtaatggctctttagagagctggaacaagatagaggagaggaatgccaattgacttttcatttttaccctaatttttttacagttggaggatagtcaataggaaactacttaggcattaagagtttgcattttcatagtgatgtgaaataatgagcatgcatacacatttgtgtattgggaaaaaagtttcccccttttgaagatctgtgttgtttacatttaataaaattagagtcattgatatttccaatgaatataatgctaatccgtctgcctaatgaagtatcagactaaatgctatccacataagcaaatgaactttgagtttgcgtatttctgagaagacagaactatgttttgttgaacctactgaatgatgcttaataaaataagaaaatatgataccagttgctagttaaacttttcacttgtccacttccaacagtgggttatcatttgcatgtctagtaacgtatcctcagcaacctttttctgtttgttacagcttagatacactactctcttctaccagtcattacttccttggccatgttccgttggaactcagggctcctgcttacctcaattcttcacttctgctgaactctgtgttactgctgcctagaaaagggtgtatgtggttaggagtaataggtgagggtgaattcctgggggacatactgagttagct

SEQ ID NO: 4143 - DNA, 2300 bp, Homo sapien
gccccagtgattctctctcatacactttgctcttttatttcatagtacacatctcagcttgtagctggatatttgtgttcattttttcagtgtctgtctttctcattggtctgtaatctccatgagggtaggacccatgggctttgtttagttataagccttagcaattatcacatagcctggcacatggtaggtactcactaaatccataacgaatggatgacttttagtgctgtctgcttactatccttcaatagccatacatttggactccaggcaagttcttgctcaaaggtggctgacaagtcattctagctcctgcaaacaacagcttttacattaggatgctggggaaaccactaaccagtccaacaaagcacaagaataaaattgatcccaccaatcctctcagacacaactattaatactctctattgcctatttcacacccctccttgtaagaatgaaacagggaggaaatgcactgggctctcagagctataagactcaacaagctgccaagttgggttagacacccaggtgggagaaggagtaaagcagctagcctatgtaaccttggcaagatgactgctcagatgccactggtgcatagatagatgactggcttcccaggggaatgtcaacaactgacacccacactgtggtctcccacatgtgaatacgtcaatgtttacttaaccattcccttatttcaacacacgttgaatgaaagtctactatgtgtctgttactgtgtgccacaaaggtaacaaagtcactgctcttgctgtcaagacatttaaaaggaagtacttgacagacaattatgaaaacaaactattatgcaggataaaaatacagtctacacacaggagcagagaggacaaaggataagggggacctaatcctgtggaaggtttcactgagaaggcagcacagaactaacttgatgcggaaggtaggcgccttctggaccaacaaggcagggagtgcattccaggtgagagaaacatggacatgggcactggagggagatttgggtttttaagttctcggaatgtggagtgcaagtgggaagtgctggaagtacaacacggacggaaaagccaacctgacttagatcacataggaccttgcaaaggagcttagcaaataacctactggcaatggtcagccactgaagcatttacaggcccaagagcagcattacgtttgccttaattcattgtgttggcagtgagaagatagagtggaggaagactagacacaggtaaggaaccctctccccatctcccctactccctcccgctggcagaagaggctacgcagtggttgagggaaaggtaagtaccagaaccagggcagaggcagtgcaaatgtgtgatctagtacagacacgtaggaccttacaacgtataccatgatcttagggtggaggtaggtgtgagggatgactgcagatagagctcttctctttgccttggacaactggccagttttaccaagctggaacagagatggtggtaggagaggggtcctaaaggaaaacatgaatgcgcttttcataagtggattgtgaggagttcgcaggacttccagctgaaattgtcccctagggagctgaatgataggggtctgggggttttgagctggatccaggttagagacacggatttgtggcgtcatcagcgtggatgagactgcgcaaagttgaatgggaaaatggcaaacctagaaaacaacaaatatcacagtgcgataccagtgtcagctttacggcttttctccgtcctcagcttggaatgaggaacatctttcatttcacaagaggttcaggaactaccagtgtgaaaagaggctacgttcaagctgctggagggccagttccacctaggcgcagtcaagaagggcgcctggctttccggcttcacgtccctggaagctcggcactgcagcggttctagatctggggccgccggctgccttcccgacctacctcgctgactgggcaccgcccttaacgtcacgatcccgcccccgccagcgctccgaccacaacccgcgggagccattgcgtttgacgtcatcatcgcgcgccatctcttcccttaggtgtttaagttccgcgcgcaggccaggctgcaacctgacggccagatccctcgctgtcctagtcgctgctccttggagtcatgttcccagccgccccttctccgcggaccccgggtaccgggtcccgaaggggcccgctggccggactcgggcccggctccacgccccggacggctagcaggaagggt

SEQ ID NO: 4144 - DNA, 2300 bp, Homo sapien
atgaatggaggaaaaatacaatctgatgaacaccaaaatcaagagatggggaggaaggggctggccagaacggttccatagttggctcccagtttttcttggtgaggaagagttgatcagactaagaagtcatcttctctgattcagatatgatcactcacttccttagtcaacctgcttgttctcacctggaaccatttggttcttcccttgagtcagagatcgaggagcaaaagggaggaaactgctagagactgagatcaacgcatactctgacaacagcttatttggcaaggaagcctcctggactcagcaccgcagcccctttgctgaagcaacctgaacattgagagtgcttgtgttttctagctgcggttggatttctcacgatgtccagtgttatctccatgtctgcccctttcttcctggggaagatcattgatgtcatctataccaaccccactgtggactacagcgacaacctgacccgcctctgcctagggctcagtgccgtgtttctgtgtggtgctgccgccaatgccattcgtgtctacctcatgcaaacttcaggtaacagtctctcctctcagggatgtgagtcatcctgaagaagatgtagagtcctgtgggtttgttcgggctcaaatctcatgtgctccaggctccattctcttcctctcttcctggcatcccattaagtggggatagagtccaatgactgcccagatgttggagttacagattattttagatcaagcactctcaactcttcttttatagttgaagttgagctgtaagggcaatcatgtcggtcttatgggaggtttgaaaataagcccctcgggctgggtgccgtggctcatgcctgtaatcccagcactttgggaggctgaggcaggtggatcatgaggtcaggagttcgagaccagcctggccaacatggtgaaaccccgtctctactagaaatacaaaaattacccgggcgtggtggtgtgtgcctgtaatctcagctactcaggaggctgaggcaggagaatcgcttgaacctgggaggcagaggttgcagtgagcccagatcataccactgcactccagcatgggggacagagcgagactccatctcaaaaaaaaaaaaaagaaaaaaaaagaaaatgaggcccctggccatgaagctggacttctgaggcttcctgaaggcttcagaaacccatttacatgccccatgcttgtgtttctccttaagtagcagctgggatgataactttgttagtatttctctgaagaggtcttgtttttacaggcaggtcactgccacaataatgagagaacctgggacaccaactcgaagtctgttgctctccatttatctctgtggataattaaccaattcttgccatttgaaggttcaatacaggaaagggtttccagggaggaacaaaatgagcttttggaagttaatgtaataaaacttctttgtaaataataccttaaaaaaatctcggccaagtgtggtggctcatgcctgtaatcctagcactttgggaggctgaggcaggaggattgcttgagcccatgagtttgagaccagcctgagctacatagcaagactccgtctatataaaaaataaaaataagttagctgggtgtagtggcggacatctgtagtttcagctacccaggaggctgaggtgggaggatggcttgagcccacaaggttgaggttacagtgaactgtgatcgtgccacttcattcaggcctgggtgatagagcaagacccagtctcttaaaaaaaaaaaaaaagtaaaaataaaaaaggcctctgagtcatgttatatttattttattcctgtatcctctcactagcgcccacagtctgtagttaataagagaaaagtagtgttagtagtgcatgacagttaatgtgcctggtttgggaaagtctctttccacccatgggatacagtgcagcagacacgctcagaggctgcattgctcaggagggttacaactccaggccaagctgctgcacagtaagtggctgccccataatggtaatggatgtctttacccttggtgagcctgttcgtgtttgcttttgcaggtcagcgcattgtgaataggctgagaacttcattattctcctccattctgaggcaggaggttgctttctttgacaagactcgcacaggagaattgattaaccgcctctcatcagacactgcactcctggggcgctcagtgactgaaaacctctcagatgggctcagggccggggcccaggcttccgtaggcatcagta

SEQ ID NO: 4145 - DNA, 2300 bp, Homo sapien
atgctccctcagcgtcccaagtagctgagactacaggcatgcaccaccaagcccagctaatttttgtattttcagtagggatggagtttcaccatgttggccaggctggtctcaaactccagacctggagtgatccgcccgcctcggcctcctagaatgttgggattacaggtgtgagccaccgcctggccgctacctcctctttttttttcttttcttttttttttttgagacggagtcttgctctgtctcccaggctggagtgcggtgtggcaccatctcagctcactgcaacctccgcctcccgggttcaagcaattctcctgcctcagcctcctgcgtagctgggattacaggcacgctccaccacacctggctaatttttgtatttttagtagggacggggtttcaccacgtcggtcaggctggtctcgaactcctgacctcgtgattcgcccgcctcagcctcccaaaatgttgggattacaggtgtgagccaccgcgcccggccgctacctcctttttgagcccaactaaagaaacatcaaggattgataccctcccagttgaagagaaagtgacaactttaacccaaatctcaccttcctcttactttctctttcccattttccagctgccaaactaagggcagctgctgtcagtttttgtaaataaagtttccagggctgggattagagcgagagaagagaggcaggattgtgaaaggtcaggagtggatactcaatcaaaattttttatattttgttcattacggattttttaaattaattttgatttttaaaaatattgcactaaaatgtttatgttgattattgaggtttttttattttgtgaacccataaaatttgcaactgacagtaccctgtccaggtccagtaaaaatacctaggagtctacaaaaatctacccacgactcactggacctcaggtacatatccccccccgcccccatgaagtctccataaagtgtcccagtgagttttaatgttctctcctgtctttccatgcacgtgtattaagatgcattgccttctgattagtgttttccacttcgaacagcgggaatgcctcgaccacgcctgtcttcaaatttctgctctagttaagaaacgatctcaggccgggcacggtggctcacgcctgcaatcccagcactttgggaggctgacgcgggcggatcacctgaggtcaggagttcgaaaagagcctgaccaacatggtaaaaccccgtctctactaaaaatacaaaatcagccgggtgtggtggcgtatgcctgtaatcccagctacttgggaggctgagaagggagaatcacttgaacctgggaggcagaggttgcagtgagccgagatcgtctcaagaaaaaaaaaaaaaagaaaaaaaagaaacgatctcttcccttctcaaagttatatacatttcactattcgccaaccacctcctccacgccgtccagagctgagctgacacgcagcgaagtcctctcagtggtccctccgcacctcagccctgtgcttggcagcgagacgagtgacagggccgccccagcatgggtctcccgggccgcggacccgccccacgccgtatccagcacgctgtcctcccgccccatctttgtgccggccatcgtgtggtcgcgtctgcgcgctccgcccggtctgccggcgtgagaaagagctcgtgtcgttcccaagttcagaccagaggggacggcgaagcgcgaaaaagttccctgcgcccagtacgcaggcgcagccgtgctcctgggcttcccgggcctcgtcccagctggcgcgcccggcgctcctccgccagcgggcagttgggggcgctgcagggagggcacccgagcgggttgggggcgctcggaagggtggcttgcaaggtccgggtagctgcagtccccggagtggggcggagaggcgcggcaccgcgcggacgaggatggggcgggggcgggcgcagcccgagggtgcaggcacgataaggcgggtgacagccagcggggaggggcgggcgccaccgcgtccacgccctttgctcggggccgggccgggagggtcctcgggctttgcgcgcgcctggccggcgggctgaggcgtacgggtcgcacgcagcgccatgcgaggcccccctgcctggccgctgcggctgctcgagccaccgagccctgccgagccaggtcggctcctgccggtagcctgcgtgtgggccgcggccagccgcgttcccgggtccctatcgccgttcactggcctgaggccggcgcggctatggg

SEQ ID NO: 4146 - DNA, 2300 bp, Homo sapien
acaggtgctaatatattgcttgcaaaaccaaaaaccagttactgagtagttaagtgaggcctttacctagtttcacagtgacagaagctcacataagcctcacatttacaggcaggagcaacaaaactattccaagatacactaatttaatttgttgttgatgacaaagaaaaatactcaaaacaagcccaccttttaattttctagcttagcgctgatttttaaggcaggaagaatttacgattcattaaaaaattagcatatattccatttaacgcaaaaacttaggactacagggaacctagaaggtattttgccaaaaaggaaacgataatagctaacatttagctattttcatacacatcattctttttctgggtacctttaaaaaggtcgttttttgggaggctgaggcgggaggactgcttgagcccaggcctgggcaacatagaggcaccctgtctcttaaagataaaaaaaaatccacgtttaagttattccttatcatcgcattttatagatgaggaaactacagttcagagaggttatgcagatggctacatggtttccatcctaggtctactgtcaccaagctctatccactacattatgctgttccaaagtttaaagatgtggccagatgcatttaacctattaagcacaaaactccctttcctactcccccttccaagtagagctgtgaccaggaactggggcacagcctccgtgtcctcccctacatccccaactcaggtgttggcacacttgaatcgcctgatataagacacgctccgcacttaatgttcctctcagcacagctcccaactgcttgttagcaggagtcaccattccgagattccaatctgcaaggtcagtttaggtacagtaatttaagacagacactgcatgggactggcacttaccttctgatcccagaaccacaaagactgcgagatccgcattacaacgactttcacaactgatgggagaactgcatgtagcgttcctgcactccacttccgctaagtctaaaatgacaccactgtttctaaccatccactcacttcggaccaacgccttatcgaatacattttcaaaagcctggcagcttcgcgagctggaggtggtgaacccgtcccacaccatgggcgcaccaaccttaccttgctgtcatgaggcaacgagccccgagagacacccttgcaggtaagcactctcctgcagcagctagtctaactctggctcccccgtgtcacacgcggagatcgactccacacccacccacgcacgatcaccatgtgcaaagttgaatcccgacttcgccgcaaagacatttccttttcccctacatgcaaaggagctgtggagccgtgctccctgcttggctgtcgggcactgggataccttccccgcgggcgcccgccacctcctccccgagcccggcatccaacccgcaggacccacccctgcgcaggaacgcgacgccagtccaggtgtagccgccgactgcaggccacgccgccggccgcagcccgggactcgggaggccgagggcggaggcgcggccgtcgcgcccgcgcagagccgcccgccgccccccagccccgcctcccgcgccccacccccaccgcccgccggcgggagccaaggcgcgccccgccgaggccccaccgccccggcccccgcccgcccgcgcgcgcgcgcgcctcgcgaccctcccggccctccccgcccgtgctcccggcactcactgaacatcccaggcggctccggctccccccgccgccgccgcctccgggatcgggttgcttccgcctccgtcgtctctgccgcagggtctcactccgacggccggctcagctgggcccccgcgccccgcgccccgccgcccccgccgccgctctgggcggccgctccatgactgactgacacggagcgggccgcgggctgggccgctcgggcctccaacgcgcaaccgtctccgccaatgggcgaggcgcctcggcgctcggctggcgacgcctggcgtgcgtgcagcccctccccgctgcgccgccggcgtccggcggaaggagcgcgggtaccggtcccacgtggtggggacgcgggacccgtacagcggcctccgccgcaccgggacagcagccgccgccgctgccgccgtcctcccctgtctacccggagctgtctcgagctgagccccctaccgggccggatcccgaggtgagtcccccacctgcggtcagcccctgcgggcagccaggtcccgaggtgagtccccccacccggggctggtccag

SEQ ID NO: 4147 - DNA, 2300 bp, Homo sapien
tgggatctcattatgttgtccagtctggtctagaactcctggcctcaagcgatcccccgctttggcctcccaaaatagagatgacaggcatgagccactgtccccgacctaaatgaggttttttaacagaaaaaaaaaatgtattaatgaagtacctgactcattacttttttcattgacattacatttaacttccaacaaagttccctccccaactttttctctatttttttattttaaccaattgtcaatatccaaattataaaagtgataattatcttgacagactgtaaaaatatgagtttcacattaaacttacttgttctttatttggaagaaagcactggtgagaaatccaagcaaagtgagctagttttagtttatcttcccaggaagttgtcttgcttttaagcttaagggaaatgccagaataaacagcagccatggctaggctttatctaaaatttaaaaacaatgggaaaaaaaatactataacaatgtcagactgagcaggcaccagaaaaccaacagtattgcagtactgtatcttgtttacctaatatgtattcttttaaaagtttttaatgaatcaacagatttgtcggggtaaatctacatacaagatgcttgactccagaattttctgggggaaattcagacaaaagcaagcaaaagatggactgcacacacagaagatggactatatgtattccagctatgatcaaacatcacttccacaaaggtgagtgttcaggaattcaacaaggccaaaatcagtgattacattacttgtggaaagagtcattcatacatggtttcaaattgaaagaggaaaagatacataagcaatatccggagaaagtaatatgtctccaagtgaaaaagaaaaccccaaaggaatacagttatttcagctgcaacagtaaccttccactaacacttttattcagtcgtgtataaatttacaacgcacatacacttcaaaaaagactctacaagagatacttgcacaaggaaaagactaaaaatagaaaacaaaaaaccatgaaatctcgggggtagcaaacataccaaacacctacagttactattaaactgggtaaacttggctttgagtttcctaaaagttatagtaaaaaggaacgttaagacgttttcattttagaaattaagttatccttcactctactgcagagaacaagaacgtcaagtgctgtcagttttcctattttgtcaaaatgtccaaaacgaattcaacgatgcctgactttctaagttcaataccatagaaccgccatcgcgacagctacaaagtgcataacaggtgtttgctgaactggctacaaagacaaccgagatgctctccccggctccgccagagttcggctctccgggcctccaaccgcccttaccgggcaatgcgaagtccagggcggacagcacagccctgccagcactccctgcccagcagaaagagaccaagcaacaagaaccaggggagagcagctaggagccaggagggagttcgccttcgcgaatggagcgtgccgaagccgctccagcccagagtctgctggcggcaccggaactgggcagggttggggggccccccatctgggcccggccttaggtagggggatctcctctggaccagccccgggtggggggactcacctcgggacctggctgcccgcaggggctgaccgcaggtgggggactcacctcgggatccggcccggtagggggctcagctcgagacagctccgggtagacaggggaggacggcggcagcggcggcggctgctgtcccggtgcggcggaggccgctgtacgggtcccgcgtccccaccacgtgggaccggtacccgcgctccttccgccggacgccggcggcgcagcggggaggggctgcacgcacgccaggcgtcgccagccgagcgccgaggcgcctcgcccattggcggagacggttgcgcgttggaggcccgagcggcccagcccgcggcccgctccgtgtcagtcagtcatggagcggccgcccagagcggcggcgggggcggcggggcgcggggcgcgggggcccagctgagccggccgtcggagtgagaccctgcggcagagacgacggaggcggaagcaacccgatcccggaggcggcggcggcggggggagccggagccgcctgggatgttcagtgagtgccgggagcacgggcggggagggccgggagggtcgcgaggcgcgcgcgcgcgcgggcgggcgggggccggggcggtggggcctcggcggggcgcgccttg

SEQ ID NO: 4148 - DNA, 2300 bp, Homo sapien
tttagggactccacttaacatgtattttggtcttcctttcctggcttttattttaacctcttctctctgaacctttttacttctatctttatattattttcaatttcttgattgttttcttgccattcttcagtgtccttttacatattttcatttgaatatattttcccttggacaccttgtaattattctttgtttctgggatagtttttgtcattactttcaatttccttcttgaatttgctcaacccttgttgcatttcttcctaatttttgtctagtctgtcttcagttcttgaaatttcttatcctagatatgtgtgtgtgtgtgtatgtgtatacaaatacgtgacactttgttcagtttgacatgtggtattacaattttcttatgcttcatggtttttattgtgggggttttcatcagcgaaaatgttatgatttattttttatcatcagaaatgtgatttctgttttctttttgcagaatctttaaatgcagttgatttgatgtttttctgttactaggcattttgaggcagggttcccggttcaagagtgttttcttttatctgtgtactgaaatgcagtttttaatagataatgttggtgtttggggaggggactggctgtcttctctttcatttctgcaggatttgtaattttcccttctgacttccttctttcccttcattgtcaggcctctgaaggacattatcttcttttcgtatttatctgactttttcccagaaacaaggctccttcaagcctctcacctcttgtcccattttctttcaaatctcttcccttgatcaataaggcacctgacctctgttcagtttttagttcttggtgttggactttctatttataaagaggtgacaaccctgtacttcacttaagtccttggcaatagtggagggagctcagttggaatttggtatcttttctttcttctacttaagtaatttaatgttcagttcatggcattctctctaagtaatgctgaaggcttgtttttgtttcgttgaggatatgggtacggacttatatcaggcagctgccattatcctctgaccgagaagctcctgaaaacatttaatatatcaagttctaagtaaaatttctgtctttcttaggaacactggaagctttgcgtgttgcaagggcatcaccaaggttacatagattatgttacaagacagatcgttttcttgtatcgttaaagatgcttaatgtgctttttaaagaacgcaacgaatgagaaagaaaagattttaaacaatatattattgctttccttcttcctcattttgtgtttattgaaaagaacaactctaccattgatagctctgtcacccacagaaaaatgttcttttgaaaattaccttctcagttcctaccaactcaaaacctccacatctgcctatatagataaataaaatcgataccagcgggtcaggaatgttttgctgcaagattagtgagaaaactgcagcaagcagcagcaaagtcgggttcaagcgggcggtttgcaccaaaaactcaggtcagttggccaataagagcaagcccgttaagggtctgaggtggccccaaagaccaaggctgaagaggtgacagtctgggcaggaagcaccgaggccactaccgcccccgtaatcgagaggccccgtgtgcgtgagcaaggctctttgcccacgtgtgcgcgcgctccagtcgggtcccggggcagccacctgtcactcacgggggagggggcggccggcggggggagcacgctgaggggcgggcggccgggggcggggcggcgcccaggccctcacggcggagcccggcgtgctgcagccatggagacgcggcagtcccctcccgcggcccgcgccccggcccccgcagccgccgccgattggtcgccctttgctccctgacccccctcgccgcctccgaggccgctgcttcctgctctggtgccgcgcggcgccgccggcccggggcggagctcgggcgccgagtgcgcgccgccgccgagcagtagcaccgcgcgggaggaggagccgccgccgcgcccttccccttcctccgctcctcccccggcccccaccgcgcccgcggccggcccaggcagcactcgcgagcagcggcggccccgccggcggccgagttgggagaatgcggcggcgctcgcggatgctgctctgcttcgccttcctgtgggtgctgggcatcgcctactacatgtactcggggggcggctctgcgctggccgggggcgcgggcggcggcgccggcaggaaggt

SEQ ID NO: 4149 - DNA, 2300 bp, Homo sapien
ttattaaagccccgtaacagctgcatggatcacccattcctagtgagtgaggcattagtttgctggacccaagtagaaactcatggtgttctgacccctgtgttgtatttcctgccatgtgcctggcattctgggcacctgttgccataactaggttgactgcctgcaggatttgccatcaactcactgtatggtctgtgatggacccaccctatttctgatcaatctgcattggtgacagtgactgcacactctgtagatactatatgtgtatatttttacttcttttaatttgttaattgacagataataattgtgcatattcatgggatacatagtgatgtttttaatacatataatgtatggtgatcagatcaaggaaattagcatatccatcatctcaaacatgtagcatgtttttgtgttgggaacattcagtatcctcctcctggttatttgaaactctgtatatattatgggtccctagagtcaccctaccgggctgtagaacacaagcaagatccctcttctctagctataattttgtatccttgaaaaaatccctactccttccttcccagcctttactatcctccgttatactttttacttctatgagatcagtgttttttagcttccatgtatgggtgaaaacatggtattcaactttctgttcttacttcacttaatttcctgggaatactatccagccagaaaaaaaaaatgaagtcctgtcattcacagtaactgttgatttttgtcctgcctccctaacatgttcttagggatcttagataatacagaggaaaattcccttttgtattatacaaacctggtaaagaaaaactgttttttgcctttcagaaaattcttagtttttttgttgaatctgtttcttgcattcagtcggacccctgactcagactccagtcactcacctagtcagtggtgataagggcaggtacctggttggaaggtacctgtgtgtcacaaaaggcacaccagtcagtctaagcttcgactgagttccaatgctcagggcagtctgtgtgtttaagtaggtgtgggtagtgcctagacctacacatctcattcctcctgccggtcagttctgtgttgaagcaagtcaacagcagccttccccagggagcattcctacctgggccagctggttactgactggtccaagcctgtgagcagcgtgcagatatcaatcagttacttgactgtccttggtcactaccatagtccataaggcagtccctaagtccatagtccgtaagtccaaactctgcctggagacttgagcctgctaatacacagggacttgtatttaataaacttttccatttgagggaagggattatttttccctggatgagaaaagccaagatgcatcctggggttcagtctgttaaaaataagttttagagaaagatggcatatatggttgtctagaatatgtaacaataaagcttaattgtacatatttatataccttcagtgttgccttttcccacggtgttgatacgaagcaagtgcaaatgatcgtgagccagctagtgaagaattcagcacaagtgttttgtcactcagtagttacgatgatactggggtatacatgatcttatgccaagaggcctttatatttacagtagaccaagaagcattcttgtctcaaggtgtctactccacatctgaaaaatatttccccgtgaacattttttcttgattgtattgtggtccagagatccaagtgtgtcaaatgtctctcctttagagagttctgcatcaggttctggaaggaggaaggtccttatcagatctccttcagcagcagagggcatgggagccccatgatgggatggtcagggggcctctgtacctgcttggtgtgtctgctgttgcagaggtgcgtcccaggctctgtcagtcacctgtgtcttgttcatcgtctcagagatctcgttccgcgtgtggcagtgtggtggcagcctggagatcatcccgtgcagccgtgtgggacacgtgttccggaagcagcacccctacacgttcccgggtggcagtggcactgtctttgcccggtaagtagtgaaaggctgagcggggtccaaaacattgatgactaccctgaaagcaggacctgaccttgggctgtttgaggacagatgtccttcagtgggtgtggtgcatttatacaatggaataccacttagcaattgaaaggcgcattccacggatgcaggatacaacctgggcgcctttccagggcatgatgctgagtgagagaagcagtt

SEQ ID NO: 4150 - DNA, 2300 bp, Homo sapien
ctgatttgttagtccaacaaaggcagtctggtacccagacaaaaagagggtttgtttggggaaagggctgttaccatctttgttttaaagttaaactataaactaagtttctcccaaagttagttctgcctatgcccaggagtgaacaagggcagtttagacgttagaagttagatggagtcagtcaggtcagatgccttaaactgtcaattttgtcattgttaaattttttgcaaaggcagtttcgtcactatctcatgttggtgctcaaaaagttttggatgttaggacattttggattagggatgcccaacttgtaatagatgacatttaatatttatttaatacttatttaatactacctaaatacttgcaaatacctgcaaaaacaaggagggcctggacaaaagtgagtctccctcggtgccactgtatctgcagcactgagactgtttggtgtagataccaaataaatacctgagtgaaccaataaataaatgaataaaaggagctagcactgagtagcacatggagatcattccttggggctgcctagttatccttttctattacaaagacagaaaagagttgctttgcgtttaggaatttttaagtgatttagtcacttaaaaacttgagtgatttgaaaacagtatgactggagttgataaaacctttaaatcattaaggctgaaaggaacctaggacattctggaatcaaatcctttcatgtccctgttggggaaatccaggtgccagatgttacaagtatttaagttaataactggttaaaaactgactaggcataggttaaggcataggtcacttagcaaaaccccactaacaatgtttagtggctcttctgagaaatgatatgtatgatccagtatcccccagcactttaagtactcattgttgtatctgtatattttttaatagagagaaagtaaaaattcatcagtctcatcaccaaaccagttgtgccataacactctcataatttgatgaattcgtctgtcagtatctatttctgtctctctctcttgtttgctcactggctctccttctgcctctacacacatatccactatatgcaattctgcaaactattttattttcccacaagtccaggacatcatttctgtcaacatgtaagatgcacactcatgtttttagtggtcacagaatatttcatttgattccttcctcatatttagtcataaagtttctcttttttttttttttttttgctattataaacaaagcagaagtgagcatattttcacatgtatatttcattcctaattgattgctgccttgagataaatttctagaagtagagctgctgggtcagagaataggtgcattcatatgttcttatctgtgttgaatggcattatggataatagtccatattctacttactaaaatgaaaaagtatatatatcaccttatatgaaagatataggccccatacagaaattattttaataatggtatctcagatcagttgaaagtttcgccattttaaggaattattttaaaaggcgagcattacctccttactgtatttattttggaagaacacagtgccttcctatggggttcttaaggagggctagctatagcctgaagtgggagtccaccttatagccgagaccagaatatgggagcaaagaggttagctgtgtgcttgctacttcatggatgctttaagataattcttggcagaatacactgctgatacctatgcagatgatagcttttaatgcatgtcagacattcaagagtagcttgtcccaggggctttatttatggcaaatcatggttctctctatgagatttaagtacatggttttctttccttctagaaaagccggctgggcgcggtggctcacgcctgtaatcccagcactttgggaagctgaggcgagtggatcacaaggtcaagagatcgagaccatcctggctaatgtggtgaaaccgtctctactaaaattacacaaaaattttagctgggtgtggtggtacatgcctatagtcccagctgctcaggaagctcaggcaggagaatcgcttgaacccgggaggcggaggtttcagtgagccgagatctcgccactgcactccagcttggcagcagagcgagactccatcaaaaaaaaaaaaagctagtgcaaacatggcagtctttcagcttagccccgcagaaaagaaagtgattttcccaggaactcttatcttatgtagtctgaactttaatgcagagctgtctgatagtgtcgtagccgtgacggaga

SEQ ID NO: 4151 - DNA, 2300 bp, Homo sapien
cagaaagaaccatagcgatttcctcacccagatggccccagctcacagtatggggagagtgggatggggtgggggagtggagccagctgtggggtctcatcagagtgccctgggatctaggccagaggcgccgtcttcacccacatgccagctttgtggttctggtccctcttccttaagcgagggcttgccaagctttggctgtggaaagccttagccttgtgtagtgggagttccaaacgaaagaagtccccagaagttcacaaggtagtggccagggaaagtgtccccagtgccccctccccaccggtggcctctgcagcttgctttggaaaacagttctgtctgtgaagaaatctctcctgttacggccctgtgtcagtcaatgcgggcttggctgtctgcccaaataccttccgttcttatcaggaacatgactgaggcttctcacttttgactccatcacttaatccctttttctccgtggcttctgtgtgtctcatcttcgagaatatttctcagccttctttgcaggtatgttattctctcccaataagaaataaagagtatcaggtaccaaagtggcacttagagctgttgccataaaatagcaccagagagtaagcatgccctctggccacgcagctcgctgccatttagccatctctgtgtccctccctccctggggtgcccagtgcgcaccccagttctccagcagcccaggcacattctcctagctctgacccctgtctggtgggggccgggcagcctctcttgagtgtagggcggtggtgctggcgctggtggcagctctgtgtgaactgtgttccggggagggtggggcaccttcacccttccgtgtatacccatgtatacacggtcgtaatgaggagactcctgcgggagacttgattgtgcgctccatgtcactagctactctacaagcagatactattcttcaggttttttccttagttgcctggaagcttgaccttgtgtgcatgtatttggagatgaaaacagaaagggcggggaggacatcggcttgtgtgaaagacctaggaagacgatggaggagtgtgtgcggcttccctcacgtgtcaagcctcctggctccctcaggtggaaggggcactttatggccaaggaaattcagtgaggagtgaagggtgaggctgagcccgccagataaatcagcctcggccctcccctccccaagggtcagcccccggcagcgcacctctgttcttggtgcgtctcgctagtctttgattcattcttctgccgtcttcacccaagcctcgctggactaaagagtgacagttaatgcacatggagcatttctgttccagcaggtcacgtctccctgtatggttcctttgctgagtcctcagcattgccctgggagctgacaaccatcggtcccccttttgtgatgggaaagtgacactctgagagccgtggtgactctacagggtgtggagccaggttgaccctcactctgtctgctccagggcttcctggttctcagccactgctgcttctgaactgctacaggccaggcattgtgctaagaactgggcacgtgttaccccaacgtggtctgtgcccttgagggtgccatgactgaaacacgttgggggcacagagcaggctgattctccgccgaaagaaggctccagccagaggccgagaccccgtgtgggggaggtggcagtcaccattgctgctggactcagcaacccccagaccctccaccttgcttggcaggcatcacatgcacctggcttagcacatccctgcaaacacaagagtctgagcctcctcaagaggctgcagtcacactgcatttgaccaggacttgccaacctgcaacttgccctgagagccaggtatgcgtgtgtgtatctggggagcacgccccaaacatgagcagggacggtgttcccagctatccgagaggtcatgcccaagccaaaaggaaggctctagctcttaaacatgaataagtttattcctttcatttccacagtgtcttatgcttgcttctgttttctccaaggaagtatggtgcccacctactcctccagcctgacgatccatgtgagggttccttgttcccagcccaattctcatgtcccacctttctccactaagaaacagccaaattttggcaagagtcgtggtaggaaaaaaaaacaataattgggcagatgaggatttttcactttttgactagttctttctctagactttcctgtctttttaaaacttctagtttcccccttgagcgctccctc

SEQ ID NO: 4152 - DNA, 2300 bp, Homo sapien
tgtcgagtggggtagatgccatggagataaggtaggtggagtggggatgctagaggactatcccgggccatcgatatggttcccaaagagctgagtgtgctgctcctgtggttctgaggaggggatgcctcttggctcagagaattaggaggatgggaaaagaatcttctagctggaagaaaatatttagatatggaatttggatttttttcaagagaaggttaggtaagagataaaaaagatctccttgcctatttttagaagcatctaaactgagctcttcacccagggcgtcatcatgtacctcctctgccgtgactgagggtagtgtcctccagcatgtccacagggagggtcactggtggctgcaccgtgcctcctcaggacacagattgcattggtctgggccactgtccccccaccctgggggattctcaggcagccaaggttgaggagaagaatcagagctgagagtctggttgtccctcctagggccacacagaccattgtcaaaagccagaaaggacattcctagaataatttctgtgtttataaagggatagattcatggaaacttgagtgctgctggaatgttctttccctcttacgaacatgcagcttctctttggctggtggtgtagattgagccccagatgggtgattttggacatccttaccctggttcatgtcatcctcctccctgtttctaagaacagattctcctttttacatctctagatgagagtagcttgagtggtcacgtgcggttgctaggaatggagctgcgagcagcagctccctcctcttttcagcagcgagactcaaaagcacctccgggtgcatcttccttcccacctgccacaaggaaaggaattcggaagaggaaaagattcattcaactgtccttcttccagtgcagggtgggatgcggggatgaggaaagcagatgcatgggatatgggatgtgttcaggtgaccgatggcactgtcggtcctccgggagctgagcagagagtaaaggctgagactgctcccagggtctctgcgtcccctccaggctgctggggagcagctgagtgcttgtggcccctgtggccttctgtcccagcagggtggggcaggcccatgaagtggaaggacctgaaaggccttgagtccagagtggaagtgagcaagtccgcggtgggtgtttgttcatactggtctctaccgcccaccagccacccatgccagtcttccaggcctgaaagaccgagctcaagctccttctccctcaggaagctctccacccactcatggaaggacacttggtttagttcacattcttggattattctttccttcgcatcaaatatagctccccaaggagatgggggctccgtctgacagcttcctggggtgcagtgtggactggctcagcactgggctcgcgttcagccacgtcctggtgagaccattaggatgatgtaaccgtggccaggtttggatgctggacagtcctgggcttcatgcctgtctttgccctcccagctgtgagtctgggggcttcgcccttctcgagtctcagttcttcttctctaatgtgcatgccataacctatggagtgcagaagtttcttgaagtagatgggatgatgagtacacgtgcgtagtgctgtgctggacacccaagtgagggtccaggtgacagctcctgctgctgctgccgatccattgcttgtgctgtagccctacatgcagtcttagcatactgtatgttcttagggagggacctggggagattgtcacggggagagacaacagagggatacgagacctcaaaacttcagcagtctcttctagaggggtctctagagggtctgactcccaagcatcagcctcagaaccgggcagtcccgtcctttccttgggggtgcccagggcggaggagccgccggcatctccgatggtggtgagtgtgcgatccttcctccctctcccctcagggatttactgctgcggcttgctccgcgcgcggaagagtgactgcaccggcctcccactgtccatgctgaccaacccagccacacccccggcccggggccagtaccaaatcaagatgaaggggaacatgtccttgatctgctggtacaacaaaggacacttccgcttcctgaccaacgcctactccccggtgcagcagggtgagtgcgggtccgccattgacacagtggggcgcgcggggattggttgagcttggccgagcccaccgctgcggtggatgtggcgtccactgtgggctgtgctgctctggggtcagac

SEQ ID NO: 4153 - DNA, 2300 bp, Homo sapien
tcccagggaataaaactgacgtcatcttcactccgctggtttaaaaaaggtggggaagcattaaataaagtggggaagcactccatttctcagctatcacgttgcagttcttcagatgcatagaagtgcctggtgtggaagcagtgtgccccaatgtgtgttagaactcaaagatacaggcttcctgcccctggtgtgcacacacttccccgttattcgctcaaacagtaatgtgggtgttgatgagaaggaatttggattttgcaaatgtattatggtcctaaatctgttaaagagaacttatctcgcatgggcccaacctacccaagtaaagccctagaaaaggaaccgggctcttcctgacagaaagcacaagagggacgcagcttcaagaagaggccccattgcgggcttttttttcttttcttttcttatttatttatttatttttgagatggaatttcgctcttgtcgcctaggctggagtgcaatggcacgatctcagctcactgcaacctccacctcctgggttcaagcgattctcctgcctcagcctcccaagtagctgggattacaggcatctgccaccacacctggctacttttttgcatttttaatagagacggggtttcaccatgttggtcaggctggtctcgaactcctgacctcaggtaatcactcacctcagcctcccaaagtgctgggattacaggcgtgagccaccgtgcctggccaatcattgccggctttcacaatggaagaggtcatgtggcaaggactacatgttgcccccaggagctgaacgcagtccctggctgacagccagcagggacacaggacctcagtcctgcagccgtaaggaaacaacgggaatgcagatcccaagcaccagatgagaacccaccagtcaacattttgattgcagccttgtgctgccctaagcagaaaagccagccgtgccctgctcagacctccagcctacagaactatgagctcataaacggatgctgttgaagccactgaatttgtggtcatttgtgctgcagcaatttaaaaaacataatacacagcatttaaaaatttgagtgtagatgtctgcatagaaaccacaggcaacatgcgagctgcatgtgttaatgtagaaataatctgtggcaggctcagatctatgaacttctctagcagttctggtttgcagtgacttaccgtcgtccaacaccacattttgtgttgtgttttgtttgtttaagatattttcgctaagtcacatttcttgcacctgtactggaggcagttgatttttttgaacatgctcttcttcaatccattaactttcctgcctctacccctttggtgatgttcatggaagcagcatgaaacgacgtttaaaaattgctgactgagtccccacacatcctctttgttggccctggactcttgggcaaatgtttagccctcagtcctgtctcctctgcaccgtgaggggaatcatacctcttctgcctgcctgatgggggttactataaagaacaaattaaacagtcattatgaacataccttgtaaattaagaagctgtattcaaatggaaagtacacagataatgtgtattcctaacaggtgaggttgcctttaattttatttatagtgaatttaaatcattcctgtgtttgaaagccggggaatgtatttgcaccatcccattacccatggctgcttgttcctttcctcctctgccttgacctttccaaactgaagcatctggggctgagtcaccaatcgccaaggccacggggtgtgcttgggggtgacctagagtccctgtgagctgaaaagatgatgggggcttttccatgggctcccaactggatgactgagacccatgagatctgtgcttgctgaatactcgggctcccagcctgacactgctgtgagcacgctaacctctgtgtgtttctgttaaagatttatgtccacctgaaggaaggtgggggcccagatggcctggatgcgctgaagaataagccccagctccacagcatggtggccaggagcctgtgccggaacgcggcaggcaagaactacatcattttcacggggcccagcatcaccagcctgacgctgtttgaagagtttgagaagcaaggttagtcaagtggggagccagtgaggatacggcccagcctcccctgggaaagtggtgggagaggtccaggtgggggtgcagatacgtggtggccaccacaaaccacaggatgccaggtgatgaggcccttccttgagggaacagatgcgtctcagc

SEQ ID NO: 4154 - DNA, 2300 bp, Homo sapien
tgaggcaggagaattgcttgaacctgggaggtggaggtttcagtgagctgagattgcaccagtgcactctagcctgggtgacagagactccatctcaaaaaaaaaaagaaaagaaaaatcaatatacagatgcaatagaagcaaattttgtctcttacaaatctctacatatagttagtgtatcttaggttactacatagaattgtaagccatagctctttaaaaatatatgtgtgtacacacacagagtcatgcttcacttaatgacagagatacattctgagaaatgcatcattaggtaattttgttgtgcagacatcatgcagtatacttatacaaacctgtatggcacagcctcctacacacctaggctatacggcatagcctatcgctcctagactacaaacctgtgcagcatgtgactgtactgaatacagtacaataggcaagtgtagcgtaatggtaagtatttgtgcatccaaacatatctaaacatagaaaaggtacaggaaaaatacagtgttataattacatgggaccaccatcctatatgcagttcattgttgactgaaacatcttgtgggggggcggggaggtgtgtgtgtgtgtattcaaagggctgcattagtcaaaaattgtgaggttttatcctatatgtgaaattatatgaataagccccttcagatgtagtccctagtcaccataaagtgactacatagggaacgtttaatgaaaattgctttttcctaggtggaatttttcaggccccaagtgatgaaagcgttttacttacaaaaccgcctcaacttaccagaaaatgaaagccagaaagccgtagccatgcccctgtgttagaaacaccacgtgtctttgcatctcctccctccccttatgtgtctttttctcttcagatcagtatttaccgaatgtgccagatttgtaagaatttgcattctaccccccattcccagggaaagcgtggggtctgcaggggagggaggagccctgtgtgatggcgtggcgggagacaggaggggctgtgcactgctgtctggggggagtgttggagtgccttttgtttttaaatgtatatacatatatatataaacatttatacatcgatgtatttgtaatatctgtatttatttttaaatgtatgtatgtgtatatatgtgtgtgtgcctgtgtatgtatgtatgtatgtgtgtgtatgtatgtgtatatatgcatgtgtatatatatgtatgtatatgcatgctttcttccttgtacggagaagtaccccagactggcagacagtgcttttaatttatatgtataaatatgcacattttaattttaaaacttacatgttgatgtatacatttatatgatatatatatttaaacatatacatttatgtgtgtgtgtacatctctagttaagactcggcttgtgccccgagtgtgtgaaactccctagaccgacaccctgtgccacacgggttctggagagcagggattccacgtgactgcgccccccgagggctgtcctccggtctggtgtggagatgcaggctgcagcttgcactccgggtgtcagggctgtttgttcctgtggtgtctgggaggagctgcgctcccacacacacagcaggagagctggctgttttggagcaaaggggcgtacaaaagctatgggagccggcactgtcaggtggttgcagcagcttctggaaggttggaggggaaggcggtagcactggaggcagcgggggcactcggccagggacccagggattggaaatgcagccgttctcgtgtcgagtcagggtgtggcggccgtcctaaggaacactccacctgtctttgggtttcaggtcccacccgaaagatgccccccagcgccagtgccgtggacttcttccagctctttgtcccagacaacgtcctcaagaacatggtggtgcagacaaacatgtatgccaagaagttccaggagcggtttgggagcgacggagcctgggtggaggtgacgctgacggagatgaaggcgttcctgggctacatgatctccaccagcatctcccactgcgagtccgtcctcagcatctggagcggaggcttctacagcaaccgcagcctcgccctcgtcatgagccaggcccgcttcgagaagatcctcaagtacttccacgtcgtggccttccgctccagccagaccacgcacgggctctacaaggtccagcccttcctcgactccctgcagaacagcttcgactctgccttcaggccttcccaaacccaggtgaggcccacgca

SEQ ID NO: 4155 - DNA, 2300 bp, Homo sapien
gagggtgcagaggaaggaggaactacctctggggtgccaacaggctagttgagctgggtattgaagtaggaatgagtgtgtggaagatgaccagttaacaatgcaagagcaaggaggcctgaagggcattgcatgctggtgaacatgagtattttagtacagctgaaactgaaaaggtacagaaagtggaggtaggcattgaagagccaatggggcatttcagtgaggggtatggtatgatgagaattgtgtttttgaaagttaattctaataatgatggaaacagagtctgattagcaggctactacagtcagcctgaagagatcctgaggggacctggtggagagccggcatcctggaatgggcagatgggacttggagagagtaatttgaacgtggagcttgtggatgggatgtggaagtggaggtgaggagcaggggttgaaaggaggtcgccagggttgtggcatgaattactaagtgaatggggtgctggtcacaaagcaggagagcaggttgggcaggcagcaggtgggtgaggtttggcatgctgggcgcagtctttcctcccctagagttggacatctagggattggctcaggacagtggctggactggaagtaagaatcggaagtcatgtgagtgaggccatggttggttgtgaggcatcagatgggttcccttaggctccccctagtccttggggtggctttgttgaacagaaaaacgtcccctcaaggtggctgcagctctgcaggctcgtgacttggccatcagctcctttcaccttgtacatacatcaccttgggacctcaggcaatggctgctttctttgggttgactcatcagtgtctttatgaaagacagtaatatcaaccctattcatagggttattgagaagactgaaggactgaaggcctgtgaaagggtttcttatctcatccagacattatggtctttgcccatttcaggaaatgttggccatgctgagatctacgggctgcaagggaagcttccatgctcagggctgtactgcagctcagagaagagcttttatgggggcatttgtccttgcagggtttacagagaacaggcaagaagtaggcggtggttcaaacagaggtggagagagaggtggcaccttccttcagagaactacacacaatcaggagaaatcccagctcccatctccaagctatactactgatgtcatttcttcccagaccctaaaggcatgctcaggtgcttgtaggtgagcatatatgaactagcaatgtggctccaggtaactgggagatttctgaatacagagagaaaagggattgagttatgaccttaggggatggaagacgggaggaggctattttatctttgtactcagcattaacttgacagcaaatcctgtttatgaaggaaccacctgatgaccatttcattataatccctgcaatggcagtgatttgatttctttgtgctgtgttagatcctgtgtctaccggagaggccagggaaggtgggcatagaagcagtccaatactaggtcccatgtggtagcttaaaatcctcatcaccaccaggaggaacatgaacattcccagaataacttctgctgctcttgattccagaagtaaaagtatgtttggtatttgtctgctaacgtgtgacatgctcacctgctgagctttctgtacttggactcaaaggagtagccagaaagggatctcaatgaggagtgcatgttttctattttcagtctgtataaatatcacattgctcctcctcagactcaaattcaagccagagttgcattcttatttggcctcactggtctttaagaaagagcctgattaccatgtctgcactgggaggcacatgcccaaaatgctagcattgcatcagacggcattcataatgatggccagtgcttatcccaaatgtatgagccggatgctgcactgtgctttatgcacagtatttcattttattctcacaatgactctttgaggtggatactctaatctttgccattttacagatggggaaatgaaggctgtgtgggattatgtaccttgaccagggcacctgttcggtaggtcagatatgcctgactacagaactcgagctctcttcgtgcaaagtactctcggggactctgcaggacctgagctgcagttgctcagcatagtgcccggccgggatctgcagccaagcgattcattcacaggtacagctgtcttagtaaggcccttccagctctgggcaagagatcttttcatccatgtgttattggcatcttcatc

SEQ ID NO: 4156 - DNA, 2300 bp, Homo sapien
catcccacaattgtgcaaggtgcaatctatgtaacaaatccatattcacacacacaaatgcaaacacatgtgtgcacacatatcctagtgattctgcctccctgattgactctaactggtatggtggctaagctagcctttttatttctgcccctacattgggctcaagaatattggggaatgcaactgcgggtgagtgaggatatgtatgggagtttaacatatcaagaggcatgggcagcctgtgtggggctggggcacagtttccatcttgaatatggtagatgaaaacctgttagaaaattgcaaagtgtgtaagaggcaatgttgacttaggtgggtgtatagtgaatcaaactgctcataaacaaaccctctctcccaatccactggaagcatggattggaagactatctcgtggtccccatgaccaataataataactaacactaaggcagaggcagagtactaagccctttacatccattatcatgaccaatctcctaaatgaccctgtgagggttttcctaatactatctccatttcactgattaggacactaaggttttgttgagttagatcattaactcacacaaagcaggggttaatatatgcccaggctgtctgatgtccaggtccatgctgcctgcgcagaatgggtgtaagacagtcatggggctgagcaggttgagaatggaagcagtaggacttgactgactccagtgagcctttccataggagcaggagatgataacccccccacttttttttaagagacaggaactcaatatgttgcccaggctgatctcgaactcctggcctcaagcgatcctcccatttcagcctcctaaagtagctaggattacagttgtgagccactgtacctggccaagaggtgataaacctttttacctgtttcttcatggctttatctgctggtgcaaagcagggaataatgccacatacctagtcattgatatctaatattgatataatataatgcctaatattgtaccagcaccatttcctcaggctttggttctctctgcctattttgggacaggcctatccagaaacagttggtgaagttcttaggttctttcacttgagcagacctgtgataggcacatcaacaccaagtccagacacggacccaagttgggtctaatctcttgcaaagacactgacctaattggcagtggatggtcaggtgctgttccaagaatggctttttcgttgctatccttaggggaggcatgtgagaaccaggcagagatgtgggcctctttctaagatcttacaaccaatacatatttcttggttgaatacaagttcaaatatgttctgacaccttcaaatacttattttgttatttctgattaaattagccctaaaccattgattctccgacattattgcctaaaagcctcttgcctggcactcaaggaatctggcagaatttttcctttacaaatcgagtcactggaaccaaaacctttgcctgtcctactatctagtagtcatcaacacagaaggtcagctgagtgcagttgaactattttactacaaggtaatgatgccttgagtcatgtaccttgtacaagtagagaggctaaaggaaaatctttttattattattgaacctagttcgaaaggtttgacctcattaatcgttacccagatcaattgtttttctgtattttatatcctaggcttatgtttttagacccaaacttggggttctttggcctttttttttctttattctcctatacttcctctcaattcaaattatggctatgtcttccttagctatctgaagaattattatctttcgtgtctctgttttccagacttatgtatgagtattcatttactaattcattcagtcattcattaacttattcactcaatagctattactgaataccttctattggccggacactgggacaggattaatgtagatatagtctttgccctcaagaacctcgtatgccactgcaggggacagatctgtaagtcatgataagacaatgacaaaagttctaaatggaatgtatgtgtcggtactaaaaagacaaagagaaaactgtacccaacacttctaagacatgtcagcatgtgccttgctgaaacaggtgacatttaagtcaaatctcgaaaaaggagcaagctgaggttcatttcatgacatgacactgcctctcaagtgagaagagaataaaaaatgtccatctgattctgaaactgtaaagatactaatgaccttagtaagcaatgtggagtggagccaagtg

SEQ ID NO: 4157 - DNA, 2300 bp, Homo sapien
ttgaagccaggctgcctgggtttgcaacttgccacttattaacagtgtgaccttgggataaaggcccacctttcagagccactatagattggttattggaattgctggttttgttaggtgttacaaaatgtcagggtttttttttcttcttttgatgcgtaaactgaggtattaggggataggaaatgatatggtgtttagaatttgctttaaaacatattccaataaaagggctggactcagtggttcatgcctgtaaacctagcactttgggaggctgaggcgggtggatcatctgaggtcaggggttcgagaccagcctgaccaacagggagaaacaccatctctactaaaagtacaaaattagccaggcatggtggcacatgcctgtaatcccagctactcgggaggctgaggcaggagaatcgcttgaacctgggaggtggaggttgcggtaagcagagatcatgccattgcactccagcatgtgtaacaacagtgaaactccgtctcaaaaaaatatatatatatatgtatatatatatatatataaaacaacaaaaaaagaaggtctcgatgcggtgggtggggaagggcagaggagacaggttgatgatggttgaagcgaggtgctaagtacatagggtggggttcttgtgctctccacacttctgtgtacttgaaaattttcataacaagagaaaacaaaaaattaaacagaaaatgaggttttcatttcctccagcaaaacaaacataacagggacttaggatgtacttttcccaatcgctcctctggcagaatattttgatcctccagctagcttccggctcttatcctgttcatctgttctgtagatactggcaggaaataggctcttcaacagggcctgctaggtccagtgctagggagtagagcgttttggattctacgcctacatttttttttaagtgaccagttttctagttgagatacttgaaatacaaagtctcatggtgaggtcttaccctctgctgtcccattcctttttacaggccatcatggcgttaatcttatctccaaggagaaaaattgggaagagaggcctagattcctcaacagaagcgggaaggaaaggtttgcagaatgaagagtgtgaagtgaggtttgtggtttgaatcatccgaatgtcaaggagaaaagaagaaaaatgaatcatcatcatttgaccacggtatttacagctagcggaagggacaagaggagaaaaaagcaagggaggagataaaggaagaacgtctcagaataaaattggggtgggtggggggaggaggaggaagacagtctaagaaattggtttggttgcaccagtactggccacaacacaaaaatttgtccattcctggttgaaattaaaaataaatgtgcatgcacatgtatttgtctgctgtgtttaatcagatagcgaggcactcctttaagcaccttgaagacccaaagttgcgctcagaggctgcccacctggaacggagaccgaggttgagcagggagctactcagaggacccaaagccgcctagctgaccaccttcttccctatgagttcccagtaacggagcccagtggaggagacgctacacttctctgtggggacagaggctaagggcgggggtctccatagaggcgttagcgcccaccagcggcagtgaccgcgcacagggaggtgaagaatgcgaccacggtgatacgtccaacctggaaaacgggcctgagaaccaaagggccaacttctggccatgcataacgaagcagagcagtctcagggtagaaggcactggaaaagcgttgtaggacaatttttcccagtagaaacggtgggggtgggagggagacccgctcaccccttttgacccacccctgcagctcagccacgcctcctagggaggtgggcagccttgcaggagcccgcgcgaggctgcagtaccgccctccgccacatgagggcagcacggcctacccgtgcagcagcggcggcccccgcgcccctcttggccagagccaggcgcaggccggcttgcggtgccgtcgttcattggccgcggcgcgggcgctgccatgttggcggaagcggacccccctgtgccgtggaaactggcggtggccgcggccgccgagtcggtctgcgcagcctcctgcgttttctcgcttggatcttggcactgagaggcggtggccggcgggatggagaaaagtaggatgaacctgcccaaggggccggacacgctctgcttcgacaaggacgagttcatgaaggtgcgcgcgg

SEQ ID NO: 4158 - DNA, 2300 bp, Homo sapien
caataaaattctctagcaattttctgattgattttaatgagctttaaagccttacgtagaagatcccccagctgatagtcagccttgggcatggattaagggcttttaaccaatcttgcaacaagtttaagcagatattctttattgggtccaatctaaccaaaattattttcttatgttctccccagtaacgtgtcattattaagagaagtttggcttgcttagaggccaaatttagagggtcctgaaattttattttcttttacaccactttccagcatgttacctgatcagttgtttattatctttgctgttgaatggagtgatcattccaagggcccgaggcaggaggcccaggcacagtggaaactctcccaaagaccaggatctttgttttgttccctgacatatgctgagcaccaggaatagtgagtgaatgaaacaaattgtgaggctttaaagagccgaaatatttaaacactgggcacaaggttgttgcttaatcagtgctagatccttacctcccccttgtgtccaggtggacttgttactgcagttaaaccacttgctgatcctcaaacaactagttagtggcacagccaggcctaggaccccagtctctactgttccaactaacccattcgcaggcaggagcactttgaatggtctcttattttaaaaaaattaaattaaaattgtctatttatttagagacagagtcttactctgtagcccaggctcgagtgcagtggtgcaatcatagctcactgtaacctccatctcctggcctcaaaaagtgtttgaattacagatgcgaggcactgtacctggcccgaatgttctgttcagacaaagccacctctaagtcgctgtggggccccagacaagtgatttttgaggagtccctatctataggaacaaagtaattaaaaaaatgtatttcagaatttacaggcccatgtgagatatgatttttttaaatgaagatttagagtaatgggtaaaaaagaggtatttgtgtgtttgttgattgttcagtcagtgaatgtacagcttctgcctcatatccaggcaccatctcttcctgctctttgttgttaaatgttccattcctgggtaatttcatgtctgccatcgtggatatgccgtggctccttgaacctgcttgtgttgaagcaggatcttccttcctgtcccttcagtgccctaataccatgtatttaaggctggacacatcaccactcccaacctgcctcacccactgcgtcacttgtgatcactggcttctggcgactctcaccaaggtctctgtcatgccctgttataatgactacaaaagcaagtcttacctataggaaaataagaattataacccttttactggtcatgtgaaacttaccatttgcaatttgtacagcataaacacagaacagcacatctttcaatgcctgcatcctgaaggcattttgtttgtgtctttcaatctggctgtgctattgttggtgtttaacagtctccccagctacactggaaacttccagaaggcacttttcacttgcttgtgtgttttccccagtgtctattagaggcctttgcacagggtaggctctttggagcagctgaaggtcacacatcccatgagcgggcagcagggtcagaagtggcccccgtgttgcctaagcaagactctcccctgccctctgccctctgcacctccggcctgcatgtccctgtggcctcttgggggtacatctcccggggctgggtcagaaggcctgggtggttggcctcaggctgtcacacacctagggagatgctcccgtttctgggaaccttggccccgactcctgcaaacttcggtaaatgtgtaactcgaccctgcaccggctcactctgttcagcagtgaaactctgcatcgatcactaagacttcctggaagaggtcccagcgtgagtgtcgcttctggcatctgtccttctggccagcctgtggtctggccaagtgatgtaaccctcctctccagcctgtgcacaggcagcctgggaacagctccatccccacccctcagctataaatagggcatcgtgacccggccgggggaagaagctgccgttgttctgggtactacagcagaaggtaagccgggggccccctcagctccttctcggtcttgtctctctcagatgtaactgagctgtgggctaggaggaaaaggccgggaggaggcacggtgatgactgaaaaacctctcccctctcataagaccagtcatccggacgcgggctttcccccactcggt

SEQ ID NO: 4159 - DNA, 2300 bp, Homo sapien
ccctccatgtgccagactttgcaagtggctttgcttccacaaacccgccatgcctctagcaggcagcaccgattatcctgattcacagcttggaagcagggacagacagcatggataactcgcccaagatcaccccagggaaaactgggaatttgtcttagttcattcaggcttctataacaaaacagcacagacagggtggcttataaacaacagaaatgtgttgctcacagttctggaagctggaagtccaagatcaaggcactggcagattccatgcctggtgagggtctactttctggttcctgtgtcctcacatggtggaagggaggagggggccctctgtgacctaatctttcataatgacaccaatcccattcatgagggctccactcttctgacctaatcaccccttagaggccccactttctaataccattaccttgcagggtatgggttcaacatacaaattttggcggggtcgggggggtggtgcggaatacaagcaatcaggccatagcagagtaaaacccaaatatccccaactctaatgtctagacctcccctgtaaaaccatatgcaggatctactagacagaacgtgtgtcagactgagtgcacactcctgggaactgtgagcttatataaaaattcacatcatggccttttaactgtacccattaactcaagaccccttgtctccaaacctcaactttgactagttagagaatcacacagaaatcattataaagtgcttagaacatcagagttttcacgtggtgactaatacttttattgacttatttttattgatacataatatttgtacgtattgatggggtacatgtgctattttgttacatgtgcagaatgtgtgatatcgagttggggtatttaggctatctatcccctccagtatttatcatttcttttcttctttccttctctctctctcttttctttctctctctctctcttttttcttttttttttttttttttttttgacagagtctctctctgtcacccaggctagagggcagtggcacgacctcagttcactgcaacctccacctcccaggttcaagggattctcctgcctcagcctcccaagtagctgggattacaagcatccgccaccacaccgggctaattttttgtatttttagtagagacagggtttcatgatgttggccagactggtcttgatctcctgacctcgggtgatcaaccctcctcggcctcccaaagtgctgggattacaggtgtgagccaccacacccagcctgtataatcatttctatgggcaaacacatttatcaaaccacctccatcctctaacatttgttttttctcagacgtgagatcctatttgtaggactataacaacaaggaactttattaatatgatgtctagagaatgaaagaggcacatgtgccctagaggaagagccgatgtcctctgtgagttctcctctatcaggggtcaggttggatgaaatctaacccccacctgcctttgtaaataaagttttattggaacacagccacacccattcatctgtgtcacatctacggctgctttgtcactacaacagcaaagttgagtagttgcagcacagactttgcgtggcccacaaagctgaaaatattcatggtctgggcctttacagaaaaggtttgctgaccccagtgctgaatcactatgggattgcctgtgcaggagctgtgccagctgtgttcacataatgcatcctgctttcattcaccaacctcccttccgactacaaaactctgccattctctgatgcaggagatgggactcaagaccacaccgtgcacttctccgtaaagccacctcctggaccagttgggtttcttgctccttttccttctgaagcaatcctctctctcccatgaggccccctgagcgcactaagcagaggtgccgcctctgagtggaatgtgccaggccccagagctgcctctgagtctgcaggagtgcagagtgggcagagggctctctctgctgttttccatcagggcgtgtcccatctcagtctaacagggaggtgcccagaaaataggtggaggtgagggccactcagcccagtggccctctgagctgttccttcttgaccggcacacacagctcgcttcttcactttcttttccatccactgccggacccaagccagccttccagggagcagccatgccttacctctaccgggccccagggcctcaggcacacccggttcccaaggacgcccggatcacccactcctcaggccagagcttt

SEQ ID NO: 4160 - DNA, 2300 bp, Homo sapien
tttttagacagagtctccctctgtcgcccaggctagagtgttgtggcgcgatcttggctcactgcaacctccgagtccctggttcaagtgattctcctgcctcagcctcccgagtagctgggattacaggcacgtgccaccacgcccagctaatttttgtatttttagtagagacggggtttcaccatgttaggcagggtggtctcgatctcctgacctcatgatccacccgcctcggcctcccaaactgttgggattataggcgtgagccaccgtgcccggccggagtttggctatttttattccctccaggagtagataaagatatatgtaaaaaaaaaagtttctaatttcagccaagtcatctgttagagccatactttaattcccctgagtttcttcttataatctggaagaatttttctttcagttagccccttatcatccagatcatggactttacatactttggccaatgtccctgaattatctcacgcttttattatcttgaaaacttctttgacaatcaattattgccagacccaaaacacctcatggggttgtggtttttttttttttgaaagcaacaattatttccacaactgctttgaaaacagcatgagaccaagtttctaagggtacggacagcttcttatgtgaatatcaaagcaagcctggggatgttaattaatttcaagaatatatctttaaacattacctatattattaaacaaggattagaggagagaaatcagtgggattcaggtcaatgtattgagcttctctagcatcaactcaaacagaagatcatactccaaaaaactgtccttaaacttccggtctcataaataatccgccacttactgtggagactatatttggtggtgcttgcctttccctgcttcaatatattatgttgtgaacattgttgataataatgtctttaactgtagagcctgccacattcatgacattccaaaaatattctgaggatttctgggccggaagatgaggccatctcacatttaaaataggactttgcaagttatttctacttttgtgttcagaactatccaggcaaagaccctggataacagctgaaatgctggtttttgtttttgtttttttattttacgagtggacacaattctcacctgagtcctgttagtcttgttaaaatcagtcagatggagagaggggcttgggggaagtgggggctcgctataattttaattttgtggtctgtctgggacacacctcaaaattacaaaccctggccccctacctgttgggatgtcgcctctgagtctgaaaactttctgctcctctttggtttgtttgcaaacgtcgaactgccaagagttctgagctccttgggttggggaaaggcacctgggccaccgggtacttcatgcacccacctggccccgaggggcggcgggagctgactttccttgagcaccagatgccccgaaccggtccagccttccaggtcgccctccagcctccgggctgccctgcgcccccggctatctgcagctcaccgcgccaggccccgggcccagcgtcctggacgggcccagagaaagcagagaaggtgtggctcgtcccagaaagggacagaaggaaaggagtaaaaacagaagccaggcagccagcggcttggcctgaaatgctggggctttcttaggctcactggaggttgaaaaaagtttcctttgtcaagcagtggccacgtggcgctatggcggtcactaccgggaattaaccacggccaccctctcagagcgccgggcgcggactcagggacacgccggctaccacctgagccgggtaaggggagcccgaaacctgcgggcaccgcggtaatccactatggaggcgtaaagggggactcgtggggtccgcgagggggtggcgggggggggcccggagggaggagctcccggggagggggccacggagggccggggtcccggggcttggggagctgggttggcttggagacccgggtacgcggcggtgcagggcggggttcccggagggggcggggctccgggtggcgcggggcggggcgagggcgggcacagcgaggggcggggcgcgggccgggagcggcgggcaggccgggcatggcgtccatggcggcggcgatcgcggcttcgcgctcggcggtcatgagcgggaaccggcctctggacgaccgggagcgaaagcgcttcacttacttctcgtcgctgagccccatggccaggaagatcatgcaggacaaggagaagatccgcgagaagtacgggccc

SEQ ID NO: 4161 - DNA, 2300 bp, Homo sapien
tgtgatggtattaggaggtgaggcctgaagaaagtacttaggactgactagatgaggtcatgagaatggagtctttaggaaagggatttgtgccctacgggagtcatgagagagcttgctgtatccctctttccaccatgtgaggatataacaagaagctggcagtctgcaaccccaaagagggctcttaccagaatctgatcacactggcatcctaatgtcagacttccagcctccagaactgtaagaaatacatgttttttgctgaagtcacccagtctatggtaccacgtcccaaagggactgcgacaggtgcttagcatgacagccatcccgcactattttacttgaagtcttggtccattcgggccactataacaaaatactatgaactgagtggcttatcatcaatagaaatttatttctcacagacctggaagctgggaagtctgagatcagggcacccacagacttggtgtctggttctgcttcctggctcataggttgtgccttttgatggcaccttcttgctgtaaggtcacacggtggatggggcaagtgagctcccttgagtctcttacaggggcaccagtcccactcatgagggctttgccctcctgacctaaccatctccccaaaggccccacatcatcttaccagttagcatttcaacatatgaattttggggggatataaacattcagaccatgtaacctaattacatatttggagtttggctttttttctttttttctttctttctttttttttttttttagacagagtctccctctgtcgcccaggctagagtgttgtggcgcgatcttggctcactgcaacctccgagtccctggttcaagtgattctcctgcctcagcctcccgagtagctgggattacaggcacgtgccaccacgcccagctaatttttgtatttttagtagagacggggtttcaccatgttaggcagggtggtctcgatctcctgacctcatgatccacccgcctcggcctcccaaactgttgggattataggcgtgagccaccgtgcccggccggagtttggctatttttattccctccaggagtagataaagatatatgtaaaaaaaaaagtttctaatttcagccaagtcatctgttagagccatactttaattcccctgagtttcttcttataatctggaagaatttttctttcagttagccccttatcatccagatcatggactttacatactttggccaatgtccctgaattatctcacgcttttattatcttgaaaacttctttgacaatcaattattgccagacccaaaacacctcatggggttgtggtttttttttttttgaaagcaacaattatttccacaactgctttgaaaacagcatgagaccaagtttctaagggtacggacagcttcttatgtgaatatcaaagcaagcctggggatgttaattaatttcaagaatatatctttaaacattacctatattattaaacaaggattagaggagagaaatcagtgggattcaggtcaatgtattgagcttctctagcatcaactcaaacagaagatcatactccaaaaaactgtccttaaacttccggtctcataaataatccgccacttactgtggagactatatttggtggtgcttgcctttccctgcttcaatatattatgttgtgaacattgttgataataatgtctttaactgtagagcctgccacattcatgacattccaaaaatattctgaggatttctgggccggaagatgaggccatctcacatttaaaataggactttgcaagttatttctacttttgtgttcagaactatccaggcaaagaccctggataacagctgaaatgctggtttttgtttttgtttttttattttacgagtggacacaattctcacctgagtcctgttagtcttgttaaaatcagtcagatggagagaggggcttgggggaagtgggggctcgctataattttaattttgtggtctgtctgggacacacctcaaaattacaaaccctggccccctacctgttgggatgtcgcctctgagtctgaaaactttctgctcctctttggtttgtttgcaaacgtcgaactgccaagagttctgagctccttgggttggggaaaggcacctgggccaccgggtacttcatgcacccacctggccccgaggggcggcgggagctgactttccttgagcaccagatgccccgaaccggtccagccttccaggtcgccctccagcctccgggctgccctgcgcccccg

SEQ ID NO: 4162 - DNA, 2300 bp, Homo sapien
tgcttaacataaagtagcaaatgcctcagtaaagtgctgatgattaaaggaataccctttggaccactgcaaggtttgaaagcatttccgtgggtcaggcaccacgtgttagcctcttcattttgtgaacagagagagtctactggctaaaccacattcacaaagaaagataatttaggctgcctccatccaaattcttacctaagaagatgttacagactaaacacttgtgtcccctcaaaattcttatgttgaaaccctacctaataccaatgtgatggtattaggaggtgaggcctgaagaaagtacttaggactgactagatgaggtcatgagaatggagtctttaggaaagggatttgtgccctacgggagtcatgagagagcttgctgtatccctctttccaccatgtgaggatataacaagaagctggcagtctgcaaccccaaagagggctcttaccagaatctgatcacactggcatcctaatgtcagacttccagcctccagaactgtaagaaatacatgttttttgctgaagtcacccagtctatggtaccacgtcccaaagggactgcgacaggtgcttagcatgacagccatcccgcactattttacttgaagtcttggtccattcgggccactataacaaaatactatgaactgagtggcttatcatcaatagaaatttatttctcacagacctggaagctgggaagtctgagatcagggcacccacagacttggtgtctggttctgcttcctggctcataggttgtgccttttgatggcaccttcttgctgtaaggtcacacggtggatggggcaagtgagctcccttgagtctcttacaggggcaccagtcccactcatgagggctttgccctcctgacctaaccatctccccaaaggccccacatcatcttaccagttagcatttcaacatatgaattttggggggatataaacattcagaccatgtaacctaattacatatttggagtttggctttttttctttttttctttctttctttttttttttttttagacagagtctccctctgtcgcccaggctagagtgttgtggcgcgatcttggctcactgcaacctccgagtccctggttcaagtgattctcctgcctcagcctcccgagtagctgggattacaggcacgtgccaccacgcccagctaatttttgtatttttagtagagacggggtttcaccatgttaggcagggtggtctcgatctcctgacctcatgatccacccgcctcggcctcccaaactgttgggattataggcgtgagccaccgtgcccggccggagtttggctatttttattccctccaggagtagataaagatatatgtaaaaaaaaaagtttctaatttcagccaagtcatctgttagagccatactttaattcccctgagtttcttcttataatctggaagaatttttctttcagttagccccttatcatccagatcatggactttacatactttggccaatgtccctgaattatctcacgcttttattatcttgaaaacttctttgacaatcaattattgccagacccaaaacacctcatggggttgtggtttttttttttttgaaagcaacaattatttccacaactgctttgaaaacagcatgagaccaagtttctaagggtacggacagcttcttatgtgaatatcaaagcaagcctggggatgttaattaatttcaagaatatatctttaaacattacctatattattaaacaaggattagaggagagaaatcagtgggattcaggtcaatgtattgagcttctctagcatcaactcaaacagaagatcatactccaaaaaactgtccttaaacttccggtctcataaataatccgccacttactgtggagactatatttggtggtgcttgcctttccctgcttcaatatattatgttgtgaacattgttgataataatgtctttaactgtagagcctgccacattcatgacattccaaaaatattctgaggatttctgggccggaagatgaggccatctcacatttaaaataggactttgcaagttatttctacttttgtgttcagaactatccaggcaaagaccctggataacagctgaaatgctggtttttgtttttgtttttttattttacgagtggacacaattctcacctgagtcctgttagtcttgttaaaatcagtcagatggagagaggggcttgggggaagtgggggctcgctataattttaattttgtggtctgtctgggacac

SEQ ID NO: 4163 - DNA, 2300 bp, Homo sapien
ttttaaccagaatatggactaagacaacatggtattcgttcctggaatgcttttcttagcaattagggaggccagatatggtggctcatgcttgtaatcccagcactttgggaggccaaagcaggtggatcacttgaacccaggagtttgagaccagtctgggaagcatgacgaaaccccatctctacaaaaaatacaaaaattagccaggtgtgatggtgtgcacctgtagtcccagctacttgggaggctgaggtgggaggatcacttgaacccgggcaggtcaaggctgccgtgagccaaaatcatgccactgcactccagcctgagtgacagagctgtccccaccgcccccgcctcccacccaaaaaaagaaaaaaattagggagacatagcaacaagtgctttaaccgagtcaaactgtctctggtgtcctgagctgtggagttcttcctggtaagtgtcatttcagttattttcctcagaaatgttcttgagtgaccactagaatgcaaactgtacaataaggagaaccttatctgccttgtttactgttgtaaacaataatgccttattcatagtgaaggaattatgaattatgaaggaatgaataagtattccataattggcatcattaattccctctctacagaaaagaaaactgaggcatcagcagaagagactcacctaagcttgtccctgaccacccgcgcacctcatagtttgggacggaattgagatcacagaacagggttcctttgtcttttgttaaatctgtaacattggattgatgtgtctaaggttaactattggatgtaataataatgatattaaaaactgaccttaagggcacaatttattaaagtttccaagtcacttacttggaagtcaagtcaaatatagcactaacttgtcagtgtaacaatagaatacccaaagtgatggccaacattcccattacacgtctgacatcttggctaacagtcatagccctggaactcttctccctaggccagccccatttaaaaaatccattaatcccagtgctttgagaggccaaggcaggaatattgcttgaggccaggagtttgagacctgctaggacaacatagtgagactccatctctacaaaaataaaataaaataattagccaggtatggtggcacacacctatagtcctagctaattaggagactgaggcaggaagattgcctgagcctgtgagtttgaggctacagtgagctacgatcatgtcattgcactctaccctgggtgacaaagcaagaccctgtctctaaaaaaacaaaaaaaaatttattgagagagagagacagcaaggccggctggtctcgaggaagagaaataaacctctacaagaaaactgccacaccctgtttgagcccaacctgttcaccctcaaagacagaatgacggtcttccccatctgtctgcactcctggctgttcacagggcacatcaacagggaaatgctgtctgttctactcatgtcttactggtgacttcctgtagaaattcatgttattgtttaaaataattaattctatatttgtttctttggcatttgtgcttaccatattctcacattttatctgatctccctgcttagaaaagtgaaattgacattatattgagcatctcctctgcaacaggcactgtgaaatcacattagtcagatgttgtccattagttagacatttttctattagttagatgttttgtctatgttttaatgagaacttgctatcaaagaactaacttctgttttctttcccagcttggcttgaaggagtactttaggactcagaacaacaggatgaagacagcagctaaaatagaacacaccagcagagacgttcagctccttgagctgtgcttccgaagctcaagcatggcagagtggccttgttaaatcagagttcagggtgccaccctgacagtttctgattccgtaggtgcccagtagggaccaagaatcctttttttttttcctttttctttttaatagagtcagggtcttgctatgttgcccacatgggtctcaaattcaagcgatcctcccacctcgacctcccaaagcactggaattccaggcataagccaccgtgcctggccaagaacgtttttttttttaacaagtttctaaatgatgctggtctattggtcctgggaccacactttgaaattggtgggataggaggctgggatctttatccattcactcaactcccattccccatggttgaaagtttccctggggcatccctgggaggcctggggg

SEQ ID NO: 4164 - DNA, 2300 bp, Homo sapien
taagctgtgctctcacatatttttttctcccaaagctcataagccaaactgtagagtatattgtatatatacatgtatgtaacaaacctagtttttaaaaaggtacgtgagtcaggagcacacatttcaagagatgggaggatgggataggaaagcagcatacaagtagatacaactgcatgaattgctctagttcttaaactgggtaatttgacttcgtgttttctatgtgtctcaactattaaatgagcaaaaataataaaaagaaaattgattgctcatggagattatgcatgttctcgaactactccttttttgagaaatatttcgatgcacaaaagagttaacatagtagcaggtctatgactgctgtccttagaaaggactgcttgcaagagtgacccttggttggtatctgggaacttggatttcgaggggattcctaccactcccaaaactaataggagaggttccctgtgcctaaactgtgtgttcaaacagtgtgatttctattcaacacttgctttccttctgggtatctggaatttgggaacttgccaggcataagttgtctgtaaccctggccactgagtctttaatgagctttcctggttggcagcattttacacgtgttcgcaactaatcgctgggagaatttaatgtgtcatatatgacttccttgggagaggacccttggaagcttgtgactggtttcctccagacttctcccaatgtgcctcttccctctgccggttttgttttgtaaaggacacaaaataaaaaatgatactcactattgtgagtatcattatgtgctaagtccactgagccctttcagccaatttctgagcctgagtaaggatggtcttggagatccccagaacaacctgtaatttagagtttcagtctttgttataaaagcatcaagcaggttggcagctaaacagtagtatttcaatgtatcattccaagtatacttgttctaatacaacttgggcagggttgaggagtggacaaagggcagaggtttggttgcttgttgaaaaaggcagtccattcaggaatgtattctggagaagtttacaaagcaaataatggaaagaggtgtcttctgaattgcatactagttatcatagttttcactgttactaaccagcatgtgatggcaattatgcacatgccatcatagagattcccttttaagctgaggtatggttgggtgcaaaggactgaagtaaggattatgtggtcgtagactgcttcattagttttcccgtggaggaagtgactgcttctcaggtggaattggattaccaaatgtctgttgtaaaagtccttatcatgtacatgatgtttcttccagagatgtgttacatcagaattttgagagttataagcctgaagtacaggagctgatttgtgtggctgatcgtttgggatccctgatgcaatatgaaacacctggtttcctgccaaacaagagaatacacagaggtattctggaaactacctgaaaatgaaaatattcctggcataagaggaagggtggttaagccatgttgtgcattttaataaattagtatttattgtgcttattcaaattctccatgtgatcagaatagaaatgtgtagaatcattcaaactgaattctgaaagaagactgcttccatccttggcttttttgctattgctgtagtataaactagaatataggtcttaagtccttactcaaaatcagacagctgatccagggagctatttccttactataggagtgaggaagaatgcaaacctccacttgtttcagtaggaggcagagttgggagcagacaacttgagttgtcttcagttaactctgatgggttttaattttagtaggaccatcatgactgaaacgtgccttgggtcttgttatatcaccaatacttctgaccctttatgtgttaactcttgagttatcactgagactctgtaaagtaggtggaactcagtccctctaaagtgtactaactcttctcgatattcctttctcgtagctatgggtttggccgcattggaggtcatgcaagccgtgcagcgtacatggaccaactcgaaagttcgaatgaatgggaagacacggttgatgcagtggagagacatgtttgacattgcagttaaatggagaaggtaactaacatctcagtgaaaataaactataagtcttatcattgtcaaataacgtcagtctgttttagctaacaggctatgaaccctgttttgcttgctaacaccaggccttccaagttaggttttcctc

SEQ ID NO: 4165 - DNA, 2300 bp, Homo sapien
attttaacaattatgcaaatgaaataattttctctacactttttataggaagctattgaatccttcaaagaagctttgaagcagaaagttgactttattgatgcatataaaagtctagggcaggcatataggtgagtaaaataataacagttggggtaggagggaggctgaagagtggggagacaagatagcttcacataatatttaaaagaaatagtatttcttaaccaaaggagatgggtattttgaattgtgcaagtatgtatagacttgttgatattttctctgaaatgcagaaaaataaattgtaccagaggatgtcatgatgcacagtattctctcttaacttcagcgtgtgtattggtctagaaaacgttcatccttcaagggttgttttgaatagtggcattgtaagctattggggtgtagacgctgctgctactttcttagacagtaactaaggtaaatttcctatgatctctttgaagagtcctagaatgaagggatggaaaagttgtgattataatgtacatctgctgagaatgagaagttgtaactagaacttggcttcctgacgccatgcattgccctgatgattagagccattgtgacttttggcttaaaaaaaaaaaaagtaagccgggagcggtggctcatccctgtaatcccagcactttgggaggctaaggcaggcagatcacttgaggtcaggggttagagaccagcctggccaacatggtgaaaccctgtgtctactaaaaatacaaaagttagctaggcatggtggtgggttcctgtaatcccaactacttgggaggctgaggctggagaatcgcttgaacccgggagtcagaggttgcggtgagccaagattgcaccactgcactccagcttgggcgacagagcgagactctatctcaaaacaggaaaaaaaaagtatattgtgttatgaaaaggaggtaggatggcatgagtgaaggagctcatgacttagttctgccttggtcgttctgcaggtatgagtgcttaacttccctgagcttctggcttctcacttgtaaaggtgctacaaaagctagaaaagaaagacagcgacggaaagtccctttattaggtaccttattcaggaaggattacattcaagagcttatttatctgatagtttgaggagctcttatactaacttggaagaagtgtgtttggatttgtttggggtttaagggatgatatttgtgcttcctgtctcacagaattattgaatataaattgaaaacagatttgaaagcaccttgtaaagtgctgtatgaatgtaagcaggaattatatttttaaaaaatgttcactatttatagagaattgggtcccgcttttcaggaggtcaagtgggagcatcgcctgagcccaggaggctgatttcagcctgagcaatgcagtgagacccggtttctaaacctatttgaaaagcaaataaaaagcagattgatccataacaaccatttccatcctggaatggttacaattctaaaatacacttcttttttcagaattctaaattatataatgatttactagattttaagcaaagcaactttggtgaccaaaaaaaaaaaaaatgcatttttaaggctatgaatttgattgagaatgatgaactgtttatgattataattggtatatttttttccaaatgggaaaagtgtgtttctatccatatattaacatttacacagtttttagggtttgggactcattgtgaataatcaaggagaggggtttgaataagcgtctgcctttggaaatcagcagatgaattttccccacagaatttcaagagctctgtggttatcctatgagctggtgagatttagaagtaagtgaaatgtaatgtgtcagaggctataaaaaagcaacaaagggaacactcccatcaaggtatcttgtttacatattggtccataattctgaggatagcttattctgtatgtttcccgtaatatctatactgtattcataactattattaaatacctagagaactgggcaattttgaagcagccactgagagctttcaaaaggcactgttgctcaaccaaaatcatgtgcaaaccctccagctccggggaatgatgctctaccaccacggcagcttacaggaagcccttaagaactttaaggtgagcatccataaataagaacactgtaattggaattactggattattcttcattgaagtttagtgaaatgaatagagaagggggactgagaatagtgtttctactccaacaaaaagaaagagaag

SEQ ID NO: 4166 - DNA, 2300 bp, Homo sapien
caaaggagaaagggaaatttacccaacatgcaccatatgcaagtaaatacttcagatgtggtttgcctacctacaaccacttaatggttaggacaaaggctttgtctggagcccgacttcatgggttcctcctttggcagctgtgggatctcaagaagatgacaatttcactatgtttcagtttgttcatctgagaaaatgagccaccatctaatgaggtggttattgtttttctgatagactaatatactaggctcatagacctaaagcacttataacagcacctggcatacagcaagcactcaatatatgtcggctacttctcatttccctcacagcaccctcgtgaggaaaataaaaccccacaattaggtgaacagtgttttccacttacagaggaggcattttacaaagacaggtaattcacttgctcagagatacagaaagtgacagaggtaagtaaatgccattctttctccaccgtgcaaggctggccgtgttacttacgccgttaccagctaaggcctaccgcaaaataaaaaagtcacaaacctctcagtgagtgacacttcctcaaggaagtcagactgtactaaaaggaaatcagattgtgctaatcttgacgtctcatctcaactaaaaaaaaaaggtattgttttcccaggtacacaatgccgaagaaaaccactgccaagtcttaaaagcaaccatctcccagtgggttcggtagaccccggtccttcccaaagcaagccataagggaactcacatagagaagggggaaagagaaagggaggagattgatgggtaaaaagacccacgacagaacttcaaaacaaaaaaatgtacacacgtattttgtcccagaggcatctgctatgatttattaaactgaagccaatagcgcccattcttaatgaatgagctggcgtagctccaatacacacacggcactgacacacaggctcaaggcctgcaggggccttttttccctctgggagacacctgacagatcgcaggttgatcttaaacaactggaagcaagatgtcaacgagcagataagatgggcttgctctttttttccattccagggatccaatttttaggaactgttgtatacgagacattaacccgggaggtcaggaagcctgatttccaggcctaagatgtgccaggcgtctccctccgggggcgggctccgcaagccgccgggctggttgctcgtccgcccgcccctccctcgccccttcggcatcctcgggaggccggcggcgggaacagggctgccccgggccacctgccatctcctccgccacccttccaacagttgcttcagactcaggagagaggccgccctggccccaggagcatgctgtcagctcatttctcgactcgccgccctgcccaaaggcggctgcaggagggcgcgcggcggcgtgggtggcagcggcgggaagctgcccgccaggacccctggccgagccggctcccgcggatcgcgcgccgcagccggaggcgtgaggcccgggcgacccgtaccccggcccgggaccccagccccgctgccccgccgccccggccgactcggacgcccgccgccgcccactcaccgccgcactcggcagagtactggtccccccagtccccggactgcgggctgcagccgccgccgcccgccggggcctcctgctgctgccggtgctgcagctcctgcttgagcagggagagcggcgagtagtgctcggtggccagggcgcctggccgcagcccggcggacaggacccccagcagcagcagcagcaggacacgccgggcggcgcccgcggcggccacagcgccgccccagaagcagcagcagcagcagcagccggcaggtgccatcttccctcaaggcgcatgcgcgacagcccttgcccggctctcaggcctccccgcctctaacctacggcgggcaggtggaccgtggcaagggggcgggacaaggggagaagcattgtgtgctgggaatggtagtcccagctcggccagcccggggccgccttgccggtgccgggactacgaatcccaataagcccgcgcggcgcaagtcttccggtctggcgtctgacgtcttaccctccacagaatcggaagttctggactgcagttgagtggaaatgggcaacggcgggcggagcggcctgcagcaggggaaggggaacgtggatggggtggcagcgactcctactgctgcctcggcctcctgccagtacaggtgcatcgaatgcaaccaggaggccaaagagttgtaccgagacta

SEQ ID NO: 4167 - DNA, 2300 bp, Homo sapien
aacaagaacagtttctaatgaaatgcgggtgggaatgtgactaaagcaggttcaagagaaactaggaaaggaaatagacagtacaaacatatcttagaaggtctgctttctaattaagaagaaaaagagcagaagctaaagggggaagtggcagcaagtgtattttgttggtggtgttggttttttttttttttttgatggaagaagtaacagtatgcatgctggtgggaatgatccagcagaaggcagaagaagacagtacagtaaagaaataacaaatgctagtattgggtttatgttgttgcaaacctggtggaagttctcttctgttttcgcagtggctcatgcctgtaaccccagcactttgggaggccgaggtgggtggatcatttgaggtcagttcaagaccagcctggtcaacatggtgaaacctggtctctactaaaaatacaaaaattagcccggcgtggtggtgcaggcctgtaatcccagctacttgggaggctgaggcaggagaattgcttgaacttgggaggcagaggttttagtgagctgagagtgccccactgcactccagcctgggtgacagagggaaactctatctcaaaaagaaagaaagaaagaaaaaaaaaaccgaaataagattgccagaaatcatgaaaggcctatatgaggttaatcgtcacaaatttgtttttccccagcaacgtactgctgcatgggtacagggacaagaccaggcaatatgttggatttaacaagggttgacattttgacaaaagagggaaagtacttgagagaggaacaggaaattgaggttgtatgcatcagaacgttatgtggttggcagattatacaggtatacactcagtttgtcaattctcttgtatattactacagaccataatttactaaagagattagaaaatcacaagatctgaaatgggacaaaaatgtactgtctattctgtgacaggttctttgctaattaatacccccaaagaacctccaactttgtagactctttaaacataagattattctctctgccgtaaaataaagaagggaaagagtagcaggagactccatagggccttataagccagttcagggattcgggccttaactctgagatggaaaatcatcagaaagttcaaggtattctacgaacaccttgaaatgagaatttttacttcctcacttttgggttttgtaccaccaacgtctagcatagtgctttgtacaccgtagacatccaataacgacaattgatgaaacctttaaaaagcatcgtaggtgaattcaacatgggttgtggagggtaaggatggtaccatctctctgtcaaagggagaagagctagaaggaagtagctttggcatgaaccaaaatgtcaacctaattgatctttaaatttctctgcaaaatgcccacatctacctctgtctgtcggtccggtccgttcgccggcttaggtcatatcacccaaatatgccccagtatgagaaaagcgctgtcgggtagctgagttctctatcagtacagatattcatgcaaagatcccgggcgggaatgtcaactaccgaactaaagactgtatcagaggaccctgctcctcgcggtccccaaatcccgccgcgccattttcttctcaagggcaccccacacctgacaactcacacagatggttatcttcagcacaccgtggttatagtctcggtacaactctttggcctcctggttgcattcgatgcacctgtactggcaggaggccgaggcagcagtaggagtcgctgccaccccatccacgttccccttcccctgctgcaggccgctccgcccgccgttgcccatttccactcaactgcagtccagaacttccgattctgtggagggtaagacgtcagacgccagaccggaagacttgcgccgcgcgggcttattgggattcgtagtcccggcaccggcaaggcggccccgggctggccgagctgggactaccattcccagcacacaatgcttctccccttgtcccgcccccttgccacggtccacctgcccgccgtaggttagaggcggggaggcctgagagccgggcaagggctgtcgcgcatgcgccttgagggaagatggcacctgccggctgctgctgctgctgctgcttctggggcggcgctgtggccgccgcgggcgccgcccggcgtgtcctgctgctgctgctgctgggggtcctgtccgccgggctgcggccaggcgccctggccaccgagcactactcgccgctctccctgctcaagcag

SEQ ID NO: 4168 - DNA, 2300 bp, Homo sapien
actttgggaggccgaggtgggtggatcacctgaggtcaggagttcgagaccagcctggccaacatcgtgaaaccccatttctactaaaaatacaaaaattagtcgggcgtcgtggcacatgcctgtaattccagctacttgggaggcagagacaggagaattgcttgacccaggaggcagaggttgcagtgagctgagatcacgccactgcactctagcttgagtgatagactgtctcataaaaaaaaaaaaattcatgctaaggtgtgaaccgaatgtcaaaatgcttcccaccccttcctctcccttactcccacacaggcagactggtcactctcctgaagacacccaccgtttacataagtgaatgaataaatacctgacatccagaaatgtgactaggtaattagtagaaggtgaggcacagtgaagaggcggaaaattctgggcagtgggtggggtgggaagcctgggtgctgtcaatcacaccgcctgcactaaagcttcttcatatcagtctcacccacttgcaaccgtccagggagaatattgtgccaatttcaaagacactgcttctggggtgggctctaggaggtggtaaagggtataaaacaacccaaagtgcagggctcttttatgttgggtgtctgaagtgctcagaacactttataattttgatccccttgaatgtagctagaaaattaaatccctttataattaaagccaataatgaatgggcattaaagttatccaatctatacactgcattagtttttaatctgcggttgggctgtagcgtttacttcttgatcttttctatctctaatctggttataactgcctgtcatttttacttttcctgggaggggcagagtctctctctctcttctcttttcctctgaggtgtgcgtcgtgtttatttttgcctgagctgatggataatttccgagatttaatccctttctctggtttcctgacatttccacttagagttactcttgtgtttatggccagaatgaaaggcatgtttactagtgttttgaagtttcaaaagtgggtctggcgttcttgctgactgctgcgggtactgctggacaaggccgtgctgagaaggccagcgcgcccggcggcaaggagcgacctgcccgggtctggggcccccagccgccccccgcggcgagtgggaggcagcaggaggcgggctggattccgccctcggggagggccgggggtcctgggaccagagccaggcctcctgccctcgacgtcctgccggttgtgagccagagcctcggtacccccaccccctgcaacggcctgcttcgtgggatctgaagctgggccgccccctgggcagggcagggatcggtgaggcaaggagctgaggagcgctggcaggtaagggggaagtctggagccgggttggaggtgagcgggcgttgaggggtgggacagagggagtggagacggggctgggggcgagccagtgaactgggggtggcacagaggaggtgggagcagagatgggggtgatccggaagcctggggtggggggtgagtgggttcggagctgagggtgagccagtgagctgagggtggcacagagggcgtgggggcggaactgggggtgagccgggaagctgggggttggcacagaggaggtggggacagagatgcgggtgagccgggaagctggggttcggggtggcgcgggtgagagggttcggagctaggggtgagccgggaagctgggaggtggttcagaggaggtggggacagagatgggggtgaaccgggaagctgcgggtcgcggggggcttagtaggttcggagctagggagtggcacagaagggttcgtgacggggctggaggtgagtcggggggttagagggtagtcacgcggagttggagatgaattagggcgctggaggggcgcgagggaggaggagacccgggtggaggcgagcccggctgctggacgcggacgccacccggacccggggcccgcgcaggggcctcgaggagagggggcggggccgggggggcgtggcgcgggaggggaagtgggcggggcaccgccgggaagggggcgggccgggggaaagccttggttcgctgcagcggggcaggcgcgtggccgggccgcggcgcgatgagtggggcccgggcggcgcccggggccgcgggcaacggcgcggtccgggggctgcgggtggacgggctgcccccgctgccaaagagcttgagcgggctgctgcactcggcgtcgggcggcggcgcgtctgggggctggcggcac

SEQ ID NO: 4169 - DNA, 2300 bp, Homo sapien
cctaagcgagctgctgagtggggccagtggtcccggggcgtcctgacttccaaggctctgggccttcgtgctgcggccaggagcgcgtcgccaagcgcctccccaagggtccccctgcaggggttcctgtcccctaggcacagagccccaagccctgggcgcaggctgcagcttccccctgcctgaccccgccagcctgcgcctcctcacccggggactagcagaagcctgggcccgcgcctggcgctacgactccggtctttagtctttgtttggagcacgggagaacctgggacggagggaggcatgacttcaatattcatatcgttgttaaataaacgatttcctaatttgtatctgtttcatgccagcgtgaaacttctgtaggcagagccggctgcgctgccagcactttcttctgctcgtccccacccacctctgcctcccccacccagccttccctcggcagcagcggggaagaacagccgagcagaccaaacagccggggccgcgggtgggaggctgttcccgcagctcgtggctggcgttggagaatgtggagattttcccattcataaaaggaacgtctccgcttgccgccttcccgtccgccgcacaccgccacatccgcagcggggtagggctgggtctgggggcgctgggttcccaggggtctacccgggcgcgctctcgcctttctcaggaaaccccattttgtgagcggcaccgcgtgtcctctctcagtccgtgcacacagttgacctggagcgcggatgagcacccttggttgaaaggaagagacaaaatggcttgtggttcaattcataaataaaacctcacccttggacttcaggctgcccgacattttgggacttggatttttttgctttatcgtagttttaggaagcgactgtcaggccatgttgcctatccatttctaaacgactggctttttaggatcccgttttcacccttctatggcggtgggttgggggtggggtgtggaactggagtggcccagggagacgatggcaggggcggggcggggcaggtcgttgtactgattcaagatacaatctccatccaaataatggattgttattaacaatgatcctccctgcaaaacccttaaaattgccccttgattccctagcagcaagaggcgagcccttattcgctgagctgaagcctcctcccccctcctccccattactctctgctctggaaattacaactcctcggcgcgccgcgcggggaggcagcggcagcggcgggagggaggcggggaggggattcccgagccagccggacgctcgccctccgcccgccggctgcagcgtcgcgcggcccaaggtcagaggcgccgcaggagcagcagctgggaaccagggaagcgggtcaatcccggccgcagggagaaagccccagggcgcagtcagccggcgtccacagccgcccaggagtagggtgagcggctgtctccgggccggtcgggtcccgccgaggtggccgcggccccagcgacccggcgggtggcggcccaggggtcggcgagcaggcagctggagccccaccttcggctcccgggcgctgtccgccgcctcgtggtgctgatcccagccccacggctgagcggccttcgcacctgcctgtctcacctcgctatcaccccgataaggagttgggccggggcagaaggggggcctcggggtagccgcccaccggagccaggggctgaagcagcgagcgcacagcagcccggccgctggtcctggggtggagaggaggcgcgcgctgcagccggcggcggcgctggtgctgattcatcacctaaagctcctcgcaggccaccgcgagggcagccgaccggctccggaatctggccgcaggttgaagccgctggtgcgggaccctcgggcaggaggtgaggaccccctcccttctctcgcccctcaatcatcttagggcggtggctacaggacagagagaggggcgtgcccctcggctgtgaagtgggcatgcccgtgtgatgcccccgcccgtcgtctcaccggggcgcaccgcgctggtcctcctccgccagtctcccgagctccggccattcatccccagcgcagagcagcgctggcagccggcgccgcgatggaggaagagctgaagtgtcccgtgtgcggctctctgtttcgggagcctatcatcctgccctgttcccacaatgtctgcctgccttgcgctcgcaccatcgcggtgcagaccccggacggtgagcagcacctgccccagccgctcctgctttcccg

SEQ ID NO: 4170 - DNA, 2300 bp, Homo sapien
aagccatcacatctctcttcttgttttcccttttctttatgatcttcttctgttctgtttcaccttctgtacctcctgtttgttcaaacacaagaaggaaaataaatattttcagtcttagctatcatcagtatcaaatcctacgaatgtatttgtacatattccagggctatatgcacctagaagcacacacaaagaaataaactatttgttttctttcaaataagtgtatttgcaaaatgcagagaatccaaaatgtagtcatcttttcctaggtaactatgtctttgacccttattagcacaatcactttagtctccactttggttcctactcaaagtgtcatcacagcaatagtccccagggctggtaatcccaattggctttatactaaaaatatcaggcactgcagccactgtttctttttaacactttctgggttacaggaacatggaatagtcttcctattttctttcacagttaggaattaagatgaacctaagacaactggctcaatttgaatgcctttgttttctattaattcctctttctatatttcacttgttgaagctctgaccagtcacctgaaagttctaaccagaatcctaggcatccttactcacatgtattacaaataccacagagctctctaaattaccagctgctgatttatgcttgctactatttgcttaatcttttatacaataaacatttaagagccaactaaactttggcattaaggatataaaaatgaatagacacattcaatgccttcagagctcctaccatgatttccagcctgtgttgacatgaactatattattttgcagaatagtcttttcctctagattttaaacttctcaaggtcagagactaagtcttctctgtcctccaatatgtccaagggcacagaaatgctagttaatacaagcatggggtctggggctagaatcagaacccaggctctgcaaaaattaccagtcagacaacctgcatcaggtttcatgaacttctagtacttgtttctacatctgcaatcatggatttatgacagtgtctatttcatgaagttgaaaattaaatgagcaaatacacgaaaagcatgtgctatatggcaagttctcaacagttttaactattattcctactgtttaggtgaacttagaattttgagcagtcattccaaaataaaaatagcttttaaaatatcacgctgtaaatttaagaaatgtgtgttgtcctgaaatctaatgattttctttggtgcatgtgcaaagggtgtcaccttctcccgggaaagctcttcagagtatgaggcactgtcttcctactgacatgccatgcgactttaataggctcttttattttccttttcccccatcaagacaaagaacggagagtaaaagatcagcgcacttgtttaaaaaaaaaaaagtcgtgaaaaggacaactcgccaaggactatgatgtctctggagagggacacacaaggatgaagctggtgtattatccaacaggcccgaggccccagagcgaaatgacaccatcgcaccagggtcaggcaggtcttgggggtggcatggggaaaggggacttcccagggctcaagaaaacgtggaaaagcgggctacttttaaatcggaaagccttggtgcttcctacaagcaagtaggatggtccccacacttggggacgagttggaaggtttgatgaataactcagcagagcccggtcgaggggtgacttccgatggagaaatgtgttcgctactggaaccaggtgggacgaagggtgcttgacatgcaagaacctttagcctcaaagcagaggccaacccaggacgggcaacacaggagacccacgttcctcaaatctgttctccacgtgggctcctgggaccccgcactcaccaaagtcgtaaaggttctggagcagagcgtcaagaagtgtcggagaactgggaggcgtggaggaccccggcccttgctcctgcgacattgtggggtcagccgaggaatcaaccctcattctgccgcgctgcacccccgcttccgggttccgcgactgcgcgcatgcgctgcagggccctgcgcggcttccgtcctggctgagatggcggcgcccgggatcctgtgtagcggctgcagagggtgccgccgccctaggcgaagtagggccgtcctgagcgaaagaaccgcccccagcaggagcaccaccacggcttagcaaagaatcccagaccccgcccgggaaggcagccgcaccatggagtcttccagttcatctaactcttatttctc

SEQ ID NO: 4171 - DNA, 2300 bp, Homo sapien
cttttcttagaaaccttctccaagttcccaaactggtcaggtgccccttcttgtctctcccacaacacgctgtgcatgcttcaatcattgcccttaccatacttaactgtgattgtttgtttacttttatgactttttgtgcccttaaaggcagagcctgcatctgtaacttctatatcttggaaactgagaataatgagtaggatactgtatatattcctaatgtttgctgcaatcagcagtatcttctacgcttctaaagtgctacttttagatcagaatattacacaataacagcgtagctggggaaataaaaacagcctgaagtactaagaaaaagtaaggttaccgtggaagtaaaggttatccagtcacaaaacagtagtgagaactaccagtaaagagtgggttgctgtccagcatcagaactacagaatgctcagatacaactgccatagtttttcacatgaaaaagtggactcaagtcttattaaagaaccgttggtaaaggggaagtaaaacaaacaaacaaacaaacaaaaccaactccttcctttaatgtacaaaaggaaaattccaaccaattcacaaaccagttgggagcttaaaaagctacatgttaaaagctggatctgcacagcaaccctcttcccttcgtgcctgctctggagtagcagagtcagaaaacaaagttgatatccaccacagaactgtggggaagataagatcaatgaagagatatatctaaataataaggcttataggcagttagcaatcagaaaccgaaaggtcttgatagagagggaacagaagtttctccatgttccaaagaatattggtgtctcaatttgaaggaacccatatattctctttcaaaactggggtgtttatcttgctctgctgtgttatccctgttttgacctttctgcacaaatgaacactacatttaagccaaaattggacagtaatcaccaggatatgctaatatgcttttaaaatgaattctttcattttctcctaaagtagctaaaaactaatttagtggttaaaaacaacaagaaacaaacaaaaaccaaaccagttgccccaggtctgtgcaatcctgaaggctataaagctcccatctcataatttcttcatgaaaatcgtgggtgaccaacatctgccagccaaaaagacccgttaaaaccaagagaggaagagggggttggaggaaaaaaagacaagcgggagagaagctgggtggcgctggctgtcctccaaaatgatttgtggaaaaggtacaataatgactggaagacaagaacaggcaataaaaatgtctagaagttctaaattttcctgaagtgtttaaaactctattcccacatacaagccaagtgctctactcccaggaatataacagcagcatagggcggggtgcggagccacaggctatctcagggcgggtcaaacccgcaagtttctcaggtttgcccaaaaggtagctcgacatgccctcgctagagatggggagactccaattctcattcctcattctcgtgtccaggagctttctgaaggccccagggcctgatagaaagaaagagaaggaaaaagtggaaaggaaccaaaggaaccataatccgtagaaacttccaaaagcatgcacacacagacacacagcgatacactgttgtcctggaaaccaatccaaccaactaacccctcctcgggagcctaggggccagctcttttgggcaagggtggtgggccggaggaatagggactgggagaaaggggtactatttcgcgcggctccgctctgggcctcttttccctgggcgcctaccgagtagaggagcacgacagcgctgggactggttgggccaacggagaaataagagttagatgaactggaagactccatggtgcggctgccttcccgggcggggtctgggattctttgctaagccgtggtggtgctcctgctgggggcggttctttcgctcaggacggccctacttcgcctagggcggcggcaccctctgcagccgctacacaggatcccgggcgccgccatctcagccaggacggaagccgcgcagggccctgcagcgcatgcgcgcagtcgcggaacccggaagcgggggtgcagcgcggcagaatgagggttgattcctcggctgaccccacaatgtcgcaggagcaagggccggggtcctccacgcctcccagttctccgacacttcttgacgctctgctccagaacctttacgactttggtgagtgcggggtcccaggagcccacgtggagaaca

SEQ ID NO: 4172 - DNA, 2300 bp, Homo sapien
aaataaagaaataaaagtctcatcttaaaattaaacaaaaaaaaaaacagtctctttttcaacccctcacaatttaatcaactcaaggacagctcacttggtcaatcaaaagcctagggcctaatcatcaggcctccagtctaggcagaagaggatgtgcatctctgaaggttgttttctgtttttttgtttccttttaactgcagacctacaggcttcagactaacttagtcaagtaagacttatagactaacttaatgccagatattcagtaacgttacaaaagaaatacaaagaattcctgtatatacttcacctagattcccttacagcatttcctttatccttttcctaatactctgctgtgtttttcctataattaagggcattatcttatggtacaagtatcaaaataaggaaattaacattgaacaaatactagtaatactgacctgactcatatttcaccagttgtcccagtcatgtcctgtctagctaaagaaaatcgtagctcatgtgttgcgctagaaatcctagaaagtgttcaactttcttctgtatccacttccatattagactcttttaatctaaaataattccttagtatctgtatttgtgtttcatgctaattttttttttttttaaagaacaggctaattattttgaagtgtgaaatggtttgaatttgagtgatgttatctcagtattgggctcgggttgtgtacctttgctaggaacaccccggaagcgatgcattcttctcagtgggtcgtgtcagcaatgcatggtgcctgtcggtttcattactggagatgtttcacttccatcagttggttatcgttatgactgccaggtttctctgctgtaaagttattattttttccctttataattaatgaatatcttgtgaaaagactctttgaaaatggctaaataccctgttttgcatcatactttaccccactcgtttttgcacccactgatgatttttgcctgaattaattattatgttaatgattgccaaatgatgacttttctaatttcataaagagctttccttatgaagagtatttttacttatttgtgttttatatttttttcttctaggaaagctcttaacttcacttgccttcctcctcatcccttttaatattttgttttaattcagtcatttactttcctgtcaaatatttcttcttcctactgactgttttcgagattgctgacttataccctgaatctgtcagagaatgttacagtgtttgggaccaagggtggtggtgagccatttcttaagtgatgatcacagattacctggcctctgttacatttagatttcaaaaaaacagataacacatggataccagtgaatcttgagattgatggcctgaggagtatatttggaaactcaaattatccctcccagccacatgacacccattcaccctggcagtgagtccagcacatagagaaataccattcttctcaccttgtcctatgaatttgtagattttttttaatctctccaagagaagctttgttttctcttactacaaccaaccaattcaatacagtggttaacagttggctttttaagtcagactgacttgggttccattcacagctctgccatttattggatgcatgaccattttacaaacaagaaagctaaggcttagaccttgttaattatgtggtattaaacaaagcacgtaagataactgtatataaaatgatgctaatatagtgcccaactaatatatgttagcgatcatcactgttattattctgatccataaaaatttacatttttaatattcttgcattatgtgaaattgtttaactagaaacagtacttttaccttatcagagcaaatcgtttatgtgtatggcaaaaaggcagaaaaagaggatgggtattccctctaaatatagacttattcttccgttttctgatttgagatgtgatttgataacatgacaactgaaattattcaaaatgtaacatttactttcaagctacaaagagccatccaggagcatcctgttgttctgctgcctagtcatcgaagttacattgacttcctcatgttgtcttttcttctatacaattatgatttgcctgtgccagttatagcagcaggaatgggtatgtattgtttttctgtttttttaactgtaaaaattaaaaagttcactggcatattctagcagtactgaggtatttgaagatgatgatgaaaatagcctctcctcctttcttccagtcctagcactgaataacttgagttatgtccttt

SEQ ID NO: 4173 - DNA, 2300 bp, Homo sapien
tgtgtgttccaattacagttgtagctgaaggaagtatgctttggtgagtcaattagtatgggaacttgactaaagacccccagtgttgtaacgtacctttgtacccagacaaaacaattatgttacattcctcaaagtggcatgggctttcttctctaattcttctgttttattagacccaagacaagttctaaaaattgaatgcaatgagagattgtccagaaatgtaatatatactaaaatataccacttaagcattgattgccttttcttgtttgcttcaagaatataaaacttgttacttgagcttggaatcatgggcttgattgaattaattactcttggggaaaaaagacaccttgtggcattaagtcttgctttggttaaagccttatttcacataattgctaaaaactcatttttgtttaatatactacctatagtttaattatcggcacttgtattttgtaacttgatatcttacctaggattgggaatttgggacatgacatgtactataaaagtcagtctatgtacatactgcttattgatgtgctgtgatatgagggaatctgaaatgtttcataaaaataaagcttaaaaattgtcttacactggataaaagtgatattaagatattatatctattgctcttctttagttggtattcaatatttttatattcttgttactgaaatattctttgaagaccctagttttttgttttatttatgtggggaggatacttaggaagctgtttgctaaattaagtaagtgttctgcttaccgtcagaattgtgaataaatcagatctcaattttttaaaattccctcgaatggaaaatttcagaggtacaaaatgtgaatttattataaaaaagtagattttataccatctgcacatctctaaataaagaaaataaaatgtaggccacaagacctaggaactaaatgacaaggcttggcctttttttttttttttgagacagagtcttcccatatcgcccaagctggagtgcagtggcgtgatctctgctcgctacaatctctgcctcctgggttcaagccattctcctgtctcagcctcctgagtagctgggattacaggggcccgccaccatgcccggctaatttttttatttttagtagagatggggtttcaacatgttggccaggctggtctcgaactcctgatctcaggtgatccacccgcctcggcctcccaaagtgctgagattacaggcgtgagccaccatgcccggccaggcttgcccttttgaaagtaatatgtatatcctgaggaaactatcacatatttaaaagtattgaatgctatgcttcatattgactgtaatgtgggagtgcagaagaattttaataattttaaacatacttcgtcctcttaagatgcttagaaattggaaaaagtcaacaaatataagtgagagaataatcaaatgcacagctgtgtacagtggaaataccaagaaggaagagagcagtgtacttttaaggagtttagaaagttctcatggaattgttggcatttgagcgggtccttgaagaatggacaagacttaaatgtgcaaagaaaatggaagagtaggacctgagcccaaggcacagaagtgggaatgtgggtgtcatatgaagagaccttcctggatgaattgcagagtttggaaaagcgtaaataagccacatttgcctacaaagcaagcttcaatccatatgcaatgtgcagaagagttaaagtaaaaaataaaagtcctcatccccccaacaatcccattcactagaggtaactactagtaagaatttcatgtacatatttttccagaaattgtatcatactctgcatacagttctgcatcttgattttagtcacttagcagttcagtgttttaagacatctcgtatcagtacctcttgctgtaccccactgggtttttcttctgtgattgggtagttgtcaatcacagtgaatgaatatatcataattttgcattttccaattacttggttggcttcaagttttgttgattacaaaaaaaaaattctgaaaacctatgcacatcctcctattcgcttatgcgaatatatctatgggatgtatttttagaaattgctctgccaaattacattttaaatttaagcattaccagttgctcatcaggagggttatatcatttttaagttctctccaacagtataggaaaatacctgtttacatgaatgcttataaacctgtattcattcactgtttaattaagagtagccttgccaagcacagtggctca

SEQ ID NO: 4174 - DNA, 2300 bp, Homo sapien
atatactgtggggaaaaaaaaaaagaagaaagaaaagactagcctgggcaacatggcgaaaccccatctctacaaaaaatacaaaaattagctgggtatggtggtgcctgcctgtggttcctgctacatgggaggctgaggtgggaggactacctgggcccgggaggtcaaggctgcagtgagtcgagactttgccactgcactccagcctgtgcgacggggtgagaccctgtctcaaaaaaaaaaaagaaaaaagaaaagttttatcaaaggataaaaccgaaatgctatagtatatagtgtgaccataatttcagaagaagagaattagcataatttaaaaggatagctagcatactatacgttttaataattccagtatttttgttacttgggcttaatttaacttattttcctctttttgatttttgtatttttaagagggcacttttaattttcaagttgtgtttgaaactatagagtatgctaatacaacttaatataaatataaataatatataagctctctctctgcatatatacacatataaacagacccaagcattagaccactgatgttgtactttcaggattcacacgaataagtctagatgcattcctcagatcttggagttgcttggcaggtttccccacaccttcttcaaaccttttctccaccacagggaggactgtttcatataaaaaggatgcattctgtctgataaaagctttcttctctggatcctgctcacatcgaagactataatccacatgctgaacagcaaccaaaatgatttccaccaggctctccaaaagtaccatgtgcagctctgggaaatacagcttcagggcctcttccaagaagcccatggtctgtttggtgaaagcaaccactgtgtaacttaggttcacccagcagtcatcccctgtgtactgctcaaagttacttaccccacaacttttcatctcttctttgagcttacccagggcttctggcgtcatcaagttcatcctcctccacatctcttcagagttgcgatgtttagtggcttcaatgatgatttctttgtaactgtgcaaggccccttggatgtctttcaccagaagggcatggatgatgaaggtgagatccagtccgatatcacccagttgctggcaatgctccttagccacttttacacactcagctgctgtagagaggctctccttactatcaaacacctgcttgctaaaagcatccacgaacatgcccatggctgatcttgcccagaccacaaaggcagagtagcagccgctgtcagtgcctgcaaaatcgatctcaaattctcttgcagtctcgagaaggctggtaaagaagacatggcacagcttatgaatatagagtaaagtggcaccttcgatgcgaagctgacgaattgcagtatgaacagcggctgccctgtttctcaaaaatagctcacaggccttcgtgcactggcccagccggatcagttgcgaaactgctctgcgagtagccttcggaccacctctcagggaacgatctggggagagttcgaaaactagcacctcagtgagctgtcgaactcgctcctccactttggcccttagttcttttacaggaggtgggctaggtttatcttccaggtaatggttcaatttatccagcaggtcaaccgccccttcaaagtctctctgcgcaatgcagacatccaggtcttcaggtaactcctggatccattccatggagaggtccaccttctcttcctctacctcaggaacagctggttcttcttcttcgtcatcctcaaatgggttagtggccttggaagtcacttggggtggccctcgaggggccgctgcctcctcctgctcccttcgccttttctcactgagggccctcttggtgtcctccagcacttccagccactctcgtttgattttagcattttcggcctggaaaatacggctctcggggaacataagcagcttgaacatgtccttcatgggcgggttgtccttgacattgactacggccaaaccatctagggaatagagagcgttgtagcgatacatcccacgccgctgaggcagccaggtagccaccaacaagcaatcgttcatgagaaagccgtgcacccgctgcagttgggccatgtggtccgcatcgtattccactaggtccccattgtacaccaagtactgtcccggcgtctccagcagatgcctgcagccttccaccttctcaagcagggtggtgagagtgcgctgctttccttcctcgcctggaccggagccgtcgc

SEQ ID NO: 4175 - DNA, 2300 bp, Homo sapien
gggaaatacagcttcagggcctcttccaagaagcccatggtctgtttggtgaaagcaaccactgtgtaacttaggttcacccagcagtcatcccctgtgtactgctcaaagttacttaccccacaacttttcatctcttctttgagcttacccagggcttctggcgtcatcaagttcatcctcctccacatctcttcagagttgcgatgtttagtggcttcaatgatgatttctttgtaactgtgcaaggccccttggatgtctttcaccagaagggcatggatgatgaaggtgagatccagtccgatatcacccagttgctggcaatgctccttagccacttttacacactcagctgctgtagagaggctctccttactatcaaacacctgcttgctaaaagcatccacgaacatgcccatggctgatcttgcccagaccacaaaggcagagtagcagccgctgtcagtgcctgcaaaatcgatctcaaattctcttgcagtctcgagaaggctggtaaagaagacatggcacagcttatgaatatagagtaaagtggcaccttcgatgcgaagctgacgaattgcagtatgaacagcggctgccctgtttctcaaaaatagctcacaggccttcgtgcactggcccagccggatcagttgcgaaactgctctgcgagtagccttcggaccacctctcagggaacgatctggggagagttcgaaaactagcacctcagtgagctgtcgaactcgctcctccactttggcccttagttcttttacaggaggtgggctaggtttatcttccaggtaatggttcaatttatccagcaggtcaaccgccccttcaaagtctctctgcgcaatgcagacatccaggtcttcaggtaactcctggatccattccatggagaggtccaccttctcttcctctacctcaggaacagctggttcttcttcttcgtcatcctcaaatgggttagtggccttggaagtcacttggggtggccctcgaggggccgctgcctcctcctgctcccttcgccttttctcactgagggccctcttggtgtcctccagcacttccagccactctcgtttgattttagcattttcggcctggaaaatacggctctcggggaacataagcagcttgaacatgtccttcatgggcgggttgtccttgacattgactacggccaaaccatctagggaatagagagcgttgtagcgatacatcccacgccgctgaggcagccaggtagccaccaacaagcaatcgttcatgagaaagccgtgcacccgctgcagttgggccatgtggtccgcatcgtattccactaggtccccattgtacaccaagtactgtcccggcgtctccagcagatgcctgcagccttccaccttctcaagcagggtggtgagagtgcgctgctttccttcctcgcctggaccggagccgtcgcgggaggcacccccgggggtggagaaaaagccggcctggcctcggaggtggtctcggccccccgccccaccgactccctcctcccctccagaggcggcggcggctccggcggcagcagcggcaggcagcaacgtaagcgggatgctctccaggctgcttttctgctcggtcagcaaatggctgagctggtacatctcgctctccaggtaggagatctcgcgggccgtctctatgaactgccggtagttctggtagacgttgcgcttcaggttctgcgccgtctcctccgccagcgcctggatgcgctgccggtgctcctggaggtcccggtccccatccgactgctgcgagagctgcttcacgtacagccgcgcctcaaaaccccctgactccagctgccgacgcaggcggctcgccccactgtccgacatcgccatcgccatttctctccgggtctcacgcactcactgtcactatcggcgccgcagccgccgcggctgtctagacccacccaaggccaaccgagctcctgggctgaggaagcaggaatgggaacgagacgagtacgcctgcgccgggtctgagcgtcagacactgcgcctgcgcaagtgggccgagcgcagacattgcgcctgcgcagcaatgccatcggttaaagcgcatgcgcaagatgagctattgcggaagtgaggggagggagaggccgagagaaatttcggtactgcgcatgaaccgagcgtgacgttgaggtttgaaataaccggcaaagagtaaaggctgaaactagcttcctgaaagcttcgtagggcccgagccctgtgagcccaggttct

SEQ ID NO: 4176 - DNA, 2300 bp, Homo sapien
atacaggcgaattcacagcagtctaaatcattgacaagtatttgtaaattactgcgctaggaagcaagtttacacgaaaaatacctctacaagatcctttcttggcctcaacttcaaaaggggttcgctgagacggatggaacacattccacccttcccttcatagctgcatatcccagcacacctagaaaacaatcaccataaaaatgtgttacattggccaaatatgcccaagtccttacacattcttgggcagttcacactaactcagttggcagatggctttcatgaaagtataccccccttggttagcagatacttgcatttcacctaattaattagttacaacccccgcgggcgcctcccgcgatggctccgatccccgccgggcaaggaaggaaagcagcgtgctctcaccaccctgcttgagaaggtggaaggctgcaggcacctgctagagacgccaggaccgtacctggtgtacaacggggacctagtggaatacgatgcggaccacatggcccaactgcagctccccttgccctagctaggctgcaacagctcaaaggcaatcctattctgctactcccagtctccttccgacaagttacagttcggtgttattaacaagcagatatctccagtagcatatctccaaaatcataacagacgcctgtataaaggaaattggtactttaaacacaatttaatatcatatcttaatttgtttgacagtaggttgttttctatcaactcaaaaacaagcatgctgggatacaactgtatcttaaacttaaccctgttcacgtgcaggagtagattattatttcaaatagggatttctgaaatttagcgtgtagaaaaagaatcgttttaaaagcatcactgaagatccccaatgcaacacacgagctaactaaagtgggtttcctaacgggaatagaggaggagaacacacatcctttggcagttactctgcgtcctcagcactttcttaggtgcagatttggttgcttctcccttctgggtcctacagcactatcataaggcaaatcaggaacttgttattttcaagtgaagtgagattcaaataaaaatctcttttttgttacggccctgagtccaaccgtggcggtgtggtctacacagctttcttattgttcgagtgggagaaaaggtaaggaagacagaaacacgccgaggcaggaattgccaggtccaaaaccagactcccctcatttaacgccccctgggaccgtcggactagagaaaggagagaaaaccagggccgggggctgcaggaaagctgccagtcccgcctctttccccagcggggctcggaactcacagggtcattcgcacgctccacttcacctcgacggcctccagctggccccagaagaattggtcgttaaactgaacaaacagtgcctgcaagtccggtgtggggtccaccaactcccacgacgcgtccactagcgacagggactcctgggcatgatcgcgctccgcctcctgcaagttccactcctcctgaagccgcagtgccaacatcaagtcatcatccatcgttgccaggatcacaggcggggtccgccggcgtcaggctggctccccagttacgccgcgaccccaagccgcctagccgaggaccaggactagctcctaggagatgccggctctcgagacggcccgtcaatcccgcgagagttcgcggaaacgcgcttgagaacgagaacggagcttaccccaaacgccgaagccaagattctagggctttaaaaaaagcagtcagcatgacacctcctagtgggcgcagaacctgggctcacagggctcgggccctacgaagctttcaggaagctagtttcagcctttactctttgccggttatttcaaacctcaacgtcacgctcggttcatgcgcagtaccgaaatttctctcggcctctccctcccctcacttccgcaatagctcatcttgcgcatgcgctttaaccgatggcattgctgcgcaggcgcaatgtctgcgctcggcccacttgcgcaggcgcagtgtctgacgctcagacccggcgcaggcgtactcgtctcgttcccattcctgcttcctcagcccaggagctcggttggccttgggtgggtctagacagccgcggcggctgcggcgccgatagtgacagtgagtgcgtgagacccggagagaaatggcgatggcgatgtcggacagtggggcgagccgcctgcgtcggcagctggagtcagggggttttgaggcgcggctgtacgtgaagcagctc

SEQ ID NO: 4177 - DNA, 2300 bp, Homo sapien
tttataaaaatccctaaaatggctggggacagtggctcacacctgtaataccagcactttgggaggccgaggtgggcagatcacctgaggtcaggagttcgagtccagcctggccaacatggtgaaaacccatctctactaaaaatgcaaaaattagctggacatggtggcgcatgcctgtaatcccagctactcgcgatgctgagacaggagaattgcttgaacctaggaggcggaggttgcagtgagctgagattgtgccactgcactccagcctgggtgacagcgagactccatctcaataaataaataaatatccctaaaataagaactaaatttgtccttgcatcagtgcatatacttttaaaattgcagctcatcttcatactttattgagacgtatttgtgaataatccaattaagacattgaaattgtctctttttttccccctaaatttaatcttgtagcatttttggttactcctgcttacatatttggctcttttcctaggtaagtggaggtatacttcgaatttttccagaaggcaaagcccagtttgctgacattgaacccaaatttgatagactgctgtttttctggtctgaccgtcgcaaccctcatgaagtacaaccagcatatgctacaaggtagtattccttttcagaaaaaattggtttagagtatggtaggacaggagggaatctgtagagtaaacgtgaaagctttctaatgagtattttcctgccaggtacttttcacagtcattttaatttgaataattgtataagatttatgttgcacagtcatctgaattcaaataattatataagactcattaacagttagtactaaatgtgtctttctttgcacagccactctgaagaaagggaagcacaggccttcccatctttctagcactctctccgtgctttgtgcatctcttaactactatccatgctttgatttttgtaagagtattttacttgggagagagaaagatcaagaaggaaaagggttttttaaaaggtggtgagggacaacataggaaaatggatacagagtagaaaaatcagaggtaaccagagagtagaagtgaagagaaaaacagaagaaagaaaagtagagaacaggttaccatgtgtgggagttaatgttagaaaaatgatcctattagctttacaaataatgagcatctgtttcattatactttttctacaaggtatttgcaacctattatatttagtgctttatttcaaatgcttttttaaaaaccatttatcctgactcaattaaaatgctctggctgtgaaaacaagatattgtagacattatcatgaaagtaaatatttgtagaaaaatagcacattaaaaaaaaatacttattttttattatggaaaggtcttggaacattctgatagtgagcttccggcattcatttgctgtatctggcttaggagatgctagggtggcaagaagaggcacaggcttagatgcgctgggtggagagttggctttagtaatgatggttgactctaacgacttgattatcagctgtgccttttttcttcctgccttctgaggtgtgttgcctgcatcctaattcacgtactgagtagcaagctaagcaggttgtagctggagattgtaagaaatcctgaatggaaaccaaagaaagactgtcacatcacatgatgtgcccttttcaatcccatgtctcttcccagtggcatcccagtgctgtctctgccccctgctgcttctgtaaagattttctgacacagtaactgcctcatagaccttcctttttatgaaatcctgagtttggtttggttacgtcctttttagatgaataaataacagatacttgggagtttatagtaaataaatgccagatggcatggaggctaagtgctacaggagttgaggaacgaaggtggtgctacattggagagacgggcaagtgcgctttgaagggagaggctcagctggcctaggtgaggagaggcaaggggtgcagtcgtgttagtaaagttctgggggaaaaggcgtagttgttcaagttaaggcatggaaaatcatgcgacgaaaaggattcttgaagtagaatcctattctgatcttatctagaatgggtgataaggctggaaagttagaatgacataaggtaagttgttgatccagatattagaattctgattgctaagtgactaaaagtttagggcatgggcaaaagatacataaaattatgtatctgagccctttcctatttccaaggccacccaaaagtagaagaagcca

SEQ ID NO: 4178 - DNA, 2300 bp, Homo sapien
aatgtgagagtcgttaatgtagtactgctcatttaccatcaaaattcacttttcaggaataatcccatcagtttaaattggatattggaatgagcattgattacatttaacttggtagcccaaaatttcttcatggggttttgaactcggcgggatttcaaaggttttaaaaatgagtttttgattttttttaaaaccctcaaatttcattacctttaaactaggtcgaaacggggcgcaagagattggattaacaccatagtaatacttattttgttcttaaccatttcagggcttcttgaaatagaggctgtatggtgtaatggaaaaaacagccttggaatctgggagcctgattcctggattcagtcccagttttgcgtgaccttgggcaagttactttacttctctgaatttccgtttcctcctctgcaaaatgaggatcgcaatagccaccttgcaaccttgactggagcgagcctcgcacaccccgcgccggcctggaggaagagcagccatgattacgccgccttcgctccgctacccgcttgcggctggcgccctcctccagcaggtgtaggcgctgccgcgctgccccacgcctttccgccgctcgcgggcctgcgcctcggcgtccccgaggaggccgctgcgggctgaggtagcgcaccggcctctcggcgtcccagtccggtcccgggcggagggaaagcgggcgacccacctccgaggcagaagccgaggcccggccccgccgagtgcggaggagcgcaggcagcccccgcccctcggccctccccccggccctcccggccctccctccgccccctccgccctcgcgcgccgcccgcccgggtcgccgcggggccgtggtgtacgtgcagagcgcgcagagcgagtggcgcccgtatgccctgcgctcctccacagcctgggccgggccgcccgggacgctgaggcggcggcggcggccgagggggccggtcttgcgctccccaggcccgcgcgcctgagcccaggttgccattcgccgcacaggccctattctctcagccctcggcggcgatgaggcgctgaggcggctgccggcgctgcgccggagcttaggactcggaagcggccgggccgagggcgtggggtgccggcctccctgaggcgagggtagcgggtgcatggcgcagtaacggcccctatctctctccccgctccccagcctcgggcgaggccgtccggccgctacccctcctgctcggccgccgcagtcgccgtcgccgccgccgccgccgccatggccaatgacagcggcgggcccggcgggccgagcccgagcgagcgagaccggcagtactgcgagctgtgcgggaagatggagaacctgctgcgctgcagccgctgccgcagctccttctactgctgcaaggagcaccagcgtcaggactggaagaagcacaagctcgtgtgccagggcagcgagggcgccctcggccacggagtgggcccacaccagcattccggccccgcgccgccggctgcagtgccgccgcccagggccggggcccgggagcccaggaaggcagcggcgcgccgggacaacgcctccggggacgcggccaagggaaaagtaaaggccaagcccccggccgacccagcggcggccgcgtcgccgtgtcgtgcggccgccggcggccagggctcggcggtggctgccgaagccgagcccggcaaggaggagccgccggcccgctcatcgctgttccaggagaaggcgaacctgtaccccccaagcaacacgcccggggatgcgctgagccccggcggcggcctgcggcccaacgggcagacgaagcccctgccggcgctgaagctggcgctcgagtacatcgtgccgtgcatgaacaagcacggcatctgtgtggtggacgacttcctcggcaaggagaccggacagcagatcggcgacgaggtgcgcgccctgcacgacaccgggaagttcacggacgggcagctggtcagccagaagagtgactcgtccaaggacatccgaggcgataagatcacctggatcgagggcaaggagcccggctgcgaaaccattgggctgctcatgagcagcatggacgacctgatacgccactgtaacgggaagctgggcagctacaaaatcaatggccggacgaaagtaagtgtgtgctgcgggtttgtgctggacaggcccttctcggcgggcagcccctgcctgcgactgaaactgcctaggctgagaagcagcattcctctatatagaagggactcgctctttc

SEQ ID NO: 4179 - DNA, 2300 bp, Homo sapien
caaaaagaataattaatgcacttcaaatatatgaaaatacatatattcatgatcatttttttaaaaaagctcattagaagttgctagagcactaactcattattttgaaaattgataaatgaaaagaaacgtggaccctatctttcatctacaaactatatttcaggataaccaaagagttaatgaaaaatgttatggtagaattccagctaataaatttaggaggaatgttagaattagaaattcattattttgcaacgtctaatgaaatactggattgagtcacaattaatggatgctaaaataatcaggtgatgtttgatgaaaaacgtaatgtaggaatcaggctgacaccacctcaacccatgagcaatatttcgtcattaaaatgcaagtatcagacatatgtgcctcatgatgtgatgtaataggaaatacacggcaactaccacaaagtatgcttacctaaaatatagaacctcaatctaataaaaatcctaaatctacctatttgcagaaataggagtaatatcacaaggaagtaatcagctaaatctagaatatgggacattccgtagtacaaatggcctagtttctacagtaaatctatagtatgaagggtgagatgctggtaaaattgagtaaaagggacttaagaaatatgacaatttgtgatggtattaggtggggcggggtggaggaagaaacaactaagtgcaatgtatggacttgtttagatcttgaattgaataaagcaactgtaaacagaatctttgatataatcgaaaaaaatttaatacttggaggatgatggatagtattgagatttttcttaattttgtgtgataatggcatggtggatatgatttttgaaagttcttatcagatgtgcatattgaagttgggatatgctttataatactttagcaaaaaaagtgggggacatagtagggaggagggtagggaagaattgtctatcaacaaatgttgataattgttgaagctgataactgttgaactcattagggctgaggttgattatactattatctctctttttgcatatgtttaacttttcccacaagaaaatgttacaggaaaaattatttagctttctccaacctgggttggtataagtcactgattgtgactatcccaaaagttggttcaacattaaggtaatgtttgttaggaaaaaaaattagatcgacacgttatttagtatcccaggtttttgagcatttatttaaaaaattcgctataatgagagatgattataaatttttgttatatttctgagatgatcaattttaacaggattggtggtaatttttcaatcataaactgataaagtttgatgactgataaatcgccccaatatatagcaaatctattcaattattttgttttcataagggaacaaccttggtggaaagtacagctgtctccatgtacaaggagaagcacatagctcacgtgtgcatctggcagaacccccagtacagagacaagcaggtgctgttttccaatgacacctacttgtgtgtgtcctaatactatagttagaaaatggctcagatttttgagttgcttttcccagaactcaaagattgtcttcctgtttatcttggtggaatgcctatgctatacttgtgatttttctgttctctgtaacctattaaaacaagattgtcacagatggggaaacaagaggtcattagttaacaatcagatgttcgatttcttgagcagaaaagatactctgttgtgtttttaaaaacatttttaaaggagaaatagggctactccttggaaggcagattgttgttcagtgggctttcctcaagagtcaacacagtcgtttctaaattcatttcctccttcaattctgttcttgtagttaacataagctttgcctcttttagttcttgtcagttcacagtggctacttctttatagcttaactaaatactgccagaagagcaaagggaagccaaataggtggtcaattagctttgtctaagttggtatgatatggagaggaaagcactgttactttaattcattcttcagtttctagaacagttgcttttgattaggttaggggcagaaaaacatttgtaataattaatggctttgagagacacaaggctttgtttgccccagagtattagttaacccacctagtgctcctaatcatacaatattaaggattgggagggacattcattgcctcactctctatttgtttcaccttctgtaaaattggtagaataatagtacccacttcatagcattgt

SEQ ID NO: 4180 - DNA, 2300 bp, Homo sapien
cttggggtggttgtcttcctttaaaaaacaaacaaaaaactgttttgccaagtaccaaaactatgtgtttgcatctgaagcaataaaacaaggagaccaggtagggatgcaggttgttacagaagttgaaatctatttcctgacaaaggagtagctacaagttggaacacctggggaggcctggggtaaatgcatatgcaaataagtgctgggaaagtgctcctgggattcacctcccttaaatactttcagaagtcattacaggttatgaaacttagtgttctaatcattacatttatgggaaagagtggaaagcagttcaggtaacatagctgtagttgaacaggctaggggagtggtggctggagaaagaaaagaaatatagttgatccaggttttggaaagttgagatcttgggatgtgctactccaggagagttaggaaaaatacccttttcctcgactatggtacagtacagtaagtattgactctgaaaatgttcgtaagtactggcttccttggatctagagggagtcacattaaaatggctacatttgtatcagagctgtcttttattctttttggcatggtcaagtcatttctaatcagagtagggggaatactggtagatcagacgtcactcaaactcatgagaattatctgtttaacatccacaaagcaagtagcccaacaagcaaggtccccaggagcctactttatcctcaaggaatctgcttagtcaattgacgtattcacagggctggagaggtatgagtggtggttaccttcgtgccagagcagaacatgccttgtagttactgccatattctagccaagttactccatttactgttcctttgttcctaaattaacaaggagaaaagactgtgtgttcaacacatgaccacaatagagaggttatttagagaaagcttaaaatgtacttgtgttttctgtactaggcctagggcaccccagttatgaagccttggcctgagtttctctctagacggtgctgaattgccatctagttacctattctgacaccaggaacatgattcttcaacaaacattgacggaagcttacatgggaccggatcacagcgctgagaagcactggggctaaggggcggcacaaagtctagatatggtggcagcacctgctcataatgaaatgcccacagtttagtggaacacagctgctattactcacctgtctatcattttgtttgggagagccctggtgggagaggagtatggtatttaatatttaattgagcagttatatgtgaaagagcgttttcacgagacttaactcctttcatcctcaaataaccctacaaggcgggtactattctatccctatgttacagataaggaaactgaggcagagaagttgcgtgcttcatcaaggtcacacaaccactccgtggaggcaagttgaacacaggctgtccggcttctgagagccagtggagaggagggagacggtgggagacgggcagggggaaaaggtggaagtagacccgaagggcaggcttgatcttcataagagaaaacagtactaacaccatccactgattgactcgcatatttccatcacttaaagctcctggcgtcactgccaggaatggaaagttaaaaaactcccagctctgtaaggttctgcctggatcctgaaaaaaaccttcccacatgccccgaggaaactcgagggctcgcttctttctcacatccctggcccggggcaccggaggtcccgctccggcggaggaactacaacccccacagcaccgcgcgcgaagctgggcccccctgagggaagggtaaggtgtcccgaaggtgccttcagaaaaaaattacgtacgtttttcgtcgctttcccacgatcacacagatctcaggtccaggaggacgcatcgtctttttagtaacagtgcatgctgtgaggcttgtagagtcgcctctctcttcaggcgcagcagagggcggccgcaatagtacgctcgcgcggcggtggcgggtggtggtccttggaccacgcggtgggcggagccagcggcgacggcctcccctcccctccggacgcaggccggaagtacgtgagaggagacttccggccactgcgttgtagtcggcccggctgcaaagcgtttttctgcaggctgttttcccaggttccctcggcctgtacctcgcgcactcctcttgctccaggtccttcagtctccgctcgtctcaccgtaggctgtgacgacatgagcaacaaagaaggtggcgtccttaacaacacggggcgt

SEQ ID NO: 4181 - DNA, 2300 bp, Homo sapien
ttaaactacacctcttcattttcccctttcccagtccccagcagccatcagtttactttctgtttctaggaatcttactacttagttacttcatataagtggaatcatatagtatttgttacctggcaaaagagttgtacattttacttcctctgagctcctagattctggctacaatttcatacctctagtatttcatgttcattgactgtgtaaatgtaatctgtagatatgcataatttcaatgcaacagagcaactgctgatcctgctagtgatgcaaagattctaggctatgacctcagattgtgtcagcatggcattactccatttccaatctcatgaagactttggtagtattcacaagaaagagttgtccagtaatttaaatttaaaagattgatagaacaatcatcccttcatcatttgctctttgttatcctctctgtggacaacctttacatgtcttagcagccagaacttagaagcagagggaaactatagatgtcatttgtttatttgcaggcagcaggattcatggtgtctaatcttcaccatgacatttaaagtaggcacatttggggatggctgtccaaagtgatggtctccacttgcccctcattcagggttggtttcctgggggctatgcttgtcttgtgttcctatggggtccacttcttcagttacacttgatgacctgagagagggacccccgacctactgagctcactaggatcttgctcctaaagatccagaatcggctccaagagggtcgagctcttcatgtggctggattacaaacaggtaaacttggaagcaactggaagcagatgtgcagaaaaaagtagggatgagcaagacttccagggtccttctggctttccagagctggctctagtgtttccagaagaccagcttccttatgccttcagactccatgaaatgactcttgtttcctcaccaaaatttgttttacttcagttagagtatattggttttggttagttgcaattaagagtgctaattaatacagcattgtgttggaatgagaaagctgtcaaaaaactaaaggaagactgctatagtacccacaccagagatttggagttgggaggtttaccagtgagggatcaattggagaaggagaaccactataagtattgtggaataaggaatgtattacaggaattagacctcacacaattgtgagaaaagctggagaagcagaagtctaaaaagggagatgaaggatctgagaaaggtgtttaaccagccctgtgtgggtgaatgagttggggcttacagaaaatctgggagctatgtatgtacagctgttggaggaggactgtaaaggggctggtatagacatctacagaaggttgatggttctgtgtctacttcctctgtgaatgtgcagacaagcatctcatagggagcctggggctgctattggtccatagagctagtagttgaggaggagacctgggcatggaatagggagagacagggcaaactggaaaccaccagcacctttgcatctgtctctgactgtctccaaccaacagtaaccttagaacaaaatgactactgctcactgccacctcccaaatattattcttttggccaagtgtagctgggatccattcagggaaggtgattctgcaaaacatagttcccagaataatcaaggtgaaaatagaataatcttgcacacaggtctttgataagactaggaatatataatacataacagctaggaaaaaatatataaattttccccaagtgcttataatgaacaaacatatttgggaaccatatccacctagcctagtcaactaaattaaaagctggagtcatcttagatgctttcctctcaattaccctcaacatctagttaccaagtttcatataattttacttcctaagtgtctcttgaatatggccccattttctccctttttctctcactctctctcctctcattttgacacaaggtcttactttgtcatctaggctggagtgcattggcgtgaacatggcttactgcagcctcaacctcccagactcaagtgatcctcctgcctcagccccccaagtagctggaactacaggtgcatgctaccatacccagctaattttttttttgtagagatagggtttcaccatgtcacccatactggtcttgaactcctagactcaagcgttccacttgtgttggcttcccaaagtgctgggattacaggtgtgagccaccgcgctcagccagccatatcttctctatccttgttacaaatgcttatg

SEQ ID NO: 4182 - DNA, 2300 bp, Homo sapien
ttatatttacaagaaaaaaccaaacaaccccattaaaaagtgagcaagggacatgaacagacacttttcaaaagaagacatatatgtggacaacattcatataaaaaaagctcaacatcactgattatcagataaatgcaaatcaaaaccacaatgaaataccacctaacaccggtcagaatgggtattactaaaaagtcaaaaaataacagatgctggagaagttgtggagaaaaaggaacacttttacactgttggtgggagtgtaaattagttcagctattgtggaagacagtgtggtgattcctcaaagacccaaagacagaaatattgtttgacccaacaatcgtatgactgggtatacacccaaaggaatataaataattctattataaagacacatgcacacacatgttcactgcagcactattcacaacggcaaatatatggaatcaatctaaatgcccatcaatgataggctggataaaaaaatatggtacatatataccatagaatactatgcagccataaaaaagaatgagatcatgtcttttgcagggacatggatggagctggaggccattattcttagcaaactaacacaagaacagaaaaccaaacactgcatgttctcacttataagtgggagataaatgatgagaacacatggacgcatagaggggaacagcacacactggtgccttttggagggcggagggtaggagaagggcgaggatcaagaaaaacaactaatgagcactaggcttaatacctgggtgacaaaatactctgtacaacaaacacccatgacacaagtttacctatgtaacaaactgaacttaaaagttaaaaaaaaaaaagaggttcttattatgttgcccaggctgatctcaaacttctggactcaagtgaacttccaccttggcctcccaaagtgcctggccttagatattcatacatttatttatttttagagatgtggtgggggtgtggggggtctctctctgtcacctgggctggagtgcagtggccccatcatagctcactgaagccttgaactcctggactcaagcaatcctcccacctaagcctgccgagtagctgggactacaggagtgcactaccatgccgggcaaacacactgattttaagtacaactgtgtgctttcagtcttaagatcttcagcttttgaaggacctcagccttcctctagttctaactcctctcgttctaaggagatccttcccattcctgcagaacgtctccccaacccttcttcttcacagttctccctcctatccctgaaccattgcaagaggttttgtgccaagcctctggcacatggcacattctatctcatgttgtgatttcgttttctatgcacgtgctctccttctagcctggaggtgagctgcttaagggcaaagagctcatgtgtagcccttccttgtacccattgtcctatagcaggtgctacctagggggtgctccagtagcttccttgaatgaaccaaagagaaggggtgaaggggggagtcagttgcctaggagcttgcatggacttctgtgtcctggaaccagcccggagctgctggaagatgctagaagttggaatcctatctcatttctaaacatctgctcccactcatctctttccagggtcatcagttatccccactcctcccccccgcccccactttgtataaatgagcccctcacatccctccatcttctccatcactgtgtggtcacttcttaaatcatgcgtctggaaggcgccctcctgtaccccatcctggaggcttcctgcacttcccctcttgtttcttccagaaatgagtcagagtgaaagcaaactttctgaggtcctgagatcccggagacaggctgtgagggccgctggccccgcccgctccagcagcgtgtgtgtgtatgtctgtgtgtgtgtgtgtgcgcgcgcgcgcgcgcgtcaggggccaatgctggaaaggaaacagcggactcgctgaggagaagaaaggagccgcccccttcgtcgccagccccctccccacttcccgtccagcgcgctgctcccttccccccgcctctggcctcggggaaggagcaggaggcagcccaggcggagcgggaggagctggcagcggggcgcatgccaggcgggggtcctcagggcgccccagccgccgccggcggcggcggcgtgagccaccgcgcaggtaggggagctgccacagagtcctagcacgtcctgggggggtcctggcaaggagggcgcgctctggcccccaggaagtcg

SEQ ID NO: 4183 - DNA, 2300 bp, Homo sapien
ctgggacacctgcgccgcctgcactctcgttgcggtgcgccccagcctgcgccccctcgggacaggggacgtcccgcccgccttaaccccaagacccagctggatctcgggttccaccccttcggggacctggagggaggaggctgggagcgggaccaggaactggtgcctgtgccttccctaggggctgctctgaaatcagtgtcaccgcccacttcctacttggctacagtaacggggatggcccaagccggagactgctcggtttccaccgcctggagcgcgggtctcgctgtcaactcttagtgatgattgtggatggttgtttttcaacaatgacaggacttctaccttctcactcttaaaatgtgaggttttccaaagacagtgagatttggagttagggagtgctgccttgtgttcttgctgggtgaggacagggctgggtcagtcgcttaacctctcagagcctcagtctcctgaaatgtaaaggagaacactcatagcctggcctccatgtgtcgttaggtttgttgtatgggaaatcaatttgcaaagtgttatcatcaactggacaaatttgaattggacagcactaggaccataggaactggggtttggagacagtctgcctgcatgtcaatcctggacatgcaggagactatgacagtacctgcttcatagggttgttatgcggtttaactgtgatggtggaagtgaagcacctcgcccaatgcctgaaatacccagtgcactctcaaaaaaccttagttgctatttttcctaggcaaaatctaaataattgggagtaatgtgagaataccagtttgatttgattaatgcaggaatagtagggcatttaaaaacacatgtagttctcctgtgctcggcatggtacatgaagtcctctgaggttcagttctgtgccacagagcaaaaagaaccgtggacaagatacccgcttttcgggctctttgactttgagcctgttttctcatctgtttacaaaaaagataaaagaaaaatgggggtagtaattactgccttttgtactgatcgcattgcctgaggattaaatgaggcaaaagatctgaaagcaccttgtggagtatgagtcactatgcacatataagacatgatagtactaggagggaatggtaacatctgcaggtttttagaacttacaatgtgccagacattttattatgaattcctttgatgaaatcctccctgcatctttatgggactgggattacagtcctcatttccctatgacaaagctgaggttcagggtcaccctgcttggttcccaagctcacagagctcttaagtgtaaagccaggattagaaccctggtgtgggtgccactcacaactgtgttcttggccgcttgccaaactgaacttatagagtggagctgtgattcagaacagacctatattagaatttaggtaatttttttttctttaggagacagagtcttgctctgtcacccaggatggagtgcagtggcacaatcatggctcactgtagccttgaactcctgggctcaagagatcctcctgttccagctttttgagtagttgggattacaggcgcatgccaccatgcccagctaatttttttttttagagttggagtcttgctatgttgctcaggctggtctcgacctcctggcttcaatcattcctcccactttggcctcccaaagcgctaggattacaggcatgagccaccaggcccaacctccatcctgcatatctatagacccaaaatgtaagagtgaactgttaatcctggcaaaagaggctttggcataattttaatttccctcagacttattttataaaatatactttaaactatcttcttgtaaaacaaatgatgacaatttgcagaaaagttattaaaacattgaaagaacaggttgcaagatctcatcacaaatctctaagtggtatctggattgttttgttttgtttcaacactcatttgccagaacccttaggatagcacatgaggtgtaaccggaaatcgaggcgttgggtgtcatggttactttgcagggctgggccccgggacttttctgcaggaagttcattgctcacccaagatgcctccagaagaaagcagaaacttccgagaggagcgtgaatgctctgtttctgtgctgcagaaacaattcctagtttatttgtttcctaaattaagtttatcttattggtttttgtttttccaaaagcaatgcatgctcattacaggaagcacagaaagctacaaacaagtaagtgaacactaaa

SEQ ID NO: 4184 - DNA, 2300 bp, Homo sapien
tttttagataaactttctattttagaataattatagatttatcgcaaagctgcaaagacagcacaaagttcctttcacccagcttcctctaacggtaagggcttatataatcatggtgcatgtattaagactcaaaaatgaatattggtgcaatgaactaaactacagatcttattcagatttcaccagtatccttttcctgttccccgatccaatccaggatcccacactgtatgtcacatgcatggtttttgacccttaaacacgaagtgggctggatgtcaaactgctgggtggcctgtttctcctcattactgatgaagaaagtgagacgctggtgccatctgtcaccttccttgtggggcccaggactctcattgtctaatggaaaggggaaatcctatgtagggtagaagatttagaacagaggcatggggacaaattttaaatatagaccatactttttctacttgtagtagtttgtagctaaaaccacattcaagaaatagaaaaagattgggggagagagagtattctgcaaagcaacaacctctctagcatcattaaagtttatgatgcatttgaatcccaagtgtactaggatgttaaataggacttttccttaaaacaaagccttccagtcctgactgcctcctagaatcacctggatagtgtcaagaagcaccaataccggaggcccatccctcgatgttgtaatttcatcagtcttggttgtgatctgaacctcagaatttttaaaagataccaccatgattttttttttttttttttgagacagagtcttgctctgttgcccaggctggagtgcaatggcgtgactgtggctcactgccgccttgccttcccgggatcaagctatcctcctgggcacatctaggatgcatgtaatttgcctgtattctgtgaccaacccttctgtgaacaccccctctgtgaccaacccctcctggaatcccagtgtggtttccttggatggtttctggtcacttttttcgcaagccctcttcttctttcaggatttaccttcttaggcggtctcatttaaccctcctggctttcccacttgcatggcatgtgtttccacctctctgtggcccaggtcctgccttggccctgtcctctcggtccccacctggaagccaccctgggcctattcccatcctgtcttctgcctcttcctccacagctgccacactgtctgtacccaagtcccagtggttctgaacttcttcaagctggctgcactcaacactgcctttcacactgtgcttgctgttctctccaccggcaatgacctcaccctcctttttggcttgggaagcctcagccttccagtttactttcctggcctcctgcagtggagttgctcacagcctggtctgcatctgcttgttgacatgtctgtcttccccagggagccatgagctccattgaggacagggaccatgactttgaaaaattaataattaatttttagagatggggttttgctaacttgcccaggctggagtgcagtggctattcataggaggaatcatagctcattgcagccctgaactcctgggctcaagtgatcctcccagctcagtcttctgagtagctgggactacgggggcatatatgcacccaacttgaaaaagtattatcaaatatttcacggttataaaaactgtatttatatataattatgtgtttaatatataattacacataggttttacatgtgctgtttgaaaataatacaatcagttcctgtgtaaccaccacttaagaaatggaacattacccttgaattactatataattgcatgcattttttcctatgtattgtttgagaataatacagtaggcacctgtgtaaataccagcaggcttaaaaatggaacattaccctcgaggtcccttgcacatcacgtcctgttccctgttaagactggtttatcattcttttgcttttgtttatacttttagcacgtatctatctcttgtgctaaaagactgttacaagcagaacagtcattccagttttagtgattctgggctgagactgtagacaattaaataaaaagccaattcagtgtaggattcatgccttccgactgtgaggctgttgtaaggaagtagcgtttgtgggaatgccacccaggagtcaaatctctagcctttgggtgatcaggaggctgacaggaaaacagcgacagagctttgcctctggtggaactcctggtggcctgcagacctgttggcgtctgtacctgcagtccactcagctttccaga

SEQ ID NO: 4185 - DNA, 2300 bp, Homo sapien
ttagcctcctgagtgaccaggactatggttgcttaccatcatgcccagctaaatatatatatatatatatatatatatatatatatatatatataagagatggggtcttgctatgttgcccagcctggtcttgaactcctagcctcaagtgatccccacgtcagcctcccaaagtgttgggattatggatgtgagccactgcgcctggtttgctgactctttctaaaggccctagatttcatttcatgttatcatcttcttcacctctctcacaaagagaaaaaaaataaggtttgattaggctgccagctgttttgaggatgcatagttaaaggctggtctaagcacatcccaggactggaaacttccatgacaatggccttgaagctcagtattgcctagcaaaaccaccggcaaacccttgagaaggaataaagaaagagatgaaaaataaaggaaaacgatgaaagagggaaagaggagttaaggacagagtggaaaaggggagggaaaatacggactaagagtgaaaactggagacaagataggaaagcagaatctcttctgacctaaaaaggggagaacggagggtttggggcaggtgctaccgagcactctcctttgcccacctgagaatgccagccacatgcatgtgacttcttctcaaaagcagaaacaactgtttatttttttatgcctctgagtgggagtgtccttgaggttttgttttttcttgtcccccagccagctaagcaggagctttaaaacacactcaatgccaaagcacacttattgcaatacaaatggaagattagcagaggaatgctaaggggacagtggcagcttttttctctcccttgcgaatagccaggtttgaagtgctctgctcaccttctacagatagtcttaaccaagctgatgattcaggcttggtggattaaaaagactgtgtcctttcattaagccatacatagtgctccaactgtttcctaaccagggtttccagttcttcagtttgtaatcatttgcaaggacttaaaacttttctttctaaacaaatctaactgtatgggaagatctatcaacaacaggagaggaaaactgctgacttatgggtaacacgacaataacaaatgggccacagggctgtgtgcccaagactcatctttttttttaaagcttgaaaatgaattcctcctgtcttgcacactcaggagggtttactagcagcctaattaattaagagcatctatgtatctgatggggatgctcccatggctggaacaggcgctctctgctcctcctgggtacctcactattccctctattattattattttttaaacacagttccaaaccactttttacagcctccagggtctagctacgggaaaccttccacgaatcagccccagttcttctatgctgcctattctcatctgaagcaaaagaggtacatccgttgcatgctaaacaattactttctttaaatctttctcatttccgatcacatggaatggcagtgtgatagctaaccagacatgtgaataagtcatggaagatttttttaaagcagatttaaataaaatatccctcattatggtgcttaattccatctactgctaagaagacagccatctggagaataccagcaaggtgggtattaaggaggcatgcgcaccccataacgtaacactgaagcagaggtttgacgccaggcctcaagaagactggtgatgctatcaagaaggaatgtaattgtgttgatttatgtgttatttttattctgtattttaaaggcatgaagactggctatcccgaggtgataaatgaggtcttagaaatggcatctttcttttgaagtttgtcccacgaagttgtaccctcctgcggcagaggatgagcagacggtaagctttgccacagcgccctcttgtgttcagagaaccgcaatgacaacatttcctcgtattaagaaactatcatgactttaattacagattaattataccctttcgtcaaggttgaaagaagaatccatacaaagcacgacgactagaaagtcgaagacatgctttcttttctttttttctttttattgtgacatcatgtctcttcaatgccctttcaattaatagtagttgagcgctgggggctgaagtcagactctctgggttcaaatcacagtgctgtgtcctgcaggctgtcctcaggcaagttgctgacttctctgtgtccaggactctgcatcacagtacttatatcctaaggtagtagtgaacattaaatattaaggactt

SEQ ID NO: 4186 - DNA, 2300 bp, Homo sapien
aagaccgccccatctatgtttcgatccaaaacaaacaaacaaacaaacaaacaaagaaaaaaccccaaaaaacaaaaataaacagacattgtctgctggccacacctcaatggacctcctgtctggtcctgtctggtcccacctggaagtggggttggtatgaagtttcagcataatgtcccacagcttggatgctgaccccagaggggaacccacagactcagaatagttatcctgtgtccactccttgggccagcccacattcgccccattacaatagcattaggtgcgaaaacagacacgcaggctctatgggcagggggagcccctcatatatgagacctgcattggcaggttgtgcacctgattggcctgggtgttcctctggagttgggcagatctgagtttatctccagtcttcccactccctggctggctcgtcaaacttattccatttctctgtgctagttgggataattctgcctgctgtaacaaatgaacttcaaaatcttggtagcttggcataatagaagtttactttttatctgcattttcattttaatccaaatgctcctggttggaggacagcttccctctacaccctgatttggggaaccagtctctctggtcttgtggccccaccacccatgagggcctctgcatcctcagcatccagcgaagagatgaggtgagagaaagtggagaaggatgcaaggaaagctgggaagcgtagtccttggacaggcagctgcttgtcagagcaactgagaactctcttctagaaagtggggacaaattctggtggaaagtaacctagctgccacactttgtaggccacagtgtcttcatcagtaaactggggatgatgacaatgaatggggatcctgcaaaaaaggtaagctgctgttgttaattaggatttagaccttgctatcatcatttgctgaagttgaaagcaaggctgcaccttgaaaatggatccagattcctttgggggctgatttctggatcttcagcagaaattcaggtgcacagccttggtctgagcccagagatcagttcacctggctgttctattctcccactgtttcccaccaggatgtgcctcacgcatttgctccacactgaacccccacacttccccttcccagcatcttcatcttttctggcgctgcagcccaaggacctgagccctggcctcggtcatgtatgtgctgctgcaatatccccagccctcctggctttgcctctaactggcctggatacagctctgccctcaggaacagaccctgtaggacacaggcagccagttcattgaggtgtttgaattcagtaggaattcaaatgtgactttttttttgttcttattcactcccttcaactatgccctttcccatcactgaatgacatttggggcagattttataacattccactcactttcagtaactgaaacagccaaggcccatttcaagtatctatttatttcacatccattcgaatgacaaattcccctccctcccccaccctcccacgggccaggctgtagccaggaagccttggtacaaagagcaaaagaggttgctctcctctcctacccacctctctcttccaggtccctccttccttccaatttgcttgggaacaaaggatttgaaaaaggactgttctcccttgtatatctggctgcctccaccctgtctctggccaggacagcttgcctgagggttggggggcaggtgctggccagcttatggagcacacaaggaagatccacgttacctcccccacttccaaacccctctgctcccaccctcggcattgcccccacagcctgttgctcctggggtcctcgctcccacagcagccttctccaaaggcacactggtgagtcagccaaaccagcaacctctgcagcagccacgtggcccacacttggccatgcccatctgtgggagcaccggcggtcccagccatgcctcctttctctgctctgccttttgcctcacatctcctctccacctgctcaaacagcaagtctgtttgagcaacagaccttcatcctgctaaggaaatgcctatctcttctggccagcagcctttccctgggaggagttccctgtttaccctcccttgctggggagaaggcagagcatcgcaggggacttggcctcacaaaggacacagtgagatgagtccttcagggcagggctgccaggaaacagccatagctttgctggaagagggacaggagacaatgacaattgatcgaagcctccagcccctcctgggagagtttg

SEQ ID NO: 4187 - DNA, 2300 bp, Homo sapien
tacagtactgctgggaagattcaataagatagtgaactgaaaacattaacacattgccttgtacatagtggacatggcaaaggtgactctcactccacaaatccaggtgtatgcgaaatagcacatttctttatttgtgaataaattagcctctcagtagtttgtaattccatctcacatactctatttgggacataaagtccctcagggtctttttaaggttctgagcccacatgatgagccaatgcgctgatggtggcccctggtcattaccatctgctcagccaagtaactgctggtggagccattgtccttcccaccctctgctctcaagttcaggttcctttttgaatatagaatcttgggagaagccaggaaccactgtccttatgatcccatttttgccaattctttctttgaggtgtcaccccctggaaggcagaaggtgggcatatcattgttctgtcatccacatgcctcactcctctctagtcttgggaaatctctctctcttttttattaaaatcaggatcaagcacctctctgcctcctgcttcttccaagtcctggttctcttctattgctctgccaatcttgttttctcctctgagcttagcctattgaaaacaagatgaagacatcttgcaagcatagtgagccctccagcctgccacagaccacccatgaagcaataaagcattgagctttcttcctgtttaagtggctggggagggcagaaagaccccagtagtagtgagaggtgaagccggatgggcttctgggtcaggtggggacttgcagaacttttctgtctagctaaaggattgtaaacacatcaatcagtgctctgtaaaaatggaccaatcagcgctctgtaaaatggaccaatcagcaagatgtgggtggggccaaataagggaataaaagctggccacccctggccagctgtggcaacccactcgggtcgacttctgtgctgtggaaggtttgttcttttgctcttcacaataaatcttgctgctgctcactttttgggtctgcactacctttatgagctgtaatactgccaagacctgcggcttcactcctgaagtcagcgagaccacgaacccacccggagaaacaaacaactccggatgtgccacctttaagagctgtaacactcactgtgaaggtctgcggcttcattcctgacgtcagagagaccgtgaacccaccagaaggaagaaacgtcggacacatttgaatatctgaaggaacaaactctagacacaccatctttaagaactgtaacactcaccgcgagggtctgcagcttcatttttaagtcagcgagaccaagaacccacaggaaggaaccaattatggacacagtagtagtacagcagaaagaaaaagagaaaatatctggagaaaccccagaaattaatttctaaatgttatcaagctacataagcattattcagatattagggtttttttttttttaacaccttgctgaaactgtgcttggcctgattagtacttttctcttggcattatattacataccttcagtctttgttttatgttgctataacggaatgcgtgagactgggtaatttataaagaaagaggttcatttggctctagattctggaggctgggaagtgcaagatcagacagctgcatctggtccacttctggtgagggtcttgtatagcatcacaatgtggcagagaggcaaaacaggaagtgtacatgtaaaaaggacaaaacatgaggcatgacctcgctttataaaaaacctgctctctggagaactaacctggtcttgtgagaaagacattaattcttcttactggcctaatcacttcttgaaggcctcacctcccaatgtggttacattgacaattaaattttaacttaagttttggaggggacaaaccacattcgaaccataacactttccttcttaaaacatcattttctttgctatgactcagccatcttctagttacctcctatatccctgggtgctacttctgtttatttcatggaatcttctacaatctgtgtcatagtgtaccttggggttccacattctgctctgggttctcttctcaccctactcatttccctgggaaattgtacctacacctgttattgatattttgatgacttccatatctgttcttcagctctgtggtacattgcaaagcctggccagaaatatttgttgctcctcctgtcaagcggtggagttgatttctccaaccattgagtctggctgcctttgggacttgctttggagaacaaaa

SEQ ID NO: 4188 - DNA, 2300 bp, Homo sapien
gcaggtgccccaggctctgcccagcaacacagagtgtttctaaggcaaggcagtcatacaggactgcactaactagatttgaagttttatcaaaacagtgttttaccggattgctgaaagatatgcttagaaaacagtcagccaagtacatcatatttttagtgtctcattgtgcactgaagaagaaatcagttgtgctctccagaagtttcacatagaccagttatttctcaaaatcatattgtggaagccctactgttaattttgttaataatatcatcttacatttttaaataatatcagcgaatgagcagttctgtctcaggcttctgtgcacccattcatgctgttccctctgcctaaatgtcctttgtgagtttctgagcctggccagcaccctcccaaaggggattgttctctgcacccgctagctcagtacttcctacagtgtcttcgcacttgattggtcatctcagcctgcagaacatataccacatacataccacatgcacacacccccggactggaggtcctgtgcaagccccctgtcctgcttaacttcactactcacggtggcaggcacagagtaaatcctcagagcgtatttatgacacgtcattggataatttctttaaattactagtttagcagagaaagctagtgtttttttataaacacatattttaacacatattctataaacgtatatagaaactagaacagcacattgtaatcgtaattatggatgtaatatttttatccatgcagttattggtaggacctgggatttttccccgcatctttcccaaaacacatacggcctggagctcttgagcaccacctaactcacctcaggatcgaatgttgggcgcttcttggatgcagtcttcgtaaaaactatattgttttgttttccttatgtggcttttgtgcaaaagccctccagcgtcttggtttcttcttgtagctcccatttttatgtcatgccatcccacaaaccaactaaatcttcagtaatgttttaaaagttatgaaatgcttctttttttttttttttacagccactatttgttcatgttgtaactgtagcttgtgcttcaagaactgagaggtacagggaaacctgtcctacctcaggaataaagccatagaggattttagagaaatccttcttaattttgagcatgtttgtgtatgtttcttattctagcaatttcccagtgagctgtcatacagttataagatagcctggcttttgaaatcaagagtcatctcagaggcacacagcaataacattcaggtcattctccagctcgttgctgtgggctgtgaattcctagagtgttatgtttcaggttgtgtggcaaagactgtttgcctccactgacagtgcagccgctgactgtttactgtgtcttcaggaatatttggttgctcagactgtattttcagagtaaacctttttagaatgattccccagttttgtccctgtaaaggagctaaaaacagtaattcagcttgacactcctttgttgtctgtcaatacatttttatatactgataattaagggagacggctgctttatccaaacagctttgtgaaattgctgataataaaacatgcttagcacacgtgtgaattgatgactcgtaaaccccgggctccctcgggtggcttcctctctgttgcctgggtgccatcggggctctggttgtccagccgcgagagcacacaagcgttgcttcgaaagacatatgatcatctctgatgaattattgaaactgtgttttctgacacagattaggaaagggaaaacacagccgtattttaaaagttggctgtgtaattttttcatcctgggctttggggatctgatttgtgtctgaattattcagacatctaactttgtagttgagctcatttcacaaatgtgaaatggcatgggaatttggagcaaacgcagcaaaagtgaactgacttaagacctaagaagtgtttgtatgcgtttgtggctgttgaaactgcttcctaggttttaattcttaccactacaggcactttacaaataggcttaatttccattctgattgttttcaacaggatgtatagtgagatggatgtcatgtccacagcaactcagcatcagacagtggtgggagatgctgttgcagagactcaacatgttctgtctaaagaagattttctgaaattgatgcttcctgacagccccttagtggaggaggggcgaagaaaggttagtgacttagggagctttgaagttaccagaaacactaaaaaa

SEQ ID NO: 4189 - DNA, 2300 bp, Homo sapien
atccattggtaagaccagaaagtcccagaaccacaagcctgttcatgtttaccaaaccacttgtctgactcctggttttctttactcttttggtaatactggaaattggaaattcaactcctctctttttatgtgacagaaaccaaatggcatggcccaccttccaaagtcctgggttcctataaagaaagagctctgcagaaagatggaagttgcaaagattcccccaataagctttctcacgtaagtcctttgttcataagcccttcactggcctagccaggactgatctgtctcagcacacagtggtacagcctgattcctggggatgctcaagagcacattacctcacagggctcttagaggtgaggttaaaaaaggaaactatcttcctgatttataaaggacctcaaagaaaggttgcacagcaaattagtggcaaagccaaaattatatcctcagccttttgatcctcaatatccagtgcagtagttactaaatcatgttcccatttgtaatctgttaaccacttatccatttagtggcacaaaacagaagcagaaactgctaatcggtgtgtgtggtcagaggaactctgcccataggtagccatttactgtacagtcatcgatgatttaatcatcacggccgcagctgcccattacacatgtcagggtagagcaccgcccacgtggtagttctcagtcctttgcatgtgttgccatgtgtaccccttgaagaaaccctgggaggtgagcctcgagggagactgtagcccagtgaaacaaaacttccattgaaatgcagaaacaggaattgttggttattacaaataaagccaacattttaaagtggcttatttttgaaaatgttcaggtgaagataatttataaggtcctgaattaagttatgtctttcttctttcttaatgtgtcatcagccagctttgcagttgtcccttagcaaacacatgtgacatttcttccctcagctgtgaccgcgaccttgtcttgagtcagcctcaccgtatctatttaaatccacctttacaatattctcatattggtttcagcaaagggatacatggtgtgggcgtagttttgagaatatcagtgtatgatgaaaaggtcaaggtgatttgcttaaggatctgataggctggaataaaaaaagataaggccaaaccactttaaaatctactggggcctggctcgttcttatgattccaaagccctttgctgatgcttcagatcttgttgcttttcccagactgtgaagagaggccgtgtctgtatgagtacattgtagagacagggacatttcttctattctatttgctttttgtcttccagagactccccaccccaaccaaaagcattgactctttttcagacctatttactctcaatagactcccatttcttaaaggcttgggacgcactttgactggggctgtctcagagagatacttcgtgtttaccgtgtactttgcagcagccaagtggttctgcatatattatctcatttgcttcacacaggaatcatgtaagctcggtattacaagcacagagagggttaagtgattaaccagaaagtcctacctttgtgactggaacctaagtcttctgccctgaactcaaggctggcactataatttgtcatgaagcattttcttaataagtggcccttctcttccttatattaatttcccatgttccttcccagtttatatcacctttgcttattattttctttgctagtgacactgtggccatagttttgtgcttaatgcacaaataattaaagacttaaagatacccatttaacttagataaattatgggaagaagtatgaattagagacttctgcacaaaaccaggttgtttttgaaaaaggaagtcctgtcattgcccacattgaagagtgagtagaaagggcttgggtgcgatcccatggcttgtagctccctgagtcagggtgagaagcacctgagttcaagattcacttgagaactctctgttcctctttcttctgaagattggggataaaagttgctccagtcactccagcagcaacacgctctccagcaacacctccagcaacagtgacgacaagcactttgggtctggcgacctgatggaccccgaattactggggctgacctacatcaaaggggcctccaccgacagtggcatcgacacggccccctgcatgcctgccaccatcctcggccctgtgcacctggcaggcagcaggtccctgatccacagccgggccgagcagtgggctgatgctgccga

SEQ ID NO: 4190 - DNA, 2300 bp, Homo sapien
aatctgttaaagcttatttatcacccatgttcaatgctcttgattccacatatgcatattagttaaaggttcgatcagttctgtcctagaagtttgctaattagctggaaagacagaatttgtatatcacatgcctaacagcaatatccatcaactagccagaaccaaaaccatgaatattggatcatactgatccatcctggttgtaaatagacaaggcccccatagccaagaatggggctactgcatgcacttgcatggcttgtgtcagaaaggtgccttccttcagtggtgagggaccactgaagttcagccattctctgtcggggcatctgtgcagagcacacaccttttttaaattgtaccatggcttgccatcctttgcactgtgcagcacagtcagcaaatcttatggagaaggcaagatttaagttgagatgtgggtcagactgggagatacgattgccaggaggcggggctggagcagatcagccagctgggggtagatagacaacatgcagagagctgtggcaggccaggttcctctacagggggctgtccaatagaaagattttatctggattttccagtagccatattaaaaggagtaaaaagaaacaggtgaaattatttttagtaatatattttaactttatatctccaaaatactatcatctcaacatctaaaaaatgttaaatgattattaatgagatagtttacattattttttgtattatgtctttgaaatttggagtacatttcacactgacagcatatctcaaatcagatgctaaattttatcctgagtacttgctgtttatatttcgtaaaatgtaaagttgaaaacatagattcatatacccaagttattctaaacacttaaaaaatgaatcagagtatcagtttttaaagtcaaattaatgaaaatgaaatcactgtgttcctccaaacacaagtccatttcaggtgctcagaggactctgggtggctctgtgagccacctctggcgtctgctctgtgggcaatgtgactatggagggactggggcaagccagtgctaggcacatggtgtgcctgaaaggcattaaggagacattgaagttttcaggaagataaatctcatacaaagtttgtaataaggaggaactacagacagagaaagagagagaaaccttagaatccaccaactcccatatgttgaacacagacatggcctagttcttttggtcactaagactggttatgctgcatttaaccaaacactttcttgaagaataaaatatcagacaaaaggaagcttttctctttctatttagtatgattttttctacaagtttattgaggtgttgatgcataatgaactgcatgtatacaaagcatacattttgatgagttttggcccatgtgtgaaatagtcaccacaaacaagataatggacatttccatcatccctaaaaatgacgaatatttgcttagagggtcttatttctacggtccctgggagtggatgtgaggaccagaggcccagtcttggtcctgctgagtaactgtgaacaaggtgtttaatgtctctggactttagatttctaattaccggagatagtacttgttatctccagaaatatatttaaaatatttaacctacaagtcctggaggcctctgctgtgccaggtgttaattttttttagctgtgtattgggggtcttggaacagctgcttcttacgcattggtagttggaacattttaataaccatacggctgtattagcaggtaccagcatagatgatgtgtgtggctgcacggcagccaggaaaaaagccacaaaccgcctttctcatttctagacgcagtcattgctggcagaagaggaattgaatagtgtgggaatgtggttttattataggtgagatgctcctaagggtggatcgctctgcatcattgacttggagccgggagaggcacacaccatgtgatgtgtgttgaggggcccagctgtgagtaagccatgctgacagctcagctgagagcttcccttctcaccatttcttcttggcccaacagagggtgttcagagctctgccggatccctatggtggaatataaactcgacagcgagggcaccccctgcgagtataaaacccccttcaggaggaacaccacgtggcaccgggtgcccactcctgccctgcagcccctctctagagcttcccccatccccggcacgcccgaccggctgccgtgccaacagctgctccagcaggcccaggctgccattcctcgaagcacctccttcgacc

SEQ ID NO: 4191 - DNA, 2300 bp, Homo sapien
taacataccttcccagtgggtaattaacaacagaattgctgttgactgtatgaatgacgagtcctatctgcagtttcacccctgcatgtttatacagcagctatttttgtttaatgtgccagattaaatatattattaatcttagagccacagtttcttaagggagtttttcagaattacacattaatttagaaaggcttttgaaaagttagacttaagaaagattttcatgtatgtgatttttagtgcaaaacccttatattttatccatggtgttcagtagtcatatttctgctcccaattttaacaaagtaagaatcagattttagtttgagcatataaaataaagtagtaagaataaatcaaactacttctagtttttatttttggtaatataagaaaaaaacatgctttgacaatagaatttcttgtgtgtaaatcttcccccaagagggatgtaattttttttttaattagaaaaggtttagttcactatggatcatgagaaaaggagaaattatatccatttcttgccccctttcctcccaccaaaaatatttcctcccttttgttattagagaccatgtataagagaaggtaaaatcagggcagtgtctgctagccttggaaaagtaatttcattatttgtggactctgtttacagtaaagggcctcagtgtgttcaacagtattatcaggtatacgtgagcaagcctagataagagtttggggtgattaagtaaatgattagtttatatacctagagaattgacttgaattatactggtgagtctctggatgcattctgcttttgctaattgcaaatacttctttttagcatatccaccaaatcattataatctgtgcttctgaaaatacaacacaaataccacttcaccaaccacaaaaatgtactttccctggatatttacacatgggcttttatacatttgctattcgatggactccatcctattttcctagaaaagtgtattgtcagtgtgaccaagatgcacaatattacaaatatattttaggaattatattctgtgtctaggatgacttgcaacatgagctgttggaaacaagccagaccaaagactgttgaagggattagatcgtaagggttgatgcagagtggtagtaacagaaatgggaagaaagagaagaatgcagtcttagtggagatgttgggaatgcctgcccgtttggcagatggttaactcagtatccattctcaggtggtggaaagtggaactaaagggtctgtcttgcaggtaacagtacaggagcagaatgagagtttgttcctagagggccaggcagggctcacttcacggatgtgcaacccatgcagttgcacagggacccgctctcagaagagttcgtgcttggttgaatgctctgccattgccatcttgaaatacttactaattttttcataaggagcctcgcattttgatttttcttgtggccccacaaattacatagccagtcctggcttggagactacaattttcgtgtgataattgggtccatggaagaagtccaaatacatggagaacaccttacttcagactttggggatgttaggaagcaataaacagaggggataaagaaatagcaaaaagacaaagtaggggaggtggcaggtgattggaggaaatgagcagaagagccagagctggaggactctggaaaggctcagccaataactcttcagcctgatacatggatgataaacttcacctgataatcgcattgatatttgaaagaaggctgggtacatcttatgtgtcgtcttttgataggattgcttagaacaaagttgaaaaagaagtgaccaaaatttatttgtgttgtgcctattacagaactacttcttcaagttttagttacttcagttcatgactttagaaacgtcaatattctaaaacatcatcactaactaaaaccagcagtcccctttccgcattttgctgagtcgtgaactgtcatgcctgtctgggaaaagctgattggcattgtgtgcacttgtggtaaccatggaaacatcagacacagtggtgatacatgaaccagccccagtcccacagctgtacttactgtcataggtcttattaaataggtatctatgtagtcagagcatgtttcatagaaatggagtgttcattaaactgaaacttcatacattgcctctgggcttttggggataggagtatgatacctcccaacttgaaattcccacagataggtgaggtcatagtcatcgggtgatacttaatgagcccatgtttttc

SEQ ID NO: 4192 - DNA, 2300 bp, Homo sapien
gctagttttcttcatccttcaccaaagcataaggaatattaataactgtaattcggtttgaaaatgttaaaatcccaactagctaaacagcataaaaactctttccagtggactcctaatggctttgagatgagcatgtgggaatgtcttagaatagcagatatttttcttatggtggcagttgctttctccctaccataaaaaaaaaaaaaatttagggatgacaacgtatcgtctactctcagagctgttccataatggaggaaataaaatgatattttaggatatggcaaacagggaaaatgagtagtcagatactgacatgcacaggacagaacagacacactatcccatggttttcagaaagataagataaatgactgcatcttacctaattctcttagaattattgtgtttaaaaggatcaaggatgactggattatagttatttcctacacagtttaggctattatcaaatccattcctggagactgaaaaactgacaactgaggtacaagaaaacagcttcttacccagtatctcactactgcaatgtatttgatgtatcagataccagatccttgaagatctcttcccacttaaaggaggatctgtgtgagttctaatttgactacaagtgatcactatgaaaactctcttgttaatgtcttgtattgaccattttgctgtgggacattttgagtttaactgttttgaaagaaactaaactaataatactgaaacccattatatacatgacttgtgctgctcttgtagccaattcatgcattgaaatacttcatgaatccctagtttaagccaggctaccttaatagttaatgctggtacacagctgaaaggcatggttcttggcttagaggaacttgaagtcagtgagttggtaaacagcaattagagataaggaaaattactctgttggatatagatggagtgctgtgggatcacaacattctttgcttagatgcaattagggtgggagacatcctaggaaagtttcttagatgagttaatacctgattgtatggtgtgaattttatctagctatgtagagaaggaagatggtgttccagggaggagtgttacgaacagtgctgtggatcatgaaactttgtgggcagaagcagaggggaaagacagatacgaaatttatcatagaatgtgttcaacttgaagcatattaattgctaatggctacttcctatctcttaattcaggtgaaggaaatactcatgaccagccagatgtcttaaggaatgcttttgaaaagaacagaggcgtacaacattattacgacaacagagaagcaagttggctttgaagaaactgtattctgaggatgttgtttgctttgggctaagaaaagaaaaaatacaactacagacaaagcctttatatctgcaagtattatggcgtggtcggtagcaatgtaattagatttacatcagtcttcctggtgagacttggaggctcttcctcggtagacatgagtgacccaaggcagtcacaagaagagaagcacaagctaggcagagcctcttcaaagttcaaggatccccctagaatcatgcagtcagatgattattttgctcggaaatttaaagccattaatggcaacatgggacccactacttctttaaatgcctcgaattccaatgagactggcggtggtggtccggctaatggtaccccagctgtgcccaagatgggtgtgagagcaagggtgtctgaatggcctcctaaaaaggactgttccaaggagctaacatgcaaggcactgtgggaaagccggtctcagaccagttatgaaagcatcacttctgtcctgcagaatgggcagagtgaccagagtgaaggtcagcaagatgaacagctcgatctggacttcgtggaggccaagtacacaatcggagacatctttgtccattccccccaaagaggacttcaccccataagacagaggagcaatagtgatgtcactatcagtgacattgatgccgaagatgtcttagaccaaaatgcagtcaaccccaacaccggggctgccctgcacagggagtatggaagtacttcatccatcgacaggcaaggcttatctggtgaaaacttttttgctatgctcagagggtaccgagtagaaaattatgaccacaaagcaatggtcccttttgggttccctgaatttttccgctgtgaccctgcaatctctccgagccttcatgcagcagcacagatttctaggggagaatttgtccgcatctcaggattagattatgtggaca

SEQ ID NO: 4193 - DNA, 2300 bp, Homo sapien
atagctagtcaggttttccaggactaattattatcttattctcgctaatcctagttttaatatttaatagtttctctggtttattttgcacatctattagttggtggcttaaactcagagcttccctgtggagcgtggtgaataggttacaagtgtgaggagatgccggtttgctcttccctctgggtggtgggttgagcccaaggtggtcagtctgttaactgtgcctctagtctgagcatgttcctttttgactcccttgtgctgtacagatactggtatttcaatatatgccatgacacggaaaagaaaggaaggtagggtttgtcctcattatttggatggcatttattttataaataaaaggataaaggagtttcaaagcaacaattaaagtggttctttgcatttcgtggatgcatttgttaatgtcatttctagttggggactggttatgtacaagaatacaactttctagtgcattatgccacaagtgacctgtaaaataaagacccctggaaatagaaaacactgcaatttacccgtatgtttgtagacacttgatctaattactcttctctttaattacaaatatttttctttgaatttattctttctttatttagacacagacattttcaggtgttacatattttccaaactcatgacaggctatattactcattggcagaagaatgaaagaatcactttacctcttctgaacaaaagctataatatagctagttttcttcatccttcaccaaagcataaggaatattaataactgtaattcggtttgaaaatgttaaaatcccaactagctaaacagcataaaaactctttccagtggactcctaatggctttgagatgagcatgtgggaatgtcttagaatagcagatatttttcttatggtggcagttgctttctccctaccataaaaaaaaaaaaaatttagggatgacaacgtatcgtctactctcagagctgttccataatggaggaaataaaatgatattttaggatatggcaaacagggaaaatgagtagtcagatactgacatgcacaggacagaacagacacactatcccatggttttcagaaagataagataaatgactgcatcttacctaattctcttagaattattgtgtttaaaaggatcaaggatgactggattatagttatttcctacacagtttaggctattatcaaatccattcctggagactgaaaaactgacaactgaggtacaagaaaacagcttcttacccagtatctcactactgcaatgtatttgatgtatcagataccagatccttgaagatctcttcccacttaaaggaggatctgtgtgagttctaatttgactacaagtgatcactatgaaaactctcttgttaatgtcttgtattgaccattttgctgtgggacattttgagtttaactgttttgaaagaaactaaactaataatactgaaacccattatatacatgacttgtgctgctcttgtagccaattcatgcattgaaatacttcatgaatccctagtttaagccaggctaccttaatagttaatgctggtacacagctgaaaggcatggttcttggcttagaggaacttgaagtcagtgagttggtaaacagcaattagagataaggaaaattactctgttggatatagatggagtgctgtgggatcacaacattctttgcttagatgcaattagggtgggagacatcctaggaaagtttcttagatgagttaatacctgattgtatggtgtgaattttatctagctatgtagagaaggaagatggtgttccagggaggagtgttacgaacagtgctgtggatcatgaaactttgtgggcagaagcagaggggaaagacagatacgaaatttatcatagaatgtgttcaacttgaagcatattaattgctaatggctacttcctatctcttaattcaggtgaaggaaatactcatgaccagccagatgtcttaaggaatgcttttgaaaagaacagaggcgtacaacattattacgacaacagagaagcaagttggctttgaagaaactgtattctgaggatgttgtttgctttgggctaagaaaagaaaaaatacaactacagacaaagcctttatatctgcaagtattatggcgtggtcggtagcaatgtaattagatttacatcagtcttcctggtgagacttggaggctcttcctcggtagacatgagtgacccaaggcagtcacaagaagagaagcacaagctaggcagagcctcttca

SEQ ID NO: 4194 - DNA, 2300 bp, Homo sapien
cgcagcctcctgagtagctgggattataggcgcgtgccaccacttcctgctaatttttgtatttttagcagagacggggtttccccatgttggccaggctggtctcgaactactgacctcatgatccgcccgcctcggcctcccaaagtgatggggattacaggcgtgagctaccgcacccggccctaacttatattctcacctgcccactttcaaagtttccccttgctttacgaacatgctcaaatctctcccattcctccttagaaacagttcccttcgctagttaacatcaattgctttcattaatttattcatcaaggattttttaaataagtatcatatgtcagccatcttctaactgttgtggatacagtgaataataaaacagatactgttttgattcttatgtaggttatattttagcaagaggattgggagatgtcatacaattaacaagtaaacaaatagaagataataagaaccagtgcttagtgttgtgaaagaggtcagcagatagtgtggttagtaaatttctccagcacagtgaaatttcagctgaatcctgaagaattagaaggggccaattatacaaaaagacagggaaaaacttggctgacatagggaaaaatcaagtgcagaagttctgaagtgagaagaggcctgaaatattccaggaactgaaaaggtaccacactgagtgtgtattcattgagcaaccatttccggagtgcctccagacaccaggctggagatacaattgtgaagaagatgcagcaccttccttcaaggaacaggaaacactagtgggagaggcagatgatggaggactcaatttcaacgtacgttattgctttactgagaggctgcgagggtgcacagaagagctgcataggctcagcagagtcccagagaagacagcatctgtgctgagttcagaaggaccagaaacattatgaggccaatggggaagagactgggcagggaaaataacttaaaataaagcaagagtcggcggggcgtggtggctcacgcctgtaatcccagcactttgggaggccgaggcgggtggatcaccaggtcagggattcaagaccagcctggccaagatggtgaaaccccatctctactaaacatataaaaattagctgggcacggtggcaggcgcctgtaatcccagctactcgggaggctgagacaggagaatcgcttgaatccggggggcggaggttgcagtgagccgagaccgcgccactgcactccagcctgggggaccgagtgagactccgtcaaaagaaagaaaagagaagacaagacaagagaagaaaggaaaggtcacaaaagagtgtgaaatatggggtcgctgcaaatagttgagtgtgactgaaatagggagtatgggggtaaggaaagatgtgaataaaatgctgggcagtcactaagtaccccatgatgagggcgccaaatgccatgctaaagagtttggacatcagacatagggtgagagagcactgaaaaggctgaaaacaggggagtatgtgagtggacttgtattttaataggatcacttaaatgcagagaactgactggaaaggggcaaacctgaaagcaagatgaccagggaatgggcaggtgcagtgatccagccagtgatgaggtggccccatgtattagtccgttttcacgctgctgataaagacacacacgagactgggaagaaaaataggtttagcggactcacagttccatgtggctggggaggcctcacagtcctggtggaaggtgaaaggcacttcttacctggccaggcaagagagaatgagcttgtgcagggcaattcccgttttcaaaaccatcagatctcgtgagacttatgcactatcatgagaacagcaggggagaaaacggtccccgttattcaattacttcccaccaggttcctcccatgacacatgggaattgtgggagttacagttcaagatgagatttgggtggggacacagccaaaccatatcaccccaggagagtggagatcagtcatgagattccacagttgctgtggaagcagaatctatagaacacagcagctcaacaatcaacagggctttgaagtggaaagggagtgggtggtgggggggtgtgtggctttagggtctctggcttaggaagctgagtctccgtagtgccattcatacagatggaatgagggaagaagcagtttcatgggaaagtagtaaatttgattgagtaacaagagcttgggggatccagaagagagctaggtttgcagttcaggagtc

SEQ ID NO: 4195 - DNA, 2300 bp, Homo sapien
agtatatagcaagattctcaaagccaagagaagtatcttgtaatttttttttttttttttagatggagtctcgctttgtcaccaggctggagtgcagtggtgcgatctcggctcactcactgcaacctccaactccctggttcaagcgattctcctgcctcagcctcccaagtacctgggattacaggcatgcaccaccacacccagctgatttttgtatttttagtagagacggggtttcatcatgttggccaggatggcctcgatctcttgacctcgtgttctgcctgcctcggcctcccaaagtgctgggattacaggcgtgagccaccgcatctggtccgagaagtatcttgtatttatatattgcaatgagacttctctctcacgtcttcacactaaagcatcatatccctccagttctgaatttctcttgagcttcacaatgttcttctgagcactgaagcaatataatttaactataatttataaagctgaataaagcggtacatatataatgcccagcagcaggtacctcaagctttacatatctcaaaactcaaagtatttttttccgtcaaatctgtgcctcctcaatattttcaccttcagtagcagaagtttttcacccatgacttttctttcccattcaccaaattttaaaattcctccatcacaaatgcctcttctgccacctctttttaatttccactagtcctgaccatgtgcaggtcataattatctgcctcttagaccactgcagtagtcttctaatagattgctctgaatccaatttctaattagtagaatccatcctttgtattcctccccatgatacatttccaaatattgctatgatgtacttattcaatcaaaaaaatttggacagaatatagtccaaattctttaccatggcattcaaggctctccaaaaactggccttggattcctagctggctagctcattgaggttaggagtatgtttcttaaaatatctggatagagcagcaagttctgtgtgtctctgtagatgtgtgtatatttatgtacacacatttgttttattgatggaatcattaacattactctcatgcatcatgattgcttagctggaaatgttgtcaaataaaaaacagggccagacagtagttgaagtggcaaaaacactgtagtcaggaactactgcaataagagaaaagagacctcaatacagagctgggctcaattccaattacagcatggacaagtggggatttaaagccaagggggcgtcaggtcaagtggatggaaacttactgatagggaacatcacgggtgggagggttctgattaagcaggcctaataggattcttgctgaagccaggccagggtggtcagataccaatgatagaaaatgaagaatttgatcaggtatcgacggtaatcaggtatgaagggttgggggttctctctcaacagccgtagcgagacctttgctacaactcggtgatccagggtccacaggattggaagccaaggtcaaggcctagtcggaaagaaggcttagatgagcctgaccaaagttcagccaaggagagtttttgccagtgtattcacactccgtgtgtgtgtggtgtgtctgtctcagtactactgtaattgatgaggcaggggctccctggccatcccagcagtgtcaccatcttttgggtagaacagcagacacagagatggcccactgtggacagttaactaactggctctgtttagcatgggaaaggaaggagagtcctgattttctttcaatattcctcaggtatattgatctgacccccaagttacataagatctgcagtgataaaaccattacccaaaaaactcactgtcttttaccacttatatcctcagcattatcatcaattgtcttaatacaaggttggtggcaaaaaacggctcacaagtatgcatacaaaggggccaaacacattgagcagcaaaacccccaaagcagacaccgcccgagacccgctggagcgcttccgcaaatctcgcgagatagcaggcagcgatgccttttgctccggtttctcgtgagaccccggggcttcagcttctcgtttgcggagcccgcggcggcgtttcctggggcaacagcaatggcggcctcgctgtccgagcggctcttctcgctggagctgctggtggactgggtgcgtttggaagcccggctgctgccgtcccccgctgccgcagtggagcaggaggaggaagaggaggaaaaggagcagggggaggcctcgtcgccgcgcggtctgtgccc

SEQ ID NO: 4196 - DNA, 2300 bp, Homo sapien
atatgaattttggggggacacaaacatccgtccattggatgttgattagataggaagcaaaagttggattcagtatggtacagtactttaagatcccatttattttaaaatttgtttcaatttatgccatcttcttttgttgttaatctctaagagatataagctatttaattttttgttattgttacctaataacacatacaggaaactgtagaaattaagcatcaaatcaatgaattttctaacaagaagatatccgtggaactaccatccaaataattcattttccatggataaagtacattcaactatggagtctttttttctgttttgtgagacgttgattcaccatatctgaattccatgtatctttgagctacttaaactgatgccagaattccaggcacagcaacaaaacaaaagaacccaacttccggtgagccttgcaaatccaaactgcttttcagtgatggaaaatgctatctgattaacatttaaaacgagtacttttgatacaagagatacatatacttttttccttttttttggaagctcctcctatgaatttactttactatatcaacttttcactgtattcaacatatatggactgcaaaataaatcaaggtggaaggccctacattaacagttgggataataaatagtatactgttataataatagagcattacaaatgttgcagaaatgatggtgatgacagctatattttacaaatccaactttgtttttttagataatcattggactggcatatgtctcaggctaaagggaaaccaagaggtccatgtgtgggcagaaaccaattaagttgagcactcactgaactgctttctcagccaggatggggaacgactgactacaaattaagctgtacacatgttagactgaaagagtttacaggtaaatgtggcccaaggccactgccacgtcattcgttggccggaacacttgcagtggtaaagtgagacggagaagctatttaattctttgcaagaggagatctttatacactttggtgtgaaagtaaagagggaaaactgggcgtcctatgcatggctgaggacgggaagcctgcctacaccagtggttctcaaccctagcgcacttcaggaacttcctggagtttagaaagaagaaaaaagaatacaggtgctcaagactcgctcaagaccaattactcatgttaaacaagatttatgggaggccattgttttggactaacctcctgcactaggtcctagcagactagaccaaaccagaatggagtcacttgtgccaagtgccatgtaaccaaactgaactttgaaacaggcccgttttcccaaaaaacaggagattgtagttaacctgagtcagtacaataacgaagtccaatctgttttaaccctataaggaaagtaactttgaaatacccactctttgttttgttcttcagcctttttttgcccataaagccaacctcctctgcacaactcattggaacactctatttgctttatgaaatgatctatttctcgattctagatcctaaatataagccaattagatctttaaactaaacttgtaattttgtcttctgacactccctattactgcaggtgaaacccaggcatcagagcaagtttaaaactccccagctgattctattctgcaggaatgtttgagaacaaagttggagtcattaacatggcatccccctttgaggaatgcttccaggtcacaaaccttctacaaaagggctgtcccggcagccttgggcaatttcagctcctaggtccggagtcaaggggcagaacttgggtgatggcgctgacttgaagcagcaatagtttaataactgacgttctcacgcacttatctctgcaaataccccacaaaagccctgaacccagaatgaaacttaagagaccgtacaacccgctccgcctataggaactgccgcggcacaggcgccaatgccgagggctgaatgcgcaggcgcggaccggggactcgggagaaggcgcatgcgtggtcttgagggcggtgcttccggtcaaagcaccgcttgggggcggggcctgcgacacgcggtgggcgggtcctgagtcgcgaccctggtccggacctgacctgaattgcgaccccaacctggactgctcccctgaccgcaacccctacccccgcccaccagtatggcccggcacgtgttcctaacggggcccccaggtaaccctgaggggatccccacctccaagaggtcgagggggtgggggcgcgcgggctgcgggcgaccttgt

SEQ ID NO: 4197 - DNA, 2300 bp, Homo sapien
aaaattcgaaatttgagatacctggagagagaagcttattttttgttgaactttatgtcagtacaatgagggaggagaggtactgatatctctgaggtgcagctgtgggactgtgatgttacaaggctattgatacaaggcagagggacagtttcccaagcacattgtgctgttagttaatcatagttgctgtctcattttaatctaattatgcaaatgtgtggtcaatgtgttctaaaaagatgccctgagttgaatctctacttttagtgatttcaattgttttgttttatttaaatattgaacagtttcaacaattaagcaaaggctaattctctcattcaggcctttcctttcaaagtgccagagactgaaaggtgtctttaattagtgtctcaggatgcgtgctgcttcattagagaaaatgaatacagtgcaggtcaaggaggcttcatctgcatagaagattaagcatactgatacattattagactacatggcatgagtcagcccacagaacagtttctttccattaatcataattaagttataaatgctctagttttgattcagctttcaactgtcatgagtggccagcaaagatactcataatttgatagtgttattctgtagatttcttagaggtggattggtgatcttccttatgtaagcgcacttggggcatcttcaccttcttgtaccactccctgccttccgcaccctgattttgccccagttcccatggatacaaagcagggatgcttcggtcagatctgcagtcttcatccctgtcctccccgaatgtctgtctccactcaaatagacgatccaggagggagcattgagttttgctttaggcgtttcctgtttaggacaactatgcctatggctttccagagccataatttcctctcccaaagaaaagctactcctagaataaaagtcatgaacgtgaacattttgcctaggcttctcccaatgcttactccacccacaggaccacagaccaggaagacttcccatgttatccaatcttctctttaaaaaatcttatatccctcatcttgagagatcccatgaaaggagggaaaagagtcagggctcagcagggaggatataggaaatgcactacgcactcctaatttcacccccactcaacacgcacccctggctgtccaccgggaagcaaggtattccatcattccatcttctttgctgcttcctccttcacccttccttggatgtcattatccacccaattaaaatggccaaagttaaacaaacaagcaacagtggacaattccaagtcctggcaaggatgcagaattagagctctcaatcactgctggggaaatgcaaatagggtacagccactttggagaacagcagtcctgctcctaagcatttactcaagagaaatggggagagtcatattcacacaaactcctgttcatgactcttggtagtggttttacccataatcaccaaaactggaaacaacccaagtgtccttcagcagctgaatggataaacaaactgtagcacatgcatacagagggatactactcaaaggtgaaacagaacacactcatatatacaacagatgaatgcattattctaagcgctggttatatgactatgtgcatttttcaagactcatagaatagtacactaaaatggatgaattttaccctacacaaattattcttcaataaacctgaatttttaatttatatatagtttaagaacaaatggtatccatttatatatagtataataacttatatgttatataatatgtcaaatatttatttgtatttaacaaataatactagcaatgattgtttgtattatatattatagcacatatatataaatcgatgctgcttatggcctataaattacacagagagaatattgagggaaaaaattggagggtctcatataatccactaaaatgtgggaagaacacatctttcctcttttatgtatataaagagtctgattttacccttaatcagatgacaactcactgtttcctaggtctggatacacagcaaggagtaggcattcactgatcatatttcttgtctgcctttagggaatgatgacaacaatctcaattccattttttatgaacacttgacaaggaccctccaggagtccctctgtggagacttagttcttggacgttggggcaactacagctctggcgattgctttattttggcttcagatgacctcaatgcctttgttcacctgattgaaattggaaatggtcttgtcacctttcaacttcg

SEQ ID NO: 4198 - DNA, 2300 bp, Homo sapien
tctcaccattcctagcccattcgaatgaattcttttcaagtaagatttctaaatgccaagtctctcttcatatacacacacacacacacacacacacacatatacatatacacacacatatatacccatatatatatatacacatttacacacacagatatatatatacacacacatatatatatattttttcttttttctgagatggagtctctctctgccactcaggctggagtgcagcggcacaatctcggctcactgcaacttctgcctcccgggttccgggttcaagtgaatctcctgcctcagcctccaggatatctgggattacaggcacatgccaccatgcccagctaacttttgtatttttagtagagtcggatttcgccatgttggccaggctggtctccaactcctgacctcaagtgatctgtccaccttggcctcccaaagtgttgggattacaggcatgagccaccgcacccggtctctcttcatatttttaatcaaatgaaagtagttttgtttttgagttaccaagatgatatattcttatatagaaatatgagccatatcaagtagaaagtaaaatagtttctatttgtgtgtgtgtgtttatgatacttcctgagatctgtcatgcagagccccagtgaagctgattggaaacagacaatttgtatgctaatcttggataagagacctggaaggaacaggctgttttgtcagcttgaactttttctcttttgtgagttgttcttgtgcaacccaatgtaaaaactacataactctctttttaactctaggtcattgtagggtaaagtttttttttttactataaattgttgaagaatgtgattccagaggtgtaatggagttgcctggcaccttgcagctttaagctttgaggcttgctgtggagagcatgaagcccacagcagagctggttcatttgctggtaggtgggggcccactgcagcctcccaattactgacagacagagaggagggggcagggaatgagaggggcctagccgagggccctgggcctgaacctgctgtgctctcctcaagttgggaagcagaggagagtcctggctcttgttccagttccaagaggcagggatgaagcatttccccaccgctgaatgtgacctaaggaagtttgtgctctgaccactcacgccagctgctcctcctccccagagagaaaagcacgggctccccagatgggcaagcatgcattcctcattaccccatctcctgccatgaggagtaggaggtggaaagaacctcttccccatcagcagactcagaggatgggcaggacacaaaaaactaaggctcgaaaagatgaagctaataattcaaggtcattcactagtggttggtagagactgaatgcaaacccaggttggtctaacttaaaaccttagcccttaatggaaatagacttcaatctttgtggtacttcctttgttgtaagcactcagaagaaggtaatagattcatagtggctggggtttgggagtcagctgtgtcttatttgcatatattgcccagggatttgtttgtggtttaaagattaaaaagggagagaagaaagcccagaaactagcttcagccacagaagtgaaccctagcttaaaaggagacagacataagggattttttccaactcttcatccttcaccttccacccttactacgctaagatgacttgatgctatgtgacagcccattcattggtctcagtaaattatatatgaagaaatcaattgacttgaacaattgggatgctggcctatattactgtatgtatattattatttatgaactgtgtagaagcaaagctaacagttgctgcctggaaaaaaatggtatatcatgtctagtatcacgagttcttaattagcagcttttgaattaaagggggggaatattacttattattacctgtacttaaagaaaaatactttgatcggtggttgttctaagtggtttttatatttctttcagatgttgcccatttaatgtggttcgaaagactctatgtttggcttcagtgttttgaaaaatacatcttgtacccagcgctaattttgaatgccctcactattgatgcatttttaataagcaatcaccggagacttggtacccagtaagtggttaatggtttatcttcataatgatttgggtcacattttcaaaatcgagtgaattttctgtaaacaatctgcagaagaagccaacctttaccgactgtgattggccatgtaaaaataagccatggtggtcttt

SEQ ID NO: 4199 - DNA, 2300 bp, Homo sapien
gcccactcagtggtatgctaacagaaaatgtttgttcacagggaaaattatgaacagccacaaagacttttttacttctgaaaaaaaaaaggacaaaataatttcagcaatttcaagtgtcattttcctgaagtcctggtaacataacaagcatttggctgctttttccttcacgttcactgcaacctgacagatgagacacatggactccctcttcctcccattccacctccacgacatttattttaaagactagagctttcctcctccaggatgttttggagaggatctagtgcatggacctccttgttgactgctgttcttcctgtattgtttcattaagttccaattctacacccacagccagagcatctccagggatgactttctggtatttcttaccattttatcttcctcatgccatttttcattgtgttccaattctttccatttctttgggttttgttgcactggctaatgtatttcttatacagaatatctctttatccttgatttaccaaatagctcccaatatctggctttgcctttcatatcattccatacctagacttttccctgtggttcttcattctcagagtagtttttgtcacatacacatacagcatttggaaaggcaattaataaatctcattggaccttccctctgccctgatccggaattggcagatatagcatagcacaaaattgttattgctgggttttgaccccaaagtaaagagaagctcttctcagtttgtttgaaattttatggaattttgtggattaaaatttctatgctcatgactatatgttctgtaattaaatttctatttatttcttgtatctctcctttctattgatagaaactgaaaaagaaatgatgtcttatatagttacgtatagcatatcagtatttgtgcctttttgtctgctttggttgagaaataaactgctttcagatgctctacttttttacaatatagttgaaatcttggcacaaaaattatcacaacaaaatcaccacctgtatcaaaacatggctccaacaccaaccacagcccctattattatagatagccatgttcatgacataaaattttactttcacaaagacttggaacagttcctcagtactttgttccatagtgaattttaaccaacttttttttttttttttttttaatactttaagttctgggatccatgtgcagaacatgcaggttcattacataggtataccaactttttttttttttttttttttttgagacggagtcttgctctgtcgcccaggctggagtgcagtggtgcaatctcggctcactgcaagctccgcctcccgggttcacgccattctcctgcctcagcctcccgagtagctgggactacaggcgcccgccaccacgcccagctaatttttgtatttttttttagtaaaggtggggtttcgccatgttggccaggctggtctcaaactcctgacctcaggtgatccgcccacctcggcctcccaaagtgctggaattacaggtgtgagccaccgtgcctgtcctgtcctgtgttttttttatgttcctgtagttttcccagtttcctttctcttgccctcatctcccccatgtccaagtctactctttcaaactgaagatgattctactctgactcaccacccctgaagtctttgctcagtcctggccttgtgtgcgttcctttcatcagtacttctttctcaggatcagctccttgtatccacagacacatttccgtctcagcctccagtttcctccgggtgagaggagtctaagattgcttccatggaggttgcagtgagccgagatcgcgccactgcactccagcctgggcgacagagcgagactccatctcaaaaaaaaaaaaaaaaaaaaaaaagattgcctccagtattcctgggtggggtggtttggaaggggagagagacagcactgcagcaggagccttggcaacacagttccccatgcttatcgtcaattttgtttgttcattttcagtatttttatattgcttccctgctatttccctccttgggctcttcccgcaaatcaacactttctgcacttatcttttggagcaaattgacatgctgttttttggtggttctggtaagtcgtttacattctattcttcctgtaaaggaattcagagttcagataaggactaaatagccttaggcaggagatgagaggctagttaggttttctttgtcctgagcatttaaatgacttcagtttggatcagtctgggtgatgatgggcctgtccaga

SEQ ID NO: 4200 - DNA, 2300 bp, Homo sapien
attaaatatttataatagtttaagataaatataggtataaaaccatacctgcattatgacttcatttttgtaaaaaaaaaaaaaagtgcgtatatctaggaaaaagagactggtgtgatatatatcaaattggctccagtggtaatatcatgatggcaggattaagagtgattcaaagttttttcttttgtatagttttaaattacatacaatgactgtgtactatttttataaacagaaacatttctataaatgtattttttaaggaaaaaaggaaaaaaaccgtccatatgttgacttatgtaatgtacccatttaagagaaaaggagtctaagatatgataaagagatgtgaacaaatgaattcaaagacacttagtgtaaagcaggagagctgtgtcaatatgcctttctgcgattttttatgaggcatgattactggctaaagctatttgttatgatagcactttcttataaatgtgtttctggaaaactgtgaaaacttctatcttgacaggctgtcacatgaaatgcaaacattttcataccaaggaaattcttatggtagtttcacagatgtgctgaaaatgtttatgttcaggactcacagagaagccagcattgctcctctaattacttgaagtttaaggatgaataactttgttatatatgcaaggatgtgatttatatcccacagacactaacacagttttgctttctgagggcttaggcagatcttgatagacttttcgaatggtgtgtcttgaaagaacttgtaggttcaggctcaattctgttctctcaggcacaggctgttgagcttaagagccaatcatttactcagagtaagtcatgggagtacaatggtccttttgatcttaaaagtgactgttggaatgtgtccacagaaaaggaagggctgatcctcagggacatatgcagtccattttgcataatggtataacctgagacccttagtggtttgttgtttaaagaggattcaaaaaatgcaaaaaataaaaacaatcagtacctattgatcttggaattctcattcatcttaaaatgttctcagggcaaggaataggtattgtagctctctgtgtcctacacagtgctaagcatattgttcaaaatcagcaggccgggtgtggtggctcatgcctgtaatcccagtacttcaggaggctgaggtgggaggatcacttgaggacaggagttcaagaccagcctgaacaacatagcgtgcccctatacctacataaaatttaaaaaattagctggatgtagtggcatgtgcctgtcatcccagctgcttgggaggcagagataggagagtcacttgtgcccaagaggttgaagctgcagcgtgctatgactccaccattgcactccagcctccagcctccagccttggcaacagggccagaccctgtctcaaacaaacaaacaaacaaaaacaacccccgcccccagctatacttaacaagtatttgctttatgaaggggacaattctagctttagcttgaaaattcagttttggagagtgagaagaaagactgataagatttataaatggtaaaggggaccttgttctgaaatagccagatttgtttttgtaattttttaaaatctgaagttattcatttatgagatatgaacctttcagacctatgtaacctaaatgggtgatttccagctgggcacatgtatggtcaccgagttatttcaagggagtccctcaacctgtatataaaatagtaggtgtttgtagacacctaaataacatgtctcaaacttatacatacttctgtttttcacatatatgtaggtacttccataattaaaaaaatgaaaaattatttaaaagccttttgcatgcagaggagctgcttagattttctttctattcttgtttcagttttggtaacttatttcccagagttttcacattgatttattttatattaaattaacaagtaaagcaatgtttttcagataactgttcccaggaaaaaaaggaggaaatcctggaaaatgaaaagcccagtggacacagttctaagcaaggaaaaccagatttgcaaagtcaagaccatactagcaccggccccgcatgcactcagcctgccaagaccacagccttgtaaggataagttacttaatttagtttcacttggtcataaagcatgagacagcctcatttactggcttctgcttttaatgctttatcaaggataaggaggaacttctaatcattttttttgaaacttttatatgtgttaagttttcagggcaa

SEQ ID NO: 4201 - DNA, 2300 bp, Homo sapien
ttcattctgagtcatagtatgtaaaatgtacaggtagcatttaaacccatacctggctactaaatccagtgtttcttagcaacactgcagtaaagcaaagaattctgttttttccttagtcaaatcttataaaagataccatcctagttggtggtgttctacagtattttaggggatttggttccaggacccccgtggataacaaaatctgtggatgttgctcacgtctcttatataaaacagcatagtatttgcttgtaacctacacacatcctcctgtatactttaaattatctctaaattatttataatacctaatacaatgtaaatgctatatatatagttgttatactgtattgcttttcatttgttttatttttattgttgtgtttcaagaataatttcacagtgggagtgttattttaaaaaataagtatcaatgcagccgtaaataagaatgagttcatgttctttgcagggtcatggatgaagctggaaaccatcattctcagcaaactaacacaggaacagaaaactaaactcactcataaatgggagttgaataatgagaacacatggacacagggaggggaacatcacacactggggcctgtcagaggtggggggcaaggggagagatagcattaggacaaatacctaatgcatgcagggctgaaaacctagatgacgggttgacaggtgcaccaaaccaccatggtacatgtatacccgtgtaacaaacctgcatgttctgcacatgtaacccagaacttaaagtaaaattaaaaaagtatctaattccattagttgctggtgctgttttagttttgttattattcattaggtcttgctcttgggcattactcattcatttctgatgctaataaagttgccatgtgtcatttcaggtgtcattctattagaagaccatcccatagcaccagtgtcatctacctcacctggtatcaaagtggaaagcttacctgcgtctcaagcacacatgctggaaaccacgaccaagtcagtaatacctgtaaaaccagttgccacagaaactctcatcaatggtaaaggaaaggaaagaggaggcaaggggcagcctcctttgcgccacagatccgagggtggcttagtggataagggacccttgaagaagttgccccacctgtctttgtctcagtatgacttactagaaacagacgtttctttccagccgtgggggagtgagaattcagtcctgattccagaacctgtcagttgtccccggggctccataagggaacgggtacaaagcaagtcacctcaggacagcctgagcagcagctgccctcaatgtgacaccatcgtggccaagcctgtggaggagccagcagacacatcctgtcaggtagatacctcctgccagggggacctgcccttgcaccaggaagtggactcctcagatagtgaggtagctgttactctcatcgatacttctcaacccggagacccactgagtctacatgagcccataaaaattgttatcacgatgagcagtaccccaaactccatgacagatttggaaagctccctccacctgagggtggttggcacagagaagaccagtgtaaagtctgacgctgagcccactaacccaggggcggccggttctccaaatgccgagcagatctcaattcctgtaatcaccctggacctgcctgagggtgggggaggaggtgttccctgtcccgaaggcaatggaagtgaaaggactccagagagactgaagacgagggtatccaccaatcagtgttctggctacggatctggggaggggggaaatgccatcaaggatcacagttcttcatcacgggaaccctgggaatcggtgtcccggcttacacctgatacaggctccgagtctaaggtggggaaggaaggccagactaaccttgacccatcgtcttgtaagtccagccatgaaaagaggcatgcccgggtgctcagtgtggacagtgggacagatgtcttcttgagtaaaagttctgcagaaattgttaacgatacagagaaaacaatgccaacttccaaatctgacctagaggctaaggaaggacaaatgccaaatgagtccaacttcctggaatttgtctccctgttagaatccattaatacttccaagatgacggcatccagtcaactgaatggctcagctgagcagaatgaagaaagtgggcttctccgaggtgcgattccatgtcatttccgttctgatgatgacatagaaggcaatacacctttttgccatttgccttgtgtaa

SEQ ID NO: 4202 - DNA, 2300 bp, Homo sapien
actgtattgtctctcccctacatgccatttagaaaatcagtgactgctgtcagttattgccgactgtctggaaatggacggtcagctgagtcatctattgatttttgtttctttcatttgtgtaggagttgtcagcacaggaaactgtagaagatctcaaaggtaaactgttaatcatttatattttatcacagcactatcctcagtgaagtgagaaatatttttataaaacagaatgccagtggattaattgaaaataagaactatacctaagactgcatagttatattttgactttgtttctttaactcttaattttaattttttctcatcggtatttgtatatcaagtcttaattcaaattgtgatattttgttgatcataattcattgtcatttctccagtctatgcctcatttcatatggcttataaagagcagacatataagttttttattgatgataaattatcatccatataaaaatttgtattatagcatatacatcaaaaaatgacaggataaattgtacagcattctgcatatctgcctttctttcaagttacagattttgttttgggggatctttcttttaacttaaacaatttttgttttacatttttactaacttttttttttttgtcttttgactacctgcagaaggcttagaaaagatcttttggaggcctgaattaattccttcctttctctgcaattctattttcttttccactactacaaagacaaattttgtgcactatttcaattttgaaaataatgtaaagtttaattcgctctagaaaatagctgaaattagcaccatagccctgaacccctaaaatgaagtttcttttttcatcattcagttgtatcccattataacaatatgtaaaggattatccatattttttctatattattgctactgaaataaattcacatgagttagacttctaatattttagttgcacgtacagcttcataacaacgttactttatgtgttttatatacacatatacaagcacatacctttttcttcatatgaaacatattcttccagattaggtgtgctataataatcttacatactttgaatatctggtctggccttttaatttcaccattccaattaaaacaataattttctattttttacttgtactaagaattgcagtagaagttttacatacattatttcattctgagtcatagtatgtaaaatgtacaggtagcatttaaacccatacctggctactaaatccagtgtttcttagcaacactgcagtaaagcaaagaattctgttttttccttagtcaaatcttataaaagataccatcctagttggtggtgttctacagtattttaggggatttggttccaggacccccgtggataacaaaatctgtggatgttgctcacgtctcttatataaaacagcatagtatttgcttgtaacctacacacatcctcctgtatactttaaattatctctaaattatttataatacctaatacaatgtaaatgctatatatatagttgttatactgtattgcttttcatttgttttatttttattgttgtgtttcaagaataatttcacagtgggagtgttattttaaaaaataagtatcaatgcagccgtaaataagaatgagttcatgttctttgcagggtcatggatgaagctggaaaccatcattctcagcaaactaacacaggaacagaaaactaaactcactcataaatgggagttgaataatgagaacacatggacacagggaggggaacatcacacactggggcctgtcagaggtggggggcaaggggagagatagcattaggacaaatacctaatgcatgcagggctgaaaacctagatgacgggttgacaggtgcaccaaaccaccatggtacatgtatacccgtgtaacaaacctgcatgttctgcacatgtaacccagaacttaaagtaaaattaaaaaagtatctaattccattagttgctggtgctgttttagttttgttattattcattaggtcttgctcttgggcattactcattcatttctgatgctaataaagttgccatgtgtcatttcaggtgtcattctattagaagaccatcccatagcaccagtgtcatctacctcacctggtatcaaagtggaaagcttacctgcgtctcaagcacacatgctggaaaccacgaccaagtcagtaatacctgtaaaaccagttgccacagaaactctcatcaatggtaaaggaaaggaaagaggaggcaaggggcagcctcctt

SEQ ID NO: 4203 - DNA, 2300 bp, Homo sapien
ctcaacattttgtcccttcctgctggttcaggtgttcagcatttgcccctgtactatcgatcatgtcacatgcatgcttcagccttccagttcttgtccattgcctaggataagatctgaagaactttgtatggcccaggagactgacctttgcttatctcattaagtttcctactgttccgtttctcccattcccagccctaccttccagacatgttagactatcctgacattttccccaaattgccatgctcctctttccacatatacatgtgcctggagaactattcccacttacatgccttgagagctaatatttagctttaagacccagttccctggtgcttattgacaccacccctccctcacagacttacacatgtcttctgcactccacagtgccccagtgcttccatatatctggatatgtgtccatttctacaatatgataacaggcagcacattttattgcaagtctttgattttcctgcctcctcttgtggtttattaactccttcatggtagggactatatttgacttacatttgctttcttagtcttctgcaaaatgcttgacacccagaaggtgttgagtaaatatttgatgaatcaggacaagtgaacaaggacacaacctccatgtgggaacagactgttgcatgacctttcctcctatacccatgcacgtgacggcgctcctttaatgtggagttgattggttgattaacccattaaacacttatacagcacctggtaggttacaagcattttgagcagatatacaaaaaagcccatttgtttacaagctgtgtctttaagaaaattactcttccagtacagaaagcagccatattccattttgatgattcattcctactgatgaatgtaaagtagaaggaagagtggttatagctgatggcagacacaccatagtgaggcttttgctgtaactcagtggcctttcatgtcctgggccctctcctcatgatgggcctgtccttatcttcgtttcagcctgggaaggctggtgtgcctttactgggcctgactagggcagccataagtaagtgctgctgcagaccagaacatggccaggacacaggcaggcacacaagtcagaggagtgtgatgtgttgggacagaccaggtaaggatgatgcagggaaggcgtgttgggaatcatggagccctctaatctttgtctctccctaaggctctagctcacacagggcttctgctcctcatcccaaaggaagacaagctcctttttatctcttccctttccaaaacccactctcaaaagagaatctaaactgtatccactgtaaatgataaaatatataatagcttaaagattattaattttttgtccagtgggtcttcctgtctaaacagcatagagagatttagactaatgttctatatagccagttaaatacctgggattatgttctaggaaagagataaaaaactaaggctaactgaagctcctaaaattttatcaggaaggtggttatcttctttctccaccaagttggacaacagggagtggaggagaaacagtcagggaggacagaagatcagtggcagaggaccaggtagagcttagattaatagaacgtctggggtcagcccttaattaaggagaatgaagtcgtgcaggaagtgctcaggagaagaaattactttgagtgctgtgtgacaggaccttgtatgaggtaaatacttgggtgcaaaaaaggacaaggacaaggaacgtgtcctgggtctgtgccttctgcatgagaacacccttgcacgtcccctaacaggaggatcagagagaaggggaagggaagaggggagaggcaaaaaaaaaaaagaaagaaagaaagaaaaaaagagcgagaaagaaagagagagagagagagaaaggaaggaaggaaggaagaaagagagagagagggagggaggaggaaggaaaaagagagagagaaagaaagagagaaaaagagaaagagagaaagaaaaggctggaggcactcacagaaatccttctggcccccagcgaaggctaaggagggactgggcgggcgttgggaggagcctcggaagcaacctctgagcagccgcctctgagcacgatgggaaaatccttcctccctcggacatggcgctcacctgcccggccgcagcagccggctccggcgccgcggttcgcgggtccgggcggaagagcagctccagcttcaaacgtggggtggaaggaggcggcgggggcgacggcggcggcgacggcgggggcgcggcccgcgggcccg

SEQ ID NO: 4204 - DNA, 2300 bp, Homo sapien
gatcaaacttgaacagatgaggagcggagttgcttcttatggagaggcaaaaaaagtagtttcttgagatggaatctactcccagaggagatgctatgaacattttgaaacgacaaaaaggattttgaatatcacaaactcggttggtaaaatagcagcagggtgggagaaggatcactccaattttgaaagtagttctattgttgttaaaatggtatcaaacagcttcccatgctacagagaagtctttcgtgaaaggtaaagtcaatccatgtgacaaacttcatagttgccttaagaatttgccatagccactccaacttttagcaaccactgccttgatcagtcagcagctatcaacatagaggcaagacctctgccagctaaaagattatgacttgctgaaggttcagatgatcattagcacattttacctataaagtacttaaaattaaggtataaacattctttagacacaatgctattgcacactttatacgctacagtatactggaaacataacttgtatatatatgcactgggaaatcaaaaaattcatgtcacttgctttattgcagtgatctggaaccatgcttgcagtatctccaaagtatgcccatactttaaatagttagattacttataatacctaatataatgtaaatgctctgtaaatagttgttatgctgtattttatttgtattatttgtattgttattttttgggtttttaaaaaacatttttgaccagctgttggttgattctgtggatgcagaagacccactgtaaaactattaactcatttagtcttcctaaaaaccctataaagtaggtactatttattatattcccattttatagatgagaaaactgagtcatagagaaataaagaaacttgctcaaggtcacacagccaataaatagtttgatctgagagacaaagaaaactgaaaagacaataaatttatctttatgtaactcagaatgttactgtatgtcctatcctcataatatctaaaattgtcccttctgttattggaagtacaggatccacacgttaggaaattctggcctactacaggataatctaatattttagaattttaataactaagctcttctatctttttagcctcatcacctgccacagtaacctaccaacgtctggcacccagccattgccaatgcttcctaaacccaaacctgtgggtttccagggagactggggcattttccatctgagtagacagtaaaaataagcaaaggatttaccatcatggagcttctgggactataccgaccacgggtcactctgcgctgcgatctgtaacctagtcagttctgagatgcacggtggctcaaacgcacttagcatggtgacttgccactcgcactggcccaggtctggcaccgcgctacaatttcttctgtagcccgttctgagattctgtcactctccctgaactgcaactctctctctccccgccacaccctaaagccccacatcttctcaaccctctcccaccgcttcttggagaagcgtcccctccctcagtcttacctttggcttaatttaaactctcccgaaaatttatagcggatgacggccgatcccgcctcccagaccatgtgggcgcggctcaccattgctccggagcacctgcggcgggggcggggtgggaccagccaggcgggcccagggggcgggcccggcccaaggtggtgggggacgggcccgggcgccaggggcgggacgaggctctggggactggcacagaaaagggaagtgaacctggcgagggcggggcgggatggtgcagttggtggggaagggtggggcgaacctaggaaggcggtcccatagggcgggcgcagactgggcgcccgggacgggtcaaggagggcggaatgaacctggagagggcggggcggctgggggaggggcgggaaggccctggggactggcctaggggcgggcccgggggggtgggggggcggtgcggaatggagccggagggggcggggcggccctggcgcggctagggtggggtggggcgtcccaggctctggctaaggagcgcgcggcgggcgggccggccgcagggcctgggcacgaccatggtgggacgtcgcccgcggcttcggggaccgctgcggcagcagaggcggctggccaggaacgcgggccgaggctggaccctttgggcagctagcccgtgatctctgccgtcaccgatcgcgattcctaccccctcgccttcccccggcgccgacggccacaccgccggacgatgcgcgcc

SEQ ID NO: 4205 - DNA, 2300 bp, Homo sapien
agaggaactcacatcctgttggggaatcacaggtttcatgagtgagccaggtcctgaaggatataaactgtgttacagatggagatggaggaggaactgtccaagcagaaggaatcaggtgagcagagacatagggagaaaaatgatcatgacaggcaggaggagaattctgagggtctgctacggccgggggtagcctcatgaatgaagaggtctctgaacagggcaaataggcaaagatcaaggataggatagggcaagcaagggttacagagcaggacagggaaggacattgtaggatggagacttgagggagaaggaggaattcaagttctaaaagagtagggcacttgctgatggggaagggttcccagaggcggaaggactgagagtggtaagtgcttcctttcaccttgaaaataaggaggtacattttttccttaggggtaagagcaaagggaagaaatggattaccgatgagtaaattttgaagtacagagaagtaaagtggagggctggcttcaatcttttgagtaacgtaggaggtaaggctattgactaaaagtgaaaaatcactgatatatatgttagacatttgcacaagtttctatgaaaatacaaaatatgacttgtttagagaacttcagtaaagtaggcaaatgttcagctaggtgttggaatgattaattgtacaattcagttttgtgtattttaaatgtttttcctgattacaaaaataatatatatccactgtagaaaatttgaaaaatattaaaaggtacaagaaaggaaagtcatctatatactctactattacccaaagacaactgcaaggagatagttttattcctatgcagttgattaataatgcagatgtcattttattttgtaacaaaatacaaatattttacatatttgagattctacacagttttgcttcaatagtctttagacacaactttaatgtgtttaatgtctatatggtgtccatgctgtagagatgccataacttatttaaccattctctattttggaatatttagattgttctgagtcttcattatttcatctataccgtgtgtgtgtgtgtgtgtgtgtgtgtgtcccacatgtgtatgcactatattatacaactacatgtatgtatatatagataccgtctatgaccagtctttgtaagtaagtgcctctctgattgttttttcttaggacatatcactgaatcagaacaaataaaccctttcaaggttcttgagacgtgtcgctaaattgcctttccagaaagggtgtaccaatttttattttcatccacaagcaggcggctcgctgaccctcgcccacatttttgtcactttaaaaagaagtgacagttgggaaagctcagtttcttctggcagttgacacatttgggatgttttttcaccaaaaaacctaaggtcatgttttagaaaattcgaactcagaaataggacttctctgagactctccttttccctcaagtcctttttgtgagggggatgggtgggagagaggagactgattcaaggagccttccaactctgatgttctggtattttcaccgtcattactggcaccagattgctcaatccttcgaccaataagacaaagaaggaaagtacttcagcgcttgctgttttgtaatactggctttgattgggagaaaataagtgggaaacaagagtagcttggacagggggcttggacggccagcgcattgaccagaagcggcccacactacacgcgcgcgaacacacacacacacacacgcacacgccgcgcgcggtcagctagagtttggctactggacccaggaagggagggagcgggaggagctggtggctgtcgggtcggggtctgggcgccaccgagcgcccgccccacctctggagtgcgcagaaggcggtgcgtcccgggccccggcagcccagcccaggcgctctggccaagtttgcgcgcggtctccgctgactctcgggttacctgagccggcaaccacgtcagcgccacatcatctgggctttttatattgcaaggaaacaggaaaagaaggaagaaaaacatcgcccgagagagccaatcgcaggaagacggcgctgcccggaggagcggggcgggcgggcgcgcgggggagcgggcggcgggcgggagccaggcccgggcgggggcgggggcggcggggccagaagaggcggcgggccgcgctccggccggtctgcggcgttggccttggcggcggcggtggagaagatgctgcagtccctggccggcagctcgtgcgt

SEQ ID NO: 4206 - DNA, 2300 bp, Homo sapien
aaagcgcccacatcgctacctacctgccacccagtgctctgacacgagccatctcagaaaaacagtctgtcgcccacgggccagctccagcagatgcacctcgcagtgggagggtgggcgggtgcggatgagctgagccgtttcgcacccccagacagcagggaagagcactgttgtgtggatccacaatctgtcatccactgctactcccatctcaccctcccctccactgcagagcagctgatgtttgaaaatccaaccaaccaagatggaataaggaaaaaaaactaaaattttaagaaagttggggagcacaaaaaagcaaatttctgttagtagttgatgggatgtgacctaaagcaatatttgctctttcagcaactctggtggaacaccagagttatttgtaatctgaatgaggctaaaaggatatgtttggcacctgaacttgcctgtctagattctctgtttcgcttcactcagaactatgttttgtgcgttgacttgtgttagtcatctctacccagatgtctgggctgtgtctcattgacccagtggcagtggagtatgtgtgccctcagaatttcttctgcctgtcttcagtgtcccagtctctacacaagctcagctaagggtggtgccatctcacgggagcattccctcataaccatcactggcttggggaatggagctggcaaatcaaattgtcatcggtgatatcaggctgaatgaatactattgaaaagtccaacctcgaagatggaaacagtaggtattggagaatccagaagagggaaggatggaaggagggccagggtccagaaactacccattggatactatgttcactatttgagtgatgagttcatgagaagcccaagcctcaccattatgcaacatacccaagtaacacacctgcacacgtacccccgaacctaaagtacaaaagaattgtaacaatttaaaaagtcggccggatgtggtggctcacgcctggaatcccagtactttgggaggccgaggtgggcagatcacctgagctcaggagttcgagaccagtctggccaacatggtgaaaccctcatctctactaaaattcaaaaattagccaggcgtggtggtgggtgcctgtaatcccagctacttgggaggctgaggtggagaattgcttgaacttgggaggcagagtttgcagtgaactgagattgtaccactgcactccaagcctgggcaacagagcaagactctgtctcaaataataataataataataataaattttaaaagcccaacctaatgtagtgaaaagtgagaatcatgaattatttttagggaaaatgtttatgttcagagatactgaatgaccttacatagactgaagtgaatgtgcggattggaagtgtgaaagcgttgaactggggattggtggcctgggttctcttcagacaagaattcattgtggatttctctagatttcggttgcttcagctatacaatgaaaaggctaagtaagacccccttctaactctaacattttataatcctaggtctttggaatatttactgagtacatcccaacatgtggggatgcattaaaaaatactgtaaagggataatcactgaaatataaaagcccacagccagctggggagactcgactgaaacatcaaagtcccagaaagctgcatagggtgtagagacctaactgttgaattgtatgggaccccatggtaattgggtaattgggtaagtgggtaacatctgtaggactttgatagggagatggctgaagtggtcagggaagctttatggagtaggcgcactgagataaacaggcagtatggtaaggttaggtagagtgggccggggaagagggttgttaaggaaagggacatatactcagcacacccatccagaagtggaaggcagccttgccttagagagaccgtgagggtgccagcctctcagagccaaagctccctgctggcacacagcagcaggcgacaggcactgaaggtggaggtgagacgtgggaagcagatctggcacttgagtcagtagaaaatggggagcctctgtgggctcctggtcctgcaccgtgataaatagcctgtcctgcaacctggcttaaaacagggaaagccggagttaggcaacagagtgcctagctttctcagtcattcaaacacaagcacggaagaagagattgcactgaccagaggaccgccagggtgtgatgctccgtagtcgcagggatgaaggaaaaccatgggcggagcttgtcatggacagctcctagg

SEQ ID NO: 4207 - DNA, 2300 bp, Homo sapien
gcaacttgtcctccttccaccatgattgtaagtttcctgaggtctcctcagaagccaagcagataccagtgtcatgcttcctgtacagcctgcagaactgtgagctaattaaacctcttttctttataaattacccagtctcaagtatttatttatagcaatgcaagagcagactaatacaggctccctatgcctactgtcttctgctcagcacagaaatgtgcagggctgctctcatgttctccacagcctgctgatgttaggctggtgtagctcttgcactgcaataaaaacaagagggccatccacctctcagagtagcatcagagagagaagatgtttgtagacaaagctctccctacccagtttgatgtccctgaggacttcctccagtgagaaatgaatgtctacattcatttctcaggtcttctttaaccagcctgctgtgtgtgtgtgtgtgtctgtgtgtgtgtgtgtgtgtgtctgtgtgtgtgtatgatctccaagggtgagatccagagaaaaacagcaaacttcagactcccatcatttccaaaacaataaaaacactaagaaagtggaataataatactaataaataaaagtttcagaaaatgaaagtcttctaagttattaaaatgaacaaaatttaaaataaacatttcacataaagaaaacctaaaaataaaggcaaaaaaggcaaaacgacctaagcagaatagataaacaaatgatatcatgaatacaatactaagagacacaatccatgaaagaaagaattgataatttggatttcattaaaatgtaaaatgtttttcacttgacagtgaaaaacactgtcaagacaatgagaagacaagccacagacttggagaaaatatatctgatcaggaactgttttacaaaatatacaaagaactgttaaaactcaagaataaaaataaaacaagctgatttgataagaccttaacagatacctctctaaaaagatatatagattgcaaataagctataaaaagatacttcatatcatatgtcatcagggaaatgaaaatgaaaacaatgaggcaccactacacatgtattagaaaagtcaaaacccagaacatggacatcaccaaatgctggcgagaatatatggagtaacaggaactctcattccttgctggtggagatgcaaagtggtatagccacttctgaagacagtttggcagtttcttagacatctaaacatactcttaccatatgatccagcaatcatacttcttggtgttcacccaaagaaaagatgtgaaaacttatgcccacataaaatcttgcacatggttgtttatagcagctttatccataagtgccaaaaagtggaagcaaccaaaatgttcttcagtaggtgaacagataaactgtggtacgtggaacaatggaatattatttgatgttaaaaaagaaatgagctataatccatgaaaagacatgggtgaaatgtaaagatacattactaaatgaaagaagccaattactaaatgaaagaggccatatattataagatcccaaatatatgacattctggaaaaggtaaaactacagagacagtaaaaggatcagtggtttttcaaggattagaggggagagaaggatgactaggtggagtccggatgattttttagagcattgaaactactctgtataatactatagctgtggattcctatttatatgatttggatgtttttcccctccaaatctcatgttgaaatttgatccccagtgttggaggtggggtctggtgggaggtgtttgggtcatgaggattcctcatgaatgatttggtgccctccccatggtaatgagttcttgctctattagttcacacaagagttggttgtttaaaggaacctggcacctcctcctccctcttttgctcccttctctcttgctctctcttgccatgtgacacaccagctcccactttgccttctgccatgagtaaaatcttcctgaggtcctgaccagaagcagaggatggtgctgtgcttcttgtacagcctgaaaacagtgagccaaatagacctcttttctttataaattaccagtctcagatattcctttacagcaatgcaaaatggactaacaaacctatcattacacatttttcaaaaccaatagaatatacaccaagagtgagccccaatgtaaactataaactttgggtgatgatgcatcaatgtagattcagcaattgcaacaaatgtaccattctggtgggggaggttgataatagggtagattatgcatatgtg

SEQ ID NO: 4208 - DNA, 2300 bp, Homo sapien
atctattttgagttaatttttgtgaaaggtgtaaggtctgtatctatgtatccagcttcttttctttttttctctctttctttcttttttttttttgtgattggatgtctagttgttctagcaccatttgttgaaaaggtgatcttttctccattagatttcttttgctcctttgtcaaagatcacttgactctatgtgtgggtctatcttggcctctctattctgttccattaatctatttgtctgctctttcaccaataccacactgtcttgattactgtaactatagtaagtcttgaagttgggcaatatcagtcctcagactttgttcttctcctttaatattgtgttggctattatgggtcttttgccttttcatataaacttgagaatcagtttgtgatattcacaaaataacctcctgggattctgattggaattactttgaatctatagatgaagttgggaagaactgacatcttaacaatattaaatttttccatccatgaacataaaatatctctctatttatttagttctttgatttctttcatcacagttttgtagtttttctcatatagatattgtacatatttattagatttgtacctaaatatttcatttgagtggtgtgctaatataaatagtattgtggttttaatttcaaattcccattgttcgttgctagtatatagaaaagcagttgacttttgtacattaattttgtatccttcaatcttaccataattgcttattagtaacaggagagtttttttgtcaattgaaatttttctacatcaacagtcatgtcagctgcaaagacagttttcttttaccttttccttcacaatacgtatacttttaatttccttttcttgtctaatttcattagctgggactttcagtatgatgctgaaaaggattgctgagtagagacatacttgccctgttccttattttaacaggaaagcttctagtttctcaccattaagcatggtgttagctgtacgcttttgtaaatgttctttttcaagttgagaaagttcccctctattcatagtttgctgctatacaatatgattttaatataaaaaaagcagtacataaagtagtgtgtacaatttcattccgatttttgtgacaactgtattttgcgttggaaaaaagcctggaagagaatacgttcataattgaaagtcgtcatttttggctggataatggatattttcttctccacatacttctatcttttctaaatttgccccgatgaaaaataatattaggaaaggtgattaggtagtctgaagagaatgcctttcggccgtcgggggcagtggggtggtaaggaaaaagatgagaagcttttaaaatggaaatctatgaagagagaactgatttcgtaattgcatcatcagtgggaaagtaagctctctgaggaccaggtctgactgagagatccccacagcgtaatagataatacattttgtgtctcagcgttgcctatgaaacgccatttattcacttggcatgctgagcatggaaccaggtttctttctttccaagtagttttgctaatttagagaaagagagagacagacatatacatagagagagagagagagagagagagagagagagagagagagagtgtgagagagagagagaaaagtactgaactgggagcggcagggtttgagtcaaaagagaagggtggaggagcgcgtccggtgccccaaggcttccaggcggagcgcgggcgcgaggtgcgggctccggggcggagcgcacgcccgggaggcgggaagtgggcagcagcgcccccgcctggcccctgtgcgccccgacccgacgcctccccgcccgaccaggtgcctcgagagcgcacagctgggagggctctcccggtcgcggcgagactcacgcctgcggtgtgctagggcggcggcgacggtgacgggcgtggggcgcggcgctgcctcggctgccgggtcgttgcggcgagcgcgcgggccggcctggagtcaccgggctgaaccgccgcgcctgcatcgtgccgcacgccgcggaggcgctcgggtacagaccgcgcgggcgcgcacaaagcggcccggggcggccggcgcggcgcagaccctcggtgggcagcgcactccagtcttcccaggctagcggctgcagggagctccggcccgcggcccctccgcctcaagtctgggagctgccggtcccactctgtctttgcctatggggattcgagagtttcccagcggcgcacccaggggcaagagcattgccgtgt

SEQ ID NO: 4209 - DNA, 2300 bp, Homo sapien
tcttcccagtctcaggtatgtctttatcagcagggtgaaaacagactagtacaacttgtcattgtgacttgcctagtagaacacgtgtgtagaggccaatgtgaagtgctggaggacatccacatcagcacaagtataaaccagtttccccaggagtgtacagatgctcaggcacggtgaagtcatgtatcatatatcaaaaccacattcaaacttgacacgtatctctcagctgacttggaatagctatgaggaatttttgcattttatctctccaacatgtaagagaataacgtactggttataagttcaggcttttgaatagttcacacttggatttaaatccccgcttggccagttactcagtctgtgacctgcgacattatcctctcagcctcagtttccccatctatgaaacgagataacaacaatcttacagagcttttgagagtaggaaatgaaattatttatgtaaaacagttaacataaataatacatagcatgtgcttaaaaacgtgtgcaattattatgtgatatttgttttagttactatatataataaattttattgatgaacttgatgaaacacatagaagtattattttgtagtaaaaagatcctctttaatatacaacatgtaattcttttgctgtaagcttattccaaagaaggaagtggcttattggcttattgtagtgtcatcactaggagtcttggaacgtttcctgtaagaggcgtataatgtggaggggtaccactagagggctctgcagggaccctatataccttttccttggctgtagtggtgaggaagcaaccctgagaagccctggccttttggagatcagagccattccattcattacagctgttcaagagggcaattaataagaatccaacaagagcaactcctaggagccacttctgccagagagctgggggttgcaggtggatgtcaccagaaacatctggtaggtgctgagctaggaaaccctattgcttgagtttcactctcccctgtaccactccacagagctacccttgtggggacttgaatgacataatacaatgaagttttaactttgagacaggaaaccaggtagcattgaaggttctgaaattctgggcaaagatctaaccaacaataataacaaaacccaccttgaatctcaactgatccttgaggctgggacccacactgatggctgggcatctgtaaaggagatgaacacaaggccctgggagttctggggctgcatgagccctgtgtgtcctacctgcagggatgatagcagggcacctctgatgatgcactgtcatgggataaatgcccctccggactcagtggtcactcagggattgtgctggcaagtgatgcaataggtatatgtcatagctttttaatgagcaccatcggccagtagcttacagctgtgtctgagtgccagcagtgaagctggtgcctgcagaggcaaatgtcagatctgcagctgaagcaagaacctgggagctgggcagaaaaggagctttcctgctaccgaggtgagtttggatctccagactgaggcggtggggtgggagcagaaatctcttcaagcctttgttttcttgtggctgttttgcttctgtggtgtttgaaccaccccccactccaccccgcaaaaaaatagctgtccacggggccagacaagataatgtgcctctagactcaagaagtgaatggcagccttgggaagctttgctttttctaactctccctgtgaaataattcaggacttccgcacactgaagagtcaactctcaatccaaagtcaagcacttccctttttaaacttgtgcaacgctgaggcttaagttctcagggtctcccctccgcaggcgctggtccttttaaagggcttctcagagaggtggtggccagaggctgcagtcaggacctggctgggaggaagacagggatgagggctgcggggctgggcgtcccggggaggagggcggagcaggtgagctgcggggtgggagcagggagtgcacttgtacgtgacgttggagtttgcagcaacctccaagtaggaggctgtgcgcgcgtgtgtgtggagtggctgcgcggccggggaggatgtgcgctgcagggcggccgccgcagtgagcaacgcggcaaccggagcccggcgggcagccggggaggccgggactgagaggggcgagccgctggtgctccccggcggcagagggccgcgtcggccacgggcccgggagagacgcgctccagccggccccaggatgtaggcgatcggcgg

SEQ ID NO: 4210 - DNA, 2300 bp, Homo sapien
atgacacactctgcaagctaataaatattcctcgctggctgcattccctccctgtagcctgtctgccatccatacagaaacacccacagcatggggaccaccttgccctgtgcattcaagttaaaatgaaatgattcaacacttccaaaaccagcacataagatgcaaatggtttccaaaaaatagaccaaaagccaaactgaataaaaacaccaaggaaaaaaactaggcagagagaaagagctatatgtgagccaggcataccaagagcaggttttatgaggccccgaggggcagaattttgcatgggatacttgtaggtatcccacgaaaaatgcaactgggggcttgccaggcattttcagctacctctaccttattgcatctcctcacagcctgctgaagtaggttgttccttctcttttacgtttgcggaaactgaggctgtgttcgtgatttacacaaatccaactggaaaaggggcagggcccagtcttgatcctcaatctcaccatttcttagttcactatacatttccgttatccacaggcatttatgaggaaatgctagttccaaagccaagcccgtggcgaggcagctgctggcgttagcaggtgcaggagactcaaagctcttttggcagcagccctaagggactttttggggggttggtggttagtgggagataattttcactttcattccctgaaggcaacctccaggcttggccatagggaagtacctgtgcctcgcatgccactcactgcctcctgcagcacctctgaggccacagcacccagttcaggtagccccaccatccgcgtcctgccccacttccagtgcagttcgaacctgtcctgcctaaggtgggctgggagtttcccagggagaccccctgctgctggagagcagaaccaatctgtcctactaggaggtaggagtgggcagcttcccatgaggaccctatgagtgagcagacactcactccctgcttccctcagagaaataaatggccaatccttccctccccaattcacacatgcatgtgggcaatgtctgggtaggcttagaaatacaaacacccctggaagaggtagcacttgcactaaactcaggtgtagatggctgatatcaagtcattcctgaggttgggatggaggagagaagaagacagccacaagaaggaaaaaaacccaacctcctaaagatagaaaatgttgagaaataggtaagtagttgcagttcagtgcaaactgatgttctggaaaaaatgcttgagctttggatcggacagcccaggattccattcctgcttcaccacctaccaactgtgggtctaggacacgttaacccaccttgctgggcctcacagtgctcctcagtaggatggggatcacagtactagggcagctgcaggcaggcctgtgtggacagctaagcttgggatatacaattaccaagccagcctctgtcttgtcctcgctggttctgagattcattgtaataaacaagaagtcacgagtgggaagcagggtcaacagtagcctagagaagtccaggcttcctgggaagggcagaagccaggctctgtcggagcccatggctgcccctcattcaccgctgatgctcatgggctctgttagctcagcacaagcaaaagcctagaggggagctcctgggacccaggggatggtctgtctgcctcacctggccaaggtggcttgctcctggcagagggagttagtcattccacctctgcctcctgggaggaggagttaagaactgggactggccctctgccccccttctccattggaaagcaaggccccttaggccagcagaagccagctgtgtctgaggaagctctcctcggtgggctgcttcttcccctgtcctctcgctcacatttcctgggtgggagcagttccaggcagaaaggacaacacggggaggaggacaccttctgggggcctctcacagcccttccaatccctctccagggcctgggaaagagcctgtttacagactggtgctggctcttccctcacctgtgcgccccgcccattcccaaagagcagggcagtcagttggctggtggccggaaaggcttcggaacacgcaggacagacgtctccttagcccgctgcagccctctcccgcctctaccaactgcgggcagcacctttggtcggcctgggggtgaggcacagagctccacacccaggcaactcaagtgtgtgtgtggtaaggggacactgggagcggctggacgaccccctcctgccgaacagacaagagcc

SEQ ID NO: 4211 - DNA, 2300 bp, Homo sapien
ggtgctcagaaaccttcagatttgaagcatttcagattttggattttccgatgagggaggctttcagaagggttgtggcaatatatgtcacaaggtggtgagggtctggaatagaataggagtgggtgggaatgtggtatatgaagaaagaagtagggcattgatggagaactcattctttttcatttaatgcaaataaaatccctctctagtattctgcatggcattttttgttctttggcatcctccaagcctgcatgccacttttaagacagaaatagagtccttgaaatgcagaattctgtctgcttttgtatacaacattgaagattaatgtttgtgaggactagatagacaaggactaggggcaaagtcaccagccagggtgttcttcctcagcagttggaatctgcaccatcacaatcgccttggcttggatggcttttccaagtgtggttaggagatgagcagagaagtgcattatcctactgtcagcagggagccctggcgtctcgtgccctggccttggtgtgctcactcacagacattcctctttcctgaagttactatccagggatcccacttgacaattgattatgtgctgttttctgtgaaatttctcgagtttctttgtaatgttgtgcatgtctctatgtagctgttttcctaaatggatgatcctatccctggaaataccagaccatgtcttataccatttggtatcttctcccatccttcctaatgcctgtaccagtgtctctatgtgttacagcactgagaaggcaacgaacaatccacaaaaaccaggctgatgaattaaaaatctctttggtgacgctgaatacacagactgtgcagcgtgttggtgaaatggagaagaagttgaagacctcacaaaacggtcttttaattaagatttttgtatttgttctccagctgcctggaaattccaataagacagttttaattagaaccaacgttcacatttccccctgagaactatcaacatttcgctaaccccaatttttaagaatcaagctatggagaccatagataactgactttgtatctgtttttccttttaaaagtggagttcaatgcatgtgatggtttttttttaaccaaaacactatccagcatgtggcctattttgtacacaaatgctaccatgtgcagcatgtaatgagtatgcggtccacagtcacttgtgctggtcagtcttaccttttgcttcatctggatgcctccgggagctggattgtggcacccttaagcagggggactttccagactgtgtgtattcctcccaagccctcaagtatcctaaaaatcatttcatgaatcctccatcaagtccccatttctccattcagatgcccccgattccttccctgctccagaccctcaacaccttgtgcatgatgaattgtagcaatccttctgaaggccttctgaagccatccttctgaggccatccagccttcacctgacctcttgtgaagtcttgcataatttagaatctgtatcacgtaatttataactcaaattttcacgatcctgaaagatggagtattattttgtgatagcaggatgtgcttctggccttcctgctgcctcttcaaaaatgctcagcacaaacctaagttcttggctactccagataggggggcaggacagactgctggaattgtagggaggctcgtgggaggggggttgcctgggcttgcgttccctgcatcccctgtaccactcacaccggtgtgggcccttctgggcagtcatcaataaagaaagtcaaagaaagccatcgccaagcttctgaagacttataggcaacagcctgtataagggatagtaaaaataagtagacacagctggcagtcagacgtctgggtttggaaataatgattcaaatcgatgcattgaaggtaggagtgccaactccagagaaccaggcagggacagctggagtgagcccatgctggcaattccctgaatgcagcaggtgtcagatgatgacataatgcacacatgattcaataatggattagggaatacaaggaaaaggtgacagaaaagcaagagagggatccgaggagtgccgaccagagaggcagttcatgtagcctcattagtaaagcccccaggggctgtgactgtcctgcgcgggcttccaagtccacctgagagttctgatgctgtgctgaccccatggcacatcaggggcagcgagcctgctgtccacactggctgggagaagcagcagccaggcaagagaacaacaaacaggggcaggcagc

SEQ ID NO: 4212 - DNA, 2300 bp, Homo sapien
ttttggcttctttcaacctattctatgctgtggtgtgctagtgagttagctccaaacataaaatcctggcttgttgatttccatagtgtaaacagtcccatcatggttgacttcaagctacttatttgaattggctccaaacataaaacaaaatcctggcttgtttgttgagttccatagtgtaaacagtcccatcgtgggtgacttcaagctacttatttgatgttattgatcatggagttgccaagaggtgtgcacaattggctctcctatgccagtacaggctggctctggtacaccactgcttttattttccatttcgttaatttctgctcttaacattatttctgtccttctattttctgtcttattttgctgtcctttttctaacttcttgaaaagggattttcagctcaagacttttcagactcttctaatacacttacttatggctataaatgtccctgtaagtgctgcttcagtttcatcccacaggtgttgctattgttattttatggttcagttcaaaatattttctcaataccattgactctgtctctgtgttattcaggcttgtttttacagttctttattgatttctatcttaaatgcactgtagtaaaaaatgacaattatttcaattttcaaaatttcttgagttgctttataactaagtatgtggttgactgtggtgatgtgtctgctttcaaaaaactgtacattctgattttggtcgtgttgttctgtacatattaattgcgtcatttttacatcatgttattcacgtttcctatatccttaacttttctcttgctagtcttaacgattagtgagaaagtcctgttaaaattacccaatatgaccaggcattttttttctttgtaattctgtcacttcactttgtttcatatgtatttttcattaggtacttataaattttaaatttaaaacacatttcctttttagactcagaagtcatctaagactctttcctttcattccttttatatcccatcagtcatatttaaaagatatctatatgtaaactgacgtcaatagacatgatgtaaaagaagggggtggctctggtaaagctaaagtaactccactatgagagtgcattaactatgggggaaatactttctatattgcagaacacatatttggtggtacgtagcctcacatcgccacccggaaaagtctgcatatattgaatttggaatggatcaaactgcactgagtgcaaaattgtaaattgcatcttatataaatgttttagaactagatgatggagcagatgggatctattaagagaacggggtgccagatgactgaccataaacatgctttttaataaagactctgctgagagattaactcatatattttctaaaatttttatttcttgttcattttgtttctaagatattcactcacatattaaaaataacaacgtctcaaaacatttgaagcaactctcttcatcccttttaaaaataccttgctgtttcgggggttaaaaaaagccacaagggagattaaaacaatacaaatatttattttcccaactcccctgccatgggttctgggacgtcaccgcctctttctggggcccgtttcatccttttcttttaatccaagaagcgatggtgttgtgcgcctgtagtcccagctacctgggaggcaggctgaggtgggaggatcttttgggtccaggattttgaggctgcagtaagccgtgttctcaccactgcactcgagactgggcggaagagcgagacactgtatcaaaaacaaaacaaaacaaaacgagaaggcatcgcggctctgtaacactccgtccagctctcgcactctcagatgcaaacttccacacaaactcctcggctcgccttgtcccgcgggactagcatatcaagccttccgggacacaccgtgcgatgatatatacgtatatacccctcttgcccttgaaggccggaagtcggtcttacagataaaagcgaaacaggaagtcccgcccctctatggaaagtaaatggtagctcggaagggtcaaaagagtccgcggtttcgccgcgtgagttgctttttgcggctggggaggtctacgcttctagagcttgagccagcggggcgaccctgcagtggcaggactcggcaccgcgccctccaccgccggttggtggcctgcgtgacagtttcctcccgtcgacatcgaaaggaagccggacgtgggcgggcagagaggtcggcttgctgatgggtccgggtggggcgcgcgtggactatgggcccgg

SEQ ID NO: 4213 - DNA, 2300 bp, Homo sapien
cctggcttgtttgttgagttccatagtgtaaacagtcccatcgtgggtgacttcaagctacttatttgatgttattgatcatggagttgccaagaggtgtgcacaattggctctcctatgccagtacaggctggctctggtacaccactgcttttattttccatttcgttaatttctgctcttaacattatttctgtccttctattttctgtcttattttgctgtcctttttctaacttcttgaaaagggattttcagctcaagacttttcagactcttctaatacacttacttatggctataaatgtccctgtaagtgctgcttcagtttcatcccacaggtgttgctattgttattttatggttcagttcaaaatattttctcaataccattgactctgtctctgtgttattcaggcttgtttttacagttctttattgatttctatcttaaatgcactgtagtaaaaaatgacaattatttcaattttcaaaatttcttgagttgctttataactaagtatgtggttgactgtggtgatgtgtctgctttcaaaaaactgtacattctgattttggtcgtgttgttctgtacatattaattgcgtcatttttacatcatgttattcacgtttcctatatccttaacttttctcttgctagtcttaacgattagtgagaaagtcctgttaaaattacccaatatgaccaggcattttttttctttgtaattctgtcacttcactttgtttcatatgtatttttcattaggtacttataaattttaaatttaaaacacatttcctttttagactcagaagtcatctaagactctttcctttcattccttttatatcccatcagtcatatttaaaagatatctatatgtaaactgacgtcaatagacatgatgtaaaagaagggggtggctctggtaaagctaaagtaactccactatgagagtgcattaactatgggggaaatactttctatattgcagaacacatatttggtggtacgtagcctcacatcgccacccggaaaagtctgcatatattgaatttggaatggatcaaactgcactgagtgcaaaattgtaaattgcatcttatataaatgttttagaactagatgatggagcagatgggatctattaagagaacggggtgccagatgactgaccataaacatgctttttaataaagactctgctgagagattaactcatatattttctaaaatttttatttcttgttcattttgtttctaagatattcactcacatattaaaaataacaacgtctcaaaacatttgaagcaactctcttcatcccttttaaaaataccttgctgtttcgggggttaaaaaaagccacaagggagattaaaacaatacaaatatttattttcccaactcccctgccatgggttctgggacgtcaccgcctctttctggggcccgtttcatccttttcttttaatccaagaagcgatggtgttgtgcgcctgtagtcccagctacctgggaggcaggctgaggtgggaggatcttttgggtccaggattttgaggctgcagtaagccgtgttctcaccactgcactcgagactgggcggaagagcgagacactgtatcaaaaacaaaacaaaacaaaacgagaaggcatcgcggctctgtaacactccgtccagctctcgcactctcagatgcaaacttccacacaaactcctcggctcgccttgtcccgcgggactagcatatcaagccttccgggacacaccgtgcgatgatatatacgtatatacccctcttgcccttgaaggccggaagtcggtcttacagataaaagcgaaacaggaagtcccgcccctctatggaaagtaaatggtagctcggaagggtcaaaagagtccgcggtttcgccgcgtgagttgctttttgcggctggggaggtctacgcttctagagcttgagccagcggggcgaccctgcagtggcaggactcggcaccgcgccctccaccgccggttggtggcctgcgtgacagtttcctcccgtcgacatcgaaaggaagccggacgtgggcgggcagagaggtcggcttgctgatgggtccgggtggggcgcgcgtggactatgggcccgggaggtcccttactgtccccgagccgcgggttcctcttgtgcaaaacggggtggcactccaatcgcctgcttggtgattgtggcccccacacacctgtttctacagcgcttaggttcgaacagtaaccctgtaaactaggcactgctgtccccgc

SEQ ID NO: 4214 - DNA, 2300 bp, Homo sapien
taatttgttagtcctacaaaggaaatctagtccccagacaagaagggggtttgtcttgggaaagggctgttatcatctttgttttaaactataaactaaactaagtttctcccaaagttagttgagcctacacccaggaatgaacaaggacagcttggaggttagaagcaagatggagttggttaggtcagatctctttccccacctcagttacaattttgcaaaggcggtttcagaatcagagcacgaagtgttcctataaaaggaaaaaaaaaaaaaacctttcttaattatgctcatagttgtgtattgtcctgtcagcttgctcattgtgtaaaatgagcggacatgagaattcacgagcagagctttttacactgatatgtatgaaagcatcatttacgtcctgaaagccccagccgagcgatcactggcagtgccaacatttttgagtgtgggctccataggaagcactgttttccctattgagaattatagtgggtttttttcatttacgagtaatgtatacctagctccaagatcttggttgctaacaccattctccaataaaacgaaccagggatcgctggagaaatagctgattctaaaactagggcagaaagtatacaagatgagcctggagcatcttgtagagtcagagagcaaggcagaactttatacatacagtgatgtgagatgggcatgcagagggaagatgttcccagtggctgaagctgaaacagtgtgagcaacaaaataaagcagtgttggatcacaacccaaagaataaaataaatatcctcgagcccacaccgatataaataaatgattgaatcaataaatgagtccaggcactgtggctcatgcctgtaatcctgcactttgggaggccaaggcgggtggatcacttgaggtcaggagttcgagaccagcctggccaacatggtgaaaccccgtctctactaaaaatacaaaaattagccaggcatggtggtacatgcctataatcccagctactcaggaggtgaggcaggagaatcacttgaacccgggaggcagaaattgcaatgagccaagattgcaggactgcactccagcctaggcgacagagtgagactccatctcaaaaaaaaaaaaaaggatggacaagacaaatctcttgtaaaaaaaattacaagtaatttttatagaagctctgccctgagggagggggagcgtgacttctcactccttcagtgtgggctgcacaagtgacttccttccatatgggatcgttataacaaaagactgtaacaagggctatgggagttataagacaggaattgtggacaaaaaccagtgtatatcataacatcacaccttgtaatgttggcagtacagtcactgacctttgataaatgttgatgacatgttgagtaaaggaatgagagaaagaggattgtttatctctgtttttatccttctcagagaaacttagagtaacaagtgtgttatcagccatgctgatgcctttggtaaactattgtgtgaatatggttgttttgaattggtcagtagaaactgggctgccaggcgcagccggtaagcatttccatgtgagccttaggggagaagtgcatttggtaggagcatcaaaatagcttctgatatttcattaaaagtttgggtccgtctggttccttcattagtatatgtcacttcctttgaccttcagtgtctgttgaaccatgtgattttagaaagcaagggattgcttgacatctccaggctgtgaagactaaagttcacaggaaaagactacaaggaaatttaaacagttttattattttccccctcatttcttaattttcctgccactactcagtactgtgtgggtccaggatcaccattagggaagacagagtagctcagaaatcagtagtgaggaggaggacagcactttgtgtggtatcttgctctaggagcattttcaagccatcagaagtgggactcttgaagactatttctgactttctcagcacaaattaagataataggagatggaggctccatttgaaaaacattttggttgtataatggttagcataaaacatacttttttcaagttaactcaggtactagagtatggggggcggggggaaatgtactgcagcattaatgaaaactagagctgggagaatgtgtttttccttgagtaaattgcaaatgcctgtgcaccgcatttgaccaggagggaagaatgagaggccctggtagcaaagccagtggaagaagttttactaggagcagttgtatcattc

SEQ ID NO: 4215 - DNA, 2300 bp, Homo sapien
ccagactattaaaagctgttgggtaattgaaggtgatataaaatgactgtcatcatttggagtgtgcagtacagttacttcatgttcctcaggtttagaacaatttcccctgtaagttctcacacagataggcagaaatcataactaattttggttaatcactatggcagccgttgaagaatttaagagaacctgccagtaagatttggaataagattctatattattgcatccacagaaaagaatgtactgatatactataaactctaggagaaaacttaattgaaatagtgttattaagtgttgaaagtaccataaaaatataagggaaaataagctttcctagaatttttcagtgttctagtttttaaacagtgatgttttttattaacctatttcatccattcaaagacaggcctttctccacaccacattttcctctaaaatcatgataacacttttaaattgatggtgtcttccagtgtgtatcagccagatggcagtgtgttacagttccaggaaaactcgttcacatcttccgtaagatcaagaaggctctggcatcagataagatcaaatgttgtctttctgttttaaatatgtgccgcaaagagatttgcttacaatctattgagaaagctaaaacagagcagacattgtcctgttgcggggtagatgaatagcctaagaatagtttagacaaattctgaaaacgaatttaccttagaagatgttcatgttagatctggtaaaagtaacatgttatttttctgtcaagccctttttgtacttgccgtttattacatattttagatttattttttattttcgaaacatccaaaaaggaatgctaattagtgaaatggaagaatttccatttcaacaccttaggaaaaaaaaaactgacttgacatacctaagaaaaggccaagttgatttactttgtcagtctcttcatttgtgatacgtaaagtccgttgttacctagataaatgtaggtttgatttcttggaagcaatcacttaagactttccattttcttcaaagcatcttacttaacctgcatgtgggatctgtactgagcaattagagattcaaaacaactgtcacacacgacagaggtggtaaccgcccaacaggttcacctcttccgccgcctacacagagccgatttatcaagacaggaattgcaatagaggaagagtacacagagctgcttgtgcaggagactggagtcttattagtactcaaatcgatctccctgagcattcggggatcagagtttttaaggataatttggtgggagggggaaggccagtgagtcaagggtgttgattggttgggtcggagatgaaatcataaggaattgaggtgtccttttgtgctaagtcagttccagggtgggggccacgagatcagatgagccagttaatcgatctgggtggtgccagctgatccgtcgagtgcaggtctgcaaaatatctcgagcaccgacataggagcagtttagggagggtcagaatcttgtagcttccagctacatgactcctgaaccataatttctaatcttgaggctaatttgttagtcctacaaaggaaatctagtccccagacaagaagggggtttgtcttgggaaagggctgttatcatctttgttttaaactataaactaaactaagtttctcccaaagttagttgagcctacacccaggaatgaacaaggacagcttggaggttagaagcaagatggagttggttaggtcagatctctttccccacctcagttacaattttgcaaaggcggtttcagaatcagagcacgaagtgttcctataaaaggaaaaaaaaaaaaaacctttcttaattatgctcatagttgtgtattgtcctgtcagcttgctcattgtgtaaaatgagcggacatgagaattcacgagcagagctttttacactgatatgtatgaaagcatcatttacgtcctgaaagccccagccgagcgatcactggcagtgccaacatttttgagtgtgggctccataggaagcactgttttccctattgagaattatagtgggtttttttcatttacgagtaatgtatacctagctccaagatcttggttgctaacaccattctccaataaaacgaaccagggatcgctggagaaatagctgattctaaaactagggcagaaagtatacaagatgagcctggagcatcttgtagagtcagagagcaaggcagaactttatacatacagtgatgtgagatgggcatgcagagggaagatgttcccag

SEQ ID NO: 4216 - DNA, 2300 bp, Homo sapien
tgaaatcacgaggatgtaaacgttgtgactggcttcctttgtttaacatattgtttctgagacttatccatgtaaagcggattagcaattcattgtcttattgctgggagcattattatatagatagatcacaattttttattcattcttcaatttgatgcacatgtaggttgttacctaacacctactaggttgttataagcttttggctataacgaataatgttgtcaaaaacattcttctgcaagcttttttttttgaaacatgttttcatttattttaggtaattacctgggggtgaaatcgctgaatcataaagcagctatattataactttacgagaaacagtttctaaagtgactgtaccgttttcatgcccaccagtaatgtatgagaattccagttgctccacacccttggtctttgccgtttagtgttttcgagcttttacatgttagccattctcatcagtatgaagtggtacctcattgtgggtttaatttgcatttctctgatgactaatgatgttgaacacttttccaagtgcttatcatttgtgtatcttcgtttgttaagtgctcaagacatttacccatttatatttgttagatatatgttgacagaaacaatagttttctgcacattttatgttgaaggtaattgatatttactgacatgttaaaagggcttaaaatagaaacatttatgcattttgtcaatgaaaaacggaatgactgaaatatgaaaaaagtcttgcctgtgtaatgtcagataaccttaaagtcagataactttatataaaaataactgtaaatttaaataactaatttttgtcttatccattatgttattatatgtcaagctctttgaagttgggaccctgttttctctattgactaagaggcagatctttgtgtttagtagcgaagaaaaccctatgtcactgatctagtttgtctcaaattgagccaggaaccaaatccacaccatgcatgccgaggtgaggttttctgtttctctatttagcaatggatgctgtcagaaatacagaaaagacagacacagggactatttttgagtttgcacatgggagcacatgcattgtgcaggaggctctgcatcctggagtcatcttgggcacttggctgtgagggctggcgtgggcatcttggttttagctgaatcctagcacattgctataggtacctctaaggcaggagaatagggcctggaggcagggaatccaaaaactccctagaaccaaatcagatagaaacacttcagctatgacaggaaatatcctcttcatttacatagggagtacaccaagtaaataactttgtaacttcattttatcctcttcagttacatagtgtgtacaccaagtaaccaattgaaacctctataggtatttaaaccccagaaaattctgtaaccagccccccttgagcggcttgcttgggtctgcccccaccctgtggagtgtacttttgcaataaatctctgcttttgtggcttcattctgtctttgctttgtttgtgcgctttgtccaattcttggacctggacaccctccaccggtaacacttctcactcctggccttacgtctaaatcattcttgtgttttcatgacttatttttaatgcagatgtccagaaccaatttcagacctactgtgtcagtctctttgtggatggtgcccatcatgcaacgtttggaaaataatctaaagtgattctgctgtgcaccttctgtgaactggtttatgctcacaggcacgcctgatttagggtcctgggcagaccaacctccaatcaggaatcgatgaagctggtgtagatactacattaacttttaacgaaggcctcgtttctcctaaaaataagagaccaggtgggttctatctaggcagggttggtggcaggaacccaagggaagctgagctgcaccaagccgggctgggatccccctctctgcggccgcgcgcccggctccgtcggcgcacgcgcacgtaggggccggccggtcctgtgcgcacgcatcgcacacgccggcgccttcctttgggagcccgggccggtggcgcgggcgctcggcaaatggagtgggtgctcgcggaagcgctgctctcgcagagccgggacccccgggccctgcttggggcgctgtgccaaggggaggcatccgcggagcgcgtggagacgctgcgcttccttctgcagcggctcgaggacgaggaggcgcgcggcagcgggggcgcaggcgcgctcccggaggcggcgcgcgaggtggctgcagg

SEQ ID NO: 4217 - DNA, 2300 bp, Homo sapien
tttgggttgccaagctcacagcttttcctgaattaggagaaatagcctcaaactttggtttgaattacattaaatctaaatgtgggaggcaattgtgcttcctggaaattctagaaaggaaggatgtttcgcatcaaggagacagcctaatatctaggtaggaaaaacaataaaatgcaacaaaagagcttggaaggggaaaaacatatacgccctgttcatgtccagccgttgggattttggccttgtgggaagattttgctcagactagaaagaaatgctgtgagcggaatgtgcctgtcttgtgcttaagactgcggccctgcttcgagatgcaccgagcccgacgtcttgggtttctattcacatccctgcagactgtcaaccacatgggccattttggaagcagggtgtgccaagcaggtcaaagggagagcacgcaggaaagacagccagtccttccagtccaatcctgcttcttcccatgccttccctcccttccagggctgagaaaggtttgcatcatgtattttctgaatccaaattgaaacttgtcttttgctggtgattcagatgtgcaggattactcagactctgcctaggattgttttgaagggcctgcagctccactcctattctccagaagcactgggatgacattattcatagggcacacataatagctaatatgaggtaatcacattagcacattctgagacataaagtacagctaaatccttccaattcccactaggtgtaatgctgtcttgacacacagcccttttcatgataaccgtaaggtcacttctccatcatccctccccgatccctttattttctggagtatcttttgtcttagatactcctgtcaatttcagccaatcaaaattgacgtattctaagagctagtggtccccactgtgccattccatcaagttgctactcgagcttgcgtctcagtttctctctctgttaggagaaaggttgtgtttgcaggtggccatcctcccagggcatggcagagcccagtacggcagaaatgtcatgggatttggcatcaggttctggcttggacacttgtaactttgtgtcctcacttctaaaatgggaacaggaacgccttcctcacagcacagtcatgaggaaccaaacgtaatgataattatgcaactgctttgcaaacagtaaagcaatatacgaatacggcttgtcattattatcttgcaaggcctaattgtagaaatctgaccacttacgttactgtgaacatgatatagagagtgtgggtcaagatagtcaatgcccgtgcagaatgcaatgtgggaatgtattacagctgacactgccaagtgattgttgatttctgcagctgatgcaggttgacctctctcaagaataatttttaaagtatgtcacttgctcctctctttctttctctgtctgactttctgtctctgcttctctgtctctctctgcctctctgtctctctttctctgtctgtctctttctttctgtctctgtttctctgtctctcttcccctctctctgtctctctgtctctctgtctctgcctgtttctctgtgcctcattgtctctctctgtctctgtctctgtgtgtgtgtgtgtgtgtgtgtgtgtgtgtgtgtgtaggtgtgtgtgtcttcctctctccttttctctctcttttccttcaggaatcaattggtagaaatcactattcatatgccagtttactgtattgacctaagaatgaaggtgaggtcgccagtgctaattaaatttcctttcccatagtgaactgtatcccagaactagagttcacactaagcagttaaacaggtttgggcattcgaaaaaagaaaaaaaaaagctggggccccaagaaagcactcttggcctcatttctatttggctcacattgcctgtcctgttcttggcttaaatttggatcacaggactcattttctcattttccttttctcatgttcctggatctttgttgtagaattgtaggaaacacagagtcaggagagtcagccaaaaagtatttctcccctccctggaaggtctcgggccctgctcagacaccacatgcgcagggccgactgcattcccacggcgacggcctcctggcccgcatcatgactgttgttttcctcgcggtggccatagcttttggattttacattcagattggttcaaggggctttttcctttctctgtttgaaggaagccaccctctcgatccccagtcagcgtggcgtcctctcagcaacccgctcctggtcttgctttgac

SEQ ID NO: 4218 - DNA, 2300 bp, Homo sapien
cgaaccgcgctccctcccctccagagggctccgtggaaaacgcgcgagccagctggcggcgtgtgcacgtggtgctgggcttgggaatattcacagtctccctagttagtaaaagggacaggcggggcgtatgtcctttccaagacaaatgcaaagcaccagtgacggatttcatgctatgtgtccgacattgagctttcaagtataactcctaaaaaaccagaactgtgaaccacgctagacctaaattccccattctcaggagactgacggaaaccaagtgacaaagtgtccttgcataaaagaaaaaaaatgatttttagcacgatttggcccagaggcacaccagaggaaaacatcctgagggtggtcgggacagccgggtggggcgcgaagtgagggaaagtggaggaaaagcactcgatcactttgcgcggtgttccgaagggaacaccggcgctgcgctgctgcgctgccccgcgggcgggcgggcgccgcgtagccggctctcccggcagcgctccttcggcgcgcggggggagggggagcgcgcgcgcgggagggcgggcacgcgcacgaggggagggggcccgcgcaggcgccgtgcgagactgtcgaagaatcaagtctgtagaagtggagcggtcgcggcggcagcagcagcagcgacggtggcggcggcggagctgaggcgggctggccgctgacgctggcgctggagagcggcgacgccaggagctgtgagagagcggcggagcgacccggggcccgcgccgcgcccgagctccacgccgcccggccgccgccaccccggcgcggcatgccccgccgctcgggctgagcctgccccggcggccgccccccgccccctgcccccccggcctccccgccccccgccccgcactccgtgccggccgccgccgcgacctgctgcgctcccccgcgcccgcgcggcccgtcttcgccccggtctggaggcccgccgcggctccggccgagcccccaccgccgcgcccgccgccccgccgcgccgcgccgcccgcccgtgcccgggccggccggggggaactgctgccgcggctgcagcccctcacctcgcgcccgccgcccctcgtgcaccgggggcgctgcgcgggcgccgagccttcgcgggctttgccgccgccgccgccgcctttgcggccgccgccgccgctggtgggggagacgcggggttggggggggaggagggcgcgcgtggtgccggtggggggcggcggcggcgccccctcctcctcctccgcctcctcctccggcgtcgcgggctcctcggacatggccgcggcggtggcggtggcggccgcgtcccggcggcagtcgtgctacctgtgtgacctgccccgcatgccctgggccatgatctgggacttcaccgaacccgtctgccgcggctgcgtcaactacgagggcgccgaccgcgtcgagttcgtcatcgagacggcgcggcagctcaagcgggcgcacggctgcttcccggagggtcgctccccacccggcgccgcggcctcggccgccgccaagccgccgccgctctccgccaaggacatccttttgcagcagcagcagcagcttggccacggcggccccgaggcggccccgcgcgcgccgcaggccttggagcgctacccgttggcggccgcggccgagaggcccccgcgcctcggctctgacttcggcagcagccgcccggcagcgagcctggcccagccgccgacgccgcagccgccgcccgtgaacggcatcctggtgcccaacggcttctccaagctagaggagccgcccgagctgaatcgccagagcccgaacccgcggcgcggccacgcggtgccgcccaccctggtgccgctcatgaacggctcggccacgccgctgcccaccgcgctcggcctcggcggccgcgctgccgcctccttagccgcggtgtccggaaccgcggccgccagcctgggctccgcgcagcccaccgatctgggcgcccacaagcggccggcatccgtgtcgagcagcgctgccgtggagcacgagcagcgtgaggcggcagccaaggagaaacaaccgccgccgcctgcgcaccggggcccggccgacagcctgtccaccgcggccggggccgccgagctgagcgcggaaggtgcgggcaagagccgcgggtctggagagcaggactgggtcaacaggcccaagaccgtgcgcgacacgctgctggcgctgcaccagcacggccactcggggcccttcgagagcaagtttaagaaggagcc

SEQ ID NO: 4219 - DNA, 2300 bp, Homo sapien
taggaaagataatataattagtaccctgttcttcccacacttaaccagctcattccagtctcaagggagagttgtgggcctgtgttcccaacaaaagcagctccagaggccgcccttaaagagcttaagtgtaaaagtcccaattgaagagcgactaagcctacgtgtattagggagactaacgaccagcccaaagtgatttaccataacacacactagctcctcctcccgataaaagtgcgaaactcaaacattcaattcagtctgggctgagtctgaggctgccaacggtggcagacctgcaggccgggctcatcccggcctgggtggcatatagggcaaaagtccgcctccgtcggcggcccgccctgcgggacggcgggccagccagccagccggtcgcccccacggccctcgggaacctcgcggaggcgagcaggaccccccccccccccactcgcgccctcgcctcccgccacctcgagtccaagttcgggcccgggggcggcgcctcgacgcccagactcgccgaagggggtggagcctgcgctgtgacgcggccgcgctggccgtagaccccggatccctggaatgtgcattcgttccacgaggccctagtgccagcggcgccgaggcacgtctgcgcggagcgtgcgcactcgcggcggcggccgcccacggccccgcgcccacgtcacgcgcccgccgcgcatacctacataaggcagccggggcgactggcgcggcgaggcccccgatgaacagggcgggctggacggggctaagagcggcacttggtgttcgggagaggctagtccgaaccgcgctccctcccctccagagggctccgtggaaaacgcgcgagccagctggcggcgtgtgcacgtggtgctgggcttgggaatattcacagtctccctagttagtaaaagggacaggcggggcgtatgtcctttccaagacaaatgcaaagcaccagtgacggatttcatgctatgtgtccgacattgagctttcaagtataactcctaaaaaaccagaactgtgaaccacgctagacctaaattccccattctcaggagactgacggaaaccaagtgacaaagtgtccttgcataaaagaaaaaaaatgatttttagcacgatttggcccagaggcacaccagaggaaaacatcctgagggtggtcgggacagccgggtggggcgcgaagtgagggaaagtggaggaaaagcactcgatcactttgcgcggtgttccgaagggaacaccggcgctgcgctgctgcgctgccccgcgggcgggcgggcgccgcgtagccggctctcccggcagcgctccttcggcgcgcggggggagggggagcgcgcgcgcgggagggcgggcacgcgcacgaggggagggggcccgcgcaggcgccgtgcgagactgtcgaagaatcaagtctgtagaagtggagcggtcgcggcggcagcagcagcagcgacggtggcggcggcggagctgaggcgggctggccgctgacgctggcgctggagagcggcgacgccaggagctgtgagagagcggcggagcgacccggggcccgcgccgcgcccgagctccacgccgcccggccgccgccaccccggcgcggcatgccccgccgctcgggctgagcctgccccggcggccgccccccgccccctgcccccccggcctccccgccccccgccccgcactccgtgccggccgccgccgcgacctgctgcgctcccccgcgcccgcgcggcccgtcttcgccccggtctggaggcccgccgcggctccggccgagcccccaccgccgcgcccgccgccccgccgcgccgcgccgcccgcccgtgcccgggccggccggggggaactgctgccgcggctgcagcccctcacctcgcgcccgccgcccctcgtgcaccgggggcgctgcgcgggcgccgagccttcgcgggctttgccgccgccgccgccgcctttgcggccgccgccgccgctggtgggggagacgcggggttggggggggaggagggcgcgcgtggtgccggtggggggcggcggcggcgccccctcctcctcctccgcctcctcctccggcgtcgcgggctcctcggacatggccgcggcggtggcggtggcggccgcgtcccggcggcagtcgtgctacctgtgtgacctgccccgcatgccctgggccatgatctgggacttcaccgaacccgtctgccgcggctgcgtcaactacgagggcgccgaccgcgtcgagttcgtcatcgagacggcgc

SEQ ID NO: 4220 - DNA, 2300 bp, Homo sapien
attttctcacaattctggcggctagatgtctgagatcaaggtgccatcaggcttggtttctcttgaggcctttctctttgccttatagatagccaccttcaccagttcaccttacacggatttcaccctgagtgcatctgtatcctaatttcctctccttaaaaaacaccagtcgtataggattagggctcacagcaatgacctcatttgaacttaattacctctttaagaccccgtctccaaatagagtcccattctgaggttagtggggttaggggttcaacatatgaattttgggggacacaattcactataacatctactacatggtcataatgtgctagctactatatgaaatgtcaaaatgttgagctccaagttctttaagaaggcacagtattcatagtggacatttatttgaatgacaaagttgacacggctcttgtttctttctagaaggttgacttgaccatgctctccaatttgaagtgggtactatgaccgaggcatagtgcttgccattgttttaccttgacttcctcacttcgtacaccaagggtgagaaactgttcatctctctctatcgtctgtgtttcatctctctctctctttatcatctgtctttcatccatgtagctatttatgtatctactgatctgtctgactatctatatgtcaatcagtcatctcaatggaccacaaattaaggaatgaagtagtcatcttgctattatgtgtgtcttgggcatgtctttaaaaagactccattttagctttctcattataaaatgtgtctcttaagccaactgtagaaagtaagacttagtataaagggaaggagctttatggcaggaaatctaaggtaagccatcttttatgactagaagtaaatccctgggtacagggaaaaatcagagatgtggaaataataggcgcgtgtatatgtaagtatgagatattcatctcacagcgcctgtcatgtaggaggtgatttaaaattattaaaggaaggaaaacagtatcctgtcccagttttttccaacaaatgtcataaacagatacctgcaatgatttaggtccctacaatataattttacttctcatataaaagcaaatattatcctgcctctcctacttctaattccccaaggagagcatgtccttcttaactgtgttcatcacttctgcaattactgtgaatgtggaagtgctatttaaataaattttagagcattatacgagtgttaccatgaatgtttgccactcctttcccttcttttggttttgaatcccaggaaactaaaaacaaaattggacactagtgaaatgaagttgccaggataatgctgagtaaactatggcaatcctttgttaaccctagtgttgtaataatgaggttcagcatttgttttttaaaatttcaaaatctgtgatcttttagcagatgttgggctcagttcaatatccttcacagtgatgactttcctttcctgtaggttatgcatgccaggattgaggaactgcctgtgttctacccttcaatgaatggatagaaatgtagatccagaaaaaaaaatgtgcccttaagttcctcaatattttgggaagttgccaagtggttactgtagtagattacggcattgtttgcaattatttgtcctttctcctttaaaagggttatatatccctgccttagaccccttataagtaagtgtacttccctgtccctatcaggcttgctcatgtgattttcattggccaatgacgtatgagtagacaaggtatatgccacttaggagcagaagctttaaatgtgatcatgtggttccacttggtctcttgctcttctgccctgttccaagagaaaagcattttccagataggagctgctccttcagctgcatcctgggatgagaaaacacatgggacagagccatagcagactcatagcctacgtgtatcatgagcaagaaatacattgatgacgtaacaactgagattttgggggattgtttgttatgcagtgaagctgactaatacagttacacaagattttgctgagatttgcacaaataaaacaagggaggatgtgagtgcaagaagatgttatacttcacagtaagggctagtttctaaacatgaaagaacacatagcttatgtaacatgacatttgttggagaatatgccctagaaaatcatgatatcacagatatatactaaatatctgaaggagattacggagaaaacatttccagcggaggagttctttaatatagacagagcttgtttcagaattggt

SEQ ID NO: 4221 - DNA, 2300 bp, Homo sapien
ccttgacttaattccttctggggaggaatatccaggcaggaatagagaatcaggatgtagcatgcaaccacgatgaggaatcagcagaaacagagccacccttgcttggctcagaaaccagataccaggcgctaggcaggaattcgcccctgggaagctgttgcttaatcctctagttcctcaggctcctggcctccttgacaaaggccaagccaaacagggatcccaggtgaggccaggctgcccagccagtgccagctcattcaggattagactagggctgggaggagcccaggcaaaccttcaggatgtcaggcactgaacagaatcccagaggtaggcaagttgctgcagctccaataatccagtggaaaagtgctaatttcccaaaggcctttcatcacaaggcccaagtagtctttggcctgagtctagctagaaccactgggatctgggatgaaactgagcaattgcaggtcttgctggcgagtgaagagaggtttggctgcaactgggtcccagttgaccgggtcacaaggatcagccagtttctaggtgcagagttgggatccgcggcctttgcccctaagcagccccactgatacctccaaggaactgttttagtataaaagggagggggaagggaaaagtttattccattatcgaaggtggagggtagggagaagaagaacaggagatggttgtctgagtgtatttattttcttctaaaatgtaaactgaactggaaatgcctacagaaacacacaggcactttgatcatcagcccactgggtgggcaacatgtctaatctctgctctgccctgcacattgcaggcactttacagctgtataacgacatctccaccgtggtggtggccacatttattggctttgtgacattcatcagggcttccttcttattaaaaatgcatgggctgcagctatttggaaggacaccagatatattcactctaggtagaaaatatttctcctttctccaggaacccaaatgaagcaccccagatcttggggaatacagagaagtgagtgggcagagagtctgtggtggcagaggtgggacacagagccgagctgtccccaggttaggtgtctcagatgaaggaagtcccccagaccgcatttcctcctggagtgattctgccttattgactgtgatggtaaagaactgactgtgtattttccatttatttactcccatatattctccactttaatgcagggaggtaagattagggagttggcccatttcgtccctttgatttcttgtcactcagccccaaatgcagaagctcagtggactagctgctcccagggaatgacaaacagcttgaacatttcaagggactaaaagttgatggtggcaggtgagagaggccagtgggggaggaaagaaccggtcctgaggaggctcctcctcaattctgttcagtttttaaaactagagttttttcctcttagttccttcccttggccttgaggctgtcccagtagacacagggaggttggggcagggctggagccctgcggatgctctgatgagtgagaatgagtcacccgctcaggcctctttctgcttaagcagaggtaaaggtccagctttgtaatagccggagtgtgaggatccctcgcactgatctgcccacaatgggccgccggcaggcccagagaccctcaagtctcatcctcagtggtctaccgagctgtgcacggccagcttccctgaattcactccaaagtcccagccaagccccctctatgtattacaggtagttaggcatgaaaggggcagaagagaggtctctccatcacccactagaaatctcgggtgatgattcggcaatgatcgcatcgcttctctaaaaatgacaattccaccgcaccagaagagaccatttcctgatggtccgcacctgttaacatcaaactgttaatcgaatgcaggctccagggagaagcaacttcctgggcatgcgtgttaagagacaaaaaatgatgacgtttgatgaccactccaccagaaaagggaagaaagcctgaggggcctgcgtggacctccctaaacacactgcgcatgctccattccaaacggtatggcgagcactgcgcatgcgggaaacccaccctgtaagggaagaatcctgggaaagaggcaagcctatgaagtcccaggatcaaggttaaagaccctcttttttactgtcttcttgtgctctcttttctctcttggaccttcaggcgcctgcttgggtctctttcaagcgaattttgctttctttcc

SEQ ID NO: 4222 - DNA, 2300 bp, Homo sapien
tggagaaggggaatgatggggctgaaattagaccacagtggtggtgggaatgtggacactgagggaagaggaggcagtgagcacacgagtctttcatgatgtttggtgatgaagagaaggagggatgttctgtagctttaaaggatttttcaaaagtaggagaaagaacctgtttgtaagtagagggaagatacggtagagagggagagatcatagggtgtagagaactgccatttgctgagtgggtgccgcttgcaggcccggagccatgcccttaacatgcatatctcatttcagcagcatgccaacccatggggtagctctacttatacccattttctgaatgaagaaactgaggcagaccgatggattcacccagggatgggacttgctgagcagttgaagcaaaagaatagagtgactgggaagggaagaaaatgaagtcaaacgaaagctaatagaatggggtggcggagtgcggggcttaacgggctgaggggtgtctatattccagacgtgggatttggagttgttctggctaatgtcaaagaccacacacaaggacatggacgtcaacggttcattcacatgagatgacagttacccaggatgaaccaactgcaaaaagctgtctgtggatggtaactgcaggtgacctgaatgcatgtgcctcctccttctttttccgctttttgtcttttccttaagcctctctgaacagtatcttcagaagtgtctgtttcccacagagcatggtgtgtccaagaaataccccacattcccattgcctttgctatttaatgctgtagttgggagaggcagtcttgctttctgcttgcctgtctttttggagcacatatgaactacaaatagatacagcccacattttgcctcaaagatatattctttgttttctccaagttgccaagttgaactctaagctgatgtttaatttatctgtggtaatgaggaacggggatagccttgcataattggaatctgaagataagccaaaagcttcttttagccaaaattcctacatcctttcccaccaactctttatgcctgtgttgctaacaaatggcaaattgactaatctgagtttcaccagttctttgtgtggtgtatctgacctttcacaatgggttcataccagagtccacttccatggtccttcaagatgtgggtgtctggttctcaggtaaccaaccaaaacctttgtacctaccactcatgtatatttcagttgaagttagaaaagcaccccctcagtctatagctaacctctggtgaaattgaggaatgaatgaattgctaagccatctataaatagaattccgggacaattcatctgatgtgagagacaaccctttgataggtttctgagaagatgtgtgaagccactactctcaattgttctttcatttactttttgctaatcaaagccccagacatattccaaaatgtgagatgttttggaagattaaccaaaacacaagctgaaatttaccaggggctctgtataaagttatacccttaggcttttattctcaaagccctcccaagtacagaagtgtagcatgggatgatgtgacatagaatcgcagagtgggaggagcccaccatacttcaattcagtgtatccagaaggaaaactaaggttcacagacttgcttaggggcttagtcaagggactatttgttcagaaccaacattcatacaaagagtcttaaatttaaaaggggatttatttcagagaaacctcatggaaaccagttgaaagagggttagtggggactttcgggaagtgaaaagtcgctggttaatttctctgtttctatctctgtggggccttgcagattcttttctttgcttccgggagccttcttcatatctgcagtggatatgaggtgatatggtttggctctgttccccacccaaatctcatctcgaattgtaatcctacgatcgccacgtgtcaagggcagaaactggtaggaggtgattggatcgtgggggcagtgtgctgttctcgtgatagtgagtgagttctcacgagatctgatgattttataaagggctcttcccctttcgccattcactctgtcctgctgccttgtgaagaaggtgtctgcttcctcttcaccttctgccatgattgtcagtttcctgaggccttcccagccatgctgaactgtgagtcaatgaaacctctttcctttataaattacccagtctcgggtatttctttagagcagtgtgagaatggactaacacgaggcttcgctggtctctcatga

SEQ ID NO: 4223 - DNA, 2300 bp, Homo sapien
ccaagagagcctatgagagggcaagagacttctttattagcaggaggatcttctcttggggcctttttctcttcattatcaggaagcactagtttcatttttcccaaacctgagagatttaaaataggaatgcatgaggccactttctaggttttgcagagctcaaacctcaatacttgtcaacactggtagtgtgaacagtggtgccagggactcagttgttagcatcatgagacctcctcaggcccctgagctaagcccactacctcagaccccccgctctacaatctgggttcttgggagcatttcttcctggggtgtgtgtgttttaatagtccatttgaagtgcccttttcattcctcgcaatctccccttgctggcaatcattccccagtaacagcataggaaggaagggcaaaaaccgtgaggccatgagctccttaccggggcccaggatgcaggtttgcaggaggctcaaaaccctgttccaaccccacagggtggctcttgccctaggaaaggaaaagactcagggacagagggaaaccccagaggtaaaccagtaactttcccttcagctcagtctgctctctcctgctctgcctatggccagtgatcatttccttaagtcacttgcaacattaaggaactgcccttgaatcttggcctagggcttgcattgggttcggtcccacttcagaggttcagtttgaagtgctcaagtattgaaagcttcctctttgcagttcattccaatcatgagtcaagttctcttcaatcctgcaaatatttagatttggggccaggccaaaatatatatgtcaaaatcacaaaggctaatagtttcaatggacttgcagtgcaatgaaggaaacatgctcattaaaatggcaatacctaataattaatacttcattaatttattcaacaaatattctgctgcaacacaggtggtctctgtctcacaaagctcacactctagctaggaggtggtcataactgaagtcaacaaagaaagacagagaacaatgactaaatgctgtggtctgaatttttgtgtccccccaaaattcatatgttgaaattctcacctgcaaggtgatgtgtattagtccgttttcacactgctgataaagacatacttgagactgggcaacttacaaaagaaagaggtttaatggactcacagttccacatggctggggaggcctcataatcacggtggaaggtgaaagacacttctcacatggcagtggacaagagaagagaacttgtgcgggaaactcccctttataaaaccatcagatctcgtgagacttattcactatcacgagaacagcactagaaagacccacccccatgattcaattacctcctacctggtccctcccatgacacatgggaattgtgggggctataattcaggaagagatttgggtggggacacagcaaaaaccatatggtcatggtattagaaggtggggctttaggaggtgattaggtcatgaatgtggagccttcttgaatgggattagcacccttataaaagggacccagagaactccctcaccccttctatcatgtgacaatgaagtgagaaggcaccacctatgaaccaggaagtgggtcttcaccagacgttagattagccagtacatttaccttggacttcccagcctgcagaacagtgagaaatacatctctgttgtttacaagctgccccctctatgtgttttgttatagcagcatatatggacttagactagccttgttataatgagacaatggtgagaacctcttttggagaggaaggtgtggaaggcctgtctgaggagacgacatttaagcagagatctggaagatacacagtgagaattccagggaaagagaggagggaatcatttgtgcaaaggacctgaggcaagaggaaagacctgaggcagttccaggaagtgccaggaggccgatggtgctagaaggaagaggagcatggtgagagtgaggtcagagatgagccagtagggcaggcatgtggccaccaaagaatgtgaactcattctaaactcgttgggacgtgaactggtgacgtgcctggagctaagatggctctggccctgtgtggagaatgggttgaaggaacacagacgcagcagcagaaccggtgagttttgcctcagggaaattcacattcaaggggacaatcatctcagtctgaagggtacccgggagtttgacaggtgaagagacctctttcaggcagagggaacaaaataagccacagtaagtatgcttggacctg

SEQ ID NO: 4224 - DNA, 2300 bp, Homo sapien
aggaatgcatgaggccactttctaggttttgcagagctcaaacctcaatacttgtcaacactggtagtgtgaacagtggtgccagggactcagttgttagcatcatgagacctcctcaggcccctgagctaagcccactacctcagaccccccgctctacaatctgggttcttgggagcatttcttcctggggtgtgtgtgttttaatagtccatttgaagtgcccttttcattcctcgcaatctccccttgctggcaatcattccccagtaacagcataggaaggaagggcaaaaaccgtgaggccatgagctccttaccggggcccaggatgcaggtttgcaggaggctcaaaaccctgttccaaccccacagggtggctcttgccctaggaaaggaaaagactcagggacagagggaaaccccagaggtaaaccagtaactttcccttcagctcagtctgctctctcctgctctgcctatggccagtgatcatttccttaagtcacttgcaacattaaggaactgcccttgaatcttggcctagggcttgcattgggttcggtcccacttcagaggttcagtttgaagtgctcaagtattgaaagcttcctctttgcagttcattccaatcatgagtcaagttctcttcaatcctgcaaatatttagatttggggccaggccaaaatatatatgtcaaaatcacaaaggctaatagtttcaatggacttgcagtgcaatgaaggaaacatgctcattaaaatggcaatacctaataattaatacttcattaatttattcaacaaatattctgctgcaacacaggtggtctctgtctcacaaagctcacactctagctaggaggtggtcataactgaagtcaacaaagaaagacagagaacaatgactaaatgctgtggtctgaatttttgtgtccccccaaaattcatatgttgaaattctcacctgcaaggtgatgtgtattagtccgttttcacactgctgataaagacatacttgagactgggcaacttacaaaagaaagaggtttaatggactcacagttccacatggctggggaggcctcataatcacggtggaaggtgaaagacacttctcacatggcagtggacaagagaagagaacttgtgcgggaaactcccctttataaaaccatcagatctcgtgagacttattcactatcacgagaacagcactagaaagacccacccccatgattcaattacctcctacctggtccctcccatgacacatgggaattgtgggggctataattcaggaagagatttgggtggggacacagcaaaaaccatatggtcatggtattagaaggtggggctttaggaggtgattaggtcatgaatgtggagccttcttgaatgggattagcacccttataaaagggacccagagaactccctcaccccttctatcatgtgacaatgaagtgagaaggcaccacctatgaaccaggaagtgggtcttcaccagacgttagattagccagtacatttaccttggacttcccagcctgcagaacagtgagaaatacatctctgttgtttacaagctgccccctctatgtgttttgttatagcagcatatatggacttagactagccttgttataatgagacaatggtgagaacctcttttggagaggaaggtgtggaaggcctgtctgaggagacgacatttaagcagagatctggaagatacacagtgagaattccagggaaagagaggagggaatcatttgtgcaaaggacctgaggcaagaggaaagacctgaggcagttccaggaagtgccaggaggccgatggtgctagaaggaagaggagcatggtgagagtgaggtcagagatgagccagtagggcaggcatgtggccaccaaagaatgtgaactcattctaaactcgttgggacgtgaactggtgacgtgcctggagctaagatggctctggccctgtgtggagaatgggttgaaggaacacagacgcagcagcagaaccggtgagttttgcctcagggaaattcacattcaaggggacaatcatctcagtctgaagggtacccgggagtttgacaggtgaagagacctctttcaggcagagggaacaaaataagccacagtaagtatgcttggacctgcatagaagtagaaggaagatgaggggtgactgaaaggaagagcagtcaaagatgaggcggggaagcaagccgactgggtgtcaggagcaggctcagggacttgggcttggccggtgagcagtcaa

SEQ ID NO: 4225 - DNA, 2300 bp, Homo sapien
aaatgagatcaatactactcatttttctcttgctggctcccgagtgattcatgaatctgaaaactagttcatgaatcagagcagggtggggtggaggggctggggcggaggcaggcaggggaacatttgtgcagtcggcaaacctcgattcctttaatgaacctagccatgagttgcataacgctggcctgcctgctagtttaaaacagtcttttcggaagcagctttcagcttgacttattcacctattttcctcctggaaaggggaagaatgacactgggtactgattgtgtgtctgtctgtctcagggaatacttttttgctcttcgtgtgtggaaccgtaggggcttccctggacaagaacgtgtgtccatgtgtgtgtgcatacatgtataatggtctttgtgtgcacatcctctgtgtgtgtgtgtgtgtgtgtgtgtgtgtgtgtgtgtgtatgagtgagcaatgtgtgaccggcctcgggccctttaaacctgaacaggagccaagttcatttctcagcggagcttcataaggaagcacgagctggggcagttggaaaccacatccctgtgagtgctgattacagcctactaaggaaaatgagatttttatctcacaggaattcagttataaaaataaaatacagcgtctggcttgattcagctaaatgtacaagcactagggtgtttttaatttaacagagaagctggacaagaagaatgacctaaaacattgcatttaaagaaagtcagaggcgagggggaggctacaggaagtgagtgggagtagagatgtgtgtgtgagagagagagagagagagaaatggagggagagggagggaggaagggaggagggaggtggagagagagagaaaaaaaccaccctgctggcaaatgaatgcagcagggatgatgtcattggaacagttggaggagagaggagaaaaacaactcggagctgtgctaatcctgtttgctgccctgaagggaatggaaggcggccaaggcagggagttctgggaaaccatataagggtgccaaacaagcattgccgccaacattaggaactgacagctttgttctttgtaacttggctgcccgccagaggcctcatttcagctctgcggcatgattaccctggacggccgccagccccgcgctgagagctccttttcttctctccgagctttttttttttttcctctttccctctgccaaacatgcagcagttaccatggcagtggaaagtaaagttttaaaaaaacacaacaaagtagagaggcacgcctttatccagatgtgccacatgagcagatagaaaaggcagttcacctattcatcggggcctttgactgcagaagaaaacactggggcactggctgtcaagttcgggagggaggtgactccaggataaacagagcagcgagcagccctggctgcagacagagaggggctggctcccaggccctattttccttccctctctctctcccttcctggggcattgtggagtgcgtaatgtgaaacggaaaatgtcatgatttccactgggaacgtgtccacggttttgagaaagctccagaaactcaggtccataaagcactgaggggaggaggaagggagggaggagaatgggcggtcacagtgccctctggtcaccaaggtgaacccagcgagcaggagccagtacgtggctgtggcccaagcctctgcctgctgctggagcatggccaggccgtcgtcgtagggttgcaggctgttcgggggtcctgggtcccacggagccctgggacctgagggacagggatgttcccttttcccccttggaggtgtagccagtagtttggctttacagggggactctgtgaagagtccagttccctatttttaatcaggttcatttttcacctgcttagaaagtggaacatctcctgaaaggtgacaagtcgtgatcaaaggcaagtctccaggcagagagttggcaggtttccgaagcaaaggttacttagaagtggaggctccactgccagcttccccccgctgcaaaatctgacactcctcaccctcagggttcagcaagattctcggaaaggccttttctgattctaggaggtgctgcagcaggagctgactcggccatttcctggcctctttagttggaagatgacagaaaggcggaagcagggactgctattgtgaggcccatggcagccttcctgtaaaacaaattggcaaattgtcaccttcagatggaccacagctggccctctgaacagccctccttggcctttcca

SEQ ID NO: 4226 - DNA, 2300 bp, Homo sapien
cctagatgacagagcaagaccctgtcccaaaaaagaaaaaaaaagtttaaaatgagctttaaaagactggcttacaggctgggtgtagtggctcacacctataatcccagcactttgcgaggctgaggtgggcagattgcttgagtacaggagtttgagaccagcctgggcaacatggtgagaccttgtctcttaaaaaaaaaaaaaaaagaaaagaaaaggacttgcttacaatatctctcatgcttgtaattggaggtcataccttcaagaataactacaaaagcttttatttttctttgtattaaaaaaccaaatcaacaaaaactattcttccagacaacctctataaacgttccaaactaaaattcatgagattcccttcagagtattttgttgttccaaataaagaaattctgtaatataaagagctttttaagacacagatataaggtgatgccttatacttgcctatccatcctatttttctctatgctttgctggtctgagtagacagggttggtaatgaccccaaatggaacacttctctaagtgatgggaagatctcatgcagtgtccttcatcagaagtacccattacctagtgcccttgttggcactggagctggaaggctcaggatagcagggaacaggcagcccacagtcctggaagcaggcctggtggcacaggcctgggtatggagtgtcagtggtggcagaagaggggagtcactgttttcttcattagttaatgcctctcccctggagggagggcaagagctatggtctacacagccaaagtgagagggtggttgagcaattctccagcaaactcaggcaaaatcaggcaagcatatttaggcctagaagtcctggttaccacagcctaaagtgatagggacagaaagtgaaaggaacagaaaaccagtctgtatttgttttatgtgaattttggagcaatggcttttccaaaggaggaaagaagaagttattctttttaaaacacagttgaagaagaggatgcttttcctatggacatagtaggccatttaccaacgagttattaagataaaaaatacctactgggcctgtgtaggaagcctggaattctcttactttattgtattttcctctaaggatatattgcgttattccacaacaggctggtcataatctttgagagatttacttctgagactttttggtgtggcttcattcacacttcacatttcctaagagagacaattttggctactttgaaagaaccctccctcaaacataaacatcacagcatcctgactttagagtgtctgtctcaacatttcaatgttagaaggtttattggaatgcagacaaataaaataagataaataaaatctcagtgtgcttaaactgagagcaggttcttttttggaagatgtgcgtgtgtgtgtgtgtgtgtgtgttgatgagctaagtgttgattataacccaaaaagacggaaagtgtgagattagataagtgtctgctagatccattattgctgtgtgcattctgtgaaatgggcttagagttcactggttgtagctgcaggataaagttcacttgttgtttattctcagtctgattaggccaccattgaaaacagaatgtgaactactgtccagaagccctctgtgaacttcaggtctgccttaggagggacgcttccagcgagggagcgcgtgatgaagtctgcaggcattgctggggcaacgctaagtggccgctggccagggtagaagttaaaccaggagatggctgtcaaatgcagttgttaggtgtggcacatctttctcaagctgctgagctgagcaggaaagagagacgtttgtttatggatttatctcatctataagacactcttattagatgaactctatatcagttctatgtagaactctgtaccagttctataaggcactctttaatctgaatctttttatttgctcaagagaaaaataagtctgacttgcatcccattgaagatttagattgcactgtttacatctttcacctgcgccgcggtagcgtcctctaccgatgctatcctacgttgatttttccagcaacctgggaagcaacctcataggtggtttgggatgtcttttggctgtgcttaaaaatttccaacagatttgctacacatcttaggataaatatgtttcctgtgaattgtgatgatttcttacagtacatttgcaagcatgtgtatgcatctgcaggaaacatagcctggctctgtgaaggaatactgctgtgaccgcaaaactgtttctgta

SEQ ID NO: 4227 - DNA, 581 bp, Homo sapien
gaattcctttgtactcttcacagcgattagcaaattgtaaacaccccactgcgttcacccctaaccgcatttcttgccaaacctccctccctccttttcaacaagtcagtattctacgtgtttctctctcggcttgggtggacaccccgctcctagcctggctgattcttcacactgcaggcttcaaccactcccagaagacgtccttcactcccaaaatgaggcttttctgaaacggcgaggaccaccaaccgacggcgacaaacctgctccctcacccagcgcctcccttcgccgccgcccggcggccgactgccggaggggagggggcgtggccagagagcggaagtgcccggaacccggaagtgcgagctggcgcgcagctgcagtctgggagtctttggagtaagaatggccttggaagggatgagcaaacggaagagaaagagaagtgtccaggaggggtgagtggcgcgcggcacgagtacctggggagggatgttgtacgttccctcgtgctggcgaagcggtggtgcgtggcgtggctgagtttctgtcgtccatttctagagagaatcctg

SEQ ID NO: 4228 - DNA, 2300 bp, Homo sapien
ctcgtgttactggaaaaggatccagatccagaccccaacaaagggttcttggatcttgcctaagaaagaatttggggccagtccacagagtaaagtgaaaacaagtttattaagaaaataaagaagatcactcacggtggctcatgcctgtaatcccagcacttcgggaggccgaggtgggtggatcaccagatgtcaggagtttgagactagcctggccaacatggtgaaaccccatctctactaaaaatacaaaaatttgctgggtgtggtggcacatgcctgtaatccgagctactggggaggctgaggcaggagaatcgcttgaacccaggaggtggaggttatagtgagccaagatcatgccactgcactccagcctgggtgacagcaagactgtctcaaaaaaaaaaaaaaaaaaaaaaaaaagtgaaaggttactttgtagaatggtgcataccctaaagcaagagaaggaacatgtccaccttaggtacaaggcttgtttgtattgaacagcaaaaaaatgaggaagatgagctctactccaagagcttgtgacaaaggattttttgtgtgtttgttttgagacgaggtcttaccctgtcacccagtttggactgcagtggtacaatcataactcaactgcagcctcaacctcctgggattaagggatacttccgcatcattccccatgtagttgggaccacaggtgtgtgccaccacgcctggctaagtttttaatttttttgtggagacagggtctcaccatgttgcccaggctggtgttgaactcttgggctcaagctatccgcccatctgggcctcccaaagtgctgggattacaggtgtgagacactgcctggtctttgtcaaaggactgttaatcctgtgtaactactgtcttctgcaaggatcaatattatctttaaagggaaaattaaactaagaatgcttttgttcttaagatatcaggacatcaggacatttcctgggtctgttaggtaaacattattaacttgttcccttccctgtaaatatcctgtgaccaagaatgccaaacttcctgggaatgtgccccaataggtctcagcctcattttacccagcccctattcaaggtaaggtagctctggttccaatgtctcttgacactgatgcttgacttcgatacccctcaacttacagtgtctgtttaatgcctgctttctgcccacgattttccttgtcaatatcttaagttagatcatatatatatatattttgtttttttgagacggactcctgatctgtcactcaggctggagtgcagtggctcgatcttggctcactgcaacctctgcctcctggttcaagcgattctcccgcctcagcctccagagtagctgggattacaggccccggccaccatggccagctaatttttgtatttttagtagagacagggtttcactatgttggccaggctggtctcaaactcctggccttaagtgatccgcctgcctcggcctcccaaagtgttgagattacaggcgtgagccaccgcgcctggcctgatcatgtgtatgttttcgtgtggctataaaacaattcacgttttctattttttcttcaattgtgtatatttttcaagaaattactccatttaattttattccagttatcataaaatgaggctatcctgtaacattcttttgaaatggaaccactacgcacaatggattgtggcaacctgaaaagaaagtacagtttaattcaaacaagtcacaggctgcctgtgttagacaagatgaagcattcgcagtctgggaccctgcatctctgtctgccacaaacaaggctgtcagctagtcttctgagtacgtgcacgccagtaacgcgtacgcctcgttacagcatggtcggcggatatgaaaaaaagtccgtggtcacgtgcaaattcccgactccagtgcgtacacccagcggcgcaggggaaacgccggcttcgcccactgcgcaggcgcaggagccgcgctctgggcctctgctcaggctctgccgcggacgacctcgaggcccttagttgactgggaccggaagtggcgtgtgctcggcctttctgtgttcctggcccgcggccgtcgggtgtgagctgcgccgaccgctctgagggttcgtggcccaccgctccttcgcggtccctgccgccaccgtccacgctcagcgttgtagagaagatggtgggtcggaacagcgccatcgccgccggtgtatgcggggcccttttcattgggtactgcatctacttcgaccgcaaaa

SEQ ID NO: 4229 - DNA, 2300 bp, Homo sapien
ataagctttcttcatctttgtgaaataccagaagatcaagattatgggaaaccaaaataaggggcccagtaatcaaaacccagggccgagcagttgaatattgtggatttttttcataaatttctctgaagggggaagtaaaagtcacatatattcccagtcaacttggttgagtagctttcaaaaagcttaggctgtccccaaaagactcaaagtcaaatcctggctggatgcagtggctcacgcctgtaattccaaccctttgggaggccaaggcaggaggactgctcaagctcaggagttcaagaccggcctgggaaacacagtgaaaccccaatctctatttaaaaaaaaaaaaaaaaaaaaaggccaggcgcggtggctcacacctgtactcccagcactttgggaggctgaggtgggcggatcacaaggtcaggggttcgagaccagcctggctaacatggtgaaacccggtctctactaaaaaaatacaaaaattagctgggcatggtggcatgcacctgtaatcccagctacttgggaggctgaggcaggagactcacttgaacccgggaggcggaggttgcagtgagctgagatcgcgccactgcagtccagcctgggcgacagagcgagactctgtctccaaaaaaaaaaaaaaaattagctgggcatggtgctgctgcttgcagttccagctactccgtggtgggaggatggcttgagcccaggaagtcaaggctgcagtgcgccgtgatctcaccactacactccagtctgggtgacagagcaacaccttgtctgaaagaaaataagaacaaagtcaaatcctattttgccactcaaactattggatgatttaactagtaatcttttattaccctgagagtcaatttaacaaatattcactatgtacagctaatagagacacagcatacatgatgaataaaacataatccttactgtcttgcctttacatctaaagagactgtaactaacactaaagcagaccaaaaatgattatagtaagtaccatgggggcttgggaaaatatccctattgtaaatagcaaagaatttttttttttttttttttgagccagggtctgccgcttaggctggagtgtagtgatgcgatcacagcttactgcagcctcgaccttccagggctcaagggatcctcttgcccgagcctctcaaagtgctgggactacaggcgccgagcgcgaaggtgcccgtctaatttcttttctgtagagaataagtctcgctagatcgaccaggctggttcaaactcctagtcctcacgcaatcctcccacttcggcctccaaatgtgttaggattacaggcgagccaccgcacctggctgcaaagaaatactaagttagacagtatctgaggtaggccttgaaggatggacattattttgcagaaggggaaagaggagggcaattacaacagaggggacaggaataacaactgtagaggcagtggagaaagcaggctagaatgtcaggggctggagggagatgagtctgggaagacgggctgagaacaccttgaagcgttttgaatgccaagtatctacttttccaggtagaatagcaggtccgcattacaatctttcgaattgtatgttgacgtgactcgttagagttgtggtttttattttggaataatgtcatgtttcagacaagttgcaagaagagtacaaagaattcctttgtactcttcacagcgattagcaaattgtaaacaccccactgcgttcacccctaaccgcatttcttgccaaacctccctccctccttttcaacaagtcagtattctacgtgtttctctctcggcttgggtggacaccccgctcctagcctggctgattcttcacactgcaggcttcaaccactcccagaagacgtccttcactcccaaaatgaggcttttctgaaacggcgaggaccaccaaccgacggcgacaaacctgctccctcacccagcgcctcccttcgccgccgcccggcggccgactgccggaggggagggggcgtggccagagagcggaagtgcccggaacccggaagtgcgagctggcgcgcagctgcagtctgggagtctttggagtaagaatggccttggaagggatgagcaaacggaagagaaagagaagtgtccaggaggggtgagtggcgcgcggcacgagtacctggggagggatgttgtacgttccctcgtgctggcgaagcggtggtgcgtggcgtggctgagtttctgtcgtccatttctagagagaatcctg

SEQ ID NO: 4230 - DNA, 2300 bp, Homo sapien
agctatagttaaggttgtaagttctggagttaaatgacttagatttaactaccttggggggtagattaacctctaaaccccagtccctttttttttgctttgttttgttgtgttgctttttgtttgtttgtttttcttatttatttaagaccctagtctcttgaactataaagtggggctgataacatgtatctcgtagcattgttctgaggattgaatgagatggtctgttcaaagtgtatcaaaagtaaccagcatgtagtaagttctcaggaaatgttatcttaaaataacaataaaatgatttaccagaatgaacacactgaagcagtaagttccataattaattttacataagttatcagtaactaaaattaattatatctattctttaaaacatcatggaaatcattgattacaaaattattggatattcattattacattgaaaaatgaagctggccaggtgtggtggctcatgcctttaatctcagcactttggaaggctgaggtaggcaggttgctagagctcaggagttcaagaccagccttggcaacatgacgagaccctgtctctacaaaaaatacaaaaattcactggatgtggcacacctgtagtcccagctacttgggtggctgaggtgggaggatcatttgagcccaggaggttgaggctgcagtgagccatgatagtgcctggggaacagagtaagaccctgtctcagaaaaaaatagagagagagagagaaataaagaaagagaaaggaaagagaaaggaagggaggcagggagggaaagaaaataaaacaaaacaaaacaaaggaaagaaaaatgagaggccaggtgcagtagcttgctcctgtgatcccagctactcaggaatctgaggtgggaggatctcttgagcctaggagtttgaggctgaagtgcactgtgattgtgccactgcactccagcttggatgagagagtgagaccgtctctgatgaaaagaaaaatgaaggctatagtttcataagagtataaacttggggccaggcgtggtggctcacgcctgtaatcccagcactttgggaggccgaggagggcgggtcacgaggtcaggagatcaagaccatcctggctaacacagtgaaaccccgtgtctactaaaaatacaaaaaattagccgggcgtggtggtgggcgcctgtagtcccagctgctcaggaggctgaggcaggagaatggcgtgaacccaggaggcagagcttgctgtgagccgacatcacgccacttacacttttagcttggatgacaaagtgagactcaaaaaaaaaaaaagaagaatattaacttggaggtagcacaatctgggattatatcctgactccactattttctcagatatattatgataaaaatattatacttatataaacttggagaagcttttttcttttttatttcagctttattaaggtacagtttacataaaagtgatgacttttatgtttaaaatgtgatgggttttgacaaaagtatacagtgttacaaccatcaccgtgatcgtaatagaacatttccatcattggaagagcctcttagcctctttgaaacccagtttctttgcatgttacatagagataaaagccagcaacctcgggtggctgtatacacaggacctaatatatacagtccctggcacatagaagacattgctagtgttcttatcatactcatcatttttttttctgttattttctagcttctgaaagttctgctgaagacagtgagcaggaagatgagagaggtgctcaagacatggataataatggcaaagaggaatctaagattgatcatttgaccaacaacagaaatgatcttatttcaaaggaggaacagaacagttcatctttgctagaagaaaacaaagttcatgcagatttggtaatatccaaaccagtgtcaaaatctccagaaagattaaggaaagatatagaagtattatccgaagatactgattatgaagaagatgaagtcacaaaaaagagaaaggatgtcaagaaggacacaacagataaatcttcaaaaccacaaataaaacgtggtaaaagaaggtattgcaatacagaagagtgtctaaaaactggatcacctggcaaaaaggaagagaaggccaagaacaaagaatcactttgcatggaaaacagtagcaacagctcttcagatgaagatgaagaagaaacaaaagcaaagatgacaccaactaagaaatacaatggtttggaggaaaaaagaaaatctctacggacaactggtt

SEQ ID NO: 4231 - DNA, 2300 bp, Homo sapien
ggggactctggtatttgggaacacgttggtgtttataaaatagctcttatggtaggatccttctgtagatgattacgtattttaacatcctgtcttgtatgttatttctgacttgctactctgtgtgcaatcacttttattgtaaacgtcaacattcccatattttcagtatctttctgtgatatgtaatcatctggattcttaattaatctcagtcatattttgggttttttttcttctcttataattaaaaaaaatatatagtacttcagttccaagaaaagatgtccatgaaattactagtgacactgcaccaaagcctgatgctgttttaaagcaaggtaaggataatcttggaataaattacaagtactgtaaaaactgctaaagtgtttttgaagattaaatttttctttgctctttaaaatttttctttaaattatgtttttatggttatatttggttccttgtgacctttatttttataaacccatgtgtcttctgtgttataagtttccttttcttttttttttttggagacagagtcttgctctgtcgcccagggtggagtggcgcaatctcggctcactgcaacctctgcctcctgggttcaagcaattctcttgcctcagcctcccgagtaactgggactacaggcacacgccgccatgcccggctaattttttgttattttaatagagctggggtttcaccgtgttgcccaggccggtctcgaactcctgagctcaggcagtccacctgcctcagcctcccgaagtgctaggattacaggtgtgagccactgcgcccaaccataggtttcctttttttttctggttttttttttttttttttttttagcttatagtcaggcataataatctagaataatgggagagaactgtgtagtcagctgttactataatctagcttttgcctggtaaataaaatattagtttctgggaatggtagaagaaaggaatcaaagtaactttgtgttgttgttttttttgttttgttttgttttgttttgttttgtttttttgagatggagtcttgctctgtcgcccaggttgcagtgcagtggtacaatctcggtgcaccctccacctcccgggttcaagcgattgtcctgcctcagtctcccaagtagctgggactataggggcccaccactatgcccggctaatttttgtgtttttagtagagacagagtttcaccattgaccaggctggtatcaaactcctgagctcaggcagtccacccgccttggcctcctaagtgctgggattacaggcataagccatcacgcctgactgaggaatcaaagtaattttggtttggtatttctcactaatgaatgtacatccttaaccacaaggctccagtagttttatttgaggaatatgtggtaattgcatctgtcacttgatttttggcactgtaaatagttgtcttctctttgcccttattccttgaattcagtaatatgctatgtagattggttaaaatcatcaagattttttggtatataatttattcccatatattataaaatgagaataattgtgtctagctaattttagttgaaggtaattgttaccatagttttaattgaagttcaactgaaaatgtaaaaatcatgtgtggtcagttttcaggtattgtatatttattttaatggctctgtgcctggtattaatactgtttgataattgtttgttgcataagatattacatgatttcctgtattaaaggtttttactagtgaagcttaatctttgtttaaaagaataaaactgctgttcttttatttatttaaacttaagtaatcttccaatggtggcagttttgccatctataaaatgactacctaatgcataggatggataggattaaatatattgctacatttaaaagcacttaacacagtttctggtacatagcaaacaataaatgtcagtggtattagcacagtagtttttatttctttatcgtgtttaatactttttgagaaaacaattgtcttaatttcttcagttcatgtaccttgtggtctgtttccagcctttgaacaggcacttgaatttcacaaaagtagaactattcctgctaactggaagactgaattgaaagaagatagctctagcagtgaagcagaggaagaagaggaggaggaagatgatgaaaaagaaaaggaggataatagcagtgaagaagaagtaagtgaaaacagttgataccttttaaaattataaataacagttgggtttcccttgtgggttaggatttggcatta

SEQ ID NO: 4232 - DNA, 2300 bp, Homo sapien
acttaaaattagtatttctaaaaagataccaaaaaatttgcatttggctagtattaccaagaaacttttaaggctaaagtttccaacatactttcatttttttaaacagactacttaaaaaaaaaaaggaaacgaaaggaagaaaaaaaacattttaatctcagactttcaacttaactacatttcttttaaccaaacatttatagagcacctaagaagtgacaagcactacaacactgggaaatgtgacacattacatttactccaaactaaaccttttatttattcggcttctgaacttattatttcttactcaaaccaaaacttttcttaagaaattctcacccaacatcaaggtacatatacgagttacctaataaatgcactttcaccactgttttacacaggtgatgagagttatagctaggatttgtgactaacaaaagggattcattcctgaaacatgtctatgcttcatgaaatgagataggaataaactgtttcaggtagtttacagcatcccaaactcaaagagaaaaccttaaaaaaattagactaaacttaattactctgtatagtagaccaagatttaagtagccacagcttttaccttctacaaccacaagtattacaaattttaatttggatgcaaaattgtcaaagcagtcttgattctgaggacaagtgaaatatttttttaaatagttcaaaggaactgtcaaaagtagacaacgttgatattctaacatgctatctgttgcatttctacacttgtgaacactctacccttttcaagcacttctgaatttgtaatggatgaaaaaatacaagctagtgtctaagttccaccagttgaatccagacttttcaaaaatctaaggttttattctagcatgtgtttaaaaaaaaaaaagacagcattcatatacatattctctcaagtaacaaaaatacctgtatttttatcgttatcatttcttccaacaattaagcaaattttttgaccctattctccactcagttaacatattgacatctaagaggaacctggccatcagttttccacacatcataatgcaacagagcctctgacttatttacagaccaaccagatcaataaagaaaaataaaccatataaccccaagtcactggaaatacaagaaacaactggtatctctgaattgtgtaaaaaatcacaaaaattctctttttaaatctttcaattaaattatttttgtgacgagtcaaagagttttctgctaaaattttacagtactgttcacacaataaataagattctctttcatcagtgtaactgatagaaccacaatacagttcagtttctagggtcagattacctgacttgctttttattttaccttttaaaacactttaattcatgccgttattcctctcattccctacaaaaagagatgttcaatatgggagaatcatcttcagttgagacatcctataactgcctccaactccacagcaaagcccgccagctgaccccggtctctctggggaagggctcggtcaccaagtcaccaaacacaccttcctctgcaaaactcggaagccccacacgacgacctcgtcgaaacctcctacttcctgaattcgataaccccagagattcgttttccgcaggcaatcttaccttcatgatgactctgggaccaaggtatcctctaaaacaccaggttcagctgcacctggaggggaaacaaaagacacccagtcaacaccacaggagcccctctgcactggcggaggcggagggaaagaagcgagcgacgtccgaaccccgaagaaagagccgcaaccaggcgccagcccccgaaccatcacacgccgactcggggctccctccggccccgccatccccgcaaacccaaccacctacacagctcggcagcttcccgtccccattgtcgagacccgacggagtttcccgtctacgacaatgacgccatttctgtcagagaagaaactcacaacaagcccggcgtccggcgcagggccggccgctctcccctagggcctcggcgcccggccgagcgaatccgcgcccccacgcgccgcgtccgagcgagaggccggccgggggccaccgaggggccaggagggcctgtgggccgcgggcaggaccggcccgccacagagcccctgcccacgtcccgttccgggctcagacccgacaagtgggagcgagatcaacatctggccccgccgcggggacaacgtgagggccgagggccccggaggcggaacggcccccaccctgcccgggccc

SEQ ID NO: 4233 - DNA, 2300 bp, Homo sapien
aatctttcaattaaattatttttgtgacgagtcaaagagttttctgctaaaattttacagtactgttcacacaataaataagattctctttcatcagtgtaactgatagaaccacaatacagttcagtttctagggtcagattacctgacttgctttttattttaccttttaaaacactttaattcatgccgttattcctctcattccctacaaaaagagatgttcaatatgggagaatcatcttcagttgagacatcctataactgcctccaactccacagcaaagcccgccagctgaccccggtctctctggggaagggctcggtcaccaagtcaccaaacacaccttcctctgcaaaactcggaagccccacacgacgacctcgtcgaaacctcctacttcctgaattcgataaccccagagattcgttttccgcaggcaatcttaccttcatgatgactctgggaccaaggtatcctctaaaacaccaggttcagctgcacctggaggggaaacaaaagacacccagtcaacaccacaggagcccctctgcactggcggaggcggagggaaagaagcgagcgacgtccgaaccccgaagaaagagccgcaaccaggcgccagcccccgaaccatcacacgccgactcggggctccctccggccccgccatccccgcaaacccaaccacctacacagctcggcagcttcccgtccccattgtcgagacccgacggagtttcccgtctacgacaatgacgccatttctgtcagagaagaaactcacaacaagcccggcgtccggcgcagggccggccgctctcccctagggcctcggcgcccggccgagcgaatccgcgcccccacgcgccgcgtccgagcgagaggccggccgggggccaccgaggggccaggagggcctgtgggccgcgggcaggaccggcccgccacagagcccctgcccacgtcccgttccgggctcagacccgacaagtgggagcgagatcaacatctggccccgccgcggggacaacgtgagggccgagggccccggaggcggaacggcccccaccctgcccgggcccccgaccgcggccgctaaaccgctgagtgtgcggccgcccagccagggggcggctcggacacagcggctgcggggggtgggggttcccgggaggccgaggccccgaattcgggcgccgcagggaccaccaccgcgatcttcctctgctccttggccgggcccagcgactcccaaaagaacccccttaggagaccacgaaagccccagaaaatatccctaccttcctcggaggcgagatctgaccctggcacgtccagagtcccctctctccttctcccccccaaaaccagcaggcccgggggagagatggggaagaagggcggcgggtccagcggctgctgaggcagaggctccggctcctcctcctcccgcggcggcgactggtacctttgtttggcggccgctcgggctccctggttggggggagggggacgacgaaaaatcccccccggactggaggtccgggcccccaatcgcgctgccctccagaggacggcggcgatggaccctctgcagctccctccgggcaaaggtccaggcggtggccgtggcggcggcaagatgaagctcaagagtctccctccgcttcggcgaccgagctcctcactccggactcgactgacgggcaaacatcgcttcccccccaccgactctaggttccccccctttctcccctcccctagattttttttccccccctcccctacctctttcccggatggcctcttagacgaccttggattggttaaagttctttagaacccgcctatacactgttcctattggtccctggatacaaacaacgacgccattttcccaccagttctatggaaacagaaagttacgcctcaaggctttctgggaaataaagtccatactctggggccaacgcgcaaatcctcgtccgcgagaactgcaaggcccgcaatgccctgcgcctgcgtggaccggtgcgggggcgggggggaggtgaaaggggcggggcaacaaagcagtagggaggcggcaacgacgcctgcgcagtgtgaccgggatggcgcattttcttgcaccaactaatgcggtgtcgctggcggctgaggagggcggagagttctgtggtgaaatagtgggaaggattcatgtaggcatcgggaagagcctaagtccacattataaaataggaagttgatgcggggtacagttactcccggaccggcggcgtgaaagtcgtga

SEQ ID NO: 4234 - DNA, 2300 bp, Homo sapien
tcatgatgactctgggaccaaggtatcctctaaaacaccaggttcagctgcacctggaggggaaacaaaagacacccagtcaacaccacaggagcccctctgcactggcggaggcggagggaaagaagcgagcgacgtccgaaccccgaagaaagagccgcaaccaggcgccagcccccgaaccatcacacgccgactcggggctccctccggccccgccatccccgcaaacccaaccacctacacagctcggcagcttcccgtccccattgtcgagacccgacggagtttcccgtctacgacaatgacgccatttctgtcagagaagaaactcacaacaagcccggcgtccggcgcagggccggccgctctcccctagggcctcggcgcccggccgagcgaatccgcgcccccacgcgccgcgtccgagcgagaggccggccgggggccaccgaggggccaggagggcctgtgggccgcgggcaggaccggcccgccacagagcccctgcccacgtcccgttccgggctcagacccgacaagtgggagcgagatcaacatctggccccgccgcggggacaacgtgagggccgagggccccggaggcggaacggcccccaccctgcccgggcccccgaccgcggccgctaaaccgctgagtgtgcggccgcccagccagggggcggctcggacacagcggctgcggggggtgggggttcccgggaggccgaggccccgaattcgggcgccgcagggaccaccaccgcgatcttcctctgctccttggccgggcccagcgactcccaaaagaacccccttaggagaccacgaaagccccagaaaatatccctaccttcctcggaggcgagatctgaccctggcacgtccagagtcccctctctccttctcccccccaaaaccagcaggcccgggggagagatggggaagaagggcggcgggtccagcggctgctgaggcagaggctccggctcctcctcctcccgcggcggcgactggtacctttgtttggcggccgctcgggctccctggttggggggagggggacgacgaaaaatcccccccggactggaggtccgggcccccaatcgcgctgccctccagaggacggcggcgatggaccctctgcagctccctccgggcaaaggtccaggcggtggccgtggcggcggcaagatgaagctcaagagtctccctccgcttcggcgaccgagctcctcactccggactcgactgacgggcaaacatcgcttcccccccaccgactctaggttccccccctttctcccctcccctagattttttttccccccctcccctacctctttcccggatggcctcttagacgaccttggattggttaaagttctttagaacccgcctatacactgttcctattggtccctggatacaaacaacgacgccattttcccaccagttctatggaaacagaaagttacgcctcaaggctttctgggaaataaagtccatactctggggccaacgcgcaaatcctcgtccgcgagaactgcaaggcccgcaatgccctgcgcctgcgtggaccggtgcgggggcgggggggaggtgaaaggggcggggcaacaaagcagtagggaggcggcaacgacgcctgcgcagtgtgaccgggatggcgcattttcttgcaccaactaatgcggtgtcgctggcggctgaggagggcggagagttctgtggtgaaatagtgggaaggattcatgtaggcatcgggaagagcctaagtccacattataaaataggaagttgatgcggggtacagttactcccggaccggcggcgtgaaagtcgtgatatcatcgttgaactgtgagcggcagtggcggcggctggggggaacccggatgggaagaagggcgggggaggctgggaggcggggcagaggaaagaaagaaaggagagtgaggacccggatgctgaaccggattgtgtatgaattttccatcccctagctttaagcgaggagggagaggaagggttggccaagtggggcggaagggagcatctgagcgaggaggaagcagaaacctcaccgtttcttcccctccggactctgtgctagcactgtatacgtttgcagttctctgcccagccgctgtggaaaatcggcctcgaagtgattgaaattccctgtttatatcaggcggcttctttcagatccatcgtctttctcccggagtatgaatggaaggattcagtatgcgcttcacatttgtatgtctctggccattctcaaaccaggccct

SEQ ID NO: 4235 - DNA, 2300 bp, Homo sapien
agagacgggctttcaccgtgttagccaggatggtctcgatctcctgacctcgtgatccgcccgcctcggcctcccaaagtgctgggattacaagcgtgagccaccacgcccagccgccttgtgtcttcttaagagtctaaaggattctacacaccgtggcatatactctcaccctcacccgcctttgtttttcttttaaatcaaaggatttcccaatttatcacagctggaaatttcagctatcacatactaaagttaaatgtaaagaggcattagtgtgtgttacatgaactctactagtttccttttagagtgaaaaaactacagaatacctcagtgagagtctgaaacttctcactttcaaaactaaaaagctgccagaaatttgttcaaagagtgaatccataatcattaatacaaacgctccattcttttcaccatgtgaactactacggcaatagcctcctcgtcgggttccctgcatttgcctctttaactcttctttttttcgcttcctctactcttcagccagggatgacattccaatcggagccatctctcccttttgattgagattccttggaagatatcccattgctattaggagaaaaccaaaactcctttacaaagcctaaaaggttcgacactccccctcatcccatctctccaggctcagttcttcatattggaaaagctcccttccgccacagggctttctgacaagttagtctttttgtctggaatgtcttttccttttctctttccttagttaactcctgctagcccttcagctctcagctcgatcctcacttgctcagaaacccttcctttccctccctaaagaagccaaattccctcattctcctatcaccgtggaactctcctctggggcactgccactgcggtaatttcacatcgttttgttcagcatctgtccgtctcaccaggcgcaggtctacgaaggcagaggccaccccagtggtcggcgctcaacacccatgaagaaatgaaagcgccttctaacgcgttagacgatgaaaccagggcacacaaccttgcgtctaagaagtgaacatcccatgcaaaagacttttcaaagggaagggcctggtttgagaatggccagagacatacaaatgtgaagcgcatactgaatccttccattcatactccgggagaaagacgatggatctgaaagaagccgcctgatataaacagggaatttcaatcacttcgaggccgattttccacagcggctgggcagagaactgcaaacgtatacagtgctagcacagagtccggaggggaagaaacggtgaggtttctgcttcctcctcgctcagatgctcccttccgccccacttggccaacccttcctctccctcctcgcttaaagctaggggatggaaaattcatacacaatccggttcagcatccgggtcctcactctcctttctttctttcctctgccccgcctcccagcctcccccgcccttcttcccatccgggttccccccagccgccgccactgccgctcacagttcaacgatgatatcacgactttcacgccgccggtccgggagtaactgtaccccgcatcaacttcctattttataatgtggacttaggctcttcccgatgcctacatgaatccttcccactatttcaccacagaactctccgccctcctcagccgccagcgacaccgcattagttggtgcaagaaaatgcgccatcccggtcacactgcgcaggcgtcgttgccgcctccctactgctttgttgccccgcccctttcacctcccccccgcccccgcaccggtccacgcaggcgcagggcattgcgggccttgcagttctcgcggacgaggatttgcgcgttggccccagagtatggactttatttcccagaaagccttgaggcgtaactttctgtttccatagaactggtgggaaaatggcgtcgttgtttgtatccagggaccaataggaacagtgtataggcgggttctaaagaactttaaccaatccaaggtcgtctaagaggccatccgggaaagaggtaggggagggggggaaaaaaaatctaggggaggggagaaagggggggaacctagagtcggtgggggggaagcgatgtttgcccgtcagtcgagtccggagtgaggagctcggtcgccgaagcggagggagactcttgagcttcatcttgccgccgccacggccaccgcctggacctttgcccggagggagctgcagagggtccatcgccgccgtcctctggagggcagcgcgattgg

SEQ ID NO: 4236 - DNA, 2300 bp, Homo sapien
agttgtgtcaccaggctggagtgcatggcgcgatctcggctcactgcaacctccgcctcccaggttcaaatgattctcctgccttagcctcccaagtagctgtgattacaggcacacagcaccatgcccagctaatttttgtatttttagtagagacagggcttcaccctgttggccaggatggtctcaatttcttgaccttgtgatccacccgcctcagcttcccaaagtactcggattacaggcatgagccaccacgcctggcctttttttcttttttgaaacagggtctcactctattgcccaggttggagtgcagtgttgagatctcagctcactgcaacctctgtctcccctgctcaagagattctcccaactcaacgtcctgagtagctgggactacaggcacctaccaccacgcctggctaatttttgtgtttttttagagacagggtttcgccacattgcccaggctagttttgaactcttgagctcaagtgatctgcttgcctcggcctcccaaaatgctgggattataggtgtgagccaccgtgccctgctgaggagagtcttagtttgggatccatggattcctttgaggcctattcatgggcttcaaaggattaatcagtccttgaaatcatacgcaaaatttgtgtgtaggtagatagcttttatcagatttccaatgtggtttttaatcccctcttccaaagaaaaaacaatcactgtaatatctagtttctagtttcaaggagtgaactatcaaagtataaaacagtagagacatccagcaggatactgactgtttgtgtccatttaatatgacaattagaaggtcacttcttggaagagtcatttggctttgctccctcaatttcctttccacttcacctcacttcagtctggttttggaatgctaacactcactctacccaaactgctcttgttgtggagtctgtggtatccaccaatgggttctttctgcctgctgcacaaacaaaattaattgacagaaaccatggcattgcagtaaagaaagtttaattgacgcgaggctggccatgccacgtgggagacagagttgttactcaaatccatctcaccaaaggctcagaggttagggggtttttcagatagtttgacaggtacggggccagggaatggggagtgctgactggttgggtcagaggtgaaatcataagaagtagaagctgtcctcttgcactgagttggttcgtggatccccaggttgatgagtcagggtggggccatccacttgtcagaaatgcaaaaacctgaaaagacatctcaaaaggccaatcttaggttctacaacagtgatgttatctgcaggaatgattggggaagatgcgaatttgtgacctgtggaataatgggtggtaatcatttaactacaattacaacttagaagaattcaggaccctctcattctcctaacttggtggcctttcatttagttttaaaagggcagttttggggaagggttattatcatttaaactataaactaaatttctcccaaagttagtttgtcctgtgcccaggaatgagcaaagacagccagtctgtgaggctagaatcaagataggagtaaaccatgtcagatttctcttactgtcaaaattttgcaaaggcggtttcaacagaaattaacatgtctaggatagttgctttttctattattttttctatcactgcatttactttcattctgccttatgctttaactaggtaattttttttttttttttagttttggcggtatcaacactatattcttctctttgaccaccgcatgctgcctacgtggtagactctcaatacgcatggaactgaacctcttacaggatttgtaactcacttctgtggtatctagtaaactggaacacgcgctttccctgggctgctctgtcatcccaggtttcagcactcggaaatcgcttgggcccccgcccagaggcggggcttgggtgggctgaccactcctctggcctccaatactgtcgctgacattctcgtctatgctccagcagccgtacctcactccggtggaggcgggacttcctacagcacttccggccagagcctcaagcttcgctgctgggcagttggctggaggggctgctgctgggaacacctggagtctccgcgggcaggtgagcttcagaggttcggggagctttcggaacgagcattcctggccggtgcgtcaccctgcagtgctcttggccttttcttcctttcctggaatcttcccagattgccagagccgggcgt

SEQ ID NO: 4237 - DNA, 2300 bp, Homo sapien
cattgtaactttgaacagttgtttaaatactgctagttgatactgcaatctgtgtcatttcaatcccacactcacaattcccctacccggccctaattgttatattttccagagcaggaataaccttctaacatgctggttgagtatatttctttattatgtctatagtctgcgccctactccccatcaacacaggatagggatctttattttgttcactggtgtatctaaagtacctacaaaagtgtctggtacataatagacactcaataagtatttgtcgaatgactagctctgctgaaatgagggattagtcctctttttaggataactcattctaattcacaaaatgaaaattttacaatatcaacagaggccatttactacctttcctgaggataaaaatagtatactttttctggcaaccaattattactttcttgccttttctttttattttttttttgtttgtttgtttgtttttgagacagagtctcgttctgtcacccaggctggagtgcaatggcgcgatctcggctcactgcaacctccgcctcctgggttcaagcgatcctcctgcctcagcctcctgagtagctgggactacaggtgcccaccactacgccagactaatttttgtatttttagtagagacagggtttcaccatgttacccaggctagtctcgaactcctgccctcaagtgatccgcccacctcggcctcccaaagtgctgggattacacgcatgagccacggcgagccaaagtacttttttcccttaagcctgtttgagttgggtcttctgtcatccaagactttttttcaataatacagtcaccttctgtttccacacttgtggaaacttaaaaaaaaaaaaaaaaaaaaaaccgcggccgagcgcggtggctcacgcctgtaatccaagcattttgggaggccgaggcgggcggatcacctgaggtcaggagctggagaccagcctggccaacatggcgaaacctcgtctctacaaaaaaaatacaaaaattagctgggcgcagtggcgggcgcctgtaatcccagccactcaggaggctgaggcaggagaatcgcttgaacccaggaggcggaggttgcagcgagccgagatcgcgccattgcactacagcttgggtgacagagtgagactccgtctcaaaaacaaaagcagaaacaaaaaccgccccatagcccagccgctcgttctcatccttctctcccatcctcaccccagtgccttcaccgccccgtccccgctttccggctgcctcggcgcgggcctggtgggccaggagggctcccacccggggcaaagcctcaagacgcggggccggcgttctccctggaaggcgcgctgcggccacccttccccaggtccccggagcccacgttctcccagctcgcccggctcccgtttcgctcccagctccagtatgaacccggagcacgtgcagttctaccctgattggctcgtcatcatcgtgttccacagcctagtccccagctcgctgtctgtcaccctgcgttcccagagcacagaaccgggcaaagagccgggaacccacggcaccagagctaatccctgatgagtcaccgctccaggcgcggacactcgggcttcctcgccccactctacgggccaaggagacgtcagcaggatcccacctcccacagcagtcgagcaagagagcacgcggaacagaggagctctgcgtgatttcacacaagagccactcggatttccttcaaatctgaggcaaagcgcatttcccttcgcggctccgggcagcctccgagcaccgggtctccggcactacctcccctgggccgtggggtggcagcaaacgtcaagggggatgcgcatgctctgtgtggggcctcgcgcttcgcccccgcggccgccgagtgacggaagcgcgtgcttaggctcatgggaaatgtggtttctaaaccgcgggcgccccctgcctgggcccagagcgggacttcagctcccggccggctggctggcgcgtgtggaaacgcgggaggagagggcggggcgagtgggagaaaaggtgggcggagccggtgggaaggccaggcggagggggcggggcttcggccggctaagccgcggccacccgcggtctgagggaccggaggagcggggccgggagctgcgaggagccctccagacgtcgccgagcgcgagggcgggcgtgctcggagtggtcgctcgtcagccgccgcccctcagtctccgcacttgcaggtcccctccctctccgccgggacgcgg

SEQ ID NO: 4238 - DNA, 2300 bp, Homo sapien
taatccgctaataaatactcgcaggcagaacagcctaattggcaggatgagttaatgcacaggccatttatctgccaagcacatgacacagaccatgaacaaaataagctggtaactgcctctccctcttagcaaatgcttgtccgcaccccgccctctcccaacctgctcttcctctggccttgagcttggggacagtttgatgcacaactgccatgcgccagcaggcttcagataagcctggaaagaaatggaatggaaagaactttctggtcaggagcacctctctccgcagggaagtggccactccaagttaaaacatgtgtgctggctgggcacggtggctcatgcctgtaatcccagcactttgggaagccgaggtgggcagatcacctgaggtcaggagtttgagaccagcctggccaacatagtgaaaccccatctctactaaaaatacaaaaattagctgggcatggtgagtgcctgtaatctcagctacttgggagactgaggcaggagcatcacttgaacccaggagatggaggttgcagtgagcggagatcacgccaccacactctagcctgggcaacagagcgagactctgcctcaaaaaaagaaataaaaatgaaaaatgaataaaaataaaacgtgtgcttataaaatatagctaaatacaagttctgttgaggaggatgaagtgtctctctgtgttggtcacaagagtggattgcaataaaacaactaataatgataataaatatgatcacactggcttggccaggggctgccttctgctttagtcttccagaaacggtttagcaaagtcattgtgagactactgtcctggaacctccactcctcacctactcgagaatatatcaaggctgtctgggcctcctgccagccctcagtcctgtctccatgctggcctgccatgcgagggcagcctccccttcttggaggcccgcttcgaaccagtctcctagatctgcacaaaccctccctccagcctgggcatgaccatgttgtaggccgtgcacacaatacagcctaccctagggcttgtcccctctgtacgtggacacctcttccctggactcactctgcaaaggggcctttaactgagcacctgtgctctgtgccctcacaggtctcccaggcagctgcggacctcctggcctactgtgaagctcacgtgcgggaagatcctctcatcattccagtgcctgcatcagaaaacccctttcgcgagaagaagttcttttgtaccattctctaactccgtgtgtgatgaaaacgcctccttttctgaccttcaaagtcccctgtagagaccatgcatgctctaagccttagggagtgagaccaacacccatccctgcccagccaacagtggccggggcttgtcttatgtttccatctgttttcttcgtggcattcaatttcatttttttccttttcattttcatgttattttcattattggcaaagaaaatcaaaatgtttatagccaaataacaaatgtgccatgtaaaagtaagtctggacttaagagtttaaaatttttaaacatcagtttccaagtttatatcatattaatacatttcagtggataatttattttaaaaaaaaaactatgcctaaatatcccttatttgcaatattcagtatcaaattagagcattttgaccaactgaaacatataacgttttcatctcctttcctggagaaagcagctgcagaggttctgtatttcctgcatttccatcatcctagtaaaaagacaacaacccacaggattggaatggttttcttttgttttttttttgttgttgttgttgttttgagatggagtctcgctctgtcacccaggctggagtgcaatggcgtgacctcagctcactgcgacctccacctcctgggttcaagcgattctcctgcctcagcctcctgagtagctgggatcataggcacgcgccaccacacccagctaattttttgtatttttagtaaagacggggtttcaccatgttggtcaggctggtctcaaactcctgacctcgtgatccacccgcctcggcctcccaaagcgctgggattacaggcgtgagccaccacacccggccgtggaatggttttcttagcatatcctcctggggccgtggcgccccggctgtgggccgtggtggatgtcccttgtttcagtggtcctacaaaggtagatggtgggcggacaccgaagtcaacttgactgtaaaagtaccccataccgttgacgcgctgtggcagacctgtgggtg

SEQ ID NO: 4239 - DNA, 2300 bp, Homo sapien
cagctcatgaggtcaagagatcgagactatcctggccaacacggtgaaaccccatctctaccaaaaatacaaaaattagctgggcatggtggcgtacgcctgtagtcccagctactctggaggctgaggcaggagaatcgcttgaacccaggaggaggaggttgtagtgagccgagatcgcgccactgcactccagcctgggcgacagagcgagactccctcccactccgcaaaaaaaataaataaataagaagaaagaaaactgatacccagggtcctggtgccagactttacactactgcagctatcctgggtgatgtccagagatgaacggaatcagaattacctggagggtttggggaatcacaggttgctgggccccacccccagagtttctgattccttaggtctgggtggggcctgggagtctgcatctctaaaagattcccaggtgacacgctgattctactggtcttgggatccactctggaaccacttgttgactgacctcttcctcctgtttaaaactgacatgatcctatcttgaatgatagtgtaacaattagaaagataaaataaggaaatgatgcgcttgaaagtgtagacactgatttcccttgtgattgattaattgagattgggatttgggataaaaggaaacctaggattctgccttagccaaccagtcgggggcgggaggtgggcaggaaatgcaggagaaataagattttggggtgaaaacaatgagctagggtttggatttgcttgaattttcaatgcagtactcatatatctttctcacttttaaaagtctgtgaggtggacatggactggcttcgtcggtttgccaaggtttaattttgtgccttaaatgggcacttgagagctttgtaaaaaccgatgtgtttgctggccccgtgtttacgggcctttgtgatctccgcgttcgcatccaatctggcccttgggctccgagaaggtacacgtgtgtgtagggcaaggtccaaccagtggggccagggatctgagcaacaagcgcgccctgtgtcctttgtggcagggaccgcttgtggacggcggatgaggatgaggcgcccagatcttcccgaaatatttcctaatcgttcatcatgatgttatgttgttgttttcacaaagggaattaatattggcctccttttctacaaatcttgccaacactgcgtgaaatgttttcgttgcttctctattcccaaggtttcgtattattttaccaagtcggaaaatggacggcgcttaaactgttttttccctgaaaggaagagggctgtaatcactaaagtgttttaaaatctccagcgcaaaagcctgcggtgccacagggacgaggcctggagagcagtcgctcctagaaccggggcgcgaagggcacccccgcctccagcacgcgccctccgccctcccggcctcgctccccccggagtgggggcctcgccggcccctggtccccgtcactcagcaacgtcgggtcagccttcgccgggttagtggcgacgcggccgcgcgaattcgcacaggtattccgcgtttctccgccgttccccgccttggccggaggcttccgaggcgtcccttggtgcagggtgggaagcggcccgcgccccaacggcccaggcgctggagctcaccccgagcgagggcggtacctgaggcttcggggagcccgcgctgaccgcggccccgtccccagacccctccagcaaccccggccccgccccagacccctccggtgatttcccccccggccccgccccgcagatccctccagtgatctcccccccgccgcgccccccagacccccccccagtgatttaccccccggccccgccccacagacccctccagtggtcccccggccacgcgggctccgggggggcggggcgggggcgcggccctttgctgggacagggggcgtgggcccgagtagcgggcggggggcgcgggcccgggctggggcgggggcgggggcggggagcgcgggagccccggtgacgcagcagtgacgtcggtggcagcgggcgggatttcccgggcgagaccccgcggcggagtgggcgcggccagcgtggaacgggggcgagggtcgcagagtcgccggctctcccttccccagtctgggcccccacggcacagggggccgagcagaagcccccagcgtccagggccgggggagggtccgcctgcgcccccaggcccgcgtggtcgggccctgcagggcgggaggcgcggcgcggggcggggccggtgacgggacgcggaga

SEQ ID NO: 4240 - DNA, 2300 bp, Homo sapien
aaacattccaattaaaagtagagatggggtttcaccatgttgaccaggatagtctcgatctcttgacctcatgatcctcccgcctcgacctcccaaggttttccttctttatccctagtcatattctttgttctgaagtcttctttgtttttatctatataaccactgcggattttttactattagttgtcaagctgacagatcgtcaagctgaattttaaaagcagatccagctctgtgctgcctacgaagatggagaatcccacttttaagaacaaagatacaggccgggcgtggtgactcacgactgtaatcgcagcactttgggaggccgaggtgggaggatcacccgaggtcaggagtctgagaccagcctggacaacaagttgaaatccggtctctactaaaaaggcaaaaattagctgggtgtggtggtggacgcctgtaatcccagctgctcaggaggctgaggcaggagaatcacttgaacctgggaggcggaggttgcagtaagctgagatggcaccattgcactccagcctgggcgacaagagcgagagtctgtctcaaaaaaaaaaaaaaaaaaaaaagatacagatagatttaaaaattaaaaggatataaacacatatcatgcaaacactaatagtaagaaatctgcagtggttatatagatataaacaaagaagacttcagaacaaaggatatgactaggaataaagaagaaaaaccttgggaggccgaggagggcagctcatgaggtcaagagatcgagactatcctggccaacacggtgaaaccccatctctaccaaaaatacaaaaattagctgggcatggtggcgtacgcctgtagtcccagctactctggaggctgaggcaggagaatcgcttgaacccaggaggaggaggttgtagtgagccgagatcgcgccactgcactccagcctgggcgacagagcgagactccctcccactccgcaaaaaaaataaataaataagaagaaagaaaactgatacccagggtcctggtgccagactttacactactgcagctatcctgggtgatgtccagagatgaacggaatcagaattacctggagggtttggggaatcacaggttgctgggccccacccccagagtttctgattccttaggtctgggtggggcctgggagtctgcatctctaaaagattcccaggtgacacgctgattctactggtcttgggatccactctggaaccacttgttgactgacctcttcctcctgtttaaaactgacatgatcctatcttgaatgatagtgtaacaattagaaagataaaataaggaaatgatgcgcttgaaagtgtagacactgatttcccttgtgattgattaattgagattgggatttgggataaaaggaaacctaggattctgccttagccaaccagtcgggggcgggaggtgggcaggaaatgcaggagaaataagattttggggtgaaaacaatgagctagggtttggatttgcttgaattttcaatgcagtactcatatatctttctcacttttaaaagtctgtgaggtggacatggactggcttcgtcggtttgccaaggtttaattttgtgccttaaatgggcacttgagagctttgtaaaaaccgatgtgtttgctggccccgtgtttacgggcctttgtgatctccgcgttcgcatccaatctggcccttgggctccgagaaggtacacgtgtgtgtagggcaaggtccaaccagtggggccagggatctgagcaacaagcgcgccctgtgtcctttgtggcagggaccgcttgtggacggcggatgaggatgaggcgcccagatcttcccgaaatatttcctaatcgttcatcatgatgttatgttgttgttttcacaaagggaattaatattggcctccttttctacaaatcttgccaacactgcgtgaaatgttttcgttgcttctctattcccaaggtttcgtattattttaccaagtcggaaaatggacggcgcttaaactgttttttccctgaaaggaagagggctgtaatcactaaagtgttttaaaatctccagcgcaaaagcctgcggtgccacagggacgaggcctggagagcagtcgctcctagaaccggggcgcgaagggcacccccgcctccagcacgcgccctccgccctcccggcctcgctccccccggagtgggggcctcgccggcccctggtccccgtcactcagcaacgtcgggtcagccttcgccgggttagtggcgacgcggccgcgcgaattc

SEQ ID NO: 4241 - DNA, 2300 bp, Homo sapien
tagcttagttaaaatactggaaccgaggccaggagcggtgtctcatgcctgtaatcccagcactttgggaggtagaggtgggtggatcacctgaggtcaggagttcgagaccagcctgaccaacatgatgaaactctgtctctactaaaaatacaaaattagccgggcatggtagcacattcctgtaatcccagctacttgggaggctgaggcaggagaatcacttgaacccgggaggcggaggttgcagtgagccgagactgtgccactgcactccagtcagggaaaaagagtgaagctgcatcttgaaaataaaataaaataaaaaacactggtaccgaaaaaaataatagtcacaaatggcattactttgtgccttttacaaacaaataatactttgagggccaattgtataccattatcatctaaagtctgtctcattttctttgctttaatgaaatcatgataatctattattttctactcaaggttaacagaaactggcttgttacttaatatttctttgacttcttttgtccattaaaaaaggggggtgtttttaagattagtgggtgaaagttgatgtataaataagagtagacacagctttaggtaaaatgacgaaacaggttaagtttggcttcctctttttgtttcagttcaggcccatgcacctagcacaatacttagcgcattgtaggtgctcattatatactgcttaaatgagtgataagttccctgagacatttatttcctgcacttgttagggttcagtgagccgatatccggccactgccctccagcctgggcgacagagcgagaatctgtctcaaaaaaaaaaagataaaaaataaaaataaaagactacctgccagaggaagtgggcaatcttcgcctaaagatatgaactgctaatggttaaacatcagacgtcagagaagacatattttaaagtggggaattttccccaagagcaccctctaaaccacatcagtgggcaacttaacgcactttgcttgtcattgggttagatgggagtttgaggaattgggagtaacatttggtatataggcttgggacataatatcctgaattatttctatttcataattcctgtgcaaaaaattatgggagttgttgattctacagcaattcctgtcaatttgtagattatctgcttattaatagtttgtattgtttggcagaacttgaaaactaccgaacgattacagttcaggctttttcccagtacctctggcgttgctgtctcagtgactaggaggtgaggagggtggcccttgaaatgccaaactgcctaccgcagcagtctgccagcagcgtgctgggcccagagccggggatgcagccaaaacatcctggattttacctacagctcccaccctctggagggactggtctattagggcatatgacactgacagtgcgcactgtatacaaaccgtgtttgaacaggagtcggttggaaaatacaccactgcactgaattacttctgcagtggctttgcaaagctctttttgtttcttgaaagaagccgacggtaaccattacaatatggctttttccaggtcccagaggaaggctaggggtgccttgtgggtaaccctttctccctctcctgactccttcccgttatttcttctatcttcatcctctagacctacacaatgggacaggttgacagtctgtgttgaatggaagaggcggacgatgcgcttgtgtttggtgcttctcaaacggtgctcgcactccccagggtctgacgcagcccactacgcagagccctgggaggaggtgcggacccagggtacgacccccgaccgctgagaaacccagaccgggccccggctgcagccccgcgggtcggcccgcccccctgccttccctattggctcggcagttccacgcgtcacgcctgcgacgccggcgctgccctcccagaggaggcggggcttacacgcgcgaggcggagccaagggcgcacgcgcagacgagcgggtctgggtccggacgaggggagggagggggtggtgttctcggtttcctgggttacctgggcgggcgggggtggggagtgcgcggcggcggcggcagcggcgtcggctcggggttctccgggagagggggagtgcgcggcggccgcagctgccacaaaccaggtaaaggcggccgccgggcgccgacgctgccggcagaaggttccgggtcccggcccctctgcgtggcctggaggggaggcggtttggggctggtggctgtcagcctgggttgagggccggga

SEQ ID NO: 4242 - DNA, 2300 bp, Homo sapien
aaagggactgcaataatgatgtattgaagaaatatttatcaagaacctaatacctacatggtacctaagatactagaatacatttataaatatttgttgaggaactaattataaagactattccaggtgctttagggttcagccacaacctattataagtaatacctattataagtgggtgcttgtaatagatattaccatattatctaagcactcactttaatactcattgttctgggctccacctgatgttatgatatgaatctttttagctatactctgatccagaagatcacatgattagcatcaatttctaaggacagtaataaacttgatagttctgagcaaatacatacactacagaatagtcattcaacaaatatttattgcctgcctactatgtagtctatatatacctatatgtaacacacatgcaaagaacagtctagttagtagtttagaaggaaggaattggatgttaaacgggcctgggttcaagcactggtgccaccctttaaaagcagtgaaacattgaacaagtcttagattccttatcagtaaaatgggaataaaagtacctatctggaagaattgttgtgaggattacatacaataacactgatgaaatactagcccaggacctggcataattgccaatttaaaaagagcaacttggcaaagtgctagttgggaggccaaggcgggaggattgcttgagcctgggagttcaagaccagcctgggagaaatagcaagaccctgccactaaaaaataaaaataattagctaggcatggtggtgttttcctgtaatcccagctactcaggaggctgaggcaggaggatcacctgagcccaggcgtttgaggctgcagtgagctaaggtcacacaactgcgctctggcctgggcttcagagcaagaccctgtctcaaatgaaaaaaaaaaaaaaaatgccattgtttatatatatatgtacaaaagtttctaaataaaaatattaattcagaaatccataacagacatattaaaaagatgacagtagtttttaattaaaatattttaaaggtaacaacaggaggaggaaaaaaaaaaggcatattttagcacaaaggaacggcaaaaaaaaaaaaaaaagacactaggagtttggtgaaagtttgccaccagaaagctagtggcagtatccatgcttcaaactcatattgtgggccaggtgcagtgattcatgtctgtaaaccatggctttgggagactggggcaagaggattgcctgaggccaggagttcaagaccagcctgggcattaaaaaattagctgggcgccgggcgcggtggctcacgcctgtaatcccagcactttgggaggccgaggcgggcggatcacgaggtcaggagatcgagaccatcccggctaaaacggtgaaaccccgtctctactaaaaatacaaaaaaattagccgggcgtagtggcgggcgcctgtagtcccagctactcgggaggctgaggcaggagaatggcgtgaacccgggaggcggagcttgcagtgagccgagatcccgccactgcactccagcctgggcgacagagcgagactccgtctcaaaaaaaaaaaaaaaaaattagctgggcatggtggctcatgcctgtagtcccagctacttgggaggctgaggcaggaggatctcttgagcccaggaggtctaggctgcagtgagccatgattgtgccactgcattctggcctggatgacagagcgaaaccttgtctctgaaaaaagaactcagattttggggtttagttttatgtcctccaaggactgcagacttctcaaaccaagagtaatgatggtcctcacaaggacaaacttaggtccaccctctctgcagaagaatcagggaattatgactcataggagccaccacaaaatcactaactggaaatccttgctgcagctacactgcaaaagaatcggacttgatttgccaaattccccatgtgatacaagcgtggccacctgccaaagagccagagggagagagggccactcgccttcctggtgacacagagatttcctagccccgttaccaaacgaaaaagcaacgcaagggcttctaagaagccatcccaatgaccttttggctttgagaagagcagtcctcataccagagtgtttggggttttggcctctttcagtgtttattcattcttacgtgggaaagttgtattccgaggtttctgtggtgcatgaagcttttgccttcaccatctgttcccgtgtcttcctcgggtgacatcagagt

SEQ ID NO: 4243 - DNA, 2300 bp, Homo sapien
cttctttttccccaccatgccatttatttgttgaagagaatgataatcttttaaagttaaatcgtgtcagccatctacttagaaatctctaatggccgggcatggtggctcatgcctgtaatcccaacactttgggaggccaaggcgggcggatcacctgaggtcaggagttagagaccagcctgaccaacatggagaaaccccgcctctactaaaaatacaaaattagccaggcatggtggtgcgcgcctgtaatcccagctactcgggaggctgaggcaggagaatctcttgaacctgggaggcggaggttgtggtgagctaagattgagccactgtactctagcctgggcaacagagcaagactctgtctcaaaaaaaaaaaaaaaaaaaaaaagaataaccaaaaactgatatttagcatttcctttaattatgaatgcaggcaacaaagcagtcactaatagaagtcacagatattttcatatcacatcatagttgctgcatgtgtctcagaatattgctcatgatcttcaaagttcaatcgttacctgaactgcccttggatccactgctacaccttgttatttaatgttgttaaaagtaagcatataggccaggcgtggtggcccacacctgtaatcccagcactttgggaggcggaggtgggtgaatcacgaggtcaggagttcaagaccagcctggtcaacatggtgaaatcccgtctatactaaaaatgcaaaaattagccaggcatggtggtgcgtgcctatagtcccacctactcaggaggctgaggcaggaaaatcgcttgaacctgggaggtggaggttacagtgagccaagatctcgccactgcactccagcttgtgcaacagagtgagacttcatctcaaaaaaaaaaaaaaaaaaaaaagtaagcatatattgggccaggcatggtggctcatgcctgtaatcccagcactttgggaagctgaggtgggcagatcatctgaggtcaggagttcaagactagcctggccaacatggtgaaaccatgtctctacttaaaatacaaaaattagccaagtgtggtggcagtcatctgtaatcccagctactcaggaggctgaggcaggagaatcatttgaacccaggaggtggaggttgcagtgagctgagattgtgccactaaactccaggctgggggatagagagagactctgtctcaaaaaaaaaaataaataaataaataaataaataaagtaagcatataagcatatatagtacataagagcataagatgtgtgtttttttaatattttgatctgtatttcaacataattgccttccttggtcatcttgtggattttattttatgcatttaaaactttatactgcccagcatggtgacactcgcctgtggtcccagctactcaggaggctgaggccagaggacagcttgagccaaggagttggaggctgcagtgacccaagatcgcaccgctgcacccagcctgggcaacagagcaagacctcgtctctctaaaaactaaaataaaagcgttatactgaaaagggatccacaggcttcaccagtgtgcaaaggggccagggcagtcaaccaacatgggggagggctctttgtggatccagacttgaagggctcattcgttttaggcaaagcctacaagttccacgtgagtgttgtctaaggcgcagtgttcccaggccagaccgggagcacagccatttcacgggcaggacaggctgcagccgctgcgtttgcagttccaacccccttcccccggccaaccccccacacttctggaatgcacacaagccttatatgaaatccacatggtgggcggccgaggaaggcagcggcacgaaaggacttcaacaagttgacagcgaccccaggcccggccagtcacggggaggatccagggagctgtaggtcatctggtcccgctcctcgtttggggcctccgtggtgacaatgcctggccacaggaaatgggatcactgggagccctgtgtttcccgctctggactctggactctgaaacgagcccaactggaaagcagcatcactgccaagacacatccggagtccacacacaaatacaggaggctgccggcgaaactctcccgcagccacaagagtcccggggcccgcgcgcagactgcgatccagctccggctcttgccctgcggaggctccgcgcgagaacctggctccacccgggaccggccaggtcctagccccgaagggactggacagccgagggacgcggactgacctccctgcggcg

SEQ ID NO: 4244 - DNA, 2300 bp, Homo sapien
tcaaagaaaggactgtgccttaacggtcttggcattttgaatttctagtatagaatctggctcatggtagattctcagtaaatattgacataataagaatcacgaaaactgtacatttaggtaacaacgatggtttgatattaacggaatacttactttgtgcccagctaggagcatttaatgaatcaccttatctaatcctcacgacaatccttcgattttaactatgaacatcccatacaagtgacaaggatattgaagcttagaaacctgcccgtgcttatacagccagtaaatggagagccttgacctcagccaggttggattcaggctgtgctgaaccagcaaagtagagaactgctctcctcctgtagttgctgaggaaagtcccatggatggaccaataggagtttcagaagctgcctgagtaccaaaaagggagagaattcgtgagaagggtaagagcattccaggcacagactacagcttcagagacagctctgatgtgtgacagaggctggggtggggttttttgaaggaggagtgttgaaggcacaggccaaaaaaggcctactgagcttggggtttccctcaaccacagggcatggggaagtcgtggggcccgtgtcacgtgcgggtgaagatagagaagaatctccatacagagatcctgtagcagctgaaacaggcagtgctggggcccagaagcccagaaatagtcagaaacacagatggcatagagtagagtcagaagtgcttctggggagcaggctgggggctcacagtgctgtattgttgggagggaactgaaggaaaagcaccatatttgacaacagactgcaggctgcagtaaaaggtagtaaacagagggcacttaatgcagtggttataagtggggtccttgcagctggaacacctagggtcacttaccggctcccagctgcatgaccttagcaacatgacttaacctctctgggcctctatgccccttctctgtaaaacagggaaggtctgtttcctagggttactgtgagtgcaaaatgaatgaatacttgtagaacacatgctgtctctgatgggtaataaatgttatttctgatggcgaatgaattcaaaagaaaaagacaagttctcatgagtaaatcaaaagtgttttgcttagaaggcatgtttcctttgctttttcttcctgtctttgctggttcagaactcatgccccctaaattttatacagaatttgctgttttctgaaaaattattataaactaggttcaaggtcgttacttttagctgctgacaggaaacggggacgtcctgttgaccgctgataggtctgacatcaaacatatccaactccagctgtcccagatcctcttccctgacgtcaaaaggcagtactggttttccagtcctccaagtgcaaacccttgaactcaattttaacttcgtttcttctcctcttcaatgccaatcttataatcaggatttgctccttctttcatttcaatgttttagacttggtcctctaataacttacctgtctctactttcaccctagtgccaaagtaacgatcaaccgattattcaggataccacttaaatcgcttatctccctttgtcaagaactttcaatagtttcttctccgagtgacagagcgaattcaaattcctaaatttgtgattcaaggctgtacttcaaccggtccctccccacatcctctgctgggggatggtgccctgaataaacccagctcggtcctccacctcccttctctgccgcctgatgacatcccattccttccagagcacccgggttgattcccgccgtcccacctgcagctttccccgccagtttttccagccctaatgtctttgatgacttggggcccccatctgacactggcttgtgttgtacactggtgactttgcctcggagggtgagaccccgtttcctggcgaacctccacaatagggagcacaggatcaggcactcaaaaaacgcgcaatgaatgggtggatgagcccatgaacgtgttggtggctctgtcccttggctgattcccagctcccaccccgtcttcctaccagggtcaagcgaattggaccccggacgcggccgagcggcaatggggtgggcgccgttcctgaatccggagcgtttccacgtcgccggctctccacgacccaaccctaatcagaggaccacggtgcgggtcccgcgctctgctccccctcccggaggcgccgttcgctgggagtcgggctggtttcgagaatcgcaggcaccggcgcccaaggcg

SEQ ID NO: 4245 - DNA, 2300 bp, Homo sapien
ttagtcttcccctgttcctcctaacgctggcctgggatgtggactcaatgtctggagagccagtagccctcctggatcatgaggtagaatccatgcacactggagggagaaatatcagagtctggacctctgttgacaaacaatattccttcagtgtaataaaatgtatacggatgcttttccaatgtgccaggggagagactggtaaacaagcctagtttctatcataaggacacataaataagtgtgttgcgggggaaactaacaatcaggcaaggatattagggaagcacacaggtgaaacacctagcctaatcctgagagtttggtgggtggagagttctggagaggctctctgcaggaagttacaccctcatggatagctaggaaggaccagctgttggaggaaagggcagaattttcttagtctaggggagtcaggaggtgttaacactgcttaacaccttggaagagataaggcagggaggtaagctagggtaggagtttagactctaaccccagaactatgaggagcaagggaagggcatttaagcacgggagtaaagtggccaggtgttctttagagcgatcattccatcattccacttgcgctgttcagaacggggattgaggggaacgagatcagaggcgtggagcccaattccgtatttcctcttgaaatagcgatagggagagagggaaaggatagaaaaactggaaaaggagctccacgccaaaggcacacttggccccagtgaaccacctggaatacgctgggagcgctgtaaccactaagtaattctgagcaaaagctagggtggattctggatatgccaggccgtcttttggaaaaagaacacacaattaggcacgaagtggagtaagaaaagaaatcacaattactggagcctcggaaatccgagtttcttctgtttaccagaaccgcttgcccagcaatgtttccagagggcgcccggctttccctcttttcccagagcactccccagctctcccaagacaagggtggcgtggtgccccggggcaaagactaagtcgctgtacagcctcgaggagcgagctgctcagcaaaagcaaaagagaagggctctcgggtggcggggacagaccctccttcggcatgggttggatcggacaaggggggccgtgtgccgtcagctgccccacttctctctgaagcccagtgggctccatccactgacccgcggcccgcgcgcctcccggcaccggctacatcgctgggaggtgaggcgctgggagcgcgtgaggctctccgggagaaaacagcccagcttgcatcccagaggaggcagcagccgcaggcaccgtctatttcctcactcagtatacaaatttgacctcaaaaatacgaaccctgtctttggcatgtctgcatttagaaataaacatcattccagacgccggccagttcatagccacagagtcgtaaagttttatttttaaagggggggacggaaaggacttgtaaagttttttttttaaatttgtttttaaataaaggaattaacttctgcaaaacaagcaatcagcagcagaatgcgcgaggccacgagtgcgatcccccgaggcgcggggcgcggctgggaagttttgggggcgcgcggcgcggtgccgggaccggggaggaggcgcgcggttctgggggcgcgcagtgcgggagcgcgcggccccggggatggggaaggggccggggacgggtagcgcgcggcccctgggatggggagggggcgggaaggggggaagagacgcggggctctgggggcccgcagtctgggagcgcgcggccccggggatggggagggggccgggaggaggcgtgcggctctgggggcgcgcactgcgggagcgcgcggtggcgaggatagggcgggccggggttcgcggggcgaaggcgcgcggtgcccgggggagggcgggccggggcgcgcgggccggggcgggggcgcgcgggccggggcgggggcgcgcggggccggtcggcgcgcgggggcggcgggcgcggcgctgccaatcgcagacaaaggccgtcccagtgaatcatgtggtgccgggggaggaagtgcggcttgttttctttcctccagtctcggggctgcaggctgagcgcgatgcgcggagacccccgcgggggcggcggcggccgtgagccccgatgaggcccgagcgtccccggccgcgcggcagcgcccccggcccgatggagaccccgccgtgggacccagcccgcaacgactcgctgccgcccacgctgaccccggccg

SEQ ID NO: 4246 - DNA, 2300 bp, Homo sapien
tgttctatttggcagtgcccaaacaggtgatggcagatagaggcaggatgcaatgcctgtgtggaaagaatgtcatctcagtgcttctattttaagatagtctctaggaatgatttaaggactgttctcatgtaaaatccctatttctttttttattccattacgaattatttgcccaaaagttggatatctgtcaaagattcataagacaagagggagagacccttaaataagtactaaacttgtaaaatcaatatgtggataaaagtgcaagtacaagaagttactttggaaaaaaaaaaaaaagcagacatctaccaaaaaacaggatttgactattcattcactgttataggagctgggactatagcagtgaacaaaacagacaaacattcctgccatcatataacttaagacattataacctacctagattgtagtgagaatgcaccaaaagaaaaaatacatcaaccaaagggaaatggccaactagacacccatctagtgcagaaggtgtcctcaacatgaatgaatcttagtgttgtcttgacaatgccatcagattgtcatagattgatgctattaatcaattaaagtcattcccctaacactggtcagagcggagttaacattccaagcaacattctggtatcatttaacttctgctatggctttccttcatagaatatacctccaaatgggtgtgtgttctgttccctttaatgagcttaaacctgcaaacctggagcccagactcttggctagtgaattcaccaaggagatagcactcaaaggatactaagttacacatatttaatggccctggtaaagcactatttgtttaggataaatgcatgctaatccattaatgcagttaatccgttcaaggagcactgtaacttgggcctgccaagagactggagggactgttgtaggttagcgcgattcatggggaaaaggtcatagtaacaggaatcaatagaaaaagggggcaattttgggaatcttataggcatctgatctccacttaagttcaggggcagaaaatctgttctggacatagtctaatattttgagtggtaggacatccaaggtccaaaagggcagaccaggtttggagctagagaattagtattagcaagatgttaatcagtttgagaaaacagaagacagggtccagccatagctcaaggactagaggtagagaatccagacttggaggaaccaggtagatgtcattaggagttgctgagtcactggatttagatcttacaaccctgaacccataattaatgacctgggcagccaatctcagaactccacacggaaggcatgtagtatcagtgccctggcccataggaaccgggcaacaggtacagggactctgacacagatctaggttatgggcacagggacatcctcagaagacttcaatgtattttgacccttggtgcaagagttcttatgtatccttgctaagggcctagagtaacgttaataagtgggtgttcctgagtatagactaggatccacagaaacgtgacgagtgcctagtccagcgtctctcatataataggtactgaatagacattgaatcccactctcttatcctcactgttccttgttaaatgtttcctcactttaatccgtttattaattgaatctttttgatgagacaaattccccaattttagcctgatccttttcagcagctcctccatctggacccatgtcttaagtagcatgatagtatacagttagaaatgtcctttaatacaattctcatataagatgaaaactgggaatgcatattagatgtgtctctgatcagatctatgctagtctcttcctcatgcaacaatctaaagtgaaagaatggtattttttagataaaggttgtctagttggaaatctcgataaaagtttcaaatatttagacccatttagttctaatataagtttacctttactgttaaaagataaaagcaagtaatatccactatgtaaatatgagaacctttttctcacagtgcttctcaagttctagggtttactaatatgtattcctttcttcttaataaggtttaagtgttcaactaggtgttggcccagcactaaggtcaacaaagagcagctgacttggattttggtgaaagaggaaatttgaggaggcattagtgagtgtgccttatctaagtagctaaatttaaccagcaaagcttttaatttgcctgatacattcaagagagaattggtataaatatgattgatgtgtatattgtaatagtcaaaccttctta

SEQ ID NO: 4247 - DNA, 2300 bp, Homo sapien
aaagaacccgagattttataataggaaaatttataacccacaatttaaaaaaagaagttttgcataacaaaattccaggaagtatgtgttattgacaacctcaaatacagcacagacaaggaatcttttaaaaagtctaccaaacttgataaaaagtttctcttatcaaaagcacatttatatgaagggaagaaggcagtgagcagataggaagtataggtttggaagagaaaaggagacatggaaaagtagctggaaaaatcaagcaacaatttttttttttttttttttgagacagagtttcgctcttgttgcccaggctggagtgcaatggcgtgatctcagctcaccgcaacctccgcctcctgagttcaagcgattctcctgtctcagcctcccaagtagctgagattacaggcatgtgctaccttgcccggctaattttgtatttttagtagagacagggtttctccacgttggtcaggctggtctcaaattcctgacctcaggtgatctgctcgcctcagcctcccaaagtgctgggattacaggtgtgagccaccacacccagccaatttctttttgcttttaagctagggaagatctggacagtttggaggcagaagggaaagagttgctggaggggaaaaggacaggcaggactggcttcatgggcatgtgacctatgcagtcagccaccccaggaccctgcatttggtttaatgctctgctggttctgaaaggtataaaccactatgtggtaggctgattaatgaccctctatttataaatcctcatcctaatctctggaacctgtgaatatgttatcctatatggcaaaagggactgtgcagatgtgatcaagttgaggattttgagataggatggtctgtaaccaatgtaatcacaagggtccttatacaagagagacagaagagttagggtcacaagagaaggcatgtgacgagggaagcagagagagtgaaggagatgtgaagtcatgaggtaaggaatgcaggtggcctctggaagctggaaaaggtaaggaaacacattgtccctgagagcctccaaaaggaacacagccctacaggtccattttggacacctgatctccagtactataaggtaatgaatttcttttgttgtatgcaactaaatgtgtgatagtttcttacagcatcaatgagaaactaatacacgctacataaacacaagggagatgtattactcgttttgtagaaatcaaaggcattaataaaactaatagcagttaccatttattgagtgcttcctaggtgctaggcactatactcagctctttctgtatctaatcttatgtagccctagaacaagatatgaggtgggaattaaggcccaataactagctagaatgttttagagttgggatctgcgcccaatctatgtcactctaagtttttttttgttttaccccatccccatatttcatcataagcctttgggtttgtcttcattctttagcatgcgttatactcgcacgtgtcaacctaggagtcgggctggggcggggcaggagatgacatccacatctagggtgcatgaaattaaaaaagagccgaagccatctctacaagtcacaggtagcttacataggcacccacagcagatgtgaggctacagaaaaatgaatgagacaaagaatacgcttcagaccgaaagtcaaagatcccgcaccgtccgttcctaactcgcccgcgtactgggtgaatcctagagcctggcgtctgcgaggactccaggagcgacagcagggaccgacgcagagaggtcctcagcctggtttcccggagaagaggtcgccccgcttcccccgcccgcaccccccggtgttttggaggcccgcgtggtcccgcctcattggccgccgcggagcccgaggcctcggggaggcggggcggccttcgcagttgtagttcccgagtcctctcgttcagcggctccgccttcctgccgcggcgcctaggcgaccgcccaggaccacaactcccacaaggccccgcgcttgggggcgtggccgaggagccaagcgagccgggggcggggccgcctgggggatgaagtgggggcgctcgcctttcctgcctcactcgcagctgccgggtgttggggaaagagtcgcctgcctccggactggagtgcagacctctgaccctggagtcgctcggccgctgggaaccgtccccttgggtcgtcgcctgggccgcccgtcgttccccggccccgaggggtccggctggccgcggtgtgggtagaggtca

SEQ ID NO: 4248 - DNA, 2300 bp, Homo sapien
aaagtagctggtttatttgcacctactatatgacaggccttagtttaggtttgtttgtttgcttgcctggagacagggtctcattctgtcacccagtggtgtggtctgatcatagctccctgaggtctgtaactccttggctcaagtgaccctcgtgcttcaccctccgagagtagcagggactacaggcatgtaccaccatgctcagctaatttttttttttttttgtcagagtcttgctctatcacccaggctggagtgcagtggcacaatctcagctcactgcagctctgcctcccaggtttaagcgattctcctgcctcagcctcccaagtagttgggtgcctgccaccacacctggctaatttttgtatttgtatttgtatttatttatttatttatttattttgagatggagtctcactctgtcacccaggctggagtgcagtggcatgatctcagctcactgatcctccacctcctggattcaagtgattctcctgcctcagcctcccaagtagctgggattacaggtgcctgtcaccacgcccagctaatttttgtattttaagcagagacggggtttcaccatgttgggcagtctgatctcgaacttctgacttcaagcgatccacccaccttggcctcccaaagtgctgggatccagctaatatttaaattattttgtagagactgggtctcaaaatgttgcataggctggtcttgaactccttgcctcaagcaatcctgccaccttggcctccgaaagtgctgaaattgcatgtgtgagccaccatgcccagccagtattttcacataaacattatttcagtgaattctcacaatcctgcagacacttgcagactcagttttggtttcttacttaatgtaacacaaccttagagtgacaggtccatcagcgaaatccagcatatttgactccatgattaccaaatgcactatctccatttattggaaaaggaaaattggaggtcactcaaagagcagtgaagttatggaaatatgaaatttttcacatgactctgagattgagtgtttgggtactatcgggaaatgttaaaaatgtccattttcttttctttctttctttcttttttttttttttttttttttgagacagagtctcactctgtcgcccaggctggagtgccgtggtgcaatctcagcttactgcaacctccacctcccaggttcaagcgattcttttgcctcagcttcctgagtggctgggagtacaggcatgtgccaccaatccagctaagttttttgtatttttagtagcggtggggtttcatcacattggccaggctggcctcgaactcctgacctcaaataatccacctgccttgggctcccaaagtgctggggttacaggtgtgagccactgcacccagcccaaaaatgtctattttcaatagtggtttaaaacactcttggacagcaaaagaaataaaagttgaaggacattgtgacagcaaattgattgtatgggaactctggtgaatgcgaatcatttttaaattactttttttgtaaagtgcaaaacaacaatagcacccatttgcgtcatactttatagttcgcaaagcacatgggaaaaataaaggtaatgatggggatcgttgcaattcataggaaaggaggcacgaggaaatgaaaatgaaagggagtaataactacgtaactagtcaatcttccttaaaaaaaaaaacccttaaaatataccaccatcttctatttgatataatgcagaatgggaatgataaaaacatgaattacatttcagagtttcaaaaagcaaaccagctttatagcaatgcttgaggttgggctgctaacaagctcactcaactagtgtttcctgacggccaacgtcagaataattccatctccatgagaagtacagaaagaaccacaaaccaaacctccaaattgattctaagataaaatacccttaaaaaaaatttcccttcctatccgaaggcagaccaagaggaagtttatcctcccacctacaaattccccagagagctttcatctagaaggtttgactctggccagacaaccagcgagcatcttctcgcaatctgttgcttcttccatggcaaactccagagaattaagaagccaaactcaacatcgccatgggcctcaggacgactaaacagatggggagaggcactaaagctcctggtcaccaagagggtatgtaggcatttgctgtcttcctggatttctcagagctgagtttttagccagaggttgcttatttacgataa

SEQ ID NO: 4249 - DNA, 2300 bp, Homo sapien
catgactctgagattgagtgtttgggtactatcgggaaatgttaaaaatgtccattttcttttctttctttctttcttttttttttttttttttttttgagacagagtctcactctgtcgcccaggctggagtgccgtggtgcaatctcagcttactgcaacctccacctcccaggttcaagcgattcttttgcctcagcttcctgagtggctgggagtacaggcatgtgccaccaatccagctaagttttttgtatttttagtagcggtggggtttcatcacattggccaggctggcctcgaactcctgacctcaaataatccacctgccttgggctcccaaagtgctggggttacaggtgtgagccactgcacccagcccaaaaatgtctattttcaatagtggtttaaaacactcttggacagcaaaagaaataaaagttgaaggacattgtgacagcaaattgattgtatgggaactctggtgaatgcgaatcatttttaaattactttttttgtaaagtgcaaaacaacaatagcacccatttgcgtcatactttatagttcgcaaagcacatgggaaaaataaaggtaatgatggggatcgttgcaattcataggaaaggaggcacgaggaaatgaaaatgaaagggagtaataactacgtaactagtcaatcttccttaaaaaaaaaaacccttaaaatataccaccatcttctatttgatataatgcagaatgggaatgataaaaacatgaattacatttcagagtttcaaaaagcaaaccagctttatagcaatgcttgaggttgggctgctaacaagctcactcaactagtgtttcctgacggccaacgtcagaataattccatctccatgagaagtacagaaagaaccacaaaccaaacctccaaattgattctaagataaaatacccttaaaaaaaatttcccttcctatccgaaggcagaccaagaggaagtttatcctcccacctacaaattccccagagagctttcatctagaaggtttgactctggccagacaaccagcgagcatcttctcgcaatctgttgcttcttccatggcaaactccagagaattaagaagccaaactcaacatcgccatgggcctcaggacgactaaacagatggggagaggcactaaagctcctggtcaccaagagggtatgtaggcatttgctgtcttcctggatttctcagagctgagtttttagccagaggttgcttatttacgataattcttggatatattatacactaaatactattattatctttttcgacccgacttttatctttctgttcttatgtgtgaaggcagagaaagattatttagagctcttcaaagattcctatttaatttaaaatgcctgtcgccttcctataataggcttatgatggatgatagctttagttaaaatgtagcaatcttaaatatattcttcataaccaattccaacgtgttctcacttaagtaatgggtataaaaccccacttaagcgtaatattttaaatatttgaagccatcttttctgagagaacccgaagctgttttttctagagaagctgtgagtgtgtattgggcgacttctgttcactccttttctgcagcactcaccctggaggtcatgtagtaactaatgccaaagaaaaatcaaaatagaaagtaccagcgtgtgccatcatgcagcggcagagcctgcttaaagatcaggaaatttgtctaaatatcagatcgccggcgggcatctcagcccaggcctgtgtaaggggagttctggtgtctcagctgagggcgtgagtagggagccaggaaagcgacccgcgactgcagccgtttcttaaggccagtccttcgctcgcagtctgtcccgggcggcagtcgtgtcagccccccgctaggacccgcccagggggacgtgggtaccgggcaggacgcgcgctctgggcgctggggacgcccgggacactcggggccccgccttgcgtcccagccccgggtcgcggcaccccggctcccgccccgcgcctctggagggaggtaccgagggacgcgcagcgaaggggctttgctaattgccaaagcaggaagtgagctcgtggaagaagcgaaggaggagaagaagaagggaggggaaggcggaggagggcaggggcgcgcagagccacggtttgctccaggcgcgtcggaaccgcaggacttttcatccccgtggtcccacggtcctcccgcgccccggaggcctgccagccccgctcggacgctcgtttgcc

SEQ ID NO: 4250 - DNA, 2300 bp, Homo sapien
agaagcattatttatcaagcactatttcctaataaaataattcttaggtcaggcgcaatggctcaggcctgtaatcccagcaccctgggaggctgaggaaggcagatggcttgagctctggagttcaggaccagcgtgggtaacatgacaaaaccccatctctaacaaaaatacaaaaattagccgggcatggtggcatgcacctgtagtcccagctactcgagaggctgaggtgggaggatcgcttgagcctgggaggcacaggttgcagtgagccaagatcgcaccactgcactccagcctgggtgacagagtgagaccctgtcaaagaaagagagagagagagagaaaggaaagaaaggaagaaaggaagaaagagaaaggaaagagaaagaaagagaaaaagaaagaaagaaggaaagaaagaaagaaaaaagaaagaaaaagaaagagaaaggagaaaaagaattcttactaataaatgcaggagaaatgatagaattgaaatatcaccattttcaattcctaatgaaataacgtatctaggcaatgaccatcaatagctagatgctaaaatcatctgatcaaacactgatgggaacttcgtaacagatggatcaggctaacaacatctgaaaccactaactggttttgatgtcataaaaagaaaaacaaccagatattttctgtctcctgatgagttgcaattggagctacatatcacctgtaaagtcttctggccaaaaaattaagcccagccggaccttattaaacctttaaatctaacaattagttttgaagcttttacagattaaatgaagtctgagatttgcttcaaaatgaaccagtggtggggaggaagtgggtgaggtgtaggtgaaacaagattggccacgtcgataattgctggagctgggcgatgaaagcacaggtatttatcacaccatctctctacttttgtgtgtttttttgtttgtttttggttttggttttaaggagcagagagtctaataggcaagaaagaaaagagaaggctgaaggaagacgctcccccgtacagagacagagggagggggctccaaagccgaaagaggaggtcctcttgtgtatgttttaaaatactcccagataaaatatttttggaagagtacttggttggattcaacagcttttttttaatttaaaaaaatcacctcaatttttttgcttgctctaacgtgccatagaaattcctgaggttttacttgttgctttacaatgaactgtgtaaacacaagctggaagagatcagctatgcgctggaagggttggttaaatattgagactgccttgctgagggaagccttttaatgaatctcagtaattttgcaagagaaaagataacaatgaacactacattaaacatcattcttttgcactttgctaaatatgtgtatgtaaattactgtctgactgttactggatatatacagcatatacatatgcactttttttactgtttttttttttttttttttttttttttttttacagagcttgctctgtcacctaggctggagggcagtggcgcagtctcagctcactgcaatctccgcctcccaggttcaagcgattctcctgtctcagcctccaaagtagctgggactacaggcgcctgccaccgctcctggctaatttttgtatttttagtagagacagggtttcactatgttgtccaggctggtctcgaactcctgacctcgtgatccatctgcctcggcctcccaaagtgctgggattacaggcataagccaccgcgcccggcccatgtatactatttatacatttttagtatcattttgtctttacattttacataatttcagatacattttcctcatatcaaataattcagcattttttagtactaacatcatagtctgtaagccattcaaaaaatgtatttcacaaaataggctatctcatcctttgagctattgagatgaattaatttatactcctcctaagatccctctcgtcactaagattcttttattttatgacaaaaccatagttctagaagcttgtttctcccacctgaaaagactggatttgggacatgatcctgtagaacttcggaggtaagcctggtgaatcagatcatagggggtctggagggtgaaaaaaaagagtttggtgctcatggatggggctagtattggggtgtaggggagattaggtcaaagcaagaggattcaaaggagaaatgaattcctttagattggggaagataatcggaagaggtagaagacaccgtccat

SEQ ID NO: 4251 - DNA, 2300 bp, Homo sapien
aaaaggaaatattgagtaaagattttaggatgggagtgtgacaggcctgctaggagaatagcaaagtcgctgtggctgctgcagaaaaagtgagaaggaaagtagtaggagatgaaatcacagtgtgtgaggattcgggcagatcaggaagtgctcgtgtaagaactggatctttactcaaagaatgagcaaaaattagtagacggttggccggatgcagtggctcacacctgcaatcccaggttacaggaggccgaggcgggcggatcacttgaggtcaggagttcaagactagcctgggcaacatggtgaaacctcatctctactaaaaatacaaaacttagctgggcatggtggcgcgcacctgtagtcccagctactcaggaggctgaggcacatgaatcacttgaacacggtaggcagaggctgcagtgagctgagaatgtaacactgtactccactccaacctgggcaacagagtgagactgcctcaaaaaaaaaaaaaagtaggttttagtaagggattaacatgatctgaattatgttttgtcatgacttctctggctgttgtgttgagactacattgcagaggggcaagggcaaatatagggagaccgattaggatactgcagtaataatgtaagagatgtgggactctatctagaagggcccatgaggtcctttgcatgctagtattctttactgctgtgcctggccatgataggcattcagtgaatatttgcttatttaaaataacacactgggctaattgaacaacagtgccaaatgagggagatatttctaggaataagttcttaggatttatgaacattttaatccagattttctttgttaactctgctctctggccctttcactcagccccgtttgcacctaaatatgacttacaaaagaaacacagcatttatgtgtacttatttcaacttattttagctttgtaaagaagtacaaggttgactcagggcccagcttggtgtctcatgcctgtaatttcagcattgtgggaggccaaggcaggaagatattgtgagcccaggagtttgagaccagcctgggcaacacagtggaccctgtctctacaaaaaaaaatttttaaattagctgggcatagtggtgtgcgtctatagtcccagctactcctggggctgaggtgggaggatcacttgagggaaaccctgtctcaaagtggcggggctggggggagactcaggcagaattgtgaagatattcaattgctcctgactttatcaataatctaacatttcaacctaacattgatatctattttatgcaaagcattacactatgcactggagactgtataagacaagttccttttctcaaactacagtcgagttggatagataaaacacacaacacataccaaaagacagctataaatccaaggcagtgtatgtcaagggtaaattcacctattcagattggatcttgagaagtgcatcaggcttggaaaatgggtaaggaggagagaaaagcaacagtgaatcagaacatgagttcccagttatgggacttgtaatgaattcctcaattaaaacaaaaaataatgaaaacaaaagccagggaggagaaagcccacgttaatgacactaaaatatatctttccaaacaaatgtggataaaagccaagtagagaagatgagaactttgaggtccctaacagaaaataaacagtaagcagccagccattccaagtggctgacatgactttgtttaactttatttgtatttctggctggtgtgtttacagccaataggtcaaactatcagtcagtgtagggccctgagaagtcgggtatttaagagcatctaataggcacagaattgtgctccatactgcttaaactgttccctaagtgtccaatttggagaaaacacccacacgcaggataactggcgagtgacgcggagtggctgcgagtccaagttatcactaacggatggggagcttgggctgggcacagtccagcgtactgaacccttcccccaccgtttcacctgcatacagaggtgtgtactgtcaaaaagcagcgcctccaagtctcttctggcactgtctggacttggatccgaggcagacgaggaagctgagaaaaccctggcgttgaccccgtggacctgggcgccccgggaaggccagcgcttggtccaggcaggcggggcctgtgcggtgaccaccctggtcctgaaaagtcccagccccgagcgccctccctcctagacctggaggcctggaacagccaggtggacgtcggccc

SEQ ID NO: 4252 - DNA, 2300 bp, Homo sapien
cattgcagaggggcaagggcaaatatagggagaccgattaggatactgcagtaataatgtaagagatgtgggactctatctagaagggcccatgaggtcctttgcatgctagtattctttactgctgtgcctggccatgataggcattcagtgaatatttgcttatttaaaataacacactgggctaattgaacaacagtgccaaatgagggagatatttctaggaataagttcttaggatttatgaacattttaatccagattttctttgttaactctgctctctggccctttcactcagccccgtttgcacctaaatatgacttacaaaagaaacacagcatttatgtgtacttatttcaacttattttagctttgtaaagaagtacaaggttgactcagggcccagcttggtgtctcatgcctgtaatttcagcattgtgggaggccaaggcaggaagatattgtgagcccaggagtttgagaccagcctgggcaacacagtggaccctgtctctacaaaaaaaaatttttaaattagctgggcatagtggtgtgcgtctatagtcccagctactcctggggctgaggtgggaggatcacttgagggaaaccctgtctcaaagtggcggggctggggggagactcaggcagaattgtgaagatattcaattgctcctgactttatcaataatctaacatttcaacctaacattgatatctattttatgcaaagcattacactatgcactggagactgtataagacaagttccttttctcaaactacagtcgagttggatagataaaacacacaacacataccaaaagacagctataaatccaaggcagtgtatgtcaagggtaaattcacctattcagattggatcttgagaagtgcatcaggcttggaaaatgggtaaggaggagagaaaagcaacagtgaatcagaacatgagttcccagttatgggacttgtaatgaattcctcaattaaaacaaaaaataatgaaaacaaaagccagggaggagaaagcccacgttaatgacactaaaatatatctttccaaacaaatgtggataaaagccaagtagagaagatgagaactttgaggtccctaacagaaaataaacagtaagcagccagccattccaagtggctgacatgactttgtttaactttatttgtatttctggctggtgtgtttacagccaataggtcaaactatcagtcagtgtagggccctgagaagtcgggtatttaagagcatctaataggcacagaattgtgctccatactgcttaaactgttccctaagtgtccaatttggagaaaacacccacacgcaggataactggcgagtgacgcggagtggctgcgagtccaagttatcactaacggatggggagcttgggctgggcacagtccagcgtactgaacccttcccccaccgtttcacctgcatacagaggtgtgtactgtcaaaaagcagcgcctccaagtctcttctggcactgtctggacttggatccgaggcagacgaggaagctgagaaaaccctggcgttgaccccgtggacctgggcgccccgggaaggccagcgcttggtccaggcaggcggggcctgtgcggtgaccaccctggtcctgaaaagtcccagccccgagcgccctccctcctagacctggaggcctggaacagccaggtggacgtcggcccacctttcttttctttccttcccattttcctaccacctcccaccccactccgccttccgggcaaaggcagccagatccacccaggacacattctttgtccttatccctctgtgctcgtcccacagcaagccagtcgcggtccaaggctccagaggctgtgcaggaggccgagctgggtggcgatcagcggcgggtccctgtccaaaacccagcagagccgccagggacgccccagacacagaaggcggggcgcggggagggtggggagaccacagcagtgaggcgcgcgagccgggaagtgaacgaggactgactcctgtcgcttcccgtagccgcccacggacgccagagccgggaaccctgacggcacttagctgctgacaaacaacctgctccgtggagcgcctgaaacaccagtctttgggtgagtcgcgcgacccccggcctcgggtggcggggcagtcgctagaggcgtggctgctctgagggtctcgccagtggaggatggcattcggatgtcacggctcctaaatcaccatttgatgggtgggacagtgtccagtccaccccgacccgccggtc

SEQ ID NO: 4253 - DNA, 2300 bp, Homo sapien
ctatagtcccagctactcctggggctgaggtgggaggatcacttgagggaaaccctgtctcaaagtggcggggctggggggagactcaggcagaattgtgaagatattcaattgctcctgactttatcaataatctaacatttcaacctaacattgatatctattttatgcaaagcattacactatgcactggagactgtataagacaagttccttttctcaaactacagtcgagttggatagataaaacacacaacacataccaaaagacagctataaatccaaggcagtgtatgtcaagggtaaattcacctattcagattggatcttgagaagtgcatcaggcttggaaaatgggtaaggaggagagaaaagcaacagtgaatcagaacatgagttcccagttatgggacttgtaatgaattcctcaattaaaacaaaaaataatgaaaacaaaagccagggaggagaaagcccacgttaatgacactaaaatatatctttccaaacaaatgtggataaaagccaagtagagaagatgagaactttgaggtccctaacagaaaataaacagtaagcagccagccattccaagtggctgacatgactttgtttaactttatttgtatttctggctggtgtgtttacagccaataggtcaaactatcagtcagtgtagggccctgagaagtcgggtatttaagagcatctaataggcacagaattgtgctccatactgcttaaactgttccctaagtgtccaatttggagaaaacacccacacgcaggataactggcgagtgacgcggagtggctgcgagtccaagttatcactaacggatggggagcttgggctgggcacagtccagcgtactgaacccttcccccaccgtttcacctgcatacagaggtgtgtactgtcaaaaagcagcgcctccaagtctcttctggcactgtctggacttggatccgaggcagacgaggaagctgagaaaaccctggcgttgaccccgtggacctgggcgccccgggaaggccagcgcttggtccaggcaggcggggcctgtgcggtgaccaccctggtcctgaaaagtcccagccccgagcgccctccctcctagacctggaggcctggaacagccaggtggacgtcggcccacctttcttttctttccttcccattttcctaccacctcccaccccactccgccttccgggcaaaggcagccagatccacccaggacacattctttgtccttatccctctgtgctcgtcccacagcaagccagtcgcggtccaaggctccagaggctgtgcaggaggccgagctgggtggcgatcagcggcgggtccctgtccaaaacccagcagagccgccagggacgccccagacacagaaggcggggcgcggggagggtggggagaccacagcagtgaggcgcgcgagccgggaagtgaacgaggactgactcctgtcgcttcccgtagccgcccacggacgccagagccgggaaccctgacggcacttagctgctgacaaacaacctgctccgtggagcgcctgaaacaccagtctttgggtgagtcgcgcgacccccggcctcgggtggcggggcagtcgctagaggcgtggctgctctgagggtctcgccagtggaggatggcattcggatgtcacggctcctaaatcaccatttgatgggtgggacagtgtccagtccaccccgacccgccggtcctcaccgcggcagagccggggctgggtggcggggacgctgcctctgcaggcgaggcgctccggggcataagggattatcaggagtcgcggcctttcttggacatccctggctggggtcaggctgtttgccctggggtgtctcctcgctgcaaacccaccccacctgggctgctttctcacctgttccctcctagcctgaggccgagcgccacctccaagtggaggaatctggggaagtttccttcccggaatttgtagtgacagtggagtgacctccattgcgttccctgcctctaacacgctctttaggatgccgagtcatttgactgcagtgttaaacattgcaaagcgcaagtcatgtgacttcctttgaccgtacgtgaaacttaagtgatggctgcttgtgatgcatacgaagtgttcatgctggcgggacctgtccctggggatacttcgggggttgcgtgatttaatgcaagcagatggcttaaattgggtcactggcttgttattatacatgtgtatggcaactcggcatccattctttttgctcttgttctt

SEQ ID NO: 4254 - DNA, 2300 bp, Homo sapien
tgaactgcacgagacccttactacttcacactctccatctccccattggcttttgacattttccctgctcaagggccaagcagtatttgaaaggctgagggaaagatcgagacattaacttctcatggacagctctaattaaaaaagaaaatgaaaaacttgtagagtaagaaatccattttcctttaaaaactacaatttatgattagctgagcctcctcccatcaccaaaagttggcattccctccactctacccagacgttccctgttcataacactgtttcatcacgtcatattatcattgtgacttcttcctccactagaggacaagagctgttttgtaatcagcacccaccaccatctctattacatagtaggtgctttaaatatgttcactggcttttattcttgccctgtctcccaatggataattaatattctattggatctgtcctggcataggtaaaaagttatcttatagaaatcagttaccgggttatagatgatattctgtaggttgtttaaggacaacatcattcttttccagcttcttgtcgattggagtctcttctgtgtatgacctaagattttaggcaagtttcatttaaaggttacctggattgaaactgaggcactggccctgtgtaaagtaaaaatagaggaaaagaaaagtaagcatgtagcatttttcttcatatcctattttaaaatttaaattatatattatgttactgatatttaccaaataatagaatattattacaatcaacgatctgcctcccattcttaccagtgtgctcatatactaaataattttggattgtgagtgtaggaaatattgacttaaaaaatacatcagtagaaaatttctaacatggaatttattattaaaaatactaaaataggccaggcatggtggctcacacctgtaatcccagcactttgggaggccaaggcgggtggatcacctgaggttcaggagttagagaccagcctgaccaatatggtgaaatcccatccctactaaaaatacaaaaattagccagacgtagtggcatgcacctgtagtcccagctactcaggaggctgagacaggagaattgcttgaacctgggagacggaggttgaagtgagccgagattgtgccactgcactccagcctgggcaacagaacgagactccatctcaaaaaaaaaaaaaaatttaattaattaatggtaaatactaatcaaacagtcccgtacaattaccagaggtattcatttagattttcatttccataaaatgagaattacagtattcacatcattggtttgttctgaggattgagttaataaaacagcgaaagagtaagcgctatgttagctattattattgtgaatagaaagaattgctcttcctcctccaatttaaacaaatcaaagtagggaaaaatccaatacttttaatactattaagatacggttttctctgttgcttaaaaaaataataatcacagggcaggggagtgttggaaagcatcagccacattttttaagataaaagcactcatggacactacactacatttaatagctccaggaaaaactcgactttaagcagaactaaaggggaaatgaaaccagagcttcctgtattttacttccagcaattctgtcattatactgcacaccaacaatacacaccgatcaaatctatcactttttctttattaagaaaaaaaactgtatccctcttggtttaccacctaaatatagccccatgtcattaacttaattcgttagtcaaaacctcaaaactctggctccgtgactcaattcaggaagtaagaacaagagcaaaaagaatggatgccgagttgccatacacatgtataataacaagccagtgacccaatttaagccatctgcttgcattaaatcacgcaacccccgaagtatccccagggacaggtcccgccagcatgaacacttcgtatgcatcacaagcagccatcacttaagtttcacgtacggtcaaaggaagtcacatgacttgcgctttgcaatgtttaacactgcagtcaaatgactcggcatcctaaagagcgtgttagaggcagggaacgcaatggaggtcactccactgtcactacaaattccgggaaggaaacttccccagattcctccacttggaggtggcgctcggcctcaggctaggagggaacaggtgagaaagcagcccaggtggggtgggtttgcagcgaggagacaccccagggcaaacagcctgaccccagccagggatgtccaagaaaggc

SEQ ID NO: 4255 - DNA, 2300 bp, Homo sapien
tatcactggcctcgaagttaggattgctgattcaaatctagctcagtcatttagctgcatgcctttggcacttcctcctgacatcaggcttttgttttgttcgataatgtgtggttggtaatgcctacctgaaaggttattttaagaattaaataagaaaatgtgtgtggaagtgcctggtgcctggaggtgtgcagtggacagcagtctgtcttaattgaagttggttttttttttaatttgtttttcttttcatgttaaatataaaatttctctttaggtcaatgccttgctgcccacagagacattcattcctgtgatcagagggctggtgggcaatcccctgccatctgttcgccgcaaagcgctggaccttttgaataacaagctgcagcaaaatatatcctggaagaagacaatagtgagtgaagacccaggacacacccatttactgtactttgctttatcaaagagctgcatttaactcccttcaatttctctagtggtacaatttcaaattgaagtatattattttctgaatataataccatgacatgttttaaaatgtgacgttaattctaacgggaatatatgtgtgttgtaagagctcttagaatggaatttcagcctagtggaattcttgcttactacagagcttacgtggccttagccttagcatagttctaagtcccttttactccagatcagtgggtgctttgtataagtgaaacactggctagaacatgcacatcgcttagcatgactgtgtgactcaggacccccgagtctgatttccatttagacaatctcaagctgtgacaatgggaaaatggacaaacattttttgcagctttaatgatttggggattctggctgtccccttcaggttacccgtttcctaaaactggttccagaccttttggccattgtgcagcgtaagaaaaaggaaggggaagaagaacaagcaatcaacagacagacagcattgtataccttaaagcttttatgcaagaattttggtgcagaaaatccagatccttttgtcccagtgctgaacactgctgtgaaactgattgctccagagagaaaggaggagaagaatgtcctgggaagcgcgctgctgtgcatagcagaggtgacctccaccctggaggcgctggccatcccccagcttcccaggtatgcggccggagacttggaacaggagctgttaccgcctggcacacattgaaaaataacactttggtgactttttttttttttcctctgagtagacgttgcataaaattggaatttgttaaagaattgatcttgcagggtgtggtggctcacggctgtgatcccaccactttgggaggccaaggcagggagatcgtttgagcccaggagtttgaggctgcagtgagctatgactgcaccactgcactgtagcctgggcaacagagtgagaccctgtctcttaaagaaataataataaaaataattaatcttcaaacagaaagatgcagccttcccgtttatcttcagatgcactactttgcagtgttaatcgtcctccattcttccttccttttgtctagtatagtcaaaaagcagtgggtgaaggttcttggcagaggggcccacccagttaggcaaggccaaagctgccttctgctgccaaatttggaagttagaagctcctggctgtggtagttccttactgtacagccagtatgttccttaacctgttagagctttgctgtctataaaacagagacagtatctacctcataggatttctgtagggcagtgcttgcaaggagttttgcatagtgcctgacacatagtaagtgttcagttaatgaaagacattgttattttttaaattactgttgtgtccgtactgttagcactgggagatttcttgtgcttagccacataaaatgtatagacactgctttttaggctatgaagcagatagcgatgtaataggcacagtttgctggtttttttcataatgccctctactccattccctagcctctgtttctgcttcaagttcttctaaagctcttactttgtttctagcctgatgccatcgttgctgacaacaatgaagaacaccagcgagctggtctccagcgaggtctacctgctcagtgccttggctgctctgcagaaggttgtggagactctcccgcacttcatcagcccctatctggaaggcattctctcccaggtgagccacgatagccacgacatgctacgcagggtggctggggaaggtaaaagatcacaaatgtagtgattttgttttt

SEQ ID NO: 4256 - DNA, 2300 bp, Homo sapien
aataatataaacaaacgtgttatagctggttctgctgtgctgtgagtgtgtaactgtaagtgtcttaacatcattcgggtggggtaaattgacatccaccatctatttcaggacattgcatcagtttgataataccttcttacatgttgatgaggctaggaacttttagagctacagtgacaaatttgttaacatgcagtttagcaaatgtttaccaagcattctctaagagctaaactcagagagagaggtgagatgttctctctcccagtaaggaatgaacaattcaaaagttaaaagtagcctcaagagtaaaagagcttgttcatctacttgagttgtctatgtacccttcacttgttaattaatgtcttttctcatgctattgaccctctgagggatgaccatattcagcaccttcttttaaccttagtattagattggtgttctcagtgtccaccaagttggcaagtataggatatatacctaaaaagaaaaataataatatgcattcatatgatcagtgccagtcgaataagtaaatgctaaagagttcagaataggggaaagtctatatgggccaggatgaccagaaagttctataagaaatagaatttgtaccggtgtgaaagaaggatgggatttgttcagtgatggcagagccaatagtatgagaaaaggcatgatctaggaatgtgcacagcatgtttgaagaatgtaatggtgattgattgatggagagcagagggttgagacaggtagacattggtttattcattcattcaagtgttttctgtcattctttctgtcatttattcaacaactatattttgatcaccaatacctggagtaaaatggttcaaactttattctgaaagcagcaggaagttgttggccttttctgtgctctgcttatcttcattcttcttgaggcacaacccaaatcctgtgtgatttgtgcagccttcccaggcagtctaagcagacttgctatcagtgtcacatatttggcatgtgccattactgcctcctgttatcttttcacacatgtattgtttcttttgtttgtttgagacagagttttgctcttgttgcccaggctagagtgcaatggcatgatcttgggtcactgcgacctctgcctcctggtttcaagtgattctcctgcctcagcctcctgagtagctgggactacaggcacgcaccaccacgcccggctaattttgtatttttagtagagatgggtttaaccatgttggcctggctggtcttgaactcctgaccttaggtgatctgcccagcttggcctcccaaagtgttgggattacaggcgtgagccactgcgcccagccatgtatcctgtttcatacagaaaataaatctcctttggggcagggctcatatcgtacactttgtattccccttggggctaagtagcgcttgggacatgacaggtacttactgaatatttattgttaggcctttgattattaaaactcttgtggctgagtgtggtggcatgcacctgtaacaccagcactttgggaggctgaggtgggattatttgaggccaggagtttgagaacagcccggtcaacatagcaaaaccccgtctctacaaaaatttttaaaaagtggtggtggggtcctgggatgtcccagcttcttcggaggctggggcaggaggatctctttgagctcaggagatccaggctgcggtgagatatgatcacatcactgcacttcagcctgggccatggagaaagaccctgtctctaaaaaaataaataaaattcttctggcaatttcttggggcccatctaaaagccttatcttgttcacctaaacttgttttgtggaagattacttgcacctactcattgtctctgcttgctgttttgcagtctgatagtggagattctatagaagtttcaagaaacgttgaagagattgtggtaaaaatcattagtgtatttgtggatgcgctgccacacgtcccggagcacaggcgcctgcccatccttgttcaacttgttgatacactgggtgcagagaaattcctctggattctcctcatcttgctttttgaacagtatgtcacaaaaacagtgctggcggctgcctatggcgaaaaggtcagaacctagggtgggaagataaggaaaatggtgatttctcacacagattttatgatattgtccagtttaaacatggggctgatgatgcctaatgtgtgttatttagaacctttttgctcagaacctttttcaaaaaggtttttggcattttaaaaaattgca

SEQ ID NO: 4257 - DNA, 2300 bp, Homo sapien
actaaggcatagcatgttcaagcatttaaaggtagaaggcaacaggaacagcgttaaaaaaaaaaagattaatattttatttggagaagatagttacaggtggactagacgttttaaaggaaaatgatgtatttgacccatttttgaaaactgaacgttgtacatgggtcattaaaaagaattgcattttaactgacaaaattaagtgggaaacaattttgtattttgagagaggttgatataaaaattatttctggaatttaaacttgttcactgaactcagttgccttttttctaccccctctagattacaaaaccattttttgcagccatatcagatgaaaaagttcagcagaagcttttaagaatgttgtttgatttattggtgaactgtaaaaactcacattgtgctcagactgtcagcagtgtttttaaaggggtaagctgcaaacttcttgtaattttttttattaatgtttatagtctcttccaagggacaccatgtttaagagtcctgtattttatagtgcttgtaagaggtcagatgttaccattaacaaaaatcatggaaaagtaagtcagagagaggcataaaataaaaattttaaatctttaccattattttattttatgaagtatttgttgataattttaaccagataggatgtgtaggaatatgtgtgtgtgtgatctttctcatattagacggaatctacctattcctttatgcaaggaataggaatgagtcaatggctcagtattgaactgggtaacattattctacttaatttaaatagttgtttaatgacatataatggaattgaaattctgcttgttggttttatacgtatattgaaaccttgttattatcagaatagccacctggttattctcttttttgaatatagaataatacaaagttctagtatctagattcagcagttctcagaattttaacatattaatcttttttccttctttttctttgctgaaatattttaaagtaaatctcataatgtcatgcactttcatccctctgtacttcagtgtgcatcttttgaaaagtggatatgactacaatgccattagaagtaaaaaaaaaaataattccttggtattatctaatacctagttcataatcatatttccatggttatcacaaaagtattttttatagttgttttctttgaatcagaatccaaagatttagttgtgatgttagaaccttataaaaagagatatctggatcccaccccatatctaaagaatctctggggcagtaaatctgtttttgtgcatgtgtgtatatgtcttattccttcctagctgattagaatatacatatctgatccggcacttggaaacaatcggtatggatgattctgtattgcattactagttgtccactctaagggatgagcgtgaaattgagtgactctggactggagaagtgatactgtatcataatcaagacaagtgcagggctgtaacttgagactcccaagacaaattgtatagaaagcaagtgcatggtagtaggagagcttggttaaaatgaaaatctgaagttgaatttatgttggctagagcttttagtgtatactcttccctactttgctttcttctcattctggtttttcaagaagtctgtaacaaggtagtagcatccaatgctggggggggttcagatgcatatccagtaagtcattcttccctcttaattgaataaatccttcctaggggttaacatttattgctctaattttatcccaatggattatatcatcaactcttcttccttcaatatttcagatttccgttaatgctgaacaagtccgaatagaactggagccaccagataaagctaaacccttgggcacagttcagcaaaaaagaaggcaaaaaatgcagcagaagtaagagctacaaatgcattgagcacatgctgttgttccctgactctgaatgttatgaaaccattggaactttttgatactcatcaatttgctataatcaggcacaatggtttttacttagcacatgatagagtttgcttttccaacgttttgtcttctccattttccagaaaatcacaagatctagaatctgttcaggaagttggaggttcttactggcaaagagtaactctcatcctggaattactgcagcacaaaaagaagctcagaagtcctcagatattggtgccaactctttttaacttgctatcaaggtaatgacacttggctttgatctgtgagagaataggactctaattcttgcccatcttatctaacattctc

SEQ ID NO: 4258 - DNA, 2300 bp, Homo sapien
taaatttttttttcctttgattttagtggtgacatctttactcattaacctgggaagccccgtaaaagaagttcgtagggctgccattcagtgtctccaggccctcagtggagtggcatccccgttttatctgataatagatcatttgatttctaaagcagaggagatcacttcagatgctgcctatgttattcaggtaagctcgttagcaaagaagattgagtgtgttcatgcctctgtgtactggagcaattttctccattctcgacatttcactgtgtagggattttgatggactaagtcattggatttaggaactgataggtcaatatctgtacatctgtgtccccctacttttgaaaagatagcaatgtcatatttcaatttagttcttttcattggataaaggtttagtgtgtagcttttcatagtaagccagctgtgtgtttttaataacgtttcttattaaggttttaaggagaaatggaaaattataaacaatgtcacatcatttgggtaagagtcttccgtaattaatatatttagcctttgtagtttcttaacccttttttatccaattttctttttggtatcttaggatttggctactttatttgaggaactacagagagaaaagaaactgaaatctcatcagaagttgtctgaaactttgaaaaacttacttagttgtgtgtatagttgcccatcttatatagcaaaagatttgatgaaagtacttcagggagtcaacggtgaggtatgtgccatttaagtggattgtacattcctgtgatgttactaaagaattgttgtaactgcttgtgggtgaagaagacaattgtaagagttgcatgtgtgcgctcagaagagataaatgtaatattaatttgagagggggatgagttgaggtagagaaaaacagatacaagatacaaagacaagtactggtgagtttctttttattttaaaattaaatgtgttgtccctgtctaatcattaagtttattttaaatgaacttaacagtctcgtgtctcatggggctgcactgctgaaagaagctgttggttcatctctgtttttcaagtgaaaattctatacaaaggaatatatttggacacgagtctatgaaaattccaaaatcatttgctcgtttattatatatatttagagctttcattgtgttttcgaagaagcttgtgttacaaaagaaagcagttgtgaaacacttgttgatgtgatggcatgtgctgaccaacataaaaaaggttctttcatcccagtgttacagaaatgcctgtgtgcttcatcagtcctagactgactgtgggcttagagaactaaaatgagccaaatggattgaagaccatttgattacactttcttggtaggaacaaacaggttgcattcagcccttagttgtccctggtatagtttaaattaataattgacaaatttcttgggtaaaggaccagataggaaatattttatgcttttggggccacacagtctctgttgcagctactcatctctgcagttgtatcaggaaagcagccacagacagggtgtaaacaaatgagcatggctgtgtttcagtaaataaaatttacaaaaacaggtggtctgttgaatttgacctgcaagccataatttgctggcccctagtttagcagttaaagatttacatacataatttgaattaatattaattataccaagttggaaacattgaaggacacatacagtgttttagggaatcttaaactttatttttattctctaaagttttagtttgtgttttctgttctcaagtcttgaggaatgctcacagattatctttctgctcatctctgaagggtttagcacttttgagcattacacatgaactgtcagaaaggacctgagtgccttagtgtgaattaatagctgtctccatgtctaagaagttaccatcattgggttttttcctccaggctaaactcccatcttccagcaggctttgagtgtctctgtagagtgagcaaaaacatatcagtatacataactatttactactaagtctttggatctttagatggtgctttctcagctattgcctatggctgaacaactgctagaaaagatccagaaggagcccacagctgtgctgaaagatgaggccatggttctgcatctcactctgggaaagtataatgaattttcagtttcccttttaaatgaggatccgaagagtctagatatatttataaaagctgtgcacacaacaaaggaactttacgcgggaatgccaaccattcagatc

SEQ ID NO: 4259 - DNA, 2300 bp, Homo sapien
tgatcctgtctgtgctcgtctcttgttgttcatctttaaaagaaacccactttccatttgcgataagagtcttcagtttgttgcagaaaaaaataaagaagcttgaaagtgtcattactgcagtggtaaggaaagcagaatctccagaaagtgggatgttgaataaaacaacagcctggcctattagtcacagcaaaactgaaaatcagaggcgagatgttgagtctgtggatagtagctggatgaaatgtgaagcagtcttgggtagcagtgagatagtcaactaggcactcccttgcttttgcggaaagtttagttgaattataaaattttagggttgcaatattttgtatctgatgcctgactctcctctcttttattgtctttattggataattacccaagctacacctaactacctctagcgatgaagaattcacttggtgtgttagtgcttgaacaaaatactatttcattcaattgtttactaaaaatagatcttttaggctttaaataattttaatattacatagatgtgtatccctccagcctactactgtctttcatagtattactaaaggacatgtttcagctgtttacatttgacatgttttgaggtagcaagactttttttttaatatctgctatatgtaaggattttgtttttatttgtcctccaaattttagagggcttctcattataggatttactaaatgaattatatctttttcacatttacgtatacccgcaggattttataagttctgatcatggccattgttagctaaaatgtgtaaactttaaaaagagtaaaatcttcatattttgaaaaatagtccagataggcccttcttaacttttagtttcttggtgtcttttgtgaagtatgatgacctgaactatactggttctcagtgttaaaagtatggacaaatagagtgttttattatacatatgtagataacaggttattttatattgctttacttttaatacctttctcgaggtcatgagcatgttttcgcctgtagcagcacgttgagttaatcaaatccctcactggagacgttacattgtaaatctggctttggattattttccttctaagttattactctgtactgcttgtacagagtcatatttgtcattttcttacacctgttctgcattcttttggcacttacagtataatttctaaacacctaacattttgctgcttgtttaaaatcatctgcaggtttggagatttttgccatgtaccttattcagattagtggtaaaacagtgaaatcaaagaattccctttaactatgtcttggcaatccaactgtttatcttcctgttttgaaatatacctattttggccaggcacggtagctcacgcctataatcccagcattttgggaggccgaggcgggtggatcatctgaggacaggagttcgagaccaacctggccaaaatggtgaaacctaatctctactaaagatacaaaaattagccaggcatgatggcgggcacctgtaatccttcctactcgggaggctgaagcagtagaattgcttgaacctgggaagcggaggttgcagtgagctgagattgtgccgctgcactccagcctgggtgacagagcaagactccgtctcaaaaaaaaaaaaaaaaaaaagaaatatgcctatttattcctaccctttattggataaacagttcatatgaataaagtttgtttttagagataatgtttcaaggtaagacatagataaaatttaactttgtctttccttgtgaatagtgataaacctctttaaaaatccgaccaaagcagttctgttaatcctttccccaccaaaatgcacacataaacaaaacttttgcatattatgcagaggaattcatataacccatgttcagaacccttagtttgtactagtttttgtttcctttaacatttcaggaaatcccctcagaatggcacattgaactgatgttagacagagggatcccagtggagctgtgggcacattatgtagaagagctcaacagcactcagagggtggccgtggaggactcggtttttcttgtattttccttgaaaaaatttatttatgcactgaaagctcctaaatcttttcctaaaggtaagatacaagctgtgaatcttttaaatgtgatactctgcaaaactgaatgattgactccacaatgactgtcttgaataaaaagctcccagcatgttcatgtaggatctagcatcatttctctttccatgtccttgtaggtgatatatggtggaatcctgaa

SEQ ID NO: 4260 - DNA, 2300 bp, Homo sapien
tttacacctacagcagtgagtccatctgtactctttctcaggctccataagtcttagggatgggctttatgccaacgtgctgaagccaatattatagtgagggaatacaagaaataaacaggtaaacaaacagacaaatcaggtcatttcaagtagtgataatggctatgaagaaaataccagcttggtacatctgtccgtcagataaaaatatataattcaagattattacattttttttaaaaccaaagcttttttttaaaaaaaaattacatttatgaacatctgacttgttttcctttttactttccaaagtaaaattcggcatggcactatacaccatcacagctgacataggaaggactgagtcaaatctttgtagcactttttcaagtttcacttaaataaagcttttaaaaaatatatagggtattttttaagcaaaaaaagcaaattatcttatcaatgaaacagacctggtgttcatttcttttaaagtaccgaaagctgattgcttctgtaaaggtaaaactcctgtgacatgttagaaagaaaaaaaaaattcctttgagagatatgtttgtaagaatgaaataggtactactagaattttcatgttattctctgcaaggcactcaacaccacatgaaaagaagattattaacagtcagtagaaatactaataactgaagaaaatatttggttgttttaaatgcttttaaagcaaaccaacaacaaaagattctgtttgtaaatgggagagaatctgcatgaggtatagacaaccagggcctccaaatttgtagctgtgtttctgacattctccagggaagacggttacagaaagacttgaccccctggccccgcagagctcttcagagaaattaatgcatccagaaaagacagagcatcagatctcactccttcgtctggaagacgtcagttcatcctagttctagcgcataccggtgttttggaaacagattagctatattcatacataaggatactcttccgcaacactatctgtagtgaggccaagaccagtggttgcgggaatcttcgcaaacaggcaagagacaatttttaggggcgatggaaactgtcattttgactggggaggtcattacacctatacatgcatttgctaaaagtcatcaaactcttccactgacgtgggtgtaaccattgtttgtaaattatacctcaacaggattcgattaatttatttattgagacagtctcgctctgtggagtgcagtggtgcaatcttggcccactgcaacctccgactcccgggttccagcgattcttctgtctcagctttcctagtagctgggattacaggcgcccgccaccacgtccggctaattcttttatttttagtagagacggggtttcgctatgttggccaggctggtcccgaactcctgacctcaggtgatcagctcgcctgagcttcccaaagtgctcggattacaggccgcgcctgactatgattcgttttgaaagaaaaaaatatatgccatttacccctcgggaatggaaacatagaggagtgacaagatctcccccaagctctggggcggtggagtccagcatttatagatcggtttgcactaggagcagaagctcctttcacgacaatctcggcctcttcccactttgtagagtgagtaacaagctcggagagatgaaataatttggtggcgttaacccggccgacaggcgccagcgccaggatttgaacccaaaccacgtgacttcacaacccatagctttcaacactacgcggtgctgctggcacctagtaaaggctggatcactactgaatgaatgattctggctacggatccttaaagcccacagaaggcccatccagagaccgaaagcttcagacacaagccgcagagcagaccgctaaaccggagctacagaggcgaagctcagacttgagcctgagtccggcgggctgaggggcgggctttcgtctcgggaggcggagctgtctcgtcgcattcccggcaagcttgaacctcttcacttgccgtagcgcctgcagcaggaagttgctctacagcatgccttaggtttccgggtgagggttgggctccttggtaccatgtgggaagcgctgtgaagagttgttgccttccaagatatacccaaattcccagttccaggtaagcggcacagagccgcttgatgtggctgcggatgggggcggcatatcgagggagggtaagagttttccggatatctgcggaatcagggttgaaggaaagccttggcgcggtcgc

SEQ ID NO: 4261 - DNA, 2300 bp, Homo sapien
ccggcccagtttctaataggtaaaatttattgatccacttgtttcaagagtatgattttaatccaaaatataaactctaaattttaaatttaaatccaagtaaattagctcagtcactatttccagggatactacttctctcaacaaatgagcaccactgtgcggtggacacgcctgtagttgctggggtctacaactgtggacgagacaaaatccctgcgtttgaggaatttacatcctagtgagaatgtttttgaaaatgttaatgtggcggggcgtggtggctcacacctgtaatccccacttttgaaggctgaggcaggtggatcacctgaggttgggagttcgagaccagcctaaccaacatggaaaaaccccgtctctactaaaaatacaaaattagccgggtgtggtggcacatgcctgtaatcccagctactccggaggctgaggcaggagaatcgcttgaaccggagaggtggacgttgcggtgagccgagatcgtgctcttgcactccagcctgggcaacaagagtgaagctccatctcaaaacaaaacaaaacaaaacaaagttaatgcaacctgtttgctaattgttatctttctgcataaagccccaaacagtaacggtgagtgatgtaaaaattctaaggaacaatgataaatccagacaaactcaacttgaaacatgtccacaaattagtagccctgaatcacaaaaaattctgtagcatctgtgggcaacgtttattcaattgagatataaactgaattgcaggcaggcatcccatcagctcgtctggtgcctaaggcaacctctggtttacagtagttgcttaatacatatttgatttaaaaatttcagcctacttgtcccaagggtcctcattttgcttcctgcggcagcataactgatagggaacagctagccagcactagggggatgaaaaggcgttaagtgcaacccacagggcgacatggaaatataacacgaagctggccgcttgcccttcattgtcagctctcttaaatttatgcccggtaggtgagagctgacacttcctgcctttggtttggttcctaacattttaataggatggatccaaatcctgtgccttgatttccccaggtgagggtgaggaggagagaaagaagaggggggttctgtagcttttaaactttactccttaggggcctgtatgtatgtatgtgtgtgtgtgtgtgagagggaggaagagaaacagagagagagaagagagagacagagatgagagaggtatgagagacacaggagagagagacagatgagagagagaaagagagacacgacagagagagagagacgagagagagagagacacgggagagagagacagaggagagaagaggagaggagagagacacgagagacagatgagagacagtgagacacgagagagagagagagatgagaggagagagagacatgtgagagagacacaggagagacagagatgagagagagatatgagagagatctatgagagagagacactggagaaagagggacagagatgagagagagacagacgagagacagacacaagagagagggaccgatgagcggaaagagaggcacgagagagagatgagagagagagaagaggggtctccaatgaatatgtgggaatatatggaaaacgcgaatatccaaatgatatttggaaaacttggctgtgttggggtggtcagggacccagcctcttaggtgtccctcccctggctcgcgatcacccacccgggacaccgacggaccccgcgccgctaaccagccgctctcagagcgtgggtggcaggcgtggctctgctcggggccggccgctcccctcacgttcccggaggcctcggcggaaggcgtgcaggcggcctctgggcggcggctgcaggggagacagtggaggggcccggcgcccttgtccgcccgcacgtgctcggggcggggcggctggggcccgacgggcggggccgggggcggtggcggcgggggcgtggccgggcggccacgtgacgggcggcgcggctattaagccgcgcggcagctgctcgcagccggagctggtgcttcgcccgagacccagcgcccaggcgtgtcgccccgagaggagccgcgcgaaggtcaccccgcgcccgccgcccgccgcccgccgcctccgtgggtccgtttgccagtcagcccgtgcgtccgagcccctcgcgccccgccgcagccccggccaaccgagcgccatgaaccagatagagcccggcgtgcagtacaact

SEQ ID NO: 4262 - DNA, 2300 bp, Homo sapien
tgctgggattgcgggtgtgagccactgcacccggcccaaatagggtcatattctgaagcactggaagttagggcttcaacatatctttgagggggacacattgcaacccatacagtattcttggaactgtaaatcgcgtttttgtactagaaattcactgcccctttaggcactatgtattcctctaatcttatttgttactcttttacgactttaagaaatacagaatttggtcagttttagctgagagagtaaactttgatgacttgcatcaaacagggactggcacacaactcctggaatttccagtaagagaatgtgaatgggggacagttgccgactaggtgcctgaaagatcatttttcaagaaacacgtcaacaaactttgagggatacatgataattaaaaaactagcttcaacccgggaggcggaggttgcagtgagctgagccaagatcgtgccagtgcgctccagactgtgcgacagagtgagactccgtctcaaacaaacaaacaactagcccttataatcttttttttttttttttagacaggtgcatctttacacagttaaatttcactacttctttttttgcagataaaaactcaggagttgagaaatgaataaacataataataaatatgagaaaaccatcatgatttatcaagcctggataaataatttaataagttcagcatagaagaccttgcttttttttctttcctccttttcttcttctttttttttaacttatttatttcaataggtttttggggagcaggtggtgtttggttacatgaataagttctttagtggtgatttgagagtttggtgcacccatcacctaggcagtggacactgcacccaatgtgtagtcgtttatccctcacctactctcaccctagcccttataatcttaagatttttggctatttagggccatctcattcctccctcccttctttgttgcattctctctcacctactccattccccccaccttccaagtaagaccatctttggtaagatggtcttggtaagaatgtgatacgcattataataatttttcaaatcttcaaaattgaggtataattacatacaataaaatgagaatggcatgcaaatttgtgccttttttaaagcttagtaaatgtcataatttggttatagtttttatttttctggatgcatttgcttttccttacatctaccatgctcagccttacagagatttttctagatgaatttgctttttctcacatctaccatgctcggccttacagagctgccctttattttagaattccctaaagtgctgtgttgtacacagggagcttctcctgactggaacaaccttacctggtaccactcttccttcaggacccagattcttctttgaaacctttccctggcccctttgaatactctagctcttttaaaatgtatgtggttcttttttccctgttcaattattaatctaactaggttgtgagttcctcctccaaggacgtgagggtgcgatgtagcttgtctgattttgcattccaagtgtgtgccccaatgcctgacacatagtaggtgctcaatatatgtttactgtcaataagttacaattaacacccccatatggtaattcagagttttcatagcgcggtcaaacgatctcatttaacgcctactacaaccctaaaaaattctaattactaccatcctatcattcttgtttgtagagtgtggagactgagaggttaactgtcttgcccagcgcaagtcaacagcaaaacggaactaaaatttcaggctcgacaccacacagcgtgtcgagatcagcacgaacttggcgctgtgacttttccttagaggggccacttaggcttacacttccggatcctgggcacacagagacgcgaaaagctcccgcgggaaactggggagcgggactacatctcccagagagccccggggctaaacagcaggtgattggttgatattgacagccaatgcggctgcgaggagctcgggcagaccaatcacaggccggaaggggcgggacctcccacgccgaggatagattgagcgcagaactaaccgcgctctgaaaggttctaaatgtctgcggggctcagagccggatgtcacgtcgtcctcctctgccggttttctcttgggtccttttccgtgccgtcccgcgactccgcctctggccgcgcgtgtctggctgctaggccgacaccaaggactggccgggtacccgggaagaaagcacgtgctccagcagttgccgcgcccagccccgag

SEQ ID NO: 4263 - DNA, 2300 bp, Homo sapien
gtgggaggattgcttgagcctaggagtttgagactagccccggcaagatggcaagaccctgtctctacaaaacaaatttaaaaatgagccgtgcactggggagtgcaggcctgtacttcttcagccagctactcgggaggatgaggcgggaggatcacttgagcctaggagatcgaggctgcagtaagccatgatcatgccactgtattccaacctgggcaacagagtgagaccctgtctctaaaaaacaaacaaaaaagatagtggcgcattttaatcccaaccacaatataattcataatcatccatatttttaccataacagcatctgaagggattcttaaatttggggccttcagcagtaccatgaagaattaaacaaggacagctacatccttaccatatgcacttaggctcagtaaatcctcactgtatgcgcccaggctcggacgccacagaatataaggcactggggttctaatgttaagttccagcccctcctcactagggaatttgtggctattcttttacagacataactgttcaaaaacctctgctctagcccagtctttcatctttcaagtcctgtgtcctctgcgatctctttttactttcagtaccattcatgtccgggcagtctgtgacatattagggcatttaatagaatgaattctcagagttcacctttttagtagcctctggagaggggaactgggccaggcacatacattacctacccaggtagcaatttctcaggaggggctttcctccagtgcactctggaacattctggtggcagtgccttattactctgggagtctgctcttctgagtaggctctgattgctgtctcttcgaaggtaccatggggctctgtgatctctctctcctgtggcgcagggaagctttgggtccccctctggcctttgttagcaaagaataattgatgggccgagtatacctggaaaacggcttccccatgcacagctgtccctgagctctgtgacattcctgtgtgccattaccaaacacctcctcgcctgtacttaacaatttcctgccctgtgtcaatgaagctgtacttgcttccacggcgggcaacgagctgtgaagtgtgtgggttggccactcattgattaattgatcagtcctgagcagtaccatatatgtagacgcatgggttgtggtaccagccccctggcccctcccactgtctgaccttgggccagttgatcaagcttcctatgcccctgatttcttgtctgtaaaatggagctgatggtatcacctatgtcacaaggtggttgagagggttaaatagtaattcatataaagcaccaagagcaggcatacagtaaccactgaatgagtattataagctatttaccttctcagcaaatatttattgatttttttaatatgtataagactttatttgttaccttagttgcagggaagagttgcttatgagctgagggtgaaaaatgggggagggtaggccccagggctgtggagaaaatccagaagcaaatcctgctgaattcttggtttggtgcccagccagccctgggtgtcctcagccggctcctgtatgacccttgaccccaccccacatggcaggcagcacatggcctgggcatcgctgaccccaacagtttgttgtttgagctgctgctgttgatggagagtggaggcgcttccatttattggatctcttttgaacatggtgctggacttaattgaaaacacttggggacaaatttttttttttttttaaaccgtgactttagcacagtgcctgaaggcattcagtaaatgtttggtcagtgtgtgaatgagccagtgaactggtgtcttgacaatttatgttacgtcatgtcatacattttttaaaaatctcatttcatttgtttatcttacaaatatttattggatactcactatgtgtcagacacaattccaagtactggggatgtaacagtgcacaatacaggctgccatctgtgcgttgtgaagcttattctcatttgacgatacccgattgctcttcatggtgtgctggcgccacgttcttgctaacggcgcccccgcacactcctacactccttggttttaaggctgagaaggactctgccagcacggagccatactactgcctctcagacttcatcgctcccttgcattctggcatccgtgactacctgggcctgtttgccgttgcctgctttggggtagaagagctgagcaaggcctatgaggatgatggtgacgactacagcagcatcatggtcaaggcgctgg

SEQ ID NO: 4264 - DNA, 2300 bp, Homo sapien
cattttattcccctcaattctcaatatattcagtaatgaagaatggtgccaccactcaagcaacaagcctcaaactcaaccatgtcatctttttcttggatgattgcagttatttcaaaaatttgcatgcaaaatatacactcatcctacttcaagatggtggtggcaatagtcaggagaaggtaacattggagtcctggtttgattcgaaggatgaagacgaagaagcaagggaggaacaaatgaagaaccatctttgttcatgaataggaatattcaagattataaaggtatcaggtctcctaaaattgatctatggatttaataccattttcaatggaaattccaacagattttattgaatgaaacaagcaggtgtttatatggagtagcaaaggacttaaaattaccaaatgcttctaaatatgaaggagaggttggggacacgcaccctatgtgataccaagttttattgtcaagacagtgtcatggtgcagaggtaggcattctgagcaggggaacaaaataagggcctagaaactcacccgtgcatatgttgacctttgcaaaatgacctggtgacatggcaagtcagtggggacaggaaggaccactccctaagtaatcccagaacaatggctattcatgtgggaaaaaaagaaattttactttctctcaccttacctggtgataagttccaaatatgttaagggctttaatacaaaaagcaaaaattgtcagtgtttggatgaaaaaagccttagggcaggaaagaatctcttgagacataaagtagtaatcataaaggacaagatggttaagtcaattctgttaaaactcaaggcttatattaagcaaacacttgaagtgagaagatgatccacaacttgagaagacatttataatacaaataactgatgaaggattcataatcacaaatatagagaattcctatttaaaaaaatagaaaaatagtgaagactacacaagaggaaatagggcttttaaataaatagatgttctgtagcattggtcagggaaatatgaattaggaccacaatgagattccattttatatccataagatttgcaaaggttgggtctgacagtaccagttgttagatctgtagggacttgtacaacattgtggatgtgtaaacaggcaccactgctttaaaaaacaattatcccttacagacttgaacatttgcagacgttatgatcttgcttccaactcccacctgtatgtccagcaaactcttgcatgtggccactaggaggaatgtgtaagaatgttcatagttacatatttataatagttaataactggaaaaagtgaaatgtatgtctgtctacaggaaaataggtgaataattagatatatatattcattctacgggatattattcagtagtggaaatgagtgaactacagctatacctcacaataagaatgaatctcagaaaatattaaggaaaaaagcaagtttgaagagaccacatggggcgtactatttttattgagcccaaaaacaagcaaaaccaaagaatatgtagtctaagcatacgtatacaataaaactatgctattaaaaaaaaagaaggtaactgataaaccaaaattgagcatagtaattacccacagaaggaggaagtggaagggacaggagcacataggtagatgccaagttatgcagctgttctggttcctcctggtaggcttacaagtgtttactatatgctattaatacattatactttataactaatagataacagttttttacatattaaatatgttctacttaaatatattataaaaaataaaggcaaagtggaatgataacctaaaatctggtatggtgattttgtaggtaatgtttgtatatgtcaaatacagtttttaaggaaaggaagaacatcttagggtaaacagcagctagaaaggtgaggggcaggagagtggtgcatccttgctgctgccagcagtgcccagataccaggctttggggaatgagtggatggctggaccatttgctaagacagaggccaggggatgggagaaatgatgagttttggaaagattcgatgtgactagactgaatataggcagttggatactagactttggaatttaaaaagaatgtctggagttagaattgagagacttgaacgtggagatggaggtcaggctgcagtgcgatgggatcatctatggagcatatgaggagaagagaatctggaggaggaggagggggagccagcaggggagcagctgtgggttggaggaagccaggaggg

SEQ ID NO: 4265 - DNA, 2300 bp, Homo sapien
tcccaaagttcccgcctcctaatcccatcagcctggggggttaggatttcaatgtataaatcttgaggggacacaaatattcataccatagcaacagctgcctggaaatacacagatcaggggtccagagggggagcgtgaggcaccatcatttctgtcctaggaaatcatgactaactcatctttttaagtttttttgaggggaaaaaagacacatggacaggattgaatctgtgcatgtgatttatttaaagcgtctttatcaaggggccttttatctggttctaggacagcaaatctatttagatataggaaatagagggagaaaaaaataaaaaccatgggtccccaaggacttggtaccagacctactttatttaaacatatccatgatttggaatccagaataaacagtatcacaaatttgacccatgacattaagattttctaagtagtgaaattccaggtcctgaaaactcagtaaagatttcccaagccaaaatgagctagaaaagaaggtccatgaatttcaaagtgagtgaaggtattcaaatccacaaggaagatgttaggctctgagacacagttcactgccagaagtagaacaccttatgtgtccccaacgccaaagggtataacattaggctgggcatccttagtaatgaacaaacataaataaaaaaatagactccaactccacacacaaactgtgggtgtctatgcttggaatactgtatgcaactttgcttaatcactgtcaaaaaatacacagtgaaactgaagagagcacagaatgaggaaattaaaataatcaactgtgataacagactaaaagtacttttaaaaacattttaatctgggaagataagttaggttggcattgaagctgaaaaaaatcttgaaaggtataaacagactatgaatgcctctcaaggactcctttgaaataagaggtcttttaagatgaataaatgttataacactctcatttcttgtctgccaagcaccacaggatacagaatctttagcaaaggtgaagacaagctggtgtgtaagattcaatttgcacaattctatgatattgatcctaggtatatcactagctgctacactaatttgttgggaaatagggaagtagcagaaactaaaacagtaagtaagtaccctaggaaagaccacatatccgttcatcccttcattcagctatacttactgtttattatacacctgatgctatgctagacaataatgaacatgtccctctcttatgtaatatgccttctacctaggagctggagtgagcagtggtaaaattgccatcttacagtttttaccactatgcactcatttaggttaattagttcctctgatatgtaaattacacaaaagtgaacattagttaataatggaacaatttcttgagaacttttcatgaaagaagcatggcactagatgctgaaaacatcatgacatcttccttcccccaactagcttaaacctgtgaaacattttgagtttagatttaattcaaactgcagcaggaaactgttggaaggttttaagcaaagaagtaagtaacattatctgatttttactgcaataaggaactttttatcttatttcattcatgtttaaatttaaatgatagttgactaaagcgataatgtgttgtggagtttataacatgttataaagttatgtaagatgtttgacaatggatggaaagaggaaattaaagtatactgttgtaaggttcttacactgtatgtgaagtggcataatattatttcaaagtttgagctataagttataaatgaaaattgtaaatcctagaacaaccacaaaaagtaataatcaaacagaggcatagccaataagccccccaaaatacaatcatagaaatactcaatatatcaaaaagaaggcagacaagcagatggaaacaaagaacagatcagacaaacataaaacaaatagccaaacagtagatttaaacccaaacatatcactaattacattaaatgtaaatggactaaacatttcaattaaaggacaagattgttgactagatataaaaaaaagcggaggagccaagatggccgaataggaacagctccggtctacagctcccagcgtgagcgacgcagaagacgggtgatttctgcatttccatctgaggtaccgggttcatctcactagggagtgccagacagtgggcgcaggccagtgtgtgtgcgcaccgtgcgcgagccgaagcagggcgaggcattgcctcacctgggaagtgcaaggggtcaggg

SEQ ID NO: 4266 - DNA, 2300 bp, Homo sapien
caccaatatgcccatcaccagtattaaaacacttgttatatttgctttggttttctttttaaaaataaatgttgtatatcattctcaaacatatttttatacttttagaacagactagagatctataaacctcatagttttgtatttttgtgttttaaagtccacatacacggtgtgttttataaatagtctctgctctatgtctacttgctgttgaagactgtatggggtgaataagaaacatcgagtgtctaggccttttagcattattccacttacattgagagaactaaagaaataataaccataactcttgctagaacagtttacagcctagttaaaatgccaaaatgaagacgtggtaagcgtttttatattattttacctaccatctgggtagaatggagtaattaagaaacctgtctctgcatagttctgaataaaatagtttaaaacgtcaatttgatacgttctaaatttggaagatcaaatcatttaacattaaatcaggagccaatttcagaatatagtcattgctcatggaggactcttacccgactttttgggagctcactggttgttcctttagagactcgtaagagtaaacattcacataaataataacggtttaagagttggttagtcgtcatggctacagggataggtcaagtttttaggtaaggtgactggtatacttccatgagatagggcagaacattactagttctaccacggacagcgagtatttatacacatattgtcattctcctggaaatttacaaacctaccccagtaagtacaaagttaatgaatgctaaaaataaaatataaactgtatagaactcagtggtcgattttaataatgagttagatgccgcagaatgtaagatgtaggtaaacggacgcaaaaatccttgttttacaatgtctgcatctccgtagtactgacatttgaaaactttactttgcacatacttattttaagtacgataaatgaaagcgctgtggactaggaacaagagacaaattgctttcttgtccaaattgtctcagaccctgtattttcttagtcatagccgtttgttaagtaggcatttggtagactattgcatggaggattgcgagagcaagatattactatctgcggtggaatgctcgaatttcttctctcagcaaggataatgggtagcacagtctgactttagacccatccagtggttcagacttatagatagtatcccatactttaccgcaattccttgttgaattaaggcttgcacttcgaatacagactacacacttctgggtctgtcttgtaccacattgtctggcataggcgctcactgtatatttgttgaatgttaaagttctgtgcaccaaaaccgtgcactttgcatcgattatctgcgaaaagcatggtacactaaaactagatcttgaagaattcccatttgatcatgaatagaggtaatccacgtttaaaataccaggtgttgcgtaatctctacttggagattagccaccccgtgcgcccaggtgaaagatatcattcttccgtgcgatccgaagtgccgtggaagttagtgccctagcccagtccaggaggaaggggcgtcgtgccggcggttttaagctcggaaggggcaggggaatgagcccagggaccccagcggggcgcaggtaggaggctgtgcgctcgccgggtgcgctccggccccgattcccagcgcagccagtaagtggcgctgggcctcgggtttggcggcccggaggagcgggctgcggattacctgcagcagcggggagccgccgagctcctccccgcccgcccccacaccccacccccaccgctgcactaaccccggctcagctggctccgcgcacttgctcggaggagccggggccgagcggaccgccggctgcaggcagcgagcgcggctgggctgcggggctgcttccccgcgtcctccgggcccgggccgccctcctcccgcacagtgcggagcagggaggccccgcgcctcgaccacccgcgcccgagcgtccgcgcctcctcctccgctctgcaggcggggaccgcccggcgctcggcacccggcagcgcggccccctccagcccccggctcccggcagcagaagcagaaggcagcgccaggggccgccgccgccgccgagctccgcggggctcgggagccggccccggcgaggaggcgcggaaccatggccgatgggggcgagggcgaagacgagatccagttcctgcgaactgtaagcgccgtgcgtcgcgtgtgctgtcaggg

SEQ ID NO: 4267 - DNA, 2300 bp, Homo sapien
tttgacaaacatctacggaatgcctggtttgtggtgggtgttgagaatacagataggggccctgctttggatgggcctctctctcgagcagacaaggaagatcgtgccaggtagttgaatccatatacaacgtggaccacacaggtagtgagagtcagcaaggccagaggcgaacctcataagacaaaggggaccacgtaggaagtcactgtcctgctctgcatttgaaataagcactgttcagagccccgctgtccagtatggcagccactggccatgtgtggctgttgaatacttgaaatttggcccctctgagttgagatgtgctgcaggggtaagatgcataccagatttcaaagacctatcatggcaaaaagaatataaaatatctcattaataatgcttcagggtgggcactgtggcttatgcctgtaatcccacactttgggaggctgaagtgggcggacacctgaggtcaggagttcgagaccagcttggccaacatggcaaaaccccgtcttcactaaaaataaaaaaaattagctgggtgttgtggcatgcacctgtagtcccagctactcaggaggctgaggcatgagaatcgcttaaacttgggaggcagaggctgcagtgagccaagctcataccactgtactccagcctgggcgacagagactccatcttaaaaaaaaaaaaaaaaaagcttcagtagtgattgattacatgttgagataatattttggacatattagattatacaaaatatatggttaaaattaatttcaccttttccttttcgtcgtattttttttaaccatggctatgagaagatttaaaatttttttgtgtgggagccctaaatgatggctcatgtctgtaatcccagctactcagggggcagaggcagaagtattgcttgagcctaggagtttgaaaccagcctgagcaacatagtgagaccccatctctaaaaaaatgaaaataaattagctgggtgtggtggaacgtgcctgtatcccagctacttgggaggctgaggcaggaggaccatttgagcccaggagttcaaggctgcagtgagctacgattatgccactgcactctagcctgggtgacagagcaagatcaaggctaggtttcaaaaaatagattaaataaaattgtatatgtggataggctattgggcagcactgccataacctacgtactaactgtgagatggggaagaaaaggatgactccttgggaggaagatgcggcaatgggaggacactgatggatagaggctgctttacacctctgaggcctcaagcaggattcaccatgatgtcatctgcatccctccaaagtcacctgcttttgtcttattgcataacttgtttcaaatgttctgccacaacctcccccagcccagacatattcatgatgttcttttatgattagtcagtcaccacgggtagaatgtgtgttccagtgccacatcagggatgacttatgcaaacccaagatggccctttggcttagtccttcttcgcccagtgtaagagtctgtcttgtgcctggacactgaagactgggggagggcagtccatcagagatgattcaggcgatgttacgttggtgtgactggaactattgttatattattaaacggtagaggggccatcctgggcaagagttgatttgcaggttaggttgatgagtcaccgattttgaagctggtgtatgtctaggtagaaatactgaacatgcagctggattgtgcagccaggtctcggagagggatctgggctgattccacatgtttgggagctatattgatagagaaaaggctgtgggagtcaccccatgtttaggagggcagagacccaagcgctgaacccactctcattctcatgtaggttttatgcttggatatcactgcgtgaatttaaaatctgagcctctaagcaacattttggaaagcctgtttcatagttctgcttatgcaggattttctgcctttttttttggcccatgcatttttctctatgcttagagggggaaaaatatgagaagaaagtgtgttggaaagaaagtctgcgggaggagccaagatggccgaataggaacagctccggtctacagctcccagcgtgagcgacgcagaagacgggtgatttctgcatttccatctgaggtacccggttcatctcactagggagtgccagacagtgggcgcaggccagtgtgtgtgcgcaccgtgcgcgagccgaagcagggcgaggcattgcctcacctgggaagtgcaaggggtcaggg

SEQ ID NO: 4268 - DNA, 2300 bp, Homo sapien
gttgggggacaagaacaagggtaatagaggcctgagatctctcttctttccccccacccccggcgtacctatataaatttccatccatcttaccacataattattttcattactagccaatgtaacaataagaaggaattatgaagatggcaaaacatgccatatcaagcatgacacagacacagagacagggtagttatatgagaaatgtaattacagagcacttataaaacctttcagtactttagcaaccacaacttattgctgtgctaaaagattttttctaaattgtttttcaaacttgtaatatgacaagaaaaagaaattggagatgataagaattggagtaaaagggacgaatttatcatcattcgaagacaatataagtatttacagagaaaaccctaaagaatctatacacattactaggaacaattggagtgtttcacaaggtagaatttctattctagcagcagttaagaaaagtaaattaaagataccatttacagtagcatcagagactagcagtagctaggtatctctctaacagaaggtatataatacctttactgagaaaattattaaaacttattgagagatggttgactttattaaaagacttattaccaaataaatgagaggtgtgttatgttcatggagaagacaaaagcctgaagatattaattcttccaaaagtgatctatagcttcaatccgtcgatcagacttttcaaataaaaatcccaacaagtgtttttatggaagtcgatgtgatgactctaaaatgtatatggaattgtaaagggctaaaatatcttctgtctaaaagcagtgaggggatgcatgtcctaccagatagcaggatttattgtgaagctatagtcattaaaatagagtggtattgttgtagggatagacaaattgacaaatggcataaagtagagatgccagaaacatagaactgatatagaaacagatgccatagaacatgatgaggtagtgtgtcagtatgttggagaaaagaggcctgtgacaaatggggatctgtagtgaaaatatgagatggtcacttcttcacaccctatatgataacgaactccaaatggtcttaaatgtcaacagcaaaactttgaaaccactggtggagtatatagacaaatttaagaacattcatttaaaaaaatgaatgttctgcttccttaaaggaagcagaaaaacagtcaggtattaatggggagaagctattcacaatgtgtacaactgaaaaaaatgttagtgctaagaaaatataatttctgaaatcaagcaaaatgatgaaaaggtatgaacaggtatttcatagaagcaacaactcagagggacaataaacgtgtgaagagatgttcagtattattgatcagggaaatgcaaattcataattaaatgctattttacatccattctgttggcaaacatttgtaaagacctgacaatactcagcattggagagcagtacacccatagaacctcttttacgttgctcttaggagctcaaattggtctctccactttggaaaactgtgtgacaggatctctgaaaatggaatattcacatacccatgacccagaaattctactccagttttttagctacactagtgtgtctcaacagcaggagatatgtacaagaatggttgtaggagcactattcacaattgccaaagccaggatacaactgaaagcacacaggatggatgaattaactggaaactacggtaataaatgacaacatggatatttaagggaaagaagtcccaaaagataactatggtaggccgaataatgtcctccaaagatgttgattgatggcctactcttggaaatctgtgaatatgttactttacatagcaaaagagattttgttgatgtgattaagatagtgatcttgaaatgaggagattaattaacctggattatctgggaagccaatgtcatcacaaggatccttataagaaggaagtaggagtgtgtgtttctgtgtgtgtgtgtgtgtgtgtgtgtgtgtgtgtgtgcgtgtgtgtgtgtttgagagagagagagagaaagagagagatcgatctgggagtcagggaaagccagagacctctagaaatgacaggaaagtcaggaagtgggttcactgcagggcctccagaaggaactcagccctgttgagcaataggttggtagatacttaagagtatttttaaaagaaccaactaaataaataaaaacaggtgatgatgagagtgtgtcacaaacaaaagtttatcagtaatccac

SEQ ID NO: 4269 - DNA, 2300 bp, Homo sapien
gacagaggaatgggaagtgaagcttctggatctgtaaagcttctggatctgaaagtggcaaatgccccagttctttctttcttccaggcctcattagctctggtcatgccctcctcacagaaggcagcttaaccctgagtctacaggtttcattaaaattgctgagtaatcgcatgagaaaaacccctacgataataggtattgatcttctggcatagttattatgattttaaattataaatcacatctagtcaggtatcaaccaacatccacaaggaaactattggttcaaaatgtatttatgtatgtatgtatttatttatatttatttatttttattttttgtttttgagacagagtcatgctctcttgcctaggctggagtgcagtggcacgagttcggcttgctgcaacctctacctcccaggttcaagcaattctcctgcttcaacctccgtagtagctgggattacaggtgcgcgccgccacacctggctaattttttgtattttagtagagatggggtttcactgtgttgcccaggctggtcacgaactcctgagctcaggcaatccacctgcctgggcctcccaaagtgctgagattacaggcgtgaggcaccgcaccaggcccaaaatgtatttactaagtggcatctacatgctggttgctatgggtacaaagattaatattaatagcaataaaaagaataatatgtatatagtgtatactgtgtgccaggtactatcctaaatatacatatatatttagaatatatacatttatgctagatggggtatgtgtgtatataaatatacttctttaattctcacaataaaaattatcttcattttacagacaaggaaactgaggcaaaaggaggttaagtaactcactagaggtaagacattctgaaagaattcactctggtggggaacagacacaaagaaaccacacaaccatgtgataatgcgattacagaacatgtaagaagtgctcttacagggaaggaagacagcaaggtgcgaagaacaccttctggaggagatgagaagccttccttaggcagatgacatctgagtgactctcggaaaacgaaaaacagctttcgaaataggacaggcagggcatacagggcataacagaaagaggtcatccaatctatagctttattcataattgcatcatattgaaacaaccaagatgtccttcagtaggtgaatggataaacaaaccgtggtacatccagggaatggaaccttattcagcaattcaaagaaatgaataatcaaaccacgaaaagacatgaaggaaacttaaatgcatattccgaagtgaaaggagccaatctgaaaaggctatatactgtatgattctaacatatgccattctaggaaaggcaaaactatagatagagacagtaaaaaagatcggtggttgtcagggattaggggtgtgtgggaggagatgaatagcagaggacaagcaatttttagggcagaacgacttttctgtatgatactgtaatggatatatgacaatattcatttgtcaaaacccatagaaattacaacacaaagagtgaaccccaatggaaaccataaactttagttaataaaaatatatcaataatgttccaattgtagcacatgtaccacagcaatgcaagatgttaatgctatgggaaactggagagcagggagaggaggaggagtatatggaaactctgtactttctgctcatcctttttgtaaacctaaaacttctctaaaaattaaactctattgaaagagaaataaagggagaaatagccttcaaaatattacagagagagcattatagaaagaggggcattgagtcttcagagtgctttccaaaacctgaattaatcgtggagtaggaaatattaagtcatgagtaatttataacttagtataaattattagttcattttccttgctgctgtcattagctggtttcaggatgtgaagaaatgaagattcccttggctgcaagtgaaacctagctcagactcccttcgagtaaaaggaagtgtactggctgacgtaacctggaagtcctaggtgccacttccggcatcgctgaatccaagagtacaaatgaagtcactgtaatgcatctctctactcactacttcctccttctctccctccgtctccctcctcccctctttctctgtcgtgcctcaattcgatgcacttctatcaggttgtctttaaatagtgtagtgatagcccctagcaggtccaggctcatgtgatttttttagttcttctgag

SEQ ID NO: 4270 - DNA, 2300 bp, Homo sapien
catgagtgatctgtgccttaaggacatgctcctgctgcagataactagccagagctcatccctttatttcagcccatccctttgtttcccataaggaagacttttagttaatctataatctatagaaacaatgcttatcactggcttgctgtcagtaaatatgtgggtaaatctctgttcgaggctctcagctctgaaggctgtgagacccctgatttcccactctacacctctatatttgtgtgtgtgtgtgtgtctttattcctctagcatccctgggttagggtctccccgactgagctggtctcagcataaagcaatattagtaagtctagtcaggagactggccttttaactcctgagacatcttgcatgagtcaaatcctcagattctttcttacatgtgcaatcacatgatatttacttgaaggaaaaatacctaagggttatgagtttgagctcatcataaaggaaatgaatttgtaccggtgaggtttggaaactacattttcaagggggttagccctaggacatggccactaatgaaagcatattcattgattcagtctttactcagagaacactgagtacatacatccaaggcacgcaggatgcagtgacaaataaaaaagtccctggcctcacgtgcttctagtggcaaactgaataagaaagaggtcattacaatccaacctggcaaatcctgtgagtaaatggcatgtaataacccagtggtgagcacctaatccaggtagacggtgtcagggaagccacatctgtctttgagggcagagtccagctttccttcaatgtcatttttcatcatgtggttaaaagggccaccaattttcccaggaagacacatacttatttgtcctctgtgatgagttgaagagaactagagatacctagttacacattctcagtgctttgactacaatttttagtcaaccgaaaaatatcagtctaaatacaatcagggtacaatttgggaatattggtggcagactgcagaagacaagtttccatgctcttgcctctccagtggggaatgtatccatttatccccaaatctcttagaatttctctacaatctggtctgacactctagcttaaagagtgaccaaagtatataacttgtagtttatgtggaaaacaaaaatgtagaaagcaagcaagaaaccctgacatctttatgaaatatgcctgaaacacagccgaaagataaaattgtcaaatagctgtaagaggcagaaccagtttgaggaattcatggcctaatccacatttcccccagatcctgtggggaaacactgtaggacagttatggcaatgaaccactttggaatttgttgaaagattgctgtggtaggattccctctaaggaccaggaaagggttcaaaatcaacctttctcaggaaataagtttagatttttttctagaatttcaagacaggctctaatcgtacagaaacttttctagaatggatggagaaggtgacaaggcttctcaagggccccaactctcacccgacaatgttgactgagcactcactgcttggccaagcactgtgccaggcacctgacatagaatctcttgcttaatcctcaagcacaccactgccaggagatagcattcccattttacagatgagaaaaccaagattcagagagtttgtaacgtacccagaccccatagttcatagatggtagtttcacacccaaatgtgcaaaattctagagggaggtcttctgaagtcaataagttcaataaactggtgggacaaatgctatgttgagcaaccctgaggaagctttctttccttcctttctgttagctaaaagttactacatttttcttgggctctgaagtctgcctggattgtggtatttaatgtgaggcagctgcagactgtgccccaaagcaaatgaggctagaggaattcccctttctgaaggcatcccacctgagtgtcacaaagatgtgcagctgaaaacaagcctgacttctgtatataaaggaatctgggcaggcagaccctcggctcttgggagaggaggcggagagtctgcagccggcaggaactcctggtagcattatgtggctgctgcggtgcgttttgctgtgtgtttcattatctcttgctgtgagtggccagcataagcctgaggcaccagattattccagtgtgctccactgtgggccgtggagcttccagtttgctgtaaacctcaaccaggaggcaacgtctcctcctgtactaatagcttggggtaagtttgatgacttgccttgctt

SEQ ID NO: 4271 - DNA, 2300 bp, Homo sapien
aagattgactccgtaaagggaagtatgcccttccagtcaaagccttggtaaaataaccagtttttccaattgttttctgttgcaaaagaaaaatggattcttattgcactgatgcaaacaactatattgccataagaatactcacaggtagtttccaaattctagaggaaccaggcagagagaaacaaacatgctacaaattttgatcacaggagtgtatactttccttattaatgactgtaaatagttcaaaataagtttccttgactgtgaaaaacaaaacaaggatcagcaatattccaagcaaaagtcaaaaagatttgcttcagcttcctgagttcagtccatctagttaactcgttttgcttggtatttgtgaatatttcagctctttatgagccccataaattttcctttatttcaatgttacaatctcaaaagctttcagaagcctgtatttgagagcaccacctaaagttctatagcttattataaaccatcttttgaaaaggattaaagcaagacaacaattgtctgtgaatagcaaaatgcccagggtagtgacagttagaaacacaactgacaaaaatgtttgggtatctctgtggtttgcaataacttaaccttaattatgattggtagcatatacttagacattagaattttagaaatctcatacaatgttggaacatatattagcattatttaccaagatataacctaaagaagactgaacatcattttggcaatcccatgtacctaaacatgtcaaataattctgtttacctctcttctctggacacttcaggggccctgtcaaactactcaaaaagccaggtgccggggaagacaattttgaagctcaagtttgattttgggaaggctgttaaatgttcaaggtttaaaacacttgatattatgaaacagaattccagattaccacaaattatttgttttgcaaaaatgatgactcagaaaacgtaaagaagcaaaaaccttttataaccctttacagattttgccaaagagcagctaatgccataggaaacctttgttaggcttttatttcaatgctcaatttacagaaaaaccatataatacggttttttgaatttagtcaatatgttcacacagagaacctcttcggcaaggttaattttcacaattcttccatcacttctttgaaccctcagctttttaataatttaattcaaaacaatcctttaaccctaggcaaaaatttacattttcatgccttcttataaccttttactaaaaaacatacttcactgttcttacactccttgcatgcaaatctatttccagtagtctcaattacatgttataatggtaactcctagtaatttttaacaataatttaaaacctggtaaattgttttaattgtgtgctaactgtagccaaggtttgccttcttagttaaggaggtgattagttccatatgtccccaggccctaccagccgtgaagcagaggagacagacagttttcaaaacccaaaaagcagtttgtaaccttgaaacacttagcaaaccttgcatcttacctacattttaccaataatctttaggggctgttttgatttctcaaagattaaagtcatgcgaactgaaaggtaccacagcttttaacttcccttaaaaaatacttgatccaagtgcttgtcttctttaggacaaattaattagagatctttttaaagacagcacacacagtatacacacacacacacaggcattagaaaatccagttgctgggtgaggccctttaagagacagggctaggaaaacatgcagatatcaaaccagagagggctcatcctctgaggcaggattgctcaacaaaccttgccaagcagttactggtcacgcccccaggatgtaaaacaagatggaggcttgcagcacacaccatacagacatgcaaagcacaccaggattggccacggcccaagactagccctacaaatccttttccacaattgaagctttacagagactaagttcactgctgactgggtgtgaagaggagaaaaaaaaaggggtttaaaaatgcctggggaagaacctcttactcttacccaagtggttcctccaccagggagacaagtttaattgctgtgggtcagagctggcctccccggtgcagggaggaggagatcccatgagtgcgtggcagaaaacgccagccactcatgacgccttgagccaggtatcccagccccggcagggaagggagggcggtggggagccgctgctcacccgttccttccaaaaaaggga

SEQ ID NO: 4272 - DNA, 2300 bp, Homo sapien
tctaattgcaggcagatgtcccagaaaataccagtctatactgtcagaaattcctatctgctatgatctcaaaaaatacttcagaaatattactcatacggcttgagataagcacttctttggagcaccatcagctagcaaatcataaataagatactaaatgaagctctcagtcaaggaatcacaggtttcataagtgatatttcagcaaacacaggatatgcatcaaagtgtgatacctatctcaagcttcaggggtatgtattaaaaaccatttaaaattatgttcctgatattcccttctgaatttactttccaaagtatcaatgtttgagagtatttcccaagattaaattaattctccaatggtattaaagggggaatatcgtgtaaggtctacctcatagaaattcaaactttgaaagattctacagagtagggaagttatgaaatatttgatgtgaaaatggttttaaacaactcagcatgaaattgacttataaggtctttttggtcttggtaactgtgaatttgctcacaaagtcatcttcctaaagtgccaaacccttcttctactccgtataccccctgccctgagataaagaaaaatgaacactaaacaaccacccacccagtttaataatattttatccaagcaactttgtttatccagttataattgaccatttcacacttcagtgtgtttcacctgaagctgagagtattcaacaataaaatgcagtaaacagtcctgtaggaaatgtttctagaatcaaatctggtgacaacatgaacattgcatgggtattaatgcagagtttttcatttgcacactggtacggtccataacgtttctactgcaggcacttaggctactaagaattacacatttcccctaccccctacattgctacactacagaaatcagtccctcaccgtcttttctgcattaatttcccgctcctagtaaatagaaaaagtctcctggtgggtgagtaggaaaacttaaaaatgagtttacatctctagaaaagagctctgaacttgtagccatcaacagcatctacccaagcccaagcctagggaaaacatctgcagccttcttactataggagtgatcaagagcttttcagggcctgggcccagatttggagaaggttgtgttaacttgccatagaagggcaggaaattaaggtgatcatcttgactttagaagaggaggcattctggggacatgtcagggcaaggaaggagaaggaaatcagaatgaatcccagcataaacatcctccgaccaaaaataaaataaaaaaaataaatgcccccaaagaaactgtcaactgactttctttaaaaaattatattcacttataattaaataattaagtgccaaaaatacataaagagttgtttcaaacaagggaatgtgaagggaaggaagatttgtctttactaactaatagataagagatcctcaaaagaagctgcttaaaacaattaagcagggaaggatttttaatagggtttcaagccacggaaacaccctgaggacaagcagcagaggctctgggaatggaagccacaatgatccaagaacgtggcattaaacttttcagtaaaacaggattctggatgccataagaataaacaaaatgacatttctgctgtttccttaaggaggctattcctcaaagacttaacactaacaagtccaagtagaattttccagctggtatgaatggatcatggggaagctgttatgagagcagggaaattccagataggtcaggaaaacaaattgtataacaagatatagagcttaaagaaaaaatatgccatgactgtattcactctctatcacctcccattacctccctgacaggcaatcaccactggaatttaatattctggaattcctgtacatttagccagagtatgaactttcactaaaaaaaaaaaggaaaaagaaaaaaagcatgcgagacagccaggtgggagcggatccccagaaaaactccaaccggcctgcacactggggtggaacctcaggaagttcatgctgtttgcagcggggaggagcctggcctctcttctttctgtgtggaacctggaattcaagctgtgggtgagaagctctctagcagggactctgaccttatggaggatcgctgtttcccccatttttccttttcacccaaaaaagtcctgcttctctcacccttcaaacagcctgtgagcctaaatttttgtggccatgggacagacaaggaccccgtcttcagctgaactaaggaaaagtcc

SEQ ID NO: 4273 - DNA, 2300 bp, Homo sapien
ttaagtatcccatttatattttcctctgaaatataatttgataaatctgctgaatgatcgggcaccaaggtcaggaccaataccttattcaagcccagcatgaatccacttaccaagaaactggaggcaactctgtctaaactgtaatttgtttgatacaaacatgccatctacatttaccttgtccataatgataatgggaaggttagctgaaatcaggaaatactgtattatgagtttagtgactatttacaagtggaaatgaatttaatctggtatgatttattttactaaattgtagttgcttccttttcttttctcactagtcacaaatgatttatttcagtatcttctccagaacattgccagaggccagtctcaaacttaaccattgtatacataccagaatattttcattaaaaattaataacttttgtctttctctgaaaactacataatcactacttgtccattcttttggtccttgcctgttctttatggatcaatattatcaaagctactcctgtttccacaggcaaataacaattctatgtaatgggaaagatattaaatccgaattcatgttcctcttactagctatataatggacaattaaattattcctttaaattcctttctcctttagtacacaaggataaaatactcatttgattgttttaaagattaaagaagtatctgaaagtaactgttatattttcttctgagaggtatcccaataaaaaggctacaatattgttattattattactattctagtatcctggatgcaatttacctaagcctagatattttaattaatttaagtagccacatgctttctcactagctattttcccagcatgatctcaatcttttctacgcaaagtttagtctcttctctcctaaagattgttctacctagagaagaatataggttcagaaaggaattcatatactggtgtttctctaatctcttagaattacttaatttttcaaagagctctatcttttcctatttatcttcttgttccaaatagaattaaaatcatttgctgcctttaatattgttaaatatttcatttcatactatgcttcaatttcttgcttttttcttctttttatcttcctccttccttcctttttctttcttttcttctttttcagttatcattgttatgcttgtcctttcttgtgagattcctctgttatctttccttatgtgctttttaaacaaaacctcgagagtgccgtgggacagcctcattggtatcttttcaaatttggtatctctccactttttccttacatagttagctggcagtagtacataataaccttttctgtctctctctctttctttctttctttctttctttctttctttctttctttcttagattttcattcctcttgagctttaaaagactggctagcaatgttatatctttcattttattttctgatttaaaaaagtgtgtgtgtgtgtgtgtgtgtgtgtgtgtgtgtgtgtgtgtgtacgcgcgcgcgcgcgcgcgtgcacgtcagtgtcttcttcatggatgcttgtcttattttctcccaaggtgtaactgtccagggagggaaaagtcaagtcgtcctctattacactgctctgcagaaacagactcactaaatgtcaaaaagtagatgcatcagactgttccttagagaaaggtttgccatggagtcgtatattgtaactgagctgaagttcactcatcgataagttgtgcccaaggaatcgaattccttccagtccttctaagcagtccagggaaaccaatttaaaagcgaacacaacaaaactaacagaccggcaaaatctatctttgaagcgccgcgggaggcacaatttgggaacaggtgaggccatgctgggtgggtgaggcccccctctctcctgcttggtgttccgctttcagccaacccaccccaggagtaccctgggatctcctcgccccctgccaggcggagaacgcggagcccagcgggcacgcgggaatggagctaggcgccggcagggcaactgggcatgctcagaagccgggcaggttttggtctcaagcacgcagcctgtgcattacaccagctctctcagtccggggaggaggaggagcaggaggaacgcgaggaggaaggagaggaggagcggccagcagtagccacgaccgccaccaccaggcagaggaagagttcgtggggaggaaaagacctctcctcccccttggagcgccttctctctgcttttggagaaagggaatacacgataaagaaggaga

SEQ ID NO: 4274 - DNA, 2300 bp, Homo sapien
attctgttgatttggggtggagagttctgtagatgtctattaggtctgcttggtgcagagctgagttcaattcctgcgtatccttgttgactttctgtctcgttgatctgtctaatgttgacagtggggtgttaaagtctcccattattaatgtgtgggagtctaagtctctttgtaggtcactcaggacttgctttatgaatctgggtgctcctgtattgggtgcataaatatttaggatagttagctcctcttgttgaattgatccctttaccattatgtaatgtccttctttgtctcttttgatctttgttggtttaaagtctgttttatcagagactaggattgcaacccctgcctttttttgttttccatttgcttggtagatcttcctccatccttttattttgagcctatgtgtgtctctgcacgtgagatgggtttcctgaatacagcacactgctgggtcttgactctttatccaacttgccagtctgtgtcttttaattgcagaatttagtccatttatatttaaagttaatattgttatgtgtgaatttgatcctgtcattatgatgttagctggtgattttgctcattagttgatgcagtttcttcctagtctcgatggtctttacattttggcatgattttgcagcggctggtacccgttgttcctttccatgtttagcgcttccttcaggagctcttttagggcaggcctggtggtgacaaaatctctcagcatttgcttgtctataaagtattttatttctccttcacttatgaagcttagtttggctggatatgaaattctgggttgaaaattcttttctttaagaacgttgaatattggcccccactctcttctggcttgtaaggtttctgccgagagatccgctgttagtctgatgggctttcctttgagggtaacccgaccattctctctggctgcccttaacattttttccttcatttcaactttggtgaatctgacaattatgtgtcttggagttgctcttctcgaggagtatctttgtggcgttctctgtatttcctgaatctgaacgttggcctgccttgctagattggggaagttctcctggataatatcctgcagagtgttttccaacttggttccattctccccatcactttcaggtacaccaatcagacgtagatgtggtcttttcacatagtcccatatttcttggaggctttgctcatttctttttattcttttttctctaaacttcccttctcgcttcatttcattcatttcatcttccattgctgataccctttcttccagttgatcgcatcggctcctgaggcttctgcattcttcacgtagttctcgagccttggtgttcagctccatcagctcctttaagcacttctctgtattggttattctagttatacattcttctaaatttttttcaaagttttcaacttctttgcctttggtttgaatgtcctcccgtagctcagagtaatttgatcgtctgaagccttcttctctcagctcgtcaaaatcattctccatccagctttgttccgttgctggtgaggaactgcgttcctttggaggaggagaggcgctctgtgtttttgagtttccagtttttctgttctgtttttccccatctttgtggttttatctacttttggtctttgatgatggtgatgtacagatgggttttcggtgtggatgtcctttctgtttgttagttttccttctaacagacaggaccctcagctgcaggtctgttggaataccctgccgtgtgaggtgtcagtgtgcccctgctggggggtgcctcccagttaggctgctcgggggtcaggggtcagggacccacttgaggaggcagtctgcccgttctcagatctccagctgtgtgctgggagaaccactgctctcttcaaagctgtcagacagggacacttaagtctgcagaggttactgctgtctttttgtttgtctgtgccctgcccccagaggtggagcctacagaggcaggcaggcctccttgagctgtggtgggctccacccagttcgagcttcctggctgctttgtttacctaagcaagcctgggcaatggcgggcgcccctcccccagcctcgttgccgccttgcagtttgatctcagactgctgtgctagcaatcagcgagactccgtgggcgtaggaccctccgagccaggtgtgggatatagtctcgtggtgcgccgtttcttaagctggtctgaaaagcgcaatattcgggtgggagtgacccgattttccaggtgc

SEQ ID NO: 4275 - DNA, 2300 bp, Homo sapien
aacccattggattttttgagaattaggaatcattatactgtgcagagtttgggctttttgacacatttccattccttcaattgagcactccttttattggatcactggaataaaatcatgattattaaacatgtcacaatatacaattctcattttataataatttatgaagaccttgcttaaatatatgttctcaaatcaatttaagttgagcacatattaagcaaaaataaatttaaaaatgcatcttgcctctcaacaaaatatttccttgcctgagttgttcaaactcctgcagataaagcatatttaaataaagataaggggctatcacttgctcttattttcattatattcaggagatgaccactttgattataagtaagaagacttaaaaatactcatgatttccaacatgaattacagcacttaagactttgtcttctcgttaaatcatgcttattcgtgcattttatataaaaactctggagaataacttaacaggaaatctaaaataagaaaaagaaacactgaaattccccaaatctctatagataaaaccctttaaggcttaggattaagcatttgaaaatatcaggagcatttaaaatatgttcatgcttagctttctgttcacttgctatctgcaacatgaaaagtctggcgttgagtggcacgagagcattactgtttcattttgataatccaagtttaattttaatacatcttttaattttactttaatttaggtttttttggggtttcagaggcagagcactactttgtttctgactaaatgacaaaaatcattaactgccagtgactatatgaacatgatgtgaacaatatatgcaaagaaactagggcaaagttttttgttttagaaaaacatatacttatattctatatattctgaatgatcctcatataaacaacacaacatacaatatctcaaaatgttactacaacacggctcattactttgcaggttgcaaacgcagcgtgtaaatcctttcctctcaaccatagtaagtaaagacacagatacaacacggtttgcaagtcttagctctgctctgtaaacttactgctatcataggtcttctgcataagtatttttagtgcccagttcctagttcagtgcttaaaaatcctgccgatccctgggttggaacaaagctttcggaagcaattaactgcttttgccatcccaggtgccaaacacacacacaatgtccttttatttgtggaaatacacacagatctattctgcatgtgctcagagctcaacacaaatatcacccctttcccacaggcagcaggaaggatgtggtttgaaggacatagttgcttcatctgaatgttcagttgttcaaaagatctcttgttgctacgctgagttgcggctctactacctacgtttaagaagatataaccaggccgtgcccaaaatcccacttttatctatttaaacaggcattcaagtagatcgtgcaattctttgccccttaccttcagtggacacatgctgaaaatgtgttcataatcaaaagacattccccagagctgatgacccagtaattccttacgtatacaggtcagctgcaacaataccgtactaaaatcgccagatgaaatggtcagaattacccggtggcttgataaaatcagcttactttgagtctaatccaaggataaatatacagaaagctccaagcagtggaaactgtaatcaccttagaactgccccctgaaactgtaatactgccaggaaaacaaatatttgctgaattatagggtgctatattggttttacctgaatgcaattaagggctaaataactacaagctactgtttaaagtggacaggtataaccaagagcaggggactaattctgccaacaccactaacaccagtccccaaaaaccctaacgatacactcagaacaagcaaaccagtagatctgattaccaatttcacatatcctgcattcttggagctcacccatttcatcatttccggacactcagactctaactaggaacacctaactcatagccctgtattttgctaagtttttcctctactcttgagtcctcctttaatctatagagtgttattctacactggacctctctcttattttttggagtctagcatcttgcatcttcctggagccccaactaaactcataacttctaagcttctaagaaatatgtaagtttttcaactctgtacattaagtctttttgtgaccttaaacttaccttagaaaaagatgtactgttagttaccaactg

SEQ ID NO: 4276 - DNA, 2300 bp, Homo sapien
ggcaagaagagcaaaactccatctcaaaaaagaaaaaaaaaaattacatgcttctgtagctccccctgctgtctccctctaccagccaaatctagtttctctacaaaaatggagctcagttgctgtcatcttcaggcagcttcctatgctggaataattcactagccttctagcactttcactttatccttcttaggatagcaagcacttcataccacgtctgatctccttctgcagactgggagcttctctcaggctatggtgcagctctctgtccagctgttagctcagggcctagcatacagtagacactcaacaaacatttgagaatcacgtttggtcaggcatggtggctcgtgcttgtaatcccagaactctgggaggtcgagttggtggagggattgcttgagcccaggagctgggggccatcctgggcaacatggtgaaatcctatctctacaaaaagttaagaaattatctgggtgtggtagcacgtgcctgtggtcccagctactcaggaggctaaggtgggaagatcatttaatcctggaaggtccaggctgcagttagccatgattacatcactatacttcggcctgggtaatagagcaagaccctgtcttaaaacaaaataaaatgagaaacacaattaatccaaatgagttactcacagttgcagagaactctagctgtccagcaaaatccattctccccttctctgcacacacagctgtaccacatttcccagactcccttgtgttatgtgtagtcacgtgaccagttcttgccaagggaaggggagtgggacttatgggagccactgccagtccaggcccataaaatccccccacgggtatttctccatgcttcttctctttcttctgctgaatgcagatggggttgaagtcccagggatggtgaaggcaccaggtggaagaattcagggttcctcagtgaccacagggagaactgcctccccaaactgagtgcacaaccagcaaagccagggggcagtgaaatacagtgttacacccctggaatatgaacggttatttggctattaccgtaatctcactaataaacctgcttaaaaatttcattgtgggattaacttacatagttattatctctgtgtcacatttaaaatgacaaaagtccatttggccttgcaagtgctgccttccatttgactctgctattctgaccctgccactaccttagagagattcgatccctcaaaatatttttattctgtgctcagtaacctttgaaatcaaaattattgtcaacacaggccgggtgtggtggcttatgcctgtaatcccagcacttggggaggctaaggtgggcagatcacttgaggccaggagttcaagaccagcctgaccaacatggtgaaatcctgtctctgctaaaaatacaaaattagccgggcgtggtggcgcatgcctgtaatcccagctactcgggaggctgaggcaggagaattgcttaaacccgggaggtggaggttgcagtgagccaagatcgtgccgttgcactccatcctgggcaacaagagcaaaactccatctcaaaaaaaaaaaaaaaaaaaaagaattattatcaacagtttaaaattttgttgacagcaaacttcagtaagatattttaactcactgattttttaacatacagaaagtaaaccaaagtcgtttactcacttttatttttaatttactaaaatttgattttttatactttagaaaactgaaattgttatcaggatcaattaagttttatgtaagtcatttgtccacataatttactgactatatattctctctttttaagtttttttggaatcattctttctaccttttcatgtgcccggggtcaaataatacatgtcaaaatgttttttaagtatttttttctttcatcagttctttgtcagtgataaattttaccatgtggagttttcaaccattattagttgtattttgtgtggactgtttttgctgtaatactcacaatagaggtcaaggtgttccgggggccatggtgaggtcaaagcattccacttcgttcatttacagagcttcaattgtgacccggtttaggaacatgctgcttgcccaaaattctccacaatcctccacctccgctcttccatttaggatataaaagagggttttctcagaccttctgccaatgcgcagacagatgaaagacgacacagaggttctcatcattctgctgaggaactgaaagcgggtttcccactccaatgtcttagtttggaatcacggcttttgtcc

SEQ ID NO: 4277 - DNA, 2300 bp, Homo sapien
gctaacactgaagacttttattgataattacactagaattactctagatacatcaatatagaggctggtcacttttgctgtttctcgtctgtgtcttgctaccaggatgtggccaggcgtgaggtaatatctctaattatctgttaaatctagttttgcaaccacagatatgatattcttacctgatcaaatggaattaaggttaggccatgtttcaggcatccttaggaatactaaatagctattaaataacaagaaccctttggcaaagctttgtagtttgcctttatgatatccttaccggtcccccaagagtaaactatgcagtgttttatgttataaaaaaattgtggtctaaatttgcaggttccagtattctttctgctgctatgtgatcttggacaaatctcttagcctctctgagcctgagctcatgcttcaattatccttgagttaagagcacctatgtgtatttgatacccacacttgtgaatttcaaatgagcctttgcatgcaatagagatttgtcagctgtgacctgctgcacaactgtcactgtgaaaaaaaatcatcaattctttccctccctccttctttcccttcttttgtcttctgaacgtctagaatatagcacagaagaaaacaataaggaaatcagtagttcagaatcaaagacgttctgctaaagaaagagcaaaaatcaagattcaaagtacctcagcactcaaagaagcagaaaattctaatagctgcaggcaaattgtgccctctgaggagcctagattctagaaaaaaggagagagcagtcttgtgaaagaggtgaaacaaaggcttttcatgtactccggaattgcttggagactgggatataaccctggcaaagttattaaagttgatttctctaaagcatttactcgaaagggccacctaaggataactggctaactgcccttaaattacatttatttttaaaaacatagtttgaaaaaggttagtaaccaaagacttacaagaccaaccttttttaaaaaagaattttaaaggctggttcataatatgcaaaggaagactacacatttgcttgctacatttaagttgcacagtataatatatagcttttctccctcctctgggttattttgaaaatattaataagttggatgtctattccatattttcaaagtggttatcaatgacttttacttaaatacttgtaaaacttattaatgccactttaatctcagtttactgcttaaagctttagatatccatatttttttaaaaaaactattcttaaaaaataggtaactaaatttaataaataatgaaaacaatgacaaaatattcaatgaggaaaaatgtttatccccatattgtggccagaacgttaagaaacttttacaggacgaagtctgcctggaagggtttgcttgggaaagtggtagtttatagcataacatctgattttgtgtgtttgtgccaagggtgtttcctttctgtctttttcctttttataggcagccacaatagtgacatgtttaatattgatgagtttgacctcctgggagttatcgtatatgcaccctttttgaatacaaatgctgtttaatttatatggtaaacacatagaatttggagactagcattttaatcaacactaatctcagtattttctacttctcctacctctccttctgtcaacaacaacaaaaaaatcacaaaccaattttataaatgacagctaatgtcctctcctggagaagcagggtctgtgtgtgaaacataaaagcagcaccatgtgtagtaacctctcctaaaccatatgctcaagcacattaacagtgttcaattagatgatcaattattcaagaaacagaacaatccattcattcaacaaatatttattgaacagccatgcagaggcagacagggggttgtgtatgtggctgtgacccgatggcacctctaaactggaattgggcttcagtttttctccgtgtaaaaatttcttcttttttatttaacttttctcttggcaggtccagcagctttgaagatcagagtgcatcttccagctgacgatctcttcggtcggggacaatgcattcgattcgcacggtggagattaaagtccccgagatagaggaaacgtttttcgcgcccaggttcagcgaggagccgcgcgggggcagagggggcggcggcggcgggcggggagccaggcccgagctgcgttctgcgcagccattggtgggcgccgcgctctgcactgagcatgttcgcgccccgccggcccctag

SEQ ID NO: 4278 - DNA, 2300 bp, Homo sapien
ctgggactacaggtacatgccaccatgcacagctaatttttgtatttttagtagagatggggttttaccatgttggccagagggccttgaactcctgaccttaggtgatctgcccaccccggcctcccaaagtgctgggattacaggcatgagccaccatgcctagtcatgtttttttttttttaatcaatttatagtaatttgtccccagttactactcagtgaatgtttgtatgactggatcttgtagtaatcagtaaccaagtttttatacatatgtgtttaagcatatgtatttttaagcatagttggagattattatgtttaagcctattttgagattattttatttttctgatccggtacgtgatttaataaatttctaatatgtgttgccatttatgtatcttatttcagagggcaaaacgggtgatgtttttcccccgttatgctcaattcaagtgcatcgttgcaaaagtagtaatgatagttattgttattcccccgatcatgaagttttctgagctcagaggaagtgctaccagtcagtagtttcatagattttagaatgcttcccaacagtaaagttaattgaagcttagaaaaatagatttttaaaaaacacactcgtggcaatcagactttttaagacaatgacatactttcttcatgattgttttttcctcctttaagaggattatgctgttttagatatccattttgactttcacaactggtacttttttttaatcacccatttggcaaacagtgttgggtgactcagaattcattttgaatttgtatgatggacttttattaaaaggggtgactcagctcgacttttctgtcatgattttcttttcttgtctttctcctgtagatgcactgaatattaattagttctattgatgtgacttgtatttcttctgacctccttttccttttctcaagagccaggaggagtataaaattgggaatctggcctggtgcggtggctcacacctgtaatcccagcactttgggaggccaaggtgggcggagcacaaggtcaggagtttgagatcagcctgacccacatggtgaaaccctgtctctactacaaatacaaaaattagctgggcgtggtgtgggtgcctctaatcccagctactagggaggctgagggaagagaatcgcttgaacccaagaggcggacattgcagtgagccgagatcgcgctactgcactccagcctgggtgacagagtgaaactccgtctcaaaaaaaaaaaaaaaaaaaaaaaaattgggactctatggcaaagtgaaggaccctgtacagagaaaacatgacttaattcaggagcttaaagggtttttttgtttcttgttttttgtttttttttaggtcctcccaatttgtactggactttggaaatctgaaagaagatttattctcctgttattacctttattgtctagatcaggggttggcaagtttttctgtaaagggccagatagaaaatattttaggctttagtaaatattttacagtgcctgtcacaactactcaagtccactgttgtggtgtaaaagcagccacggacaatacgccactaataagcacggctgtgtttcctaataaaactttgtattacaaaacagagcacctggccatatttggctggcaggctgtggttggctagcccctgctctatactcatgtaatacatagatagtaaatttattctctgagcttttctttctgtctcttaccatgtgtgctcaccagccagtcacacaatatttatggaatttttctatgaaaaatatagggccttttcttgttcttgtgtagcttactgtggaaaggggctactgggtgaacagacacggtggtacagtagttgataaagggtgatagaagagttttcaggttttgagtggtcgaggatgcccggagcctggagcccagtgtacaggaggaggaacagaagaggcgtcttaacaaatggtactgtggccaggggcggtagctcacacctgtaatcccaacactttgggaggccaaggggcagatcacttgaggtcagaagtttgagaccagcctggccaacatggtgaaaccttgtctctactacaaatacaaaaattagccgggtgcagtcgtgtgcgctgaggcaggagaatcccttgaatccgggaggcagaggttgcagtgagctgagatcacaccactgcactccagcctgggtgatagagcaagactccatctcaaaaaaaaaaaaaaaaaaaaaagtaaaaagaaaagagaaatgctgc

SEQ ID NO: 4279 - DNA, 2300 bp, Homo sapien
acattatttggaagatttggggataatctggtttgcattaaacatatttacactttattttatttatttatttatttatttatttatttatttatttatttatttgagacaagagtcttgctctgtcacccaggctggagttcagtggtgcaatctaggctcactgcaacctcctcctcccaggttcaggtgattctcctgcctcagcctctcaagtagctgggattacaggcacctgccaccatgccccgctaatttttgtatttttagtagagatggggtttcaccatgttggccaagccagtcctcaaactcctgacctcaggtgatccgcccgccttggcctcccaaagtgctgggattacaggcatgagccaccacacccggccatatttacactttaaaatgcctcatgaattaagtcaagctttactatatacagatgctaagaaacatgaaaatatatagcgtttcgctgtattcagatcagcaaatttatcaagataattagattattatctaagggattcagttggccagactttgaaaaactatttggtttttgtttttctagagagcacagtcagacgaactcgaaaaaatagaaaagcatggccgatcttccaaagacaaggaaaatgccaagtctctggacaaacctgaacagtaagcatgtcttataaccacgtagagggcgtccaggctatgggtgggcccgttttgtttggaaaatgcaaatgcggtgtcttcagtgcatacttgttgtgaatgagatgaggataaacatctgtttatgtgaattatatttttcttcttaacttggctttatttccttaggttcctttatgaactgtcactaatccccaacttttcagagcgagtcttttgcatcctgttccagtccacattttcagaaagcatttgctcaattcgtcgcaaactggaattactacagaaattgtgtgaggtgagttctggtccaaagagagctgaacttgagtctcatttaattgtgctcagccatgttcttatttcagaaaagcattcttttatttactctaagtactcaccaaatttgaaggatcgcagtcccacagaagggaacattttatgattgaccttcaagatcaaagtaaatgttccggcgggcgcccagggctacaggaccacattgctagaatgtggccaatacatgttggcctccagagatttctctgccctctccttttgccaaaacaaaatcttcagttttcacggtcctctcagacatcagacttccaaaggaatgtaatttgaaggcttttttttttactttctttcgttatctggaaggacctctccacaaactgttaataattattccagccaaataatttaggaacagccatatgactcaacagaagacaaatattcttccgaaaacaaaaaataaatgcttggcagaaacgaccaatgttaacatttaaaacaatttgtcaaatatcagtaataccatttgttctagttgcggtaaatcattttgaaaagtgaaaagatgtttttaaaggctcacattttcagaagaagtgacatgcaaagtcaagttaaacacagtgttttgaaagaaatgagtgtgagctctttgggggtaaacctaaatttagaaattaatctctgaatctgctttttggtttcctctgctgatgccaaacattggtattgttccagacgtaggcaccattaagacaatggcagtgatattagtgatgttattttgtaatagttctcatttggccttatctaatagttatcatatagcctttgttcccatatagccttaatagttctcacacaggcttgttttccttgcagttacatcacagaaatggcctaacatagcatcccccagcttacaaaggcatacctgaatgtttgtgggtggtgcaacttttactaactttcaggatactgctcttaaaatatacctaataattaggaatgataaagttcggttgtgacccaaaactcctaatataatataaatagctggcatcaactcgatgattcaaacaaaacctggtataagataaaagttgttttttgttgttattctgttttacagacattaaaaaatggcccaggggttatgcaggttctaggtttggttcttgcctttggcaactacatgaatggaggaaataagactcgaggacaggcagatggctttggattagacattcttccaaaactgaaagatgtcaagagcagtgtaagtattttgcatgagtggacgtaagcacattgaggagtcaaggttttgt

SEQ ID NO: 4280 - DNA, 2300 bp, Homo sapien
ttgaattattatctaaaatgaagtttaagatagatctgtgactttaagtcacccatgatttcacttacactgtcttttcagtgctatgaagagctataatgagccctgaaaataacaagcacaaaatacaatgatctacttggttttctcagtaactgtttctctcttttctagaaaggcaattcgaaggcaaattattggtaacttatctgaaaataacatgacccgttctgaaataacataaatgactatttaccaagttggacagatgatttcatgaattgttagctcttctgtgcaaaggcaggcaggaatgagagtcagctgtgttaaccctttgctttcctttgagtcaaacagtttgtatgaacaaacagggcagtcatccactctcccagctctatttgctgtctgccttcagcaagtcactttatcattcctccactctgtttctccacctggaaaatctggaatatcatacctataactcctttttttttcgaagactgttgagatctttagaagaaatacattctacactttcaaagatttatgacagtattttgtttttagctgcctacctaaagaaagggaatgaactggagttgttgaagcaataaggatatgccatttgaggttagactgtggttagcaggaaccaactgctaaacgtggttttgttttgtatttcctttgtcaatttcagctgatttcaggcaggcccattctgagaataaggctgcatttcacaattcctgtaatgtgcccacgtaagaaagaaggcaggtagtctgtttggtgatagtatatttcaagaactaattgttatttcctgtgaatttgcaacccaatgtgctgtgagttgagttggaactagaatatcaaataccaaatagcatacaaaagggataacactgcaaaaaaaaaattcaagtcaaaaatcaaaacagagctcagagatttcagaagcaatggcttcttgtcaagaataactgtcattaaaatttccataagcaccagtgaaattgattttggggaaaagtctaagggagggtctgttttataagacacactgaaactttattttattctgaatttccccagccaagtttgtaagatctcagatttttcttgggccctttccctgccaaggggccaaaggtttatctctattgacacatacagataaaaaattttcatccaggaacctctatcagcagagtctgaatagtcgtctttggctggtgaatcacactaagggagtctcagtcctgagatgatcagtggtgagaagttcaaaaaataatgaaaagagcaagcacttaggcgtcacaatacgcttctggtataacgcaccaagccgatggagcacaagaattggtctggcgtcattgttttatgttctctggatgttgaagagtctgatttgcattagaaacctctgcattcaataaacaaaaatcaggataataatgaccaaagtactatttggaacagaaaacaaattcaagcaatgggtgttttgcactgaattcattcaagattttattagttaagctctcacttaggttattaggctcagcttgctttttatttcactggcctcagttactgcaaacaaaaggagcctggtgtgtgtgtgtgtgtgtgtgtgtgtgtgtgtgtaagcgcacgtgtatgagaatgtcagacatatcacacacaggctttctacattcttcacattggaaacccatcagcaaaaggaagaagatctgaagggaatgagtgttttttttttgttttttgtttttttctggtttaggggatggagggagaatttctctacataaacaagaaggttagaattggaagtctgctaaaaaaaatgttagagctgaccacagggttgtaaatccactgactggaaggaggaaaagagaaacattgcaagcgactgaagtgtgtggtgtggctgcaatgtttgtgggttagatgagaaacaagcgctgagtgaaacagagaaggggggtggctggtgtgatttgtttggtgttcagagccaatagaaatcccagactctgataatatccccatgcagcgccgagaggattcagagctaagtctccgggctcctttcacatctgcaggagcagccagcctgggaccgcgcggcgcggggcgcgctctcgcctctcctgcaccctcagccggcgcgcttctcttatgggcgtctgctgcagtctggctgcggtcgaactgaaagcggcggcgggagaccaaacttagaccccgctgtggactagagaactcagagaagg

SEQ ID NO: 4281 - DNA, 2300 bp, Homo sapien
ctaactagattagaactagtagtaatcaactgccttaggaagaagagacccaactaactccaagaggtgttggattcagatcagcttcttgaagaatctgtagaggtgacaagtcaaaactcagtgttatttggtgttgatggatcttaaacactacccccgtttttggtcggctttagacaaaactctcctttgtgggggcagcactggccgtaaagaacaactgagtacagggagagacactccaaatttggtgtctggccagcatgctgtccactagacagtatacatcactttcagtccagcagctgacattcctgcatttgaaaaacaaaatttctaggtcaccttggggccagagcttcaaattggctggaatgctggcttctcactagcaagactcctcaaaatgcccaataatttctgatattattgcagctatcatttatgctcaagctgtcagaaaagaaaatgaaaatgttttcctcattcattatcttactgcagtaaacatggttttggaaatagcagacttaccaagttcactgttcctcacccctctcccccttcccctcacctttctcctatgcccattctctcctccattctcctgtgctgtcccttcatccttatatagtctcttgctttgcattcgtttgtttttattttttcttttcaaacctgacttaaagttgaggacataatttgcactgtttatttagttgtaaaggaggaaacaatgccttttggagaagagaatagatgccagccttgttacttgtgaagctcaggtacctgaataaatctttcacatatggtatcatatggtggtactggcaaaaggttgttattttagggttaagattgctccattctattttttttttttttaaataaagtcagggtattgctctgttgaccaggctggagtgcagtggtgcaatcatagctcactttaaccttgaactcctaggctcaagctatcctcccacctcagcctcccaagtagctgggactacaggtgggtgccatgatgcctgtataatttttttgttttttctagagatggggtctcactatgttgcccagggtggtcttgaattcctaggctcaagccatccttccgcctcagcctcccatactgctgagattacaggggtgagccacagtgcccagccgtgactgctccattcttgaagagcaagacaagaccactggcttttcttatatgaagtcacagtgagagctatcacccaaccaggaagagtacttacgctgattggcttgatctaagcattgtctttgaaagctacttctgaagtcagcctgttttatgagaggagacatacttgccagagagaggagtggcttgatttcttctctggaagagactgggccacagatattactggtctcttagcattgagctagctgacatattctacattaactcagtgggtttgtcagtgcaggactgcccatctggtcaacgctgagggtgtcgatgtttctcgccgaaatccccgtcgtgaaaaataatctttggcttttttttttttttttttttttttttgagatggggtctcattgtattggccagactggtcttgaactcttgggctcaagtgaacctcctgctttagccttctgagtagctgggagtataggtatgcaccaccgtgcccagttgatctttaacatttttgaaccttagttttcttaatccgtctgggtttactacatgttagcagagtgaggaatatatacaagggacaacaagacaaagacgcactagaaaaggaaggaatgtttgtaaaagatcattatgaaaggcatggtccttttaagccctcagatttctaaattaagggctcagatgggaggcaggcactgagagaaggatcttgccatttctgaaaaatttttaaatggagtgtcttttgtaaatcagattatttgaaagaaactttctggaccaaaggatgttgtctaccctaaacatattcagatctgtttttatctcagtgatactaatactgacatgtaccctgagataagataggaccatcattgatatttccatgatgatatttcttgatgagaagtagatagaaggattttatgagtaatcatttaatgatgaattttggataataattgagtttagagcaggagagtcttccagggttgagctctttccttgccagttgttgtttgtcagtgctacttgtgggattatgagaaggatttgtggcctgaattttatttcttttatttcccacttccaatctccctgaatc

SEQ ID NO: 4282 - DNA, 2300 bp, Homo sapien
atgcttcagaatttgggggtcaaaaagacaaagaggaacaagcaatgagagtgagaaaaagcagccagtaatgcagaaagagaaataatagagagtggtgtccgggttaatttatgctgaaaagtcaattcatatgacaattgagaattgaccatcagcttagcaccatggaggtcatttgccaaagtggaacaggttcaacatggaatggaaagattttggcataaagggaagaaggaaaatagggtggcaataagtggaaagggtgtcaagagatattatatatatgtatgtttatgtgtgtgtataatttatatatataaattaaatagagccaattatatatatgataaatagagctatatatatatataggctctctatatatagagcttgggtacagcttcctatgaggatggaaactttacccagagatgcaaaggaggaggaagactgcttccttcaggcggttctctcttaagaggaaaatggtcaaactgagtgagcatacccagttgtatttgcaaatttattaatccaagtcatgcaagtcacatcaacttctcaggagcagactgaacaagagggaagagagaggggttaaaggagggataagtagatttcagcgagagcaaaaacgttaaagaaatatttcgagaagtcgaaaacgaagagaattttgctgaagaagattctaagttccagaggctacagtggaaagatgtggggagttggagtgggagacaggtcagactagagtgtgtgtagtttgggacaatgatatttctcctgtagtacttggaacaggggctaggttagataaatatttgttccttgagagaaacctgacaagacctgcatggggctggggtaatacattggtccacatggacccctgtttgagtagaagtgttatctccaataaggtctagtctgcttagaccaaggggtcaggaaaggctgaccttgattatcttctccttctgtccctccctctcctccacacctggcccagtagaggaaggaaaactagatttacagctgatcttgattatcttctccttctctccctccctctcctccacagctggcccaggagaggaaggaaaactagatttacagcggcccagcccttccccctgaaagccagaggcacaggttgctttactaccaccgagacaaaagtgatctgtctcctttatgtcattctaatccttacagaagaatttgtggcagcagtacgaagactatagctaggaggatcagcacctcagaagctctttgaaaattgctagaggatgagggcagtgggcaagaggaaagttcctctgagcaccttctgttaaaaggagaagccaggccttggggatgttccttcagtttcacaagtggcaagattttcacctccggttggcagctttcaaatcgtttcccatttctccaacttaggaagaagctgtgaaaaccgcaggcaaacggggatgaatgattcatttggtcctggccatttccttcattcctagggtgtctcaatatctctctactctgttatttaagcataataataataataataataataataataataataataataataataataaatcatctgcttccctgggactttcagcggagtcgttaggcacgtgatgaaaccttggtttgcacggggctccatccatccattcatccgtgcatccgtccgtccatctgtccatccattcactagaccacccacccacctaccacccacccacccatcgcacagccttcctccctttccggcttacactgggcgttaaactccggtctctccaggcctccggcgcacgtacacacgcgcgggcgagcgggcggggtgtgcgggagcgcgggctggccgcgccgggggcaggactacagcctcccgaggggcgcgagggcgggaggccggggaggcccgggaggcccgggcggtgtggcggcggccgagccgagcccatccgagccggcaccttcggacgcccctgtcccacgtgactgtcccctcctccctcctcccagtcgcgcgcacgggccgggcgtctcgactcccgcgcgcgctcggctggtcccagtccccgggagaagaagcggaggagggagagagccagcgaggcggcccaggggagcgggcgcgagtggcggctgccggagccgcctgtgcacgggcggcggcgaggcgagggtggcggtcgcctgagcagctagagccggggcggcgcggaatccgcatccgccgcgagtgtgatgaagctaccctgcctcgctgctcc

SEQ ID NO: 4283 - DNA, 2300 bp, Homo sapien
atcagacaagtccaaagttaaaaaaaaaaaacccaaactctaagcaaagtaaaaacattatttcaaatagataacataagtcattctaaaatgaagatatctagcctttattaaaggctttatgtacgttttattacgaattaataaaaataaattagctaagttaatatttcctaaattttagtcatttatatagcatcttcatattatactgaatattttacttcaaataaaatgaataattaaaaatggaacttcatattactactgcagatagaaaatcagtttcactaataaatcgaagtaaaacacacaaataaatatgtggatgttcctgggcatcaatttttctcttctatgtacaggaataataataggacctatctcatagggttgtttttgagtgttccaagaattaatacatataaagtgctttgaaaaattctagaacataatatgtgtcataggtaatttttaaaagggattaaaataacctatttataaaaaggctattaatttgggttttgaaaagttaaactgtatggtagaaataagagacatgctcgaaacaaaaatgaaacaaaaaataaaataaaatgagaaatatacagcaggcaaataatagccaatatgaaattggtagagaaatatcaatattaaaaaaagtttaaaaggacaagcaacaataacaataaagaggggcaccacacaatgaagaaagagatgatctatgaagaaatgataaacatatgttcattaaataattttgtgtaatagcaaagaaaaatgttctttattaagaaactggataaataaaatatttcatattcatgtgatccaatatgattaattttaaaagatcatggctatatcttaaaagcatagagttcaattatgcaacagtaaaactttaaagtaaaatattaaaaccattgtttgtatattagtgtatgaagcaaaaaatacacagaactgaaaggatgcatcaaaataatgatatacacaataatgatacctgctgggaaggaggagaacaaaaacaaaacgtcattccattattagcaatgttttaaagaatttgcattcagttttctagtgtgttttgattgtagttcaactattacaatctcatttgaatttttatattttaaatatgtgtcaaatttataagtcacaaaataacataatgttaccaaaaggtttggcaagtttgtaagtttgactcataaatttggctttgcaggttctggacttttgattttaagaacatccgatcgctctctctttactgtcatctggttccaagcaatagaaaagagaaaagataaaactgtggttcagatgcaattttatatcaattcctgcttttctgtaatcaactattatattaaaacaatatgcctttaatttgaaaatgtataaattagctatgcaaaaaactgggagaacgatatacaaataataaaaattccgaggttccctataattgtgtacgtcttccacaatacattaaaaaaaaaaaaagagttctgagggtataggctaagaagagaaaggaaacggtagcgatctcaaaatgataagttaaaagaaataagtaagtagcttatttttcagttgtgggattatgaataattactatttcattatctacactttgctgcacttcccaaaatttctacacagaagatacaatctggaagaaatgaagaaagatttcagtagtaagaacgtgtaatgagtgattacatgataaataaaacaataaatatttctttctaggatatttcaccaaccaaacacgacctgattcaccaactaatactcccgccttctaacagccacacgtaaaaatcagaccggctccaagaataacctgagcctcctttcccataattcccttctttctagtttcccatgaatccgaaggccttacaccccacactactactagaaagttaacccgccccctcattctttactggtcattcacgattggtcctgccccacctgtcggtgtgaggctgttgattggataagagcggaggccggtgggcggaacggtttctgacaaccggcgtggaggcgtggccacagccgcccagaaattctacccaagctccctcagcaccatgtaccgagcacttcggctcctcgcgcgctcgcgtcccctcgtgcgggctccagccgcagccttagcttcggctcccggcttgggtggcgcggccgtgccctcgttttggcctccgaacgcggctcgaatggtgagcgcaggccgccatcccccggcctccccgcag

SEQ ID NO: 4284 - DNA, 2300 bp, Homo sapien
actcacatctgtaattccagcactttgggaggctgaggcgggtggaccacttgaggccgagttcaagaccagcctagtcaacatggtgaaaccccatctctactgaaaaaatacaaaaattagctaggcgtggtagcaggcacctgtaatcccagctactcgggaggctgaggcaggagaatcagttgaacctgggaggcagaggttgcagtgagccgagattgcaccattgcactccagcctgggtgacagagtgagactccatctcaaaaaaacccaaaaaacaaaaaacaaacaaaaaagcataaacagcatatgaaacctagagatactcatacatatgtacatgacattgtatacacaagagtgtttatggcaacaccattattcatgatattaaaaatttggaaacaccccaaatgtccatcaacagcacaatggacaaataataaatgacgataaaaatgaatgaactggaaaaacatgcaacaacacaaatggatcttaagagatataatattgagaaaaagaagcaagttgtaaaaaaataaacagtataagttcatttataggaaagttcaaaaaagtcaacactaaactattttagggatgcatctatcatggtacaattatacataaaagcaaagaaagttggtatggcagttacctctacgaaggaggggtgattaacagggggcacgttagacttctgggattctggcaatattctctctctgcacctaaatggtagttacatggatacttgctttacagtaacttattatactgttcatttgtgttatagttcataatttttaaaagattttttaacaatgatacatattgatactgaggaattgatacatattctctacatattgatattgaagaattctcaagctatatgttgtaaagtgagaaatatgatgtggaaaaagtttttaaatgtatgtttaaaaagaaaggaaggaagggaatgagagagtgagagaaagagagagagaaaaggagagagaggaagaacaagaaagacataatcaacgtgtagaagaatacggtaacccacacaccaaaacagttgttgtctttgggcaggaggaataggtggccaagggtcaaggttagcaggattactattcaccgtgtactcttttgtgtctttaatttcatgccatgttaatgtattacctattcaaaataaataaaatacctaatcatgcttatccacaaggggtcactattgaatgccatttaactctagttcctaaccagggaaaaaaacgttctgaattctttatgtgcttaacaggaagtgaagaaacaacttcatttatgttcttattttacattacaccacatcatgttccagaaaacaattgccattcgcaaatcatgcacaaaagtataacatttaaaacggagtgaaaaagacaaaaaagtgaatagataatatgaagtcgggaatgagtttacagaagcgttgtgtcagtcatctcccctagtggtaattagactctaaattttcgattctaaaattagattctaaattttctagcatctgggctgaaaaaaaaaaggggaagtatggtcagttacacaattcaaaatgttgatcgggagaatattaagaccttgcagagaattttccctggtagagcctgttaaaaacaatccatgaggaccctttagatgaaatttttgattggtcttaaccacaaaaatgatccacagatgaattatgaaaccatgtcatcttactctctaagggaggtataagatgtttttggacttcagatgagaagggctccattcatggttaatcatgaatgaaaacgaaactaagaatatatgctgtagaaaaagaagaagaaaagccacaagactgcttaaaaatttctgtgtcttacacagaagatagaaaaaatagagtgtctccaattggatggattttttaaaaaatttggttattgtaatggatttattttttcttagagctgagctgattgtactttggccaactaatgggttaatactgtcaagggaaattagccctgactaaacattgccgctggctcatgaatgcactaggcttggggcagtataaaaactcagagaaatcagtgtgtaggagacacagaaatcagtgtcactcagtgacagaagcaacaataattgtgaaaaatacttcagcagttatggactcatctgtcattcaaaggaaaaaagtagctgtcattggtggtggcttggtaagaattttcagatggattactattgttggtggtattatattaactatt

SEQ ID NO: 4285 - DNA, 2300 bp, Homo sapien
tgcctggagtaaattccggagtttgtgcttctagatccaggttaaggatgaagaaaaggagggcacttcctgagttatccctgagcaagaactacctaacagtggagtattgaaggggaggaagttaaaaatgagggaagtagcttcttgatgcagaggcttttggagaggcttgccctatctgttggaaagaccattggtctgatggcacaagagtggatcctgttccttatcctgcgactcatgcattgtgcgggctttctcaagtcacttaatctctccagctatcagttctctcatctctattattgggtaattcagcttaatgctctgtaaggccatcctacttgctttgcattttgatgacccctttgatatctgtaggttagaacgtgcctgatcttagcgcttattgattgtgtcttctgctcctactcctaccctgagccctgtctttctaagccaagaagcagcatgtactatggttacacctcttcagataccatcatagattcagtctccatcttcacaccctgctggaagaagcagaataagtaattcagacatacttatatttatacttgagtgggccaggcaactgctgcattctgtacttagttcctggcttcttagggaatgccaaaaatgagtggaatccttgatatttttgagacagaggctttgactagacaggactgttaggattgccattttagttaaactaaaggtgtgtgccctatgcaatttaatctaagttccaattgaatggcttgtttttccagtatccaggattattagtcatcttgggctagacaggtacagcttgtactgatttatatttcagtaggtttaacagtagtgaaaaccagagctcaaaactgtgcaatgatgaatattagaaagtttagcagtattgttgctttagcctaaagactttcaggtgagtatgctcttcagcaccttggcctttctacctctggccacacagggcatcacacagatgtcttccgcacatggaatgtaaccagcattatgctcaaagttaacaggagaaccttattatttttttttttttaaacttccccttcaaaaataagaacaaacagtgttagtcttggcagaggatgtttagatagaccttttgcttgggatgcagagattcagggttgcagagacagtggcgaaatgcaaacatcactgtattcaaatgttagaagtaggtattatttatgttaagatattttaatatgaaatcagaagttttccttttttacttacacttacacacttttttcctttattacttatatgcatgtgtacattcatataatatttttaatacattttcctcctcagggctattatgagcctaaatatttttaaatggccagttgttttactgaattaatccttttgtaataatctgactagtaattgagtagaaatagtctcatgttgctaccatgagatcctaagggtggttgtggcatggaaaggtcttatattcagctgttctggaatcacacatagactgtaatggccacagaaatattttgaatcatggcagtatgcacatagtttataatctgtttctataaacagtggagccatgcgttccttttagtctaagctcacagctgtgtatagatttattcacatgatagttttcttaaaagctaaagttagagaattgtattatgttatttcttctttatttttgtggaacattatgttcattctctattactatgttgcctgattcttgggagggctgttatatctctattgtccattctcaagaaattagaaaatatgtgagaaagcatttaagacatgctttagtagaggtttatgtccaaataagatgtcacactccaatggattgtcattgttgcatgaaattatttttctcttatattgtttacaatgtattctttcttgaattttcttctttcagagaagagttccagtcacaaatgcatatatgatgcattttgacatttactgctaagatgaaatgcagaaatgaaaccacacatccattttagtattctcagatgtgattagatgtacttgctcatgtttttatgctactgacttataagaaaaaaaatattttaaaagggtaaccgttaaacagctaggacctgcaacttcagtgcttctgggataactggaacatcagaaggacagattttattacagcataatcacacctcatttctttcatcagcagttgtcaccagacgctgttacttcctaaaatggcggacaatcttcccacagagtttgatgtggtt

SEQ ID NO: 4286 - DNA, 2300 bp, Homo sapien
gacatgcgagccccgagataacctcccctccgacagagacattccaacttggcaataaacttcttctccaaacagaaacattccacgcctgtgataagctctctcactctaaaatccttaaatactcttagtctgtaagagagtgctcctgaccgaaatcggccagaagcccctcttaggtttattcttccaaataacactgtctgactgttgagctgctattagtgtttctttcctctttctttaactcttacaaactccttgccccatctcccatagctcctggctcaacctcctgagtagctgggaccacagacatgtaccatcttgcctggctaattttctattttttgaagagttagggggcagttctcactttgttgcccaggctggtcttgaactcctgggcttaagaaatcctactgcctcggcctcccaaagtgctggggttacaggaatgagccaccacgcctgacccctatttcttcatggcatttgtcagtggctgacaccctacgtatttatctaatttttgtttgttctcccaacacgactggaatgtgagctttataagggcaatgactcagcaatgaagaatgaataggaaaaaatatagcgagttctttattcattcattcaaattactatttattgagaacttactgtagactagacacagaaaacactttcgacattaaacatatagaacttgttaaatagttatgttttgttcagtggttgtacaaatctaaaattaacaattaaaagtgtgtgtgtgttttttaaggggtgggtgggtaggaagtctcacagatggcgagtccagagcagaagccttgaaggaaaatcaaggtgtcaaaggcagagcacactgccccttagctattgctcagtgcaccagggtggagagctgctgccagcctattagatcctctctccagggaattcagaatgtggattgatccaagctagtcattccctactgatctttcaaacagaggtgaggcacgcccgtatggagagcagtttctttagcttgcacaaaccctgtgttcgtcaccagtgtccaggacaggctgcaggtgtggctggggactgtgatcttcttgtagggcctccttagggattgtgcaaccacaaaggcagaagcagctcttgcagagtgtgatgacgttcacaacctatatttgacttgtactatattctcatcactacaggagaagaggcccaatgggaaatgtgtgctgttctaaatatagcacctgcctcctatacctgctagatttaggttgaatctttcactgcctgtgaaggactttagcaggcctcagtgaccggaaagatctacccacgctttcaagcacaggaaggacggtattggaaggccttggggtccagcccagggcttaaagtcagttccattggaatgccattttcagagagttttcatcccagactctccaagggtggcaggctcttgtatcagccctgggacatgtgtcctctagcagtcaggtagttaggcaggcacctgtctatcaatttgttgtttttcttctcagttttccggtaagactaccccgagctcttcaatgttttctttgcttttgtttacattgagtgtatgacgcgggatgggcttcgtaggctggttgtgggttattacagcttcccaggaaggggagaaacccaattcttgccagcacgtggtgggcgcaggcgctcataaatacttaggaataaatgaatgtataagtgagtgcatgaatgggtgagtggacacgaagctttcaaggtgggtgcagggaggtgggggtgtgaagagccatcgaggctaccctgcggccctggcccccaggctatcccgcgacgcgcgtccacgccgaccagcggaaggtgcccagccagtgggggcggggcgagctagccgcgaggacgcgcccgcgggggggcggggctaagaggacgcgccgggagcagcggagcgacgaggacaggccgcggggaggggcggggccacggggggtgcgccgggcggaaggggcgggaagagggcgggcccggcgcgcggtagcgcgggcccctcagtgcacaatggctagagcaggcggcggagccccaaccccacccagtgcggagcgcgccgcgagccccgccgcaagctgagcgcctccgcccgccaggcgcgccggcgccgggccatgtactcggggaaccgcagcggcggccacggctactgggacggcggcggggccgcgggcgctgaggggccggcgccggcggggacactgagccccgcg

SEQ ID NO: 4287 - DNA, 2300 bp, Homo sapien
ggatccctggagttgtccctgatccttctcttgctctcatacccccatctgatctattagcacacctgtcacatctaccttcacacaatctgaccacttcgcacaacctccgtcactagtgccctaatctcaaccactgtcatctcttacttgcattactgaaatttccacttaactgccttcccggcttctaccctctctccctttcagtttattctccgcaaagcagctggaatgattcttttcaaatgcacgtcagatcatgtcactgttctgctcaaaaacatcccatctcagagtaaaagccaaagtcctaaaacagccaataagatcctacgtgatctggatgccaccccctgactctcttgccttctctctctacctctctctctcatcccacaccacctcagtcacactggcctctgtcgtttctcagatatgtgaagcacacaccaatctcaggactttacgcctgctgtccctagaacatccttctaccatttatccacatgacttgctacctcacttctttcaggtttctgcccagaaatctttctattaatggggaattccctgatctccctacctcttttactttgatttttacccccaccctaatacacacaaaattcctctctcttcgtagcacaattgctcactgatacattatttatttgtttgtctgtcttctgcattagtctataaacttgagaagctattttattcactgctgtatccttagtgtctaaaacagcctctagcatgaagtgtgtattcagtaaatatttcctagatgaattaatggtgaatgcattagaattgtaggaagagtggttctccagacatcactgtacagtggtttgaaagctttaaaggaaaaaggaggagaaacaaatggggttgggggatttttctttaaataaaatcttactgcgctctcctaacagatagttagaggtggacaccaagaagacagtactggaattggaggtgctctgaaatgccatctgcttcatctctgaatgcaagttcttgaagaatgttttaaaagatggactaccaaggggtaggaaatttatctaactcacctaagccataggaagttaactaattgttgagaaacattaaacaacttctccttcccataaaaagttgaaaattggaaaaccggagtcaatagcatttggactaagtcggattggagattgcaatgactgggaaggagatgtgcagaaaggcctcttctaattcatctgacctcttaccttgaaaagctgtcctcataatcagaagccactccttccttatccttggctcactttattatttcaatcgaaggacaatgcacaaaggaagaagagcatttgtattccctatgacctctaaaaatgtttgtggtagaaatgacaggtgctgaaatacatttcatctttagaagttcgaatttccatatccagtacagtggcaagaataagtgtgaatattacttttttttttttttgagaggaagtctcactctgtcacccaggttggagtgcagtggtgtgatctcaactcactgtaacctctgactcccaggttcaagtgattctcttgcctcagcctcctgagtagctgagatcacaggtgcccgccaccacatccagctaatttttgtatttttagtagagacgggggtttcaccatgttggccaggctggtcttgaactcctgacctcaggtggtccacccacctcggcctcccaaagtgctgggattacaagaatgagccgccgtgcctggccaaactttactttccgcggtattgtgaggaaggcaaaaggtttgaggtgagaagagatacacgagggagaaagtattacccagttttcttacttgttatttactcattccttttccctctcaagcagtatacacaacacacacatgtgcacgcgcacacacacacacagtctgtggggaaaaaaatatctcaatctcctccttatgaaggaagtaggatgttacagagatattatgatgcaatgaggaccctatgaaggacactgatgacattgtgaggtcaggatttttactgaaatgtttgtctgtatgaaatgcatcagacctaaatcagctttcctccctgctaacatcctagtggcaactcttactcctacccgcactatgggattttaagatcaaaggaattagacctagggcaaaaactgagacagcagggaggcactgtaacaactggaaagttttccaaattggtaaacttgcagtattctttctgtacagaagtaaaagatccccta

SEQ ID NO: 4288 - DNA, 2300 bp, Homo sapien
cattgtatatgtatataccacagtttctttatccactcattgattgatgggcatttgggttggtttcacatttttgcaattgcgaattgtgctgctataaacatgagtgagcgagtagcttttatatataaggagttcttttcctctgggtagatatccagtagtgggaatgctggatcaaatggtagttctacttttagttctttaaggaatctccatactgttttccacagtggttgtactagtttacattcccaccagcagtgtagaagtgttcccttttcactgcatccacaccaacgtctattattttttgggtttttgattatggccattctttcaggagtaagatggtatcatattgtggttttgatttgcattttcctgatcattaatttgacgctgatcatttttttccatatttttgttggccatttgtatatcttcttttgagaactgtctactcatgtccttagcccactttttgatgagattgtttgttttttttctcgctaatttgtttgagttccttgtagattctggatattagtcctttgtcagatgtagattgtgaagattttctcccactctgtgggttgtctgtttactctgctggcttctttttgccgtgcaaaagctctttagcttaattaagtcccagctatttatctttctttttattgcatttgctcttggattcttggtcatgaaatccttgcctaagccaatgtctagaaaggtttttccaatgttatcttctagaatttttatagtttcaggtcttagatttaagtccttgatccatcttgagttgatttttgtataaggtgagggatgaggatccagtttcattctcctacatgtggctagccaattatcccagcaccatttgttgaatagggtgtccttttcccacttaatgtttttgtctgcgttgttgaagataagttggctgttaagtatttggatttatttctgagttctctattctgttccattggtctatgtgcctatttttataccagtaccatgctattttggtgactatggccttatagtatagtttgaaatcagatagtgtgatgcctccagatttgttctttttgcttagtcttgctttgcctatgcaggctctcttttggctccatatgaattttaggattttttttctagttcagtgaagaatgatttcactctcctgctagactccttcctctcaacctcctcttaatcttcctctcaatcaattcaggtcccagatcaaatgttactttctctggccatgggacctgatgtggccttttcagtcactgtgtatcagagcactataatttatttccttaaatgcacttctaccagaatagtagctctacaaagtcagaaactgtcttgtacatcattgcacagtcgtgctgcaatagttcttggcacacagaaggaaatatatagataaatgtttgttgactgaacaaatttatagagactgaatcctggaagagcaatagctgtatagcttagtggccccattcaatagtacaaaataagcttgacaaatgctaaatatttctgaataaacttggatggtaggatattttttcttctggtgactccttgggactttgatatttgattttcctgtttgccacccagtttaatgtcaacagtctggtaacacctgaaccttgttatgcttactttaatgttttcttataaatccaaaaaaaggccatttacagtcacgcatcagaaaaatctcattacttattggcccaggggtaggcactctactcctttctccacaaaacacccaaaataacaatgttgggctcacagcgagtgttctgtaacttttatttggttaactggtttttttctcaaattatcttataagataggtgtatctacaataagaaacagcggaaagtgaaatttttgtcaaataataggggaaatatttattgaacagagcaaagtaataattcattaaagtcatttttctgtttctaggaaaattattttgtcataaaaccaatggatcactgcctcctgtgtgtgtgtgtggtgcctttgcctgaccatctctgccgagatgacatcctcttgggggatgatgggggttttgtgaacagattcacagtcaacagtgatgactttggaataaagcaggcaaaatccaaaagaaaattacaaaatcaggtcttagactcaaagaactttaaaaggtaagagtatcatacagttaatttaattcttttaataattatagtcttttgcaagtaagctttatggtacaaagtgaa

SEQ ID NO: 4289 - DNA, 2300 bp, Homo sapien
tacattagttgaggtctcaaatgtcgtgtatcagattaattaaaatgctttaagcactatcagaattggagctgacagtgtctccttggtatgtaataagatggaaagagtgttgggcccatactgacatctagaaaaaaagcaagctgatctatgaaatcagaacttttcttgaacctatgcgagaatcgatgttgcaggcaaatagcctgaaatcgaaggaaagacacaggaaggaaagacttcctgggaaagacaggcacttccgcggaaggcaggacacaattactgtcttacctagggcagtgatgagaaggaaattgggctggcattcaggtgggtgagaatgtagtcaaatttgtaagaattgctgagatctgagtgtaggatagcatgagagtacagcgcttctaaaagccagaaacacaaagggactgtgcgtccattcccatgctcctcacagagctcgtcacatgtcacacagtgctggcctccctcatggtgcagatgttggggagaggaacagccaacactgtggagccacagaaagtcccaccagcatccgtcttaccgacaaagcaaaagcctaagccactgagggaagggcagcaaaccctcctgctgatactgtagatgaagacctattgtaagggagaaaaagctgagcaaattcttctctacctcttgaggggagataggaaaacctcctgggctcagaccatttgacatgccttaccactcagggcaggaggactgggggtttttcaacaacagaaattgatttctctcagttccggaggctgggaagttcgagatcaaggcgctggcagatctggtgtctggcaagggcccgcctcctggtttatagatggtgccttctcattgtgttctcacatgacaaaggggcaaggcagatccttggggcccattttgttacttacttttctttttttgtctgagccacagcagatctcaatttggggccttttttataaaggcactaatcccattcatgagggttctacccccatgacctaatgatctccaaacaccatcacgttgaggtttaggtttcaaacagaaagtataattttaagtgtaagaaaaacacttggccgggcacggtggctcctgcctgtaatcccagcactttgggaggccgaggagggcagatcatgaggtcaggagatcgagaccatcctggctaacatggtgaaacctcgtatctactggaaatacagaaaaattagccgggtgtggtggtgggcgcctgcagtcccagctactctggaggctgaggcaggagaatggtgtgaacccaggaggcggagcttgcagtgagccgagatcgccactgcactccagcctgggtgacagagtgagactcttgtcttaaaaaaaaaaaaaagaaagaaagaaagaaaaagaaaagaaaagaaaagaaaaacactcgacacttttctttcactttcctcccacgtaaccaacaaaaccactccaagcttggcagtttcttaccggctgggattccctccaactttttattatctaataagagctaaagtcctaaaacatgtcagcacattaggaaatgtgacagattactggaatgatctttcactgtgaataatagtcgtggcatggtagcgaatattcccatgttcgggactgggtgtttagcacactgagaagcgttgggagaataacaacagaagagactcactttagagcaaaagcttagtaggagagcctgagggtagatttcaaggcgttgcctggtcctgtttatttatttatttttttcagcctgtgacaaatcaaggcataaaggaataaatttcatgcacagcaagcctgggaagactcacccatctgagtagggaataaatataggataaattgttggcagaaagctttcgatcggatgaattttctctgagcgaaaagccaagctttctctaagtcatttttacccacatagtctttttctctgtatgctcaggaacagtcagaatctgggactttggcagtgggcaggagatgaaggtgttgccggaggggaaagactggaaggaggacgagcactgcctacgacgcctcattttcctcaaagcccaagaaaaacaccagcagctggtcctggccttggagcgcaacgggactatcaaaatgatccaggtttacaatcccacttcatactcgtactgcaggtgccctttttgggaaaatcaaatgagtcagtggataatccccaccatgtaaccccgctcttggtagccagctgaagatggtatttatcc

SEQ ID NO: 4290 - DNA, 2300 bp, Homo sapien
taaatttcagataaacagggatttcttttagtatatgtctcaaatattgcattagatatattaaaaatttatctgttgttcatctgaaattcaaatttctgggtgtcctacgttattatttgctaaatctggcaaccctacctcaaaaggttttcagtctattgaagggcaaagacaattcaaacacaatgagaatatgagaagtgtcaggaccaaagagccatcacagaatgcttgtgcatatcaaacaaatatctaacttagggaagacatttggaaactggtaacattggaactgagtcttaagctggaaacatatgggatataccatttatttcagcatttaataacatgccatcatgatttgtgacttaactgtctcataaacatgtgttttgtctacagaactagatcttaagttccttgaagacacaggacatctctttatgcctccatgccacctggaactgacaggcacacttaaggcagtagtaaattactgcacacattgatgcaaatggttttgtcctcccaaagagtaaaaatattctgttagtgaaatgtattgtaactagtgttttcttttccaattttagtctttgaacactgcagccaagaatacagtttgaaaccttgggagtcaaattcacagtaaatacatgagccgttcacagtgcagcaaactctcatgttagttttatgacagatccagtgacactggaatggacacctttttgattttggggttccttcctaagacccccatgtgtgatatattcatggttggattctaggtactgaagcagttactacagctggatagtccaatgagtgtaagaaggcttctctacaaacacatgctgcccacatcgaagttcctctttaatctactgcagtttgaaattgtcccccactttctccaagagtccactccaagctagtttagggttaggtctaccatagcctttggaagagggagggaagataacttttctcatctctcctagtcccagctctaaagaccagaaccagggagaaagcaacacagcttttccaaacacattccccaaatgtggcaccttttcaacaattttagtaacaaatttaaggcatcatagatgcctttaaaattggcatgatagatgttagagtgatcataaaaagactttaaaagaggaaaagatgtaaagaacgtaatcaaatggggagcatgtttaacaatgtgctcacttcttccccttcaattccttgaattgagtctgcattatcattcctattgatctttgagcccagaacattactttgtggtctggcctaaggtttcttccaattttttaaattacaatatccctaagaggacagcgacgaggtctggggtgttatgaggattggaaacctagccacaagtgaccatgaaagtccaaaatgcctctaaagtctttgtctctaaggcccattttcaaggtcttgttatatagctaatttttccccgacttatgtcaaaaataaacgaagctgggttctaggtaaaatggtaggggcagattttaatcactactactactgcaatggggaaaagaacccagcgtgaactgaattcaatttcgatttgtagaggcaaccgggcgttttaaagagaatgaaggaattaggatgggactgatgacgccgagggggactgagcaactttttcaggtttgaaaagcctcaacatcaacgcgcgacggcgctctttcaacatcagcctccagaactggggctgcagccaggagggaactacaacgcccagcagccccggcgggtgtaaacactcccaacttccgaggcggtgctcaccatcggccatcagcgccagtgccactcgcgccctcaagaagccgcacggagttcgggccggcagcagcggctgcagtcgtatggcagtgagccgctgtctacccagcgagacggagagctcaggacgcaaccctatgagttggaagccgcaggaggcggaaccgggttgcgggatacgcgttgacgtcacatcctctgggcggggccgcaaggaacccgcgcaaattgaaaggtcagcctttcgcgcgctgtgtaggcaagttacccgtgttctgcgttgccggccgtgggtgctctggccacagtgagttaggggcgtcggagcgggtttctccaaccgcaatcggctccgctcaaggggaggaggagagtcccttctcggaaggtgagaggagcgggctgtgcggaggctaatgggtgggttcccttgggggtcgacctgcgcgtcacctccgaccctcctc

SEQ ID NO: 4291 - DNA, 2300 bp, Homo sapien
tccctagtagctgggattacaggcacccaccacaacgcccagctaatttttttgtattttagtagagacagggtttcatgatgttggccaagctggtctcaaactcctgacctcaagtgatccgcccaccttggtctcccaaagtgctgggattacaggcatgagccaccatgcccggcaataagtgtctttttttagttcatcagttgactgacggctagcagtccctgggtagctttggatgggggctggtcgccagaaagacaaaggtgagattagagggttggaatttttagccccacctccagcctctggggagggtagaggggttgaaagttaaattgattaccagtggccaatggtttaatcaatcttgcttacataatgaagcctccgtaaaaacccaaaaggcctaggttctgctagctgaacacgtggaggttcctggagggtggtatgcccttcccccatacctcgctatgcatctcttcatctgtaccctttgtgatatcctctgtaataagccggtaaaagtgtttccctgagttctgtgagtcattctagccaattaatgaaacccaaggcgggggctgtgggaagcctgacttatgtcccatagatcagaagcacagggaaaacaagctaggggctgggcgcagtggctcacgcatgagatcccagctctttgggaggccaaggcaggaggatcacaaggtcaggagtttcagaccagcctagccaacatggcgaaaccccctctctactaaaaacacacaaattagccaggcatggtgtcatgtgcctgtaatcccagctactcgggagaaatcgcttgaactcaggaggcagagattgcagtgagctgagatcgtgccactacattccagcctgggcaacagagcaagactctgtttcaaacaagcaaaaaaacaacaaacacaacttggggcttgcaatcggcattgaaagtgggggacagtcttgtgggacagagccctcagcccgatctgatgctgtctccaggtagacagtgtcagagttggattggaggacacctagctggtgtccactgtagaagtgattgctcggtgtatggggaacccccacccacccacacacacacacacacatctagtgtcaaaagtgatctgtgttgtgagaatataggagaaatggagtttggtttcccctatgtatgaccagagacccagtttcttaactctaaaagcaagatcttggggacaattgtccttccttccttcttttatcccagagaaaactaagtgacagaatatactggagtgtagtacttggacttccttgtaacaactctgggttttttttgttttgttttgttttgttttgagatgaagtttcgctcttgttgccgaggctggagtgcaatggtgtgacctgagctcactacaacctccgcatcctgggttcaagcgattctcttgcctcagcctcctgagtaggtgggattacaggtgccagccaccacgtccggctaatttttgtatttttagtagagatggggtttcagcatgttggccaggtgatccacccgcctcggcctcccacgtgctgggattacaggcgtgggccactgcacccagtgtacagctctaggttttaatccataccgcttctcttacttgctgtgtgccctcgagcaaatcacttcacctttcttagtataggtttccttctgtgataaagggcatggaccattgtgagaactacacagcacacttcaggctgaggtggatccagcttggacccccccttgctactgaagggcaaaaacatcccagcacaaggcagttttacctctccacagtccgctgcccagccaatgattttattacaaaccctaatttcttttgcaaagaaacatcttgaactggtcatgaacaaagtggctttctctgaccagcaagcaggtggcgattccatttccatcagaactgacctcctgctgcccagggagggggagtggggagaggggagggagaggagaggcctgatgtcactcagccctacataagggcctccttcaggctcctgcaggcagtttggaagcagctggaggaatgagttaggttcccggttgcgggacagtttttttttcttttttaaaacagacacagctactgagtgcaatgccgcctccacagaaaatcccaagcgtcagacccttcaagcagaggaaaagcttgggtaaatttcttggggtagctttctgggttatctaaagagaggagcggatctggccttctcttgatctttgcttcttt

SEQ ID NO: 4292 - DNA, 2300 bp, Homo sapien
ccctgggtggcggaagttgcactgagccatgatcgtgtcattgcactccagcctgggcaacaaagcaacactcctctcaaaaaaaaaaaaaaaaaaagaatttgatacaggaataacatgtttacaatctggctagatggtaagatacctaaaaataaacaataaaataaccagtggcatccaagaagtgtctgaagacaatgtatgattcaatgttaaatgcttaggacagtgttgagtgacagtcatagagaagataaattgctgtaagttgaggatgtcagggaactctttctgaaggaggaaagaataacgctgcaccttgcagaacaggtagaagaaagggagacgcttcattgatgctgcggtaggggatttcttgtgcacagatataaggctaatggaaaaaagcagacaatgctttttttcctggtcacactgcagtagatgttgccgcctcttcccatgagaggagaaggataagtgggcatggcccaaggtagagtcaaaacgatgtggctgagtgtttctagagaaaggacctcaggatgggatgatgaactgagaatccacgttaggcaatgttggcttattccagcttggggacaggtgttaaacactccagagtttcagagtattcacttactgaattcatgtaaccccttaaaggggtgtctagaacctactcaatgcaagcattgagctacatcttggccagatgtctctcatgtgggcacctaatttgcctgccatattggcttctctatcctaaaagactttttccagagggtgtgaaaatgtgtgtgtttttctgggactctgttgattcacagctactccttgatgccatcgagcctgataaatgccatggactcttctaagaaatcagaaccctaggccatcagcacaaattatattcctggggatgaatttgctctagaacaagtatttagctttgctggaggttattccagccctttctaggcctaaccatacaagaagatgtgaatttttcctttttgatgagaggaaaagcagtaaaaaaaggaacccaacccaagcctggaacaaatcaggctccaagcaaaaggaattctaccaatttgtgggactttgccaacatttccaacagtaatgggaaatcaatgtattaactcagctagtaaatattctagagtggaatagatgctgcctggaggatgcagatttgaacaaaagaagcatggcacctgccctcctgcaatttacaggtggcgaaggaaaggcaagtaaacaatttggcaatcaacagatgtttttgcttatgtgtactattattctaaagagtcctgtctgagctttggatgaggttcagctgctgctgtgtgccagctgtgtgattgaattcttctgagataaatttttaaacgataaaacgtggccaaagtgcaggaaaagcaaagagccccgtggtttcatataagtgagcagcacaggctagatttaaagcatctgagaagccatggtccctgcatttgaagaactttgattatactcttcaagctaaagctgtgcaccttacactgccttgatgagtaaagaacttttctttccacctgttcagatttgacagcgctacgccacaggatttagtctggacttagcaaacacccaccgatgaccgagctgctgtaaccatggagtgctcgtcagcattgcccctcttcgctcgtctttgtctaggcaggattctcctttactctgattggaattgcagccgtttctgctcaggttggaggtgtgtggacaccagcacggtgcctgcctcccctgggtcagcttgagatcttgctatcatttcattccacaaggaacacaactcctctcagattaaaaggaaaagagggagaaacataattaaacatagcagtccccagtgcttgcttaaatgctaaatgaggggcctatgtttttaagagcacattctaggggaaattctgaaattgcaagctgcagccctttctctcttcgtgctcagtttggctgatttccaaagcattgaggccagcaattgagggactgaaatgtaatcggtggtgatacgtttgtgccacatgaaacattctctgcctctgaaggctccagaggctgtgggaagcagcacatcagcgacagctcctggctgctggactccgcagggagggaaggaagattggtcgcaatggtaagaaactctggagttttctacagacctagtgtgttacctgggaaagaattcttagcctctgctggtgaaaatggctgttggtagcatgagactg

SEQ ID NO: 4293 - DNA, 2300 bp, Homo sapien
gaaagcataagctatggaggctaaactttaatagtaaaaactgggggacagtgaatagtagggcaaagtgtaataataaaaaaatcagatcgtgcctgtaatcccagcactttgggacgccgaggctggcggatcacttgagagaccagcctggccaacgtggtgaaaccccgtctccactaaaagtacaaaaattagctgggcgtggtgacgtgcacctgtagtcccagttactcgggaggttgaagcaggagaatcgcttgaacccgggaggcggaggttgcagcgagccgagatggcgccactgcactccagcctggtgacagagcgagactccatctcaaaaacaaaacaaaacaaacaaacaaaattatcagagatgctatacaatggaatgtatagttttcacagcctcacctccgacagggtcttgccctgtcgcccagggtgcagtgcgatatcggctcactgttgcctcctcttcccaggcttcagcgatcctcccgcctcagcctcccaggtagctgaaaccacagatgagcaccaccacgcctggctaatttattttatttttagtgtaggcccaggctggtctggaactcctgggatcaagtgatcctcctgcctcctcctcccaaggggctgagattacaaacctgagccactccgcctggccttcacagcttttcaatctggttcatatccttgttttgaagtgtaatttctgcttctgcttcactttcctcactggaaaggagggttaataacatttatcttgcaggataacatgagacttagagatagcccacaggtcggggcatctattgcacaatatagttcagctcctaagaaaaccaacctagcacaaccaaaatgtgtgtatttgtgtttagttgtttcatccccatattgaatgtgcacaggattttatttcaactactatttttactataccatttttttaaatggagactttgaaaagatatgaaacacaatccctgtcctcctaaaagtttgtgaaatcccagccagaatgtctttgaaaccgtcattcaagtagggcagttctgccgagggctagagagccttcagtttacccttggcaacaccctctaaaatcccctgtatacctctccagcttccatacacttcccaagcttttaaccagacacgagacaccctgaacaccagctgtttagcatttagataaaaccaaaaaatgtttcgagaggttgactccaaagatagcaaaagatgaagagattgaagatttaatcgcgaacaagccaccctattcctaataatcatcacgcttggctgggccccgaaggaaaagcctggaccctaggggcctagaaacagagaaaagaaacaaatgcacagcagttgggccacgtccacctaaggaacagtcaccgcacaagcggagcgttgcagaggagccctggatcaccctcccaggatcggaatgggtgcggcccggggagcccggttctaggtggacaccgagggctggggagcaaccggtcccgcgtgcctgcccgaggggctactgcccccgggcgtatttgcatcgccacaccatcggatgaaagtagcgtgtacggctccagaaaacacatgtctctcggctattttcaggggggaatgctgggcaccctctgctctaagtcccttggggtgggaagttagtgaactttcagaatgggggaaggcgcagcccaagcgagccgggggcagggtgagggggcgccgctggatagagatgggggaagggcggaggtggtttcctgagtgtctccctccggagccatccccgcgctcagccagcaggaccgaggaggcgcggagacggcgctcacttctcccctcgcctgccggctttccagtaaagatgcgccagggagaggtgtagcctgctcgggaaaggcgggtgcggagcgggagcgcggccgcccgggcctgggcgcggcgggaggggcggcggcggctcctcactgcaccaacctgcaggcgcgggctggctgggccagccgcggcccctcccaccgcaccccacccccgccgccgccgccgccccgggagccggcccgggtcccagtaggtgccgcaaggagccggcgagcggagcgcccgctcgggaccgcagccgccgggcgacgtcgccgccgcaccgggcacttctgtctccccggagcaggttcctttccctccctgtcccctctcgtcccccttctccccgtccgtccccctccgcccccgcccccgcccccgcccgcacctcgccctccctccttccg

SEQ ID NO: 4294 - DNA, 2300 bp, Homo sapien
gcgcccgtcccagagtgatctttcaacaggtgacttagataataagtctctgctcagaaccctgtactagctcatttcactcagtgtaaaaactaaagttcttacaacgatgacaaagtcctctttgtttgtcccaccccattgctgtgatgacctccagtaggaggagtagctactacgtgcttctaatctactccagccaccccggcttccttaccactcctccggcatctcaggcacgcttactccaaggtctttgctctagatgttccatcttcttcaaatgctctttcctcatattttgcttagccaactccctcacctccttcaagtcttctcggggtttgaagaactgagaactgtctaacaccacatcctgctccgtatcattgcattccaaccctgcacgcccgattctttttttctacaacccttatttccttctatgttactatatacaggtaaccggtaaactgcgctattattcaaatacatactctgaccctctcaggaggattatcctttccccaccccattggccttggacatggctacgtgactgggtctgattgctgacatagaagcaaaagcattgttacttgtaggcagaagttacaggagccagcgtgtggtttaccatgttctttatcctgccataatgccttttgcatctgacttctttcacttagcagtagtatttttgagttcacccatttttgagtttatgacaccttgttccttttcattgctgaatagtattccaaaatgtgactgaactacaatgtgtttattcagagttgcagataatggctactccatcaggctgggtcctagaaagatgacaatctgtcacagagctgtagttaaccagtaattgtcaggtctcatgggtcagaaatgaactattgtgctagaagccactgagattctgcaaactaacctaattgatgcatatctgtgttttctgctcattgatggatcagaagcatatagaaagagtttggagtgtagcaggtctttaataaatatttgttaaatgaatagatgctgaggaatgtgatttaaggaatggcaggaatattccagtcttgaaatatccttccctctctgctttctgaaacttgaaactgtagtattataaatgtacccttttaggttaagtattattactcacttttaacattattagaagtatgccataattgttttaattagtatttttagtataaatgatgtgttaaacatgatttgggacaaagaaaacacatgctagtaattggaaagagtgctaaaaaattatctctctattcgtcaaatgacttacaggtgaataactcctgttctagaaactgaaccgtaaaaaaattgggccccctttttaaaaatcattacacaatttatctctgattctcaaacttctgttatcattaacattattttttaagttttataatttttttttttttttgaggcagagtgtcgctctgttgcccaggctggagtgcagtggcgccatctcggctctctgcaacctccgcctcccaggttcaagccattctcctgcctcagcctcccaagtagctgggattacaggctagcgccaccatgcctagctaatttttgtattttttagtagagaaggggtttcaccatgttggccaggctggtctcaaactcctgacctcaggtgatcgacctgcctctcctcccaaagtgctgggattacaggtgtgagccaccgtgcccagccaagttttataattttaaaatagctttattgagatacaatttacatataataaaatttgctaatttcaggtatacagttcgatggcctaaaataattttttttacacagagtcttgctgtgtggcccaggctggagtgcagtgatgcgatcacagctcactgcaacctctgcctcccgggttcaagcggttcttgcgcttccgtgacgtcacaagggcgcgccttccgtgacgtcacaaggggcgccttccgtgacgtcacaagggcgcgccttccgtgacgtcacaagggcgcgccttccgtgacgtcacaagggcgcgccttcgccgacaccatagcggtgggcctttggcgacgtcagaggcgcgggtgttcgcctacgtcactggggcgctacggtgcctggagctgggcggtcttctcgtcagagtggggactggtgagagcgacctccccgccaggtcctgtgtgttgccggctgaagaagggtagctgaaaaattcagacccagcacagtgtttatgttggtcaaaaatagaaaactatggcgc

SEQ ID NO: 4295 - DNA, 2300 bp, Homo sapien
tatacaccacaaatatatataatttttgtcaattcataaatagaaaattaaatatatgaaaggagaaaaatgatcagatgactctaattttcatctcatacaattggccttcctgacttctctaggaattgcttatttgtgcagcttgaaattgtacttaaactacttcgtcacaatgctggctcgtttgttttgtatacttaagtcatttttaacttacatctcaaaatgtaatgtaatatagctggccctctctagccataggttttgtattagtgggttttgcatctgtgaattcaactgaggattgaaaatatttgagaggggaaaaagaaatgattgcgtccccactgaacgtgtgtagtctttatttttttgtacttattcactaagcaatacagtataacaactatttacatagcttttacattgtattaggtattataagtaatctagacatgatttaaagtatatgggagggtgtgagtaggttatatacaaatattataccactttatataaggtactcaagcatccttgggatttggtatcctgggggaataaggggcctggaaccagtcttcatggatactgacagacaactgtatgatgctccttttatttttattttatttgtcttaatcaattccttctttgtggtttttatttcatagagacagagatcagtgagtctggcatgacagtgagaagtactggctctgcaacttccttggctagccagggagagagaaggagacgaactcttccccagcttccaaatgaagaaaagtctcttgagagccacagagcaaaggttgtaacacagaggtcagagataggagaaaaacaagacacagaacttcaggagaaagaaacacctacacaggtataccagaaagataaacaagatgctgacagacccttgagtaaaatgaacagggcagtaaatggagagactctcaaaactggtggagataataaaaccctacttcacttaggcagctctgctcctggaaaagagaaaagtgaaactgataaggaaacttctttggtaaagcaaacattagcaaaacttcaacaacaagaacaaagggaggaggctcagtggacacctactaaattgtcttccaaaaatgtttcaggtcagacagataaatgtagggaggaaacttttaaacaagaatcacaacctccagaaaaaaattcaggacattctacaagcaaaggagacagagtggcacaaagtgagagcaagagaagaaaagctgaggaaattctgaaaagtcagactccaaagggaggagacaagaaggaatcctccaagtcattagtgcgacaagggagcttcactatagaaaaacccagcccaaacatacccatagaacttattccccatataaataaacagacttcctctactccttcttctttagcattaacatctgcaagtagaatacgagaaagaagtgagtctttggatcctgattctagtatggacacaacccttattctaaaagacacagaagcagtaatggcttttctagaagctaaactacgtgaagataataaaactgatgaaggaccagatactcccagttataatagagacaattctatttcaccagaatctgatgtagatacagctagtacaatcagtctggttactggagaaactgaaagaaagtcaacccaaaagcgaaagagtttcactagcctctataaagataggtgttccacaggttctccttccaaagatgttacaaaatcatcatcttcaggtgctagggaaaaaatggaaaagaaaacaaaaagtcgttccacagatgtgggttcaagagcagatggtcgtaaatttgttcagtccagtgggagaataagacagccctcagtagacttaacagatgatgaccaaacctctagtgtacctcattctgccatctctgatattatgtcatctgatcaagaaacttactcttgtaaacctcatggacggactccacttacctcagctgatgagcatgtacattccaaactggaaggaagtaaagtaacgaaatctaagacttctccggtggtatctggttcatctagtaaatcaaccacccttccaaggccacgacctaccaggacttccctcttgcgcagagcacgacttggtgaagcttcagacagtgaacttgctgatgctgacaaagcatctgttgcttctgaagtatccacaacaagttctacatcaaaacctcccacaggaaggcgtaacatctctcggattgatttattggctcagcctcgtagaacac

SEQ ID NO: 4296 - DNA, 2300 bp, Homo sapien
atgactaaagttaaatctatcagttcagtatggattttcctccatcacatccattgtattgatatgatatttaaatactaaacttttaggattgtaaagaggaaaaaaaagacccacagaagctatatctagtatcttttctccatttatccctaaaagattaggaagctttatatgttaatttatatttccctgaaaagatgtttcccttttctcagaaatacattccatttttaatagtcaggaaaatccttaaatattctcaaattctctcaggtggaaaaatcaaaatatatattttctcattggcttctacttgaaaaaaaagaaagggattttgtatttccatatgtggcattaataaccagaagactataatttaaaaattcctcaatttataaaattttgctatgtcctaactatgaaaagtctgctgttacatacttacaatttttaaaattcttttaatcggctatagatttttttaaaatgttgttaaaagttctgcatttttcactttacttaggaaatccaaaattatcattctttcaagtagataatactttttaaaaactagttatgttgttcttctctactatgtagttgaaaatatagaaaataaacaatgtttatttgacattctctgtataaatctacaatagattctggttttttgagcaaacctcaaggatggaaagttacaaaagtgagaatgaacacagtgaacttcccttctataaaacacattaagaggaaagaagagcaatatatttaggtttaagatcagatgacccttttataccattatgactatagttaataacaatgccttgggtatttgaaatagctgaaagtagatcttaaatgttctcaccacaaaaaagataagtacgtgaggtaatggatatattaattagcttgacttagccattccataatggtatacatatatcaaaacatcatgttatacaccacaaatatatataatttttgtcaattcataaatagaaaattaaatatatgaaaggagaaaaatgatcagatgactctaattttcatctcatacaattggccttcctgacttctctaggaattgcttatttgtgcagcttgaaattgtacttaaactacttcgtcacaatgctggctcgtttgttttgtatacttaagtcatttttaacttacatctcaaaatgtaatgtaatatagctggccctctctagccataggttttgtattagtgggttttgcatctgtgaattcaactgaggattgaaaatatttgagaggggaaaaagaaatgattgcgtccccactgaacgtgtgtagtctttatttttttgtacttattcactaagcaatacagtataacaactatttacatagcttttacattgtattaggtattataagtaatctagacatgatttaaagtatatgggagggtgtgagtaggttatatacaaatattataccactttatataaggtactcaagcatccttgggatttggtatcctgggggaataaggggcctggaaccagtcttcatggatactgacagacaactgtatgatgctccttttatttttattttatttgtcttaatcaattccttctttgtggtttttatttcatagagacagagatcagtgagtctggcatgacagtgagaagtactggctctgcaacttccttggctagccagggagagagaaggagacgaactcttccccagcttccaaatgaagaaaagtctcttgagagccacagagcaaaggttgtaacacagaggtcagagataggagaaaaacaagacacagaacttcaggagaaagaaacacctacacaggtataccagaaagataaacaagatgctgacagacccttgagtaaaatgaacagggcagtaaatggagagactctcaaaactggtggagataataaaaccctacttcacttaggcagctctgctcctggaaaagagaaaagtgaaactgataaggaaacttctttggtaaagcaaacattagcaaaacttcaacaacaagaacaaagggaggaggctcagtggacacctactaaattgtcttccaaaaatgtttcaggtcagacagataaatgtagggaggaaacttttaaacaagaatcacaacctccagaaaaaaattcaggacattctacaagcaaaggagacagagtggcacaaagtgagagcaagagaagaaaagctgaggaaattctgaaaagtcagactccaaagggaggagacaagaaggaatcctccaagtcattagtgcg

SEQ ID NO: 4297 - DNA, 2300 bp, Homo sapien
gttgtctgcagaactagactcttgatttaataaaataccactttactttaaacaaatgactgagagacacattttggttatatacacttgggtgtttgacagacaacgtgagcttgtcacttcaaggaatttaagtgacaggattttttttttttgaccaatgataatatttgagctgtcaagaggaagttagaattttagaaaacttgattctgccatcatgagcttaacagcttccctgtacttaaaagacttttatggtaagataggtggtaatattaacgagtgtgatgttttaaaatagtataatgaaacacgtcaacatttggaagatcttcattactcaggaaatcaatattttcccaaggaccaatacgtggtgttacaaaatcccatcaaaatataagatggattttctttttttgtttttttgagacggagtttcactcctgttgcccaggatgaagtgcagtggcgtgatctcagctaactgcaacttctgcctcccgggttcaagtgattcccgtgcctcaccctcccgagtagctgggattacaggtgcacaccaccatgcccagctaattttgtatttttagtagagtcggggtttctccgtgttggtcagactggtcttgagctcctgacctcaggtgatctgcccgcctcggcctcccaaagtgctgggattaccggcgtgagccactgtgcctagccataagatggattttcctataacattgtgtgaaaagttcattaatatggtttcagattccatattgcaaaaaaccttcaagaaattactgcttatataatttttatgtagtatcaaagaaattacaaaataattacaattatttgaaaagcctattaaattacctctcccttttccacctgtttatgtgtatgaagccaggttttctttatatagttcaagttaagcagtatatggcaatggattaaattcaaagctgataccagttttatttttttaaggtagacattaaagagatttgcaaaatgtaaaatagtgctactcttctcacttatttttgttttggaaaatatggttactttgttatagaaatgttagtaatttttaaatgaaattgggttaatgttatcttaataaataccagtttcattttaatatgtaaactatatatatacatacatatatgtgtatatatatgtacatgtctatctctctatagatatatatatatctagatatatatatctagatatatatatatctatagagagatagacatgtacatatatatacacatatatacacacgtatatacatatatatacgtgtatatatatagatatatttatatctagatatagatatatatatctagatatatatatctagagatagatatatatacgtgtgtatatatatctagatatatatacgtgtatatatatagatagatagatagatatgtattgcccatgtaaacaaatgctctttggagttcattttttaaagagtataaaagggtcccaagaacagaatgtttcagaattgctgttctaggaaaacgtattaagacaataaagtacatgtgaggaaaaagaaattgaaattgcattctgtggtttacacctgatagacaaaagagcaatttatttggtcaacatagttcttaatcaggtatcatatatacttactgaattcattgtgtctttctcaaaccatttgtacctaagacatttattggtacagtattgctatttttctaatactaacatgatgctaacatgagcatttacttgaggattatagacctttataaactgtgctaaaaggctttcagaagtatgaaaactataaaagtttgctagttgagcacccacttactgccttagtctcttcctttttaactggactcttagtggattccgtgggcttacttcactgatgagaatttagtatatatgtcatttcctgggacctgtggacagttcatttaattaagtataaatgttgatgaacgcagttctattcttaggccttccagtgtttggtgaatagccactaaagctaaaaatatctgaacgtatatttttcttcatgtttctcttcaggatgacgtagctttgccaaagacttagaagctaagcagaaaatgagcttaacatcctggtttttggtgagcagtggaggcactcgccacaggctgccacgagaaatgatttttgttggaagagatgactgtgagctcatgttgcaggtaattgtgtcaagcttctctatatgtgtttattcaaaacttgaaattagtgta

SEQ ID NO: 4298 - DNA, 2300 bp, Homo sapien
gggccagttgttttgtttgttttacttgcttaaaaaataaacggaaagatgtatccattccctcaggaacataaatgcattacctgcccaatgaaaaaacaattctgcttgttcatttccctgacacaacagcttcgttgtcaggccctctctagcccaggctccaacgtcacctagtaattttatattgatcaccttggcagtgcttggactccagcaggcatagtccctgtcttccttacattcctcaaaataaataaataaataaataaataaataaataaaactctacgaaacaccaccgaacagagattctgtgacttagtatacaaatcccacgtcttcccgccctgtgttaggcagctgcaaatgttattttttcatcgcttgcataaaatggaagcgaaacgtaccaaaaccctacatctgaatcctaggacaatgaagccgacaggaagccactctctcctcccccgggtttactacagagccagagcctccacggggtgcagtcgccaggcagggtgcatgacaccgcgtcttccacgccctcccaacgcgtccaaaaggttgctcgcctgacctcgccaaccgcctcacaccccaaaaccaatcacacaaaagggattggcccggggagctgctccaatgggggaaaaatcccttccccagcggcagcgcagccattccctccaatgctccgcccgcacccctcgcaaactgctacggcggaggggggagggctgcacaaagccagtcgaaagctgaaaatgattcaatgcacttaggggatgcggaggcggcagcaaggggctcgggaaagccggggggccgcaggactggagctccggggggcggcgggtgggggatgggaagggtggtcccgtcaagccccgggtcccaggcgggcagagggtgggggtggcggcgccgcgcggagcacccgggaagcgcccccttcgcggtccagccccgcacccccgccccgcggcgggcggcgcccgagtcctcgccgcaaacccgaggagcaggatgtggaaagcagccgcggcggtggctgcggctgcggcgcctacaccgagcagccgatcgcatcacttaccccttaccgtggagagagggaccggacgggggaggcggggcgcgtcgcgtcccgtgagtctctcgcacgccgtcctccccccacctcgtcgtcgtcgtcgtcgccgctgttgtcgtcgctgccgctgcggtcgagctccggggccctcagctccgctgggcaataacgttattccacacacgccccacacatagcggtaacggcaaagaccgactgcctagtgcgcaggcgcctcgggaaagggcgaggagccggaccctatcccctcctgcccagttccaacgatcccttactgcgcaggcgccacacacagacaatgaaaaggggttgtgcgagggtctcacccacacgcttttccagcttgcccactgcgcaggcgtgccccgaaagaccagcttgaacaatgaagaggacctcggcgttaggtgggaccgcaaccaacaaggactacagttcccagcgggcagagcgccaactccaagtgaaggtccggttgctgggcatgctaggagttgtagtgtcggccgcctttacaatctaggctgtttggaagatttagagcttctatttcttgaagatttattcgaccgttttaaaaaatctcgcaactgaagcagggttcagagtttactatctgcgtccttgagtagcctggggatcaactgctgcatattagcaaatttcgaagcgtcaaggccttcagtgagccctttctgtcatttgggtggtccaggcagctgaagagtgggatggaggcgggactaaaccaggctgggctggaggaaaagggcggggcctgcaagcctgtctcttggcagcaggctctggcagccaaaccgtccaagctagcgcctggagcgcagtggtttctgggaattgtagtgtaactggaaggccctgaggattgtcgagcttgcaggttctgaacgtgaggactacaactcccgacgtgcaaagcgagggccagtgggtgggaagagcccccaagagctctgtgcgggattctaggctcccctgtgacagccgcggcaggaagcaggcgggcgctccccggccacaggcctgttgttctcggaagggagaaagctggacatttccccacgtaactcccagctctgggcctagagtgcgtgcatggcgaagtccccggagaactctaccctggaggagattctggggcagtatcaacggagtctcc

SEQ ID NO: 4299 - DNA, 2300 bp, Homo sapien
tgttccttactgcatgcctagcacctagtatgcttaacacatagtaggaggcactgacacatagtaggcatattatgcagaacaacacatgcttcataacttagtattctcaatgtcgcaaacagtcatgacctagaggcttatgaaaatgcaacagaatagaaagcagagtttattacatttagtagaataaaaattcttcagtgaaacttatagtttatatgtacacatatgtcccatataaaatttatttcttactataggtaaacattttaagaagtcttaaaatcactgctttatggggattatttcatttgctccccacaataaccctatggacaattccataacttccattataacagaatcgaaatttctagatgttatatatgctgtccaagttgacagcgccatctaaaagtacagacattaagtccaacagagcttaaaggaaaataaatacagacattatttgtacagatacttgctcatatggtaatgtggtaagaaaatctaaattaataaggttttgataatagtaattatggcttgattagtaaatacaaacataggctttgaaggcaagcctgataatacctggctctgcaactaaccagctgtgtgggctctggcctgtaattcaacctctctgagcttcgctttccccatgtgtaaaatattcacacgattggtgtaagctgcagatgatttactgtatgtaaatagcctaaatcaattaaaagggggctcttgtgattaaaataattattagtgtttccccccactgatcccataaatcacattcaatccactgtgccataatttaaatgtgtaaaaactgtgaatcagacttttattggattaaatagcaacgtatgggaactgaacaaaaatggcatagagctatccaagagtttctgctgtcgccggttgagaaagatgccaagttaagatcaaggagttgattgaggtaactacgggaatctgaggaaacatcgttgcttaactgtaaaaactaaatcaaactatttcatcctcctcaagaccacagcaacatccatcttgctcctctgtagcgtggacggggcagaacccaggtgttaggaaacgcacctggtctgctcccgcccactaggccctgggcacctcggggctagggacagaggtttggagcaactcaccccggagactccgttgatactgccccagaatctcctccagggtagagttctccggggacttcgccatgcacgcactctaggcccagagctgggagttacgtggggaaatgtccagctttctcccttccgagaacaacaggcctgtggccggggagcgcccgcctgcttcctgccgcggctgtcacaggggagcctagaatcccgcacagagctcttgggggctcttcccacccactggccctcgctttgcacgtcgggagttgtagtcctcacgttcagaacctgcaagctcgacaatcctcagggccttccagttacactacaattcccagaaaccactgcgctccaggcgctagcttggacggtttggctgccagagcctgctgccaagagacaggcttgcaggccccgcccttttcctccagcccagcctggtttagtcccgcctccatcccactcttcagctgcctggaccacccaaatgacagaaagggctcactgaaggccttgacgcttcgaaatttgctaatatgcagcagttgatccccaggctactcaaggacgcagatagtaaactctgaaccctgcttcagttgcgagattttttaaaacggtcgaataaatcttcaagaaatagaagctctaaatcttccaaacagcctagattgtaaaggcggccgacactacaactcctagcatgcccagcaaccggaccttcacttggagttggcgctctgcccgctgggaactgtagtccttgttggttgcggtcccacctaacgccgaggtcctcttcattgttcaagctggtctttcggggcacgcctgcgcagtgggcaagctggaaaagcgtgtgggtgagaccctcgcacaaccccttttcattgtctgtgtgtggcgcctgcgcagtaagggatcgttggaactgggcaggaggggatagggtccggctcctcgccctttcccgaggcgcctgcgcactaggcagtcggtctttgccgttaccgctatgtgtggggcgtgtgtggaataacgttattgcccagcggagctgagggccccggagctcgaccgcagcggcagcgacgacaacagcggcgacgacgacgacgacgaggt

SEQ ID NO: 4300 - DNA, 2300 bp, Homo sapien
actttaggtgaatgtagtttaccacgttcgagcatgatgcgacactgcagtatgggtcagtgtctggggacctgtcctgtcttgtgactactaccatatcctttggcccttagcaagtgctcaataattatttgttgaattaaattaatatacgtattttaatccttcttgtacacataaattccccagatcattgggctgcttactacattgaatgttgagagggtgacagaggttgcaactaacaatgggtacactaaattcaactcaggcatgtttggtttgtttgataaattttgagccagtgtttaatagtgtttcacatgaaggaccagatatctggtaatatgaattttcactgccacatggcagtgattgactggaattgagtagtggctgcttcctttggatggtacacatttctgtggtttgtcacagagcctactcttcttcctttttgaatccctggcatgcaggctgcatgtcaactctgtttatcaccatacatgcactgtttctttttactgaagataaatatttttctggaaaggcagaagatcgtaataataaaggactttaaaggaaaaaactgttcctttttctcataatgcttctgacaccaaatgtttgggtttgttttctcctacacctggccattctctgtttctctgtagataccaactaggtgtccagtgattcaattcaattctgacactcactacacagtatcagacccacaggttaagggctcagtaccacatgactgcctgctactttagataccaactgcaaatagtaggtctcttggttatccacaattctgtctgatttgtctgtaaattggggattcctacaatcccttcctaatgtgtgataatttgctataatggctcacaaaattcagggaaacactttgcttgctattactggtttattattatataaaggatataaatgaacagccaactgaaaaggcacgtagggcagggtccaggctggtcccaagtagaagagcttctgtctgtggagtttgggtacaccaccctcttggcatgtggatgcattcgccaacccagaaattctctgaacttcatcatataggatttttatggaggttttattacataggcatgattggttaaatcaatggctgttggcgattaagtcaatctccagtcctttccccccttgaggtgggggagtggggctgtaagttctagtcttctaatcatggactgcagccaccagtcatcttattagcatacgaaaggatactcttatcaccatggagatcctaagggtcttagaagcacttgtgtcagaaacccgggactaagaccaaatattttaacgaaagatgctcctatcacccatgtcactcaggaaattacagggttttaggaattctgtgtcaggaaccagggacagagaccacatatatatttggattcagattgacaggtttcagattctagtgctgccacttattagccacttcctacctctgtgaccctcagctactctatgtgactcagtttcctcctgtataaaatggaggcaacaatgaaacctatctatcccatagaactgtaatgattaaatgagttaatatatatgacatacataaaacagggtctggaacatagaaagcagcattttgataaaaattattattagccatgcatttatgaaacatggaacatgaaagacaaactaagagagaggtgtgtgcttcaagagtatatgtcttcagaggagtaaagaataattccatttgttgaatgcgctgaaatctagccctctttgcccatatttagattactgcctgtacctgaaggaattttactttgcaacacttgtagaatatgaccctaatagcctgaaaatgtgaagtgattcttgacctgtagtgtagaagcatatgctttttcttttcatcataggtaagaataggtattttatttgtaaaatatgcatgtttatttaaagttgaattcagttgcagttactggcacattttattttagggaaacatgcacaattcttggattacaacaggtgaagattctggggtgggcgaaacctccaaaagaccattttcccatgacaatgcagattttggcaaagctgcatctgctggtgagcagctagaactggtgagtatttgggtgcttttctcttatacatcttttttttctttttctcttttgtacttttttaaaattctggtaaaatatatataacaaaatttaccattataaccatttttaagcgtacagtttatctgcattaagtacatt

SEQ ID NO: 4301 - DNA, 2300 bp, Homo sapien
aagtgaaggaattagttcagaaggatgggaatacttaacctagatttataggtgaaagctatgataagacagttttcagttgataatagagaggcagctttctgttgaaatcagtacagcagagagagagttctctgtctcaagaactagctgaaaggacatatacatcagaagagcgattagactaaatcgccttgaagttgcttccaacgtggagataacatagttctggttcaatttaatgtgttaatttatttgaaatagaatttgagtgctgtggataaacatagcaaatgctgaactgaaagtagtaaagcagggaactgtaggagtgaaatgaagggataaaataattttaaataagacctgctgcttaaacagtttttacataaccagcttgtattggtgttgggttttaaacatcatggttgtataattattatcttctgatgttatcagttcggggttttattccattttattcatagacataaatattaatagtgaacaattgagaaagaaaataaagtatggctcctcatttttttcctgtcactctgaatttgtaatttttatttaggtttaaaattaatagtttttataaatttataatttttgaaatcggaggaataaactctctcacattgaaggcatttgaacttccaatagaatttttaataacttcattattgttctagctttctgagggctactagggagaagcctgttgactttttcttctgtcttgtcactatagcttttaaacatagattaatttatttttaaaattacttttaaggttctgttttgtttgtttggagacaggatcttgttgtattgtgcaggctggagtgcagtagctattcacagacactaccacagtacactgcagtcctgagctcctgggctgaagccatccttctgcctcagcctccagaggaactgggactacaggcatgcgctaccatacccagcttaaatgcatataggttttataccttagtctattctaatacctcagtaatgatgaaactgatttctaaagtttccaaaatcattatttttggagaaataccaaatacttgaaaagttccaagaaagcataacggtgagataatatattaagagccatatatttgtaaattagaagccaacttagctgacttgtacattaattgaactttctataggttctcagttctctcaaaaggcccataatttgcttgtttagatttatctgctaattacacttttcaaatatatttccatttctgtagcagtcctagattcgaaaaaataaataaaacaaagttcttagtgttaagtatagaggatgatacacaacacttttaagatactatgtgtgttcattattggtgccgtattacaattatttcatttaaatgcatattttccttttatattgaatgttacagtcataagtgcatagtgtgcttagttccagtctatggcttttgccagaaaatcttccttaacttgaatacctcatattgtgtatgataagatgacatctgcaaaccttgcagtcaatactggatattacagacctagatatcaatagtatatctatcagcagacaaaaattcctttatacatttccttttaaagagcataactgatgaagtctttaaaagaaaactttgtaatatagagtgaatatttaactgtatcaatgtgaatgaataataacatagcttaacattttaactactaactttacctatttaaaggttagatgatagtgcattttggttgataatatgcaattgaaactgttatataaaataatcttgggcacattacttaaattccttagttatgcatttatttatctgtaatttcaagttgttagaatcaataatccctggtgttgcttctgaatcttaacaagctacgttgaatagtctaatagaaaatggcattcttagaaaagttttgttgtattttatctatatgacctctagggggcaccaaaagatctaattgcaggcattgcctggtagattccagcaggtaatcatccagttttttacaatctaacaggtgtgtggagaaatgcgctatcagctgaataaaaccaacatggagaaggatgaggcagaaaaggagcacagagagttcagagcaaaaactaacagggatcttgaaattaaagatcaggtaagagaggacacagcataattgcagcaattatagatatgagtaacattctttctcaagttgatgttgttttattcctaatttatttatttgtattgtttctaactaatgggatgatc

SEQ ID NO: 4302 - DNA, 2300 bp, Homo sapien
atggatggatggatgggtgggatggatgaatgggggatggatggatgggggatggatggatggatgggtgggatggatggatgggtgggatggatggatggatggatgggtgggatggatggatggatggatggatgggtggggtggatggatgggtggatggatggatgggtgggatggatggatgggtgggtgggatgggatgggatgggagaggttcagaaggcctagagggctcatctgtggaaccaggagactgagctgtggggatggtgactaggggtggtcccacccactgagagggtcacagagagaggagcattagaaggtgactccagtgtgtcaggtggtgagtttgaggtgggcttggaaatgcaagagagaggcccgaggctgagatcaagtgctcaggatccttggcctctccacttggagtcatgagtgtagattttaaaaatcatgcaggcggaacatttccagtcaggagagcactgagcccagccctgggtcacaccagcatttgaaggtctgatggaggaggaagagggaccaaaggggagtgagagacctgtacagagtctaagaaggagagtgatgagtcgcactgtgggccttgctctgtggccttggtggcttaggtaatcctggctctgccttaccttgtgtgcgcttgggcaaatgatcgcttctctgcaccttgcttctctcatgcataaaatgcagatgataaagtaacgtgtagtattgttatgaggattaaattagggaatgtaaaatgcttacaatgttgggcatttagtaaatgctcagtaaacattagaggaggccactgggaggagtagaaaagtgagtgcatattttacagttcatgtatttgcacctttgaaatccatatgttgtttgaaaaatgttcttcatttccatgaggaagacgccgctcccagggaaatagtgagtctaagcactttgagaacacttatctaagaggaaggacaatcttagctgtagtcagagtgaccacagggaggaggctctggtctgaaaacatttcagaacaaaggattttaccactaccaccaaaaccaaacccaaaacaaaaccccaaaacaacaactaaaaccttccactgtagtccgtaggtagctcccagggggaattgtccagtgaagcaaaaaactctcattgaaaaacatacacgcataaggatataggccccctctggggaaggaaggggctggcctggagaagaaatccattggtagtggccctgtggagctggtgctaggttcacaagtgttcatttggttattatacctcatgacttatgtatacattgcatatattttgtatgtatcacatacaacataaaaaaatttaaatctatgtattcacttgctttcacagtattcatagcaaatgagtgtctgaagcataggaccagagctggcagcttgcaccgcttctgttttgcataagatattttccccagcccactcagctctataaagttgttttgtatttcaccacttgctccatcttatcttgaagccttgcatatttttttaaatgctggttctgatcatgcttgcagggtgtggctcagaggatcgctgttggaccaatggagatctgcctgggcccagcactcttatgagtcccctgtgatttcatcagcatctgcctttagaaacccgggcgtgtttgttcccatggtaactgctgcccctgacacgcctgaaattcctgggatgcccttgcgtggaaggggagcccgtgctgcccattctacccctgcatggggcagctgcttttctccctcagggtccccagtcctacccaggcaggggtggcagttgttcatctgcagatcctgaaggacatggaccctgtgcctgagattaggacggccgcaccagcctgggtgcaggctccctcaagtgtccttcctcatggacccgcggaccctacgctgtgctgtgagggccggggagcacaggggcttcctgggaggaggactggcttcctgcccctgatggggcctggccacagctcccagggctccatgacagcacagtgaagatagcaaccacatcctgggggccctggatgcaatccctgcctgttgcaaagatgagataaaggcgcgggaaagaagggtctgaattaggggttgagctctgaaatcggacgattctgtgtttcctgccgcatggagggcgtgtgtggttcgcaggctgtggggggcttcttgcagcgggggctgctgcctaaacagactccgcgggccccatgatggcaaa

SEQ ID NO: 4303 - DNA, 2300 bp, Homo sapien
agacagattttaaaatgattttacatgcatattacaaaaatatggccaactgtgcaaccaaattctttttcttttcttttctttttttttttttttgagacaggttctcactgtagcacccaggcacggtcaccactcagcatagcctagacttcctgggctcaggtgatcctcccacctcagcctcctgagtagctgggactacaggtgcctgccaccactcccagctaatttttgtattttttgtggagatgggttttgccatgttgcccaggctggccttgaactcctggacataagtgatcctcctgccctggcctcccaaagtgctgggattacaaactaatatccctttttgacactctacagcaacagactcatggtgattttgaggagtctcagccttacctataggttctgcctgtgacctcataatacatgaggctggtggtcttgcattcagctacatagcttttgtcaggctatttagtcaggctgtctagagaatgtttagtcttgattcctgactgttaaatggttaagctccacacttaatttgcattgaagaatgacctgtagtctaatttagcgctaggttgggagtctaacactgaacttaactgctatgtatcatttatcacaaaccaagttgagagagtatgtttgtgtagtccatctatccatttttctagttatctaaaatttatgatatgattcttgaccacataacactggtgtacctggaccacattttttggtccccttctgtgcaaatggatttactaattttatgttggcattttcctttttagtttgagagtgacaataagcaatgaccctgtaaaactcattgctgtatatgggagggtgtttttgaggactttcccgcatacatcttatgaagaagacccatgggataaattcgatgtttgtcccaggaaaagttgtatttcttctgaggaactttttttgctttttaaaaaaatttgtgcagcgtggacaatatagcgggaccccatctccacaaaaattttttttaaaaattagctaggcatggtgatgcctgcctgtagtccagctcctcaggaggctgaggtgggaggattgcttgacccccattggaggctgcagtgagctatgattgtgccactctactctagcctggatgatggggggaaaccccatctcaaaaaaaaattttttttggatactgtaaataggaaagcctgttgtgttttgttatttgcattgtcttcccaagagctccatgccaaatttgtgacgtatctttcccaagtatgtatgcctttactctgacttctttttatcttaaggcagtatagttttggaatgcaggctctggagtcagacagcctgggttcagatcttggctccacatttactaggtgtgttgaaattgagcaagttggtttatctgtgtgagcctcagtttccttgtctgtgaaatggaattaatagtatcctcataaggttataaagatcacataagaataatagatgtaagtacccgtaacagttcttggcacatcttgagtactaaatatttttttctactttcatattccctttgtttcactttactttataataagtacataatatgaaatcaattattttttaatctccttaaaatatttcttggaacaggcagagtaagaatacgtaaatgatgagttcttggtacgttgtattttatatcacttaaagtattcacgactggttgtggtggctcacttctgtaatcccagcactttgggaggctgaggcgggtggatcatgaggtcaggagtttgagaccagcctggccaatatggtgaaaccccgtttctactaaaaatacaaaaattagcagggcgtggtggcgcacacctgtagtcccagctgcttgggaggctgaggcagaagaatcgcttgaacctgggaggtggaggttgcagtgagcagagatcgcgccactgtactccagcctggcgacagagtgagattccgtttcaaaaaaaaaaaaaacaaaaaatttacaattgcttctgaaattacagggatttagggcaattaactttcattctcttccctcttcacctcaaatacacatcaccaaacaaattttctctattatttgggtaggcgtgactggttttcttaagacttttttgttgcaacctcttaggttaaaagtttcactatcatttgaaattggtcacaagactagggaagtgctttcattatagaactatttaataaataagttccccagtttgaagagccagacttttatgtga

SEQ ID NO: 4304 - DNA, 2300 bp, Homo sapien
tcaaacccagaaggaagtcaagggtaaaacataaaagcataacccaggaaaggcatttctgtggagtgctcgttgaatgaggtttgtgcagagctaatgatcttaccactgtgcagtaaagacgtgctaagcacacctgcaggatcaagtggtcagcaaaccgcctggactgtcctctgtgaatatcacttctcttggataggcattggccaagcatgggataacagcacttttcagttaaattccccagtgtgaacctaagacccgtggactctctgttgttgactgaaggacatgcttatgcatgggtacctgacacccatgtggcaagattctcattccatgatgaaagtcacatagcaggatgagtattctcgcctccttggaggacttgtcctgcctttgagtcagaagctgctctcatcaattattaaggagaaagagaaatttgttttttcctcaaaaatcaatatttcaattttctttattactcatataataggtattcattggtgatacattggaaaatatggaaacacaggacaacataaaactcattcacagcctttaagcacagctaacattttacacgctcttccagacatatttccttatactttttttttcaaaaaaggtactgtgatatgcaaatttgctttctttctgttaccaatatgtcgccaacagttttcgtttgtgtggattactgtaacatttctaaacagttccctattgatgggcatgtggatctgtttccattctttaggtattaagaacagcacattgacccttcttctatccaagttatctggcatattgtaaattatgatcttaggataaaactccataaatagaactattgggtcaaaaatacacatattttgaggcatttgataagtatttccaaatcatctcttaagtgcactcccaccagcaatatatgacatggcacattctacatcattagatcttacctccactccctgtttcataggtgaaatctgatatctctgtgctgtttcatttctttaatctgtaatgaaattgaaacgtccccctctccctgctccaacatattcaacacagttttctgactcatgctctaaaatctttacaaatctccctgaactttccggattttgtttcctgccttgttgttttcagaattattacgttattcccaggtatgcagcatattacttccggtattttccagaataccaaggagatcatttgtcatctgttaataaccccctctttcatccctgtttttcacaccttggcttttaaacccccttctcagaggtagggattcttcctcagttccttgaggggaaagtggagctggtggaggtgagagcgctcattgaacctgcatccttactgaagcaagagaacttccacccgggccaggtttgctggtggaaaatgctctgataaacgaaaccgtctcttccacgtcttctccatttgactggcgtgtgaactcgttgctctcgctaaatgaggccgctgagatggaaacatagatgtgtttacggcagggtggcagtgcaggtaacagggaagtccttgctagggacatcagcaacttgcagcttagtggtggagaaagcgcgctctggaggcctggttccacatccagtgccccctgggctcgtgtgtgcctcagtttcctcatctgcaaaatgtacctacttcacagagtctttacaattcagccactccctgcaaggctgttatagcctggtgcattgaaaagtgcgaagagaatggaaaaggagagaagggcggggaagggagggcttaaaaagtgggggagagcctgggtagaacagagaagcgagcaagaacaggtgggaagaaaaacagcagcctgatccgtcttgcttttcccttttctccatgcagccagcacttttccttctcactctccccgcacgcccacgcccacccgcttctgcaccgagaacctcgaggcgcgcacgcacgtggaggtgacgccaagcccagcggcgaggtcggggctgggggtggggggagccggcgtcccgcgggcccccgaggccggggagctccgccagcgcattgtgcgagcgagctgaatgcagccgaggggcgagcgcgcgggctcgcacggattagccgtgctttcccatgagccacaaaagaatgcccgaatctgggacatctgtcatcaaggggcaggctgctcaggatgcaaggtaaccagagctttcctcggactgcttcagtctttggggacgtggggtcaccctaatccttcctgtttatattgt

SEQ ID NO: 4305 - DNA, 2300 bp, Homo sapien
gcggcgcagctgcgggaggcccgggcgcggggacggggccgctgcagctgcggggtcgggcggggtgcgggttcccggctccgcgccgcgcccccgcgggccggtgcagctgcggcgcggggcgggctcccggccggtgcagctgcggtggcgcctctcgggtgcggagggcggcgggctgggggagggggcttgggagcagccgcagctgcagtggcgcccgggacggccgcggctccggggaccggtgcagctgcagtggcgcccgggggagggggccggcgggggagggggccctcccgggctggtgcagttgcccggaggccccgggggctcgcgcgtcgcggcatcggggaagcggtagcaaccactctcctcccgctggctgcttcttacgacttttcttttgttgttgccgtgacccgggtctgttttctcctctgttgtttaaggtgttttcctgctgcaccggctctgcgccctccacctccttccctgtggttttaaccttcctctttccccgtgtgttttatgcacggcgaactacgtaaagatttgcattgcttccccactcggcacccccgcccccacctctctgaaaaacaaaaccccaacctcacaaaacctctatggatccgcggtagcgagacgtgaaggggttgatttgtggagtgggagttgctggcccattgcggtgcccgggactcattaaactgtcactcaccccccaccccactgggtaaatggggtgattaatgtctgatatattggaatgggtcgagggcatttgtggagaataggtggtgtggctgggaagaaattgatctcccgaggatgtctcctggactaagtgttcataattatgtcactcaccgcgaagttggagaaagttaggtttgtgactttgggaaagcgagaaggacaggacggagtcgtcgggttttgttactctttaactctccgccacggctttctaatgggaacgaagtggttatcaccagggctgggacgctggcgcctcaggccccagttccttttctacccctcgccctcccaagagtctgaggagatgtatttgacattcagagatgtcgcagcaccctgcccggtaccggtcagcccagcccgggtcgcgttacagtttcatcagctattagaaaagacccacaaactggctgaaaagttctcaaacttactagacctggcttccccccacacaaagattttcttgtgatcataaacattagagtgacccccccccaaagaaaaaaaagattgttaagggacacagatcaaggggaaggcaaggttctgctttttctgagcagaaagatcagatatgcaggtgcagcattcattttaagtgactggagcaggttgtatcagtttattaattggtctcgttgaactgaagtactttccaggatttcagaaagtgcagtttcagcttgttggtaccgagaattgaaatttgcattgactgtggcagtgtaagaaatttttctgagaaggtagttgtagataagtaattacataagagtgaaataataaggtgaaccagtctgaagtaatagttctgaacaagtctgccaacatttgagacatgtataccattatctcagcagaaaaaaataaaaaagtgcggtaataatgttgaaatgggactggagatgtcaaatgggttggtttaaaaatatccctaaactgctttagaaactaaacgttggagttgaataaaagtgaatctggatttcctgaatagcaccgtggcttgagtgtgctgtcagtatgtaagccagtccaccaacttaagacagaagtgttgctattccataaatacagtagaactccatatgctgagtttttcaatttcttctgttagaaagtttggaaaaaaaggaagactttgaagtattttgtttatactaacagaagagaaaagttctcctaagaaaaagctggtggcaggagtgtagaggagtagcatatggcattaaaaggagcacagctggaggtagcatttccatctgaacatgatgtcagagcagctgacagcctgccatccctcagccttttattctaacacacagacagggagttagtgtgtgcggatctgtggtggagaaggtatctcattcctctctaacatcatctccactttgcatctgtctctcttagtctgctttttttccaccgatgtaacagacctggagccagcaggactcagaggaaaggacttaatcaggtttatgtgtcctaaaggtaggagtagcaagagattagattgagcatatttctgt

SEQ ID NO: 4306 - DNA, 2300 bp, Homo sapien
tctgaaaaaatcgaaacaaatttaaaatgaacactgtatttgaaatgggccctatttaccactgggtaccagcaaactgcatattcccactgagggagggctgagcatgcagatgaaagagctgaggcattttccaggggctcatgacaataaacgacatcgaattggatgaaatccttaggttaaaggaaaaaaataaattagggaatatgttgggtcacaatgaagttttgcttttcatagtaagtgtgaagtctagaaaatgtggtgatttctcacattctatttatatgttattttacttgagggatgcctcaaagcagtactagaatcacttctgtgcaaaagggggaggaaaggagggtttgtcatcatgtattcagtttgctttgtaaaggtgcttatcttgcagtaaaaataatattttagtcaaagtatgacaggcggtttgtaggcttgaccagtatggaaggattttaaatgattggagtgtttctgtttaaaagtcagtcaagtaacaccctcaaagactaaggcgatcaatcctcctattgttattcttatttagtagtacatatatgcttttttttctctctcctaacgtaacagaacgtttaagccttctaaccaaaaacaattccaagcttacatctgtatcctgaattttaaaatttacattctggcctggtcccttttgaaataatgaactaattctgttattcaaatgataaaaatccagtggccagcatggcccaattgttttccattatttgtagacctacagtatatgtctgatcatccccgcttacagactgccgcatcacgtgcttttccacagagagtgattgattgaaagtcacaaaaacttacagctggaaggggcaacagtgacttccggttcattcatcctgaaagtggaggagcaggcatggggaggtgaagcggctcaaagctctttacaaacatttcataccttccccaaacctttggtactatcattttatagatgactttttctctgcttagaggctcacaaaggctcaactccttgctctgggcacatctttgatcaagtctgaatctgaaatcaacattctggttatgcctaggtgataaaatttgcattatgcaaatatctatttaccatgattacatgtaccattgtctgcgatctatgtttaccaatggaatctaagattggaatgatactatttcttttcctgactttgaccctatcaactatttaaaaaatacatacagcagaacgttctctgatggtgtcaaagaggacatgttttggcccatctccttccagctcaccaagagctaaaaccctgtcaggatcttcctgaccaacacactctccctctctgcttccagctacgaaagggttgcttgggtttccaaaacatgttatttgttcaaccacaacgaggcactgctccttgcagctagtcactgcagggttgtcagagctgttgctggacgtgcagaagggagagatgaaacatggaccgagggcggcagccaaacgggatcctcaaaacttgtttgctgctgaaatgggagaattgaatatttttccacttaatctaaaaattggccttggtttcttggaatgtttctcacctcctctcagcatcatctactggaaagaaggctcaagagaaagttggggaagatctatcaatgaaacacccgaggaaacccaccctgataccttcatttctccatttgtaagaccagcatattcatacccgtgtcacctttttctttagaataacatgaaaatgaatatgcaaaagcattaagctttcagaggaaagatgctatgcaaatttgaggtgacctcactattacaataataatttttttttgcactaagacgaaatttttccttatcctaaagccttcctaccaaggtagacttttttcaatgtgggtttttgtgatttaaattcaccaagcactgatagtttcaagtttatttcagtattaagcaggaaagcagtttctgcatgaaatgtgaaaactaaaataccatagtaatgaaaaagattccgcatcctcaggtgggttttgcaggtgtgtacgtgtttagctatacacatctcatatcacttacattgtacttgtgattcttttctcaaatcccaaatctctcaaagccctttcaaatttctatctgattaactagtccaaaggctaagttggatacagatattttttctcttcaggctgaagaaatcaagactgaaagcgttggttcatgtttactcttgtatcataagtatttttaa

SEQ ID NO: 4307 - DNA, 2300 bp, Homo sapien
tctcgaactcccgacctcaggtgatccgcccgccttgacctcccaaagtgctgggattacaggcgtgagccaccacgcccggcttaagtgaaagttttaacacttgcttccctacagaatgccaggggctagccctactccacctcccaccggtaaggaggactttactgatagcctgctggtgtgacctgcacgtatatatccagatggcctgaagtaactgaagaatcacagaggaagtgaaatttaaatggcctgttcctgccttaactgatgacattccactacaaaagaagtgaaaatggccggtccttgccttaaccgatgacattaccttgtgaaattcctcctcctggctcatcctggctcaaaaagctcccccacggagcaccttgtcacccccactcctgcccgccagagaacaacccccctttgactgtaattttcctttacctacccaaatcttataaaacggcctcacccctatctcccctttgctgactctcttttcggactcagacggcctgcacccagctgattaaaaagctttatcgctcacacaaagcctgtttggttgtctcttcacacgaacgcgagtgaaactttcttctttgtactttctgttatattgccaggtatgtcttacgtaaagaacatggggattttttgttcattttttttcctcagtgaagaatactggttattactcttaaaacgcctttgacgtcaaatagctggattcaaatcatagattcattacggcctcgttgtgtgactgttaggcaagttccgtagcttcttctcttagccttcatttcaaatagaaatacttcattttcaaaagagaatctccttccatggtggtggtggagattctagatggtgtgtgtctaatagctaaaaaaacgtgtggtgctcactcaacaaatcaaaccaatttatcctttctcttagtgtggttccagtttgttgcttctgtcctcatatatttatttaagttttccctagcttatctgctttcaacaaaatgctgtcaccaagactctgtcattacattattttatgcctgttccatgtaggttaagctcccagcaggaacccagcctggcccctggtctctcctgagtgccttctggaatcttatggaaatattttacattctaacctgcaaactgtatataagtgagaagtgtccctgtttccaggacaacctactgtagataatgccagtgttggctgggtgtggtggctcacgcctgtaatcccagcactttgggaggccgaggcgggaggatcatgaggtcaggagatcgagaccatcctggccgtggtgaaaccccgtctctactaatatacagaaacttagccgggcgtggtggcacgcgcctgtagtcccagctactcaggaggctgaggcaggggaatcgcttgaatccgggaggcagagcttgcagtgagccgagattgtggcactgtactccagcctgggcaacagagactccatcacaaaaaaaaaaaaagaaaaaaaaatgccagtgtttcgttttggtttggtttggttttgacagaggttggtcagaataaatatttttgccactctcttcttctcaggttatggcttgcttctatatagtggtgctgttgtgatactccatggattggtttgcagcatatttttaaataattaaaattatcctttgatacctgcaaaggagcaggttggagcctgacctaaccttggacaaggcggggctggcctcatctgcccctcgtgccaaaccatccttcctcaattccagcttgcaaagggcaggactcctcagtgtggcaccacccagattttcaccttacgttgtccttgggacaatctttacaggaaagcaagctctagtgattagatagcctggttatttgcctacatgattttccttttcacagtaatttttgccccttctttcatgtgcagctggtctctccctagagaccaaaggagcactctttttctaagcccaggacctgaaaggcattgcctggcaaaaccttgcaagccagtgtgcgtcacaataccctttgaatgatgtaaaggaatcaggccctgccactctgcagttgatccagcagcaggaggcagctgtacccatcactgtcctcagagtacttttaagaacaaggaggtctctgcccacggcagcccaagcaggtaatagcggttggttgttactgcctgtacctctctctcgcctcatttagaggttgcattactaaatggttgactgcatttcaaatattttagagacagg

SEQ ID NO: 4308 - DNA, 2300 bp, Homo sapien
cagatagtcaccccgagacaggcctgttgagccttctgtagggctcatcaaatgtgaccagacaaataaggagggttttgagttaggtctgctggacttccatcagcaacctcttctgagatcccttccacatatacaaacgcacacaaagacgagaggacagaaggcgttcccaatcagatccctaaccaagaactccgggagtatcccttccaaactatcctcctattctccttctgagaaacctccttgaaatcttcctgattcaggagaagtctcccaaacctggactcttcctactagttagaaagagccaaatgagacccccccaggagccgaacagacaccctgcaatggggctacagacacctcaccatagggctacagaaccagttgggagaaaggaggcgttggcagcacctaggatactcaccaatccagacaccctgccctgcaatggggctacagacagacaccctgtgatagggttacagttaagggacgtctccccggggctatttctccattgcaattaaatccatgcacactgggttggcagcaccccaccagtagagagagtaccagagtcagcccccagtccaagagaactgggtggccgcttgggcaggcttctggatccattgctggaggggggccactgaaccacgagtaggtagccacaaaggcaatgccagacaagcccccaaatttgtaaccgcccaaggggttcaccttgtccactgcctagacagagccaattcatcaagacaggcaaatggcaatagagaaagagtaattcatgtagagctggctgtgcaggaaaccagagttttattattactcaaatcagtctcccataaatgattttaaaaaattgaatggaaatgactagtaaggtgtgcttattcagtatctactatctgcccaacactacctcgggcatttgactagaaagaaatagatggcattcttgtttccaaaatgtttgtgatcttgtaataaggccaagatagacaacaattatcacatagtattataattgtttactaatcaatagaccaaataatttgaatccttgagggctgaattgtatctttatttctcctatgttatcagtgcccaggacacttagttagttaatagcaggttctcaatgttcctgacttaactcattgactagaaataaaatactaaagtgtactctagggaccattagtgaacatacagtatgtacaggcgatttgggagacggtacatataatgtgattccattcccactttttttcgaagcaccttttatcagaattaaacatcatagttaatttgtgttggtgtcgaaagggcattagatgaacagtaggtatacaccagaatctagttacaaatgtaactgagagacagtggaatctacaggaaggacatgggctctggacttagattatcgaagtaccaattcaagcctcactagggcaagttacccagcttttaaatcctgtaaaataaggataatagaggatcacctaccttatatggttgtggggattaaaaaataaagaagtgcatgacggtatctgcatatatgtactatatgcgacataggtaatccactcctcctctctgagcctttgttactactatgtaaaatgaggattaggactttatttgatctattgatttcaggtctcatgtcctttatcttattgccttacttttgaattttgtcttttttgatccctgtccccatctctgttacttccggacttttaatttccaattctacacttacacgttccgattttatgctgtttgtactgcgaaattccacagtttgtattttgtacacattcattccttaataaagacaaatccagacaaacctgcagatggcagacacagtggccccagaatacaccgccgcagcccagagcgttgcatgctgggatttgtagtccgacgctccacacgcgcttccgcgcctctccagtttgaaagcgagaggtagagcgggtaggcggggtgctgaaggagaagcgctctcgaagccccgcccctgaccttttccgctcgcgaggtttgcacgggagtggcgcgccaggccgcggaaggggcgtggcctcggtccggggtggcggccgttgccgccaccagggcctcttcctgcgggcggtgctgccgaggccggcctgcgcggggcagtcatggtacccccttgagcgggctgtggcggagagcggggcggggactggctggagggtggcggcccggcggggcgggggcggggccggcctctggctccttct

SEQ ID NO: 4309 - DNA, 2300 bp, Homo sapien
atgcaacgctctgggctgcggcggtgtattctggggccactgtgtctgccatctgcaggtttgtctggatttgtctttattaaggaatgaatgtgtacaaaatacaaactgtggaatttcgcagtacaaacagcataaaatcggaacgtgtaagtgtagaattggaaattaaaagtccggaagtaacagagatggggacagggatcaaaaaagacaaaattcaaaagtaaggcaataagataaaggacatgagacctgaaatcaatagatcaaataaagtcctaatcctcattttacatagtagtaacaaaggctcagagaggaggagtggattacctatgtcgcatatagtacatatatgcagataccgtcatgcacttctttattttttaatccccacaaccatataaggtaggtgatcctctattatccttattttacaggatttaaaagctgggtaacttgccctagtgaggcttgaattggtacttcgataatctaagtccagagcccatgtccttcctgtagattccactgtctctcagttacatttgtaactagattctggtgtatacctactgttcatctaatgccctttcgacaccaacacaaattaactatgatgtttaattctgataaaaggtgcttcgaaaaaaagtgggaatggaatcacattatatgtaccgtctcccaaatcgcctgtacatactgtatgttcactaatggtccctagagtacactttagtattttatttctagtcaatgagttaagtcaggaacattgagaacctgctattaactaactaagtgtcctgggcactgataacataggagaaataaagatacaattcagccctcaaggattcaaattatttggtctattgattagtaaacaattataatactatgtgataattgttgtctatcttggccttattacaagatcacaaacattttggaaacaagaatgccatctatttctttctagtcaaatgcccgaggtagtgttgggcagatagtagatactgaataagcacaccttactagtcatttccattcaattttttaaaatcatttatgggagactgatttgagtaataataaaactctggtttcctgcacagccagctctacatgaattactctttctctattgccatttgcctgtcttgatgaattggctctgtctaggcagtggacaaggtgaaccccttgggcggttacaaatttgggggcttgtctggcattgcctttgtggctacctactcgtggttcagtggcccccctccagcaatggatccagaagcctgcccaagcggccacccagttctcttggactgggggctgactctggtactctctctactggtggggtgctgccaacccagtgtgcatggatttaattgcaatggagaaatagccccggggagacgtcccttaactgtaaccctatcacagggtgtctgtctgtagccccattgcagggcagggtgtctggattggtgagtatcctaggtgctgccaacgcctcctttctcccaactggttctgtagccctatggtgaggtgtctgtagccccattgcagggtgtctgttcggctcctgggggggtctcatttggctctttctaactagtaggaagagtccaggtttgggagacttctcctgaatcaggaagatttcaaggaggtttctcagaaggagaataggaggatagtttggaagggatactcccggagttcttggttagggatctgattgggaacgccttctgtcctctcgtctttgtgtgcgtttgtatatgtggaagggatctcagaagaggttgctgatggaagtccagcagacctaactcaaaaccctccttatttgtctggtcacatttgatgagccctacagaaggctcaacaggcctgtctcggggtgactatctgctcttcgtcttgcccagagaccccattgtgaattaccgttcggaggtcatccctccccacctggagtggatcaaagacaacagggaccaaagagaaaaagtttttgagctttgccaggctgatattgggagctgaacgaggtggctaatgtgtgttttgttatgtgtgttttgctgggatggaaaatgttaattcggttccccatgcagcccgctgggcagcatcttgcaaattaagaatctcgtctatgtttccataaaacagtaaagggtgattttctcttgtaaagtggcttgaaccccacagctatagcacaagcaagcagggtcatcaaaagccactccattcttctggaaactgcagag

SEQ ID NO: 4310 - DNA, 2300 bp, Homo sapien
acaggcttgatctcctgaccttgtgatccacccacttcagtctcccagagtgctgggattacaggcatgagccaccgcgcccagcctgggcttggcttttaaaaagtcttagctgagatccttcatggaacagagttctatcagagccaatgaaaaaagcctaagtgaaaaataattattcttgctgcactttatgcaaataatcaggccaagtacagtaagactaaagtttattttgtaaacaaatcggttctatcatggtttgttttgaataaaaatggggactggagagagaaaaattatgcttcaaaagaaaaactatagtatacagttgttagctggtcttgaggttttcttgtgcagtttagactacacactaaattatttgtgggttagaagtccccagactaatgctttcaaatctttacttttaaaattgggaattgtactcctcaaactaggactcattatttaccttatagcaggctgttcacttaaacactgtagtaaaactatagatgagagtactaatgtgtttgccatgcaactcttggaaactcaaccaggcctgcatgagttgctcagacagttgcaaagcaattccactcttctcaccttggggttcactcccattcccattacctcccctgtcagcaggaagaagccagagctatcaacggccttctcccatcttcatagcctacccaaagggaaggattgaaaccatctttgcaaaattatgattgagacagtgaaagagatctaactgaacggattgcatcttgcttctaacctcaaagctgtccttgttcattcctgggcataagctgaactaactttgggagaaacttagtttatagtttacacaaagacggtaacaaccctttcccaaagcagacctccttcttgcctggagactagattgcctttgtaggactaacattaaccacaagatttgaaatcaggtttaggagtcatgcagctggaggatacaagattctgacttgccctaaaccgctcctaagatcggtgctcgagagattttacagaccctgcacttgatggatcagctggcaccacccagatcagtaaactggctcatctgatcttgtggccccacccaggaagtgactcagcacaggaagacagcttctactccctatgatttcacccctgaccaatcagcactcctggctcactggcttccgccaacccaccaagttatccttaaaaactgtgctccccaattgcttggggagactgatttgagtaataataaaactccagtctcctgcaataaataaataaattaattaaataaaaatcatttatgctgtgcctggccaggtctggtggctcacgcctgtaatcccagcactttgggaggctgaggcgggtggatcacttgaggtcaggagttggagaccagcctgggcaagatggtgaaaccccgtctctactcaaaatacaaaaattagcagggccttgtggcgcacgcctgtaatcccagctactctggaggctgaagcaggagaatcgcttgaacgccggaggcggaggttgcagtgagccgagccagatcgcgccactgcactccagcctgggggacagagtgtgactctctcaaaaacaaacaacaacaaaaatcacttatggcgtgcctgctccctggaaagcactgccagatatgtatttgctattgcagtgtctatacgcagtcacatgaagatttgggctaaaagacacactaccttaaaagtttcacattctttctggcaaattggatttttctttttctttccttcctccttccttccttctttttttcttttaattggcaactcagatttttcgaagtgtttttgctatctcactgctggaaagcctggttctgcctttcctaaaatctcgtgtgcaggttcgcactccggctactttcaggcctctagggagcccaggtagcggcgcgcacgcgcacgcgcacacttctccctcgctggtcttcaggcccggcccgccctgtccagaggcgccgggacccaggcgcctgcagccgcccgccgggccgacgtcccacgggaatgcgcgaggcctggacgggagtggccgaggcggttgggcggaggcggagcaggcgccatgtcagcccgggaagtggccgtgctgctgctgtggctgagctgctatggctccgccctttggaggtagagagacgccagtcgcaggcgagcgactaggcggggattacccccggcggggcaggcgggagggtcctgctctccaccccatgcgcctcggga

SEQ ID NO: 4311 - DNA, 2300 bp, Homo sapien
cacatattcctaggtcatccaaccaagccccaagtctataaatggccatgactccagtttattcaaatgtctactacttggcagtcatggatgtctaaaaggcatctcaaacttagcatgaccaaaccatagctcttgatttccctacccccagcctgctcctccccaaaatgtttcacatcttagaagtgccaggactatccactcagttccccaagtcaaaaatctagaagttattctcgaatcctctctccctaaccaactcaacatctaacccattagcaagttccacagactttactccaaaatatttaaactctaattatttcggtctccaccactatcagccacaacgaagccacttgctggcatgcacttctggaacagcatccaattggtggacttgattaacttttgccacataaccacccccaaaactttgtgacttaaaacattatttctcacattctgtgggttggctggtcagttcgtccgatccatgtggttgtggccagggaaggatagtccgggagagcttcacatgttcgcagttggttggttgtcagctggatgtgggccgtgacttgaccacgtgtccctcatcatccatcaggctagcccacactcattcctaaaatggtggtcacaggactcccaagttcagcaagagggcaagccccaactcacaagtgttttttaagcctctgcttgcacgatgttaatgtcccacgtccacagcaagtcacagtccagtgcagtcagtgggggtagacaccaccaaagagtataatttgggagactggaaataatttgtggctattttcacaatctgccacactcatctccctatttccacctcctttgcctctctgaaatccattttccacacagcaacccaagtaatcatttttaaacacacgcacactcatttcactccctggtccaaacttatggcttcgtttaaaatacaacccctgttatgaattttaaaatccttccgggatctggcctctgcctacctgcccagctcatctagtaccgtcgactccttgcctactgtgtcccagcaagagtgatcttttgtttccttgaatacagaaaactccttcatgcttcagatctttgcatttgttccctttgactgaaatactcctccccctcatatctgcggggctggctttgtcattcacatttcagcttaaaactcattacagcgatcttccccgtgcagccaatttaagaatgacttcaccttacttaaattttctgcaaagcacataccagtgatattttgtatgtccctgttcctgtttatcacggcattcccgagggcctacaacactgcctggcacataggaagcacataacaaacatttgttgaattaatgcagagctgcatactacgtcccaggattgtgctaagctacggttactgtacccttcccatctcagcaggatagtttcacaaaatgtaaattccacattgaggattaattggatgcacgttacacctcatcccacaccagtaactcgtcttcctctatttccccaccactccccttgccaaataaaaggtgaggaagcatttggaaaacttagggtcatcactctggtcttttgccacatttcgctggcttcatcgagctcaacgcaacatgaactactaacagcagcagcacctgagatgagagggtgaatgaaggtaggagatttcaccgcccgcgggcggcaagggatctgccgcagctctaaagcactgcatgctgggagttgtagtctcccggggaggcctggtctggtaggaccggggcccccgcggcatgcagggagttgtagtcgaagggctgttgagactccgcctctgcacttatagtagcaagggggaatcctcactgcatgctgggaactgtagtcttcctgggtccccgttcctccaggacgcggaggcgccggagttgccgccattttaggtcccgaggtgcgccggccgagaaccagagcgcaggcgggctcagtcctggcgccgggccggccccgcccccggggcgcctggcgcccgccccttgctcaagccccgcctttccccacgtgtctgccgcctaggggaggtgcctcatccggagcgggccgccaacggtccggccccgtccgcacagacgctcctgtcggcggcgcccgggagcggctcggctgcccgatgcttccgccccggctgccgcgggccgggctgtacgcttagtgcccggctcaggccccctgaagcgcccgcgggggtgagagcggcctccggccccgcggag

SEQ ID NO: 4312 - DNA, 2300 bp, Homo sapien
gcaaatcctgccatgattacatctaatcatgccctttgtcattaactcagcccttttcattctccttattaaaaccctttattaggataaacatgtcaggagtcactcaaaccaagcagctgtgttttcaacagtttttttccactgtgctaattcctactcttgatgcaagataatctacccctgatcaagttgtaactaatagtaatggtctgcgtaagacagatcacattgctgatttcattcaatgtatcattttgaattataaactaaccctatagcagaaatgcctttgttcgcttcagctaggcagtctttgtgacctcttaagaatatattattgcagtttactgagggttacccctgaacactatacaccagttttaaccaatacaaagaaaagactcatttacttaaatgtgtcagtatggtggttatactcttttttatattccattttacctgcttccaggtgaagtttagcatattaaatgttggctataaaaatctgccatttaagctctattttacttgaaagtctgcatctaccaaataatcccaggaaatactgaggggctcttgctggaagtttcatgcttgggagtattgctgtgggtgggatcatagtctgtggggttactcttttggctgatttggcttttgccaaatttgcatgtgtatttcttgaatttgtgtgatgtgttactgttcttaaaatgccatcaagttttgaaccacatgatcatggtgggttaggtaagggcaggtgccatcttctccatttttcagctgaagaaactgaggcccaaacctgctggaagtcatcatgctaataattaactcaaacttgaacccaaatgttcttgtatgctagtccgtggctctattatctccctaatcattgctccccttcataaaattatttagtaataattagaaacatgtttcaaaacatgttcatgtaaatttagtaaagctagaatcaaatattaatatattcctgaaaattagtgattgctttttaaataaaagaatgggtctgtgactttccgtactataattgagaaagttaagaatccaaatataatcttatcccttccaacctgataatctacaatattttgtaaaattttgtcactaaaaaactttaaaaattatgtttcaaaatagccactttatttctcaaactacatcattgctttttttgaacaggtctgaattaaaagtaaatttagtatctgcctgttctttcctgtgctttgttctaagaccttttaaggtatatttttaaagtgatgaagttgatttaagcatggtttggaattctttaaatttgtctactaagacttagccactgaaatatctaagtgaaataacagaaaattacaggaattttttatctaaaattattctccattttgttctccagagtttgtatctgatgtacattttgtattggatgtacagtcaaaaaatagtttatcctagctaaaagacttgctgtggtgattggatgggagggtggatgggtatgtgtgttaatttggcagtttatttttttcttacatgaagagaattgagtagtgttttaggtttggtaatgttccaccctactcaaagataaaccaatagtctttatcccagaaaccatgaaactcactgttactagacagtttctccagtaagatatgtgtttgaaattggatcactttaacttagaaagtggcaaaacactgaactgaccacctgcctagactggcatgatatagacaggcagagagaactgtatatacctctgtgtgttgatcactctcttcctgccatgataagaaagggaaatatggcaggcaagaatatctttgagtgtcttctgttatttgagtttcgggtcttttgtgacaactgtttatacgagtaatagctaagtgagatatttgtgaaagcattttataaactgaaaaatatttagatggtgtcactgttatcctcaattattaaagctaattcagcattctggttaaattttatgtgatacatactaaaaatcatgagttttctcttttcagaatttgcttatggtggccatccttaccccttttctggaatatttgaaatttccccaggaaatgcttctgaactaggagaaacatttaaatttaagtaagtagggaggataatttttattacactgtcttaggtgccatagcttgttttcaggtatacagaattcattctgtaaatcaaaacaaacccaagaagttaaaaatgtctctttgttttaattgctgacattttatata

SEQ ID NO: 4313 - DNA, 2300 bp, Homo sapien
ggctgagaaccctgcacccggttgctgttttgacgctcatagattggacacgttgcagttttaagcagttatccctgagtaaaagggactattacaaggttcaaagtccagactaatgcgctctcatcttcaagcaatattaacattccttgacaggaaatttgtagcagagagctaactttgtaacagttttcttttttttttttttttgagatggagtcttgctctgtcatccaggctggagtgcagtggcgcgatctcggctcactgcaacctcggcctcctgggttcaaatgattctcctgcctcagcctccgagtagctgggattacaggctcgcaccaccatgcctggctaatttttgtatttttagtagagacagggtttcatcatgttggccaggctggtctcgaactcttgacctcaactgatccggctgccttggcctcccaaagtgctggtattacagggatgagccactgtgtcctgccaacgatgatctttattataataatagctaatagtataataattaacgtagtataacatattcacgcaattcacaaaacagttttcacttatactatttattgaactaagtggggattcttaaatcttcctactctaaagatgagaaagccaaagcccaaagcagtgaagtgtcttgcacaaggtcagcataacagtaagcagcagagtgaacgacaggttcttgatcaggctctcatcttcattaactgtgtcttggattattgtctgtccttaatgcacaagaatagacacacacacatgcaagttcatgcagacaacctttttcttgttgttgctaaccttttagaatggctcttacaatttccatgtaattacattttattccaacaataagccaggaatccaccattaagggaggttcacgatgttattgcatatcctaccaccaggtgtcgccatcgtatactcacacgtgtttcttccattggtgaattcctaattcactacatgctccaaggagtgatcagctaatttatttattttttggagacagggtctcgctatgttgcccatgctggagtgcagtgggtattcacaggtgtgaccacagcgcactacagccttgaactcctcggctcaacagatcctcctgcctcggccatcctggtagctgggactacaggtgtgcaccactgtggccagccagctgattttaagtaagtgtatcctacagcaggaaacagtccaaagagaagaatgaggattaaaaggtgaagaggaccaggtgcagtgacttatgcctgtaatcccagaactttgggaggccaaggcaggtggatcacatgagcaggagttcaagaccagcctggccaacatggtgaaacctcatctctacagtctaagagcaatgtctaggccaggcgcggtggctcgtgtctgtaatcccagaactttgggaggctgaggcgggtggatcacgtggttaagagatcgagaccatgctggccaacatggtgaaaccccgtctctactaaaaatacaaaaattagctgagtgtggtggcacacgcctgtagtcccagctactcgggaggctgaggcaggagaatcacttgaacgcgggagggggaggttgcagtgagctgagattgcaccactgcactccagcctggggacagagcaagactccatctcaaaaaaaaaaaaaaaaaaaagagcactgtctaaccctttgaatgtgaggacatttttgcttctctatggtggcggatatcttgaaaattataattatgcatggacctttttttttttttttttggagacagagtctcactctgtcgcccagtctggagtagagtggggtgatctcggctcactctagcctccgcctcccaggttccagcaatcttcccacctcagcctcctgagtagctgggactacaggcatgtaccaccatgcccagctaattttcatatttattttttagtagagacagggtttctccatgttggccaggctggtcttgaactcctgacctcaggtgatccacctgcctcggcctcccaaagtgctgggattatgcgtgagccactgcacccagcagcattagtgtattttatgtgtggctcaagacaattcttcttcttccaatgtggcccagggaagccaaaatgctggacacctgtggaaggcatcttagcatcaaggccaaatgacttttcagatagtaagggctgtgctgcaggctctgagatggagtttgatgggcaggatgtttattaaggagtgcccttgcgatcagcacctat

SEQ ID NO: 4314 - DNA, 2300 bp, Homo sapien
agaactgagatttttactttcctttctataactgttaaacaattaaaaatggaaatattatatgcaattttgtgaaaataaaaattttaaaataggccaggcgcagtggctcacgcctgtaatcccagcactctggaaaccagaggcaggcgtatcacctgaggtcaggagtttgaggccagcctggccaacatagtgaaaccctttctctactaaaaatacaaaaattagccgggtgtggtggcaggcgcctgtaatcccagctgctactcaggaagctgaggcaggagaatcacttgaacccgggaggcagaggttgcagtgagctgagattgcgccactgcactccagcctgagcgacaaagtgagactctgtctcaaaaaaaataaaaaataaaaaataaatcatccttatgaaaatacttttcaaagacaaatgaaatagaccccaacaatgtctactctagcaaattttcaaagtcataataaaaataaaataggatgactcggtggtgttttagctggtacttttccagttttccttttacaacataatcaacaatgacttcaaaaggatttccccctccttcatggaatattactaccttcaacacggcctttcagatccggagttcaaagcatagttagcattataatttcagcagagaatccagaattggcaggatatcaccagtagggtgactttttttcttttccctagcaaacagtagagcagtatgtagtttctccccccgcccagacggagtttcgctctttctcccaggctggagtacagtggcacgatctcggctccctgcaacctccgccttccgttttcaagctattctccttcctcaggctgccgagtagctgggattacaggcgccccccaccacgccaggctaatttttgtatttttagtagaggcgaggtttcaccaagttgaccaggctggtcccgaactcctgacctcgtgatccgcccgcctcagcccccaaagtgttgggattacaggcgtgagcctccgcgcccggcacagtatgtagtttctaactacaatttcaaaaacaaaaacaaaaaaaccccccccgcccccgcaaaaaaaaacctcaaaaaaaaaaatgtgacacataaatacacaaccttaactgtgtattttactgggattgtagaaaggtatcaaatgggcatgcaagtaaggtccttacggagtaagaaaacgcccaatgaacagtacttaatatgaattcgacatcgttaacactgagcgcttgctgtgtgccagcgcgcagcataattcgaagcagcatgactttgcacaatgacatattctacaagtccagtttcctaaggagtgcccttaggttacatataacctaaacgtgaaatgtagaagtacataaaggaggcataaagttaaaggggaaaaattataaatactagaaaaaattgcattgtattattttgatggctgaaaaatgggctcgaccctgcatgcacgcgttctccattgagctcgacaatatgcagtattttgtttcacgttatgtcgcagtcttagggaggagtgaaacgtggaacacgacttcacatcaaaaatgcacgttgcagaggcatttttccttcggggacgccggaagacttcgccacacgcgcgccctctccgcggacaccaacgtgctgacgcatgttcattagcgagctgctccctccattttgtccccagtctcctttaggcgaactgcgcggttctatgttaaagccacttagtaatgaaactataaaagggaggaagtggggtgggcgtgggagccccgtttgcgcaaggcaggcgcgggggactaaatggctgctggtgcagagtggggctgccccggcaccaagggctcgtcccgtggccggaaggacaaaggacacttaggggacgagggccgccgagccagcgcggagcgccttccgggtcggtgggctggggcgggctgggggctggggccgggccgacccccgcggtggggcccaccccgcaggacaaagcagcggccccgcccctcggcgcgcgcccgaggctcgtgcgtgtgagcacgcgcgccggagacggttagaaatggcggttggggcggagcagggggctggcgcgggaagcggggctgtctggctcggttacgcccccacctcgccaggaatctaggagtcggtttgttttccgaacccatctccttccgctctcccgcccctgcaggctgtgtgccgagcttggaagaaagtgtgacccgttcgacggaacaaaggacatgacagcc

SEQ ID NO: 4315 - DNA, 2300 bp, Homo sapien
aattgctgcttgtacatttaatagttatgttaggcttccagaatcactttaaataggactctttttaaaagatgggggaagagagtaattggtaatcagatggacagagtctctgtaacagaaaaaaaagggtgttttctcttgcatatctgaggtgaagtgtgtattctgtgtgctcttagcaattggcagtcctcttgcttaggtttacaggtgtatgtgaaaatagacctgagtcttttcaaagttagatcatttttctgatttcatcttttaacttttggcaatacatttgttttgatatccaccctacttggtagagtgtaagtacttccttacaatgttctaatgtaaaacagtgcataggagacctttctgtccttggttgcccaaaatctttttcatttctactaaattcagaaatacatatttttactagcttatgaaaatttggaaaatagcttgacatccttttggataatgaagtgattagttcatatattgaagtatataaaatcaactaggaagtaaattcaagactgaaggaatgggagagcttgtgtgagttttggttgtatcagtccagaatatgtaattttccatttccctgaaaaagacttcagaggaaatttattttccccactatacgctccagaatgtctttcggtgaaatgagagggcttgggctcttctgattctagacgtagctatcagagtttgcttaatgaaatatgggtctactcacaaataaagcaatttaatggtttcgaaagagtaggcaacttgtggtttcattaccatttctgttcatttgagaaaaatcataaaattacagaaaaggaaacattcatttcaaaaataagctttgaatttagatggtaaggcatatatgttttatttcacatgacttcagggtagaagtcaaatgaagaaacatttctatggaaacttaccctttaagaaaccagtatatgcaaagaatgattgataccccctgagggtgtgccatataataggtgactgataacatacaggatttaattcttagaataattaagaacagatatcacccattacattgacctacatttttctaaagtgaacaatagaaacctctctcagaattagtatttgcctattaatgtaatcagtgtagccttctcaacataaaaatgtccttattctagaacatggaagcgtacggcaaatgcaacggttgaaagcactgaaaaatatttgtaaaacatctgtagtgctcacattatgaactttaaatgtaatactttgaaaaccatcttcataatttttttgttctaacagcttcctttttaagaaaacattttaaaacattttaaaatggaacttaatgtgcaaaataagttgtgtaaaataccagtatttgggtggtggaggatattggtatattatattgacctgggttgatgactactggactattttaagatacctacttccaaaacttattttattctagaggaccactaaaaatcagaattacagcaatcattttaatttttctactttccttgttaaggtcttctgcttacccaaagaatagtgtatatcttaacatgacttttaaaggggtatcttgatccccatcacagatttttatctatgaatagaaggattgaaaccctatttgatccctagctctttgctgaaaagtgcataaacaggaatcctgaatttattatatagacctcctcgcattatataatcgaagcaaagggaaaccagcgatggagtagaggtacgtagactaaagagatgcttgcaaatgatggtacctagggatagtcacattttcttgttgccaaactcagacaatataatcacaagtccagagaagagctagttaattttaaattccccgaggtccttttactgagatggaaaagcacaaacagtcaaggaaaaccaaagagggaggggtgagggaaggggaaagtgcataaagcacttaaagattttttaaaagtaggtatgatagataagccacaagaagtttttaagactactaataaccataattctattttaatcagctatttagctggtacctactgctatatcacctagtgtgacatttcggaattaatggaacaatgaaggaagctgtacactggaggttccaggtggtcatggaaggtaggttactcttaaagtttgaaattgtaaagtgtgaaagtctggatagaggggaaggggaacctggactatttttatttttttttgagacgagtctggctctgtcgccaaggctggagtgtagtgac

SEQ ID NO: 4316 - DNA, 2300 bp, Homo sapien
agagccaaatctcctcagccacctgttgaagaagaagatgaacacttcgatgacacagtggtttgtcttgatacttgtaagtgaagctgtttctccccaattatgaaatgcggtgatggtggtttttttttttttttttttagaagtcttaatgcttaagtgcagcaaaacttgggttagtttttttaaaagcaggaagataatggtttacattcagaacctagtagtttaatatttagcacgtcatcagttgtattaagtggattattttacaggctctaggagtttcgtatttttatgacttgaaagttctcattcttaggaaatgtaaaattaatgccagtttttgactagctaacggaaacttgtaacactacctataatttagccttacaggcttctacaataaagtaattcatttttttgtggaattatattaagtgagctatttgggctagttaaatatttactaatgacttctcccattagcacacaagtatattccctattttaaaagattgtaatattactttttcaataactgctcttttgttctcaattccagttcagtagctgctgctttaaacataagttgatttcttccaaagacctgaggcagcagcagtgggctatcactgggccactagctttcttcagcagcgaatggtatcaatggcagtgcagcactgtaaatactgctactttacccagttgggttgcaattgagtgagaaagtattgcaaacctctaagtgggctttgactgtcagacttgttttttttttttttttttttgttacaaaaaaacgtagttggtttagtgatgagaatgtacaactctgggtgtgataaatagaccaaaggataaaaataactgtttcaaaagtatcagctatggtgtcagcctgctgtgttagatggaaggcattggagcttagcttctcatgttttcttgtacaaattggctttattcagatttgtaagagtgtcaatgtaaaactctttcttactggaatatcctttacagaaggttgagatagtcatctgagcctttttaaaagaaaaaactgcaggtgaaaaaggagttagttgatgtgaaagttttagtgaaattctgggttgtataaataagttgctaggaattggcaaggtagtgaagtggtgactcacacaggtaatgtaattgttagattttttagcaaatcaggaatatgtcaatataagtacaatgttgaattcaaacaatctgttgaattaaattctgttgattagaataactctaatttaagaaaaattccaaactgtagatttatttttctctgatcagtaaaaagaaaatgagttccagcttgactttagctgttcaagtgagaagtctgaggaagtgcatgttaatgagccagtgacccataggtagctgggttaaagacactttggatttggataatccgggaagcaattaatccctaattgttgaacaggcagtcctgggtaaagaggacctaaaatgctgcactattaacagcattagacggccaggtttgtacttcatagttttaggctgtcttcttcacaagttttagaaaaagaatttaggagctagagccctggtgcaggatcaacagcagctcatactcctattttaaaataatttggtcgtggcctcccttcagttttaatgtggcactggtaaatctacctggttctggcatgcttcactttgatttcctgctatcctctactgcttgcctctaaatcaaggtaaagagcagagcaggtatgtattaatgtcacattgtcttgattattttaaatacttaaaatatacatgttaaaccttggtattagtttcacaggcagtttacttttcagtacataatttaacaggagtgacttggtgggagtggggctttaaactgaaaattggaacaacagcatgatgtggagaaaagttgtgcagcattaagaagtacatgcaaaaattaagtaaccaagttttgtctacatagcagatatgtttacattggatgtcaaaagtaacacagtatttgatataattacagataattgtgatctacattttaaaatatcaagagatcgtctcagtgcttcttcccttacaatggagagttttgcttttctttgggctggaggaagagcatcctatggtgtgtcaaaaggcaaagtgtgttttgagatgaaggtaaatgcaattttatgatttgtttgtttgtttgtggagacagtctcactctgttccctaggctggattgccgtggtgcgacctaggctcactgcaac

SEQ ID NO: 4317 - DNA, 2300 bp, Homo sapien
atcatgcagtgagtcggttgaactgaaaggcggtttccttttcctccatttgctcagtcccaattggaagcgcactgcgcggcctccaccgcgctctcggcccgggttcggcgtgggggcggggaggtaagtacggtaatgggcggggccgagcgcgggcgcgctccggctttcctcctgcgcagtgctcccgtcagcgcagggggcggggcgcctatattacgtgcgcggcgccgctcctgcgagaggacgttgcgtgctcgctcgcgccaggcgagtctccgcgtctccctcgcgaactcggtgaaaggaattggcgccgttcgacaccaggcggatccgctctgcagcacgaacccatctccagccgcagccgcagccgccgcccgggccgaggagcagccgcagcagccgccaccagtggccgagtgagcggagccgagtttgaggcagcgcctagcggtgaatcggggccctcaccatgagttcctcgcctgttaatgtaaaaaagctgaaggtgtcggagctgaaagaggagctcaagaagcgacgcctttctgacaagggtctcaaggccgagctcatggagcgactccaggctgcgctggacgacgaggaggccgggggccgccccgccatggagcccgggaacggcagcctagacctgggcggggattccgctgggcgctcgggagcaggcctcgagcaggaggccgcggccggcggcgatgaagaggaggaggaagaggaagaggaggaggaaggaatctccgctctggacggcgaccagatggagctaggagaggagaacggggccgcgggggcggccgactcgggcccgatggaggaggaggaggccgcctcggaagacgagaacggcgacgatcagggtttccaggaaggggaagatgagctcggggacgaagaggaaggcgcgggcgacgagaacgggcacggggagcagcagcctcaaccgccggcgacgcagcagcaacagccccaacagcagcgcggggccgccaaggaggccgcggggaagagcagcggccccacctcgctgttcgcggtgacggtggcgccgcccggggcgaggcagggccagcagcaggcgggaggtaagaagaaggcggaaggcggcggaggcggcggtcgccccggggctccggcggcgggtgagtgctgcgttgtacgttgcgcgcggcgggaggcccgcgcggggtggggaccgtgccccaggcctgccggagccccgcagggggagggagccccgggcgggagggcgccgcggtgagggtgggggagggggcgcggggaatcccagattagccgagaggcctcgggctcggggcgtgtgtgtgcgcgcgcgcgtgtgtgtgtgtgtgtgtgtgtgtgtcggcggtggcagcgcctccattatgtggctcgagagccggggggagctgcagctgccgctgtagggggaggagccgcgggcgggcggcgggagggagcccggtcggcccgcggtggcgccgtcgcgctgcgtgcgcgcggtgcgggcacatgtctcggggggaggggagaggccccaggtcccggggcgggcgcgctttggcggctcctcgccgctgtattgtgcaaggagcgcaggggctcggcgtgacgtcacttccggcgggaggagccgggcggggcggggcggggggcggaagatcagtacaatgcggccgcggggagcgcgggcccgcgggggaggggagcgccgccgcgccgggctcggcccctccccctctctgcgctctcttcgggatacacgtgggcttcgggcctgggccgcgcagtttttctttggctttctcgaatcatcgaggagactggcaaaattagtaatgtctttagactgcgtcactagcgccaatcgaattcgtagttgattgttctttgaattcacatttgagtcctcggttaaaacctcagttaaaaagcaggataaagtcgagctgctttggttctcggaacggaaaagcgtttttttgttgtttagaggcttggcctttatggggctcgtgtgtgttttaggggacggcaaaacagaacagaaaggcggagataaaaagaggggtgttaaaagaccacgagaagatcatggccgtggatattttgagtacattgaagagaacaagtatagcaggtataggatgctcacctagttttactcatcccttattcgttcgttgatcggaaagctgtatcaggagacaattctgtctttcagagccaaatctcctcagccacctgttgaagaagaagatgaacacttc

SEQ ID NO: 4318 - DNA, 2300 bp, Homo sapien
tgaacgaagacaaaatttcaaattccagtttgtggcttattcataaccttcaaaattataaccaaaggctaaaatgagtttctggcactgtttggaagtttctattttgggggctatcctcaccacttaacttgaactggggattatcagtagtactgtacatagtccattaatttcaagtcaaatcatttcacaagtgttaatatttcacgtatacatgactgcaaggtatggtagaatgcttcataaaagctaccgaaaataaacttcaaaaataaaatgtatcaattagttaaatcatattagcctatgggagaaatttcaatgtgtttacttccaaatttcaaattaataatggggcaatattattgtgccacctagagcaccaaacagtgggtataaaccatctccttagtcagatggaacactggctggacactgcagattatctagggtttaaaatgttaacttctatcacgaatctaaattctgacttccctatctaaaacttcgagacatcacatcttttctttaaagagaaaaagtaaacttctaacatataaaataacggatttcaagagcgatagtccatttttctttttacaaaatcacagcccttgatttttcgtaaactttaagtttcagaataatttggtcaagagtatttctacaggaataggaagagaatcaagtgggcctataatcaaagacctagttgggtctcaccctcacggttagctactgggacttcgtagctgatgaccaggtcctaaagtggacagaacaagtgttactggaggtccgtctttgtggtagctacagaaaacttggaaatgcaattctgaggtttattcagggttattaagagcatgagaatagctgccctgcaaaggcaggtacactaaggtttgcagtatggagtagtaagcaaagcctctacttcccaggccccgcacccggggtgtggaacagacaaaagaacggttctgcccttgcccttctcgaacttaaaatccaattcgcaaggcaggacttacacaaattaaaccaaatacggtattatgaggaaaagagccgctgcgtgtaacagttgccaatgtatgctataccagtcaaaactgaaatacgatttgaaggagttttaaacgaagagctggagaaacacataagaaggcagatctaagatggaagaaaaggcggattcgggttgaaacgccaagttgaggactgaagaaagcatttggataaagcagcctccaagctgggaaggagaaaagccaaacgagtatagccaccaaagacccagaaaggccaatatatcatgcagtgagtcggttgaactgaaaggcggtttccttttcctccatttgctcagtcccaattggaagcgcactgcgcggcctccaccgcgctctcggcccgggttcggcgtgggggcggggaggtaagtacggtaatgggcggggccgagcgcgggcgcgctccggctttcctcctgcgcagtgctcccgtcagcgcagggggcggggcgcctatattacgtgcgcggcgccgctcctgcgagaggacgttgcgtgctcgctcgcgccaggcgagtctccgcgtctccctcgcgaactcggtgaaaggaattggcgccgttcgacaccaggcggatccgctctgcagcacgaacccatctccagccgcagccgcagccgccgcccgggccgaggagcagccgcagcagccgccaccagtggccgagtgagcggagccgagtttgaggcagcgcctagcggtgaatcggggccctcaccatgagttcctcgcctgttaatgtaaaaaagctgaaggtgtcggagctgaaagaggagctcaagaagcgacgcctttctgacaagggtctcaaggccgagctcatggagcgactccaggctgcgctggacgacgaggaggccgggggccgccccgccatggagcccgggaacggcagcctagacctgggcggggattccgctgggcgctcgggagcaggcctcgagcaggaggccgcggccggcggcgatgaagaggaggaggaagaggaagaggaggaggaaggaatctccgctctggacggcgaccagatggagctaggagaggagaacggggccgcgggggcggccgactcgggcccgatggaggaggaggaggccgcctcggaagacgagaacggcgacgatcagggtttccaggaaggggaagatgagctcggggacgaagaggaaggcgcgggcgacgagaacgggcacggggagcagcagcctcaaccgccggcg

SEQ ID NO: 4319 - DNA, 2300 bp, Homo sapien
atttcctctgtttgtgaaaaggatagtatgatgatggttctttgagcagaaattgtttttctttcaaatgttgtctaagacagcacaatgtaatagaaagcccattggtgtggggggtgagggtcccagcttcctgggcagtaaaatgaacaggactgcagatcgatctccaggccccatccagctctaaagttctccaaaacttttggagataaagccatagaactttcttgtgagcatcaaaagttgtatttcatgtttatttttgcaactgacttaatgttccaagagtgactgttacagatctactatatgtagatatacaatctttgttttcatagtttagtgttttccagtaaatgaaatttgttttcatataactaatatttaaaggtgtaaataatatctaggacacataaatttaaggaaccatcataattgtatttaactctgattcattaagggattagttatctagtttgtgaacatgtaaaccccctgtagctctcttcccatttctgaacgaagacaaaatttcaaattccagtttgtggcttattcataaccttcaaaattataaccaaaggctaaaatgagtttctggcactgtttggaagtttctattttgggggctatcctcaccacttaacttgaactggggattatcagtagtactgtacatagtccattaatttcaagtcaaatcatttcacaagtgttaatatttcacgtatacatgactgcaaggtatggtagaatgcttcataaaagctaccgaaaataaacttcaaaaataaaatgtatcaattagttaaatcatattagcctatgggagaaatttcaatgtgtttacttccaaatttcaaattaataatggggcaatattattgtgccacctagagcaccaaacagtgggtataaaccatctccttagtcagatggaacactggctggacactgcagattatctagggtttaaaatgttaacttctatcacgaatctaaattctgacttccctatctaaaacttcgagacatcacatcttttctttaaagagaaaaagtaaacttctaacatataaaataacggatttcaagagcgatagtccatttttctttttacaaaatcacagcccttgatttttcgtaaactttaagtttcagaataatttggtcaagagtatttctacaggaataggaagagaatcaagtgggcctataatcaaagacctagttgggtctcaccctcacggttagctactgggacttcgtagctgatgaccaggtcctaaagtggacagaacaagtgttactggaggtccgtctttgtggtagctacagaaaacttggaaatgcaattctgaggtttattcagggttattaagagcatgagaatagctgccctgcaaaggcaggtacactaaggtttgcagtatggagtagtaagcaaagcctctacttcccaggccccgcacccggggtgtggaacagacaaaagaacggttctgcccttgcccttctcgaacttaaaatccaattcgcaaggcaggacttacacaaattaaaccaaatacggtattatgaggaaaagagccgctgcgtgtaacagttgccaatgtatgctataccagtcaaaactgaaatacgatttgaaggagttttaaacgaagagctggagaaacacataagaaggcagatctaagatggaagaaaaggcggattcgggttgaaacgccaagttgaggactgaagaaagcatttggataaagcagcctccaagctgggaaggagaaaagccaaacgagtatagccaccaaagacccagaaaggccaatatatcatgcagtgagtcggttgaactgaaaggcggtttccttttcctccatttgctcagtcccaattggaagcgcactgcgcggcctccaccgcgctctcggcccgggttcggcgtgggggcggggaggtaagtacggtaatgggcggggccgagcgcgggcgcgctccggctttcctcctgcgcagtgctcccgtcagcgcagggggcggggcgcctatattacgtgcgcggcgccgctcctgcgagaggacgttgcgtgctcgctcgcgccaggcgagtctccgcgtctccctcgcgaactcggtgaaaggaattggcgccgttcgacaccaggcggatccgctctgcagcacgaacccatctccagccgcagccgcagccgccgcccgggccgaggagcagccgcagcagccgccaccagtggccgagtgagcggagccgagtttgaggcagcgcctagcgg

SEQ ID NO: 4320 - DNA, 2300 bp, Homo sapien
agtagctgggattacaggcgtgagccaccacattcggctaatttttctatttttagtagagatggggttttaccatgttggccaggtgggtctttaactcatgacctgaagtgatccacccgcttcagcctcccaaagtgctgagattatgcgtgagccaccgcgcctggcccagtacttttactgatgaaaaatgtaatgtaaaaggaaggtctgtcttacatacaataagtgctgaatctgggtcttttttaaaaaaagtcattgagaagacttactcctttcttaagttttaagacatttattattgcaaacagaaaaattgtactagataccggggatatataaacgaataatgccgtttctgtcttcaagatcttactgtttggtaggtggaaataaagtgaacgaacgaaggcactgcaaatcaatgtgggaggctctataagcatggggccacagaggaaaaggctgagagggaaagcttcaatgactaggtgacttcaaaaaggtcatcctggccaggcacagtggctcacacctgtaatcccagaactttgggagggccaggcaggcggcagatcgcttgagctcaggagtttgagagcagcctgggcaacatggggaaactctgtctctacaaaaaatacaaaaactagccagacatggtggcgcgcgccgctcctcccagctacttgggaggttgcggtgggagggtcacttgagaccgggaggcggaagttgcagtgagcagagatcacaccactgcactccatcctggacgacagagcgagaccctgtctcgaaaaacaaaagacaaaaacaaaaacaaaggtcatcctgcaggacaaccaggagggcacaaatgtgtgtctgtgggaagctgaaatgttggcgggggaaaaaagcagggaaaggcattccagaaaaaggaaactgtaaacagcacacgaaaaagcatagtgaatgaataggaagcctgagaccaaacttagggtttcctacacttatttcaaagcccttcattatctatatggaaagggggagtctttaaacacaaatatttagatcatattgactgagatttagatataaatgaatgctaataattacttttcgttattttggggtgttaaacatttactgtacaagattgtattcgttttaagtatcttctaacatgagccattttgtaatgattcagttgtttatattcaatttcaagtagaatgctgatcacagcgccaaatgggtatcttctacagaaaaagttattttaataaagaaaaatatagtcagttttaggatttcctgagagattatagaaacaataaaagcattaaaactgttaagtcattaaatacgagtaccttgtattttgaaggctcttaaaatttagtttataaattgcttttacataacatatgcactgaaataccacttaagattagttttgaaaataggtgttcgtttcaaccacatcattaggtattttattcaaagctctttataaaaagagctttactatgttccagtatagtaaacttatccagaaaataagacaaaaatttaacttcatgctatagctgcaaagttttcggaaagcgggatttaaaacttccattgtaactttaactagcggtcatgtcaaatttcacaactaagaacattttaacgcatgtaatactgagcacaacatgggcacgtttttgttgctatgagaaccttctattttgtattagacattgcagccttgacgacgcaatgtttgtgctattttgcgcatgttttcctgcagctattcctctcctctagcaatagtcgaatggctctggtttcctcttgcgcccggcccagtttttccgttttagcttcggttgtcataggctgtgctgtcgctttctctgggaaaggacggtgaagactggacgggagaaaccgggagggcaggcgcggccgttctgcagcagccgggccgcttcccggcgggaggcgggctgcgaatgggaagcgggaggaggaggccgggccgcgggctggttctatcacccccttgggagcccagctcttcacctagctctccggcgcttttcaaaatctgcagttaacaacaaaaatcgagcaacgccacgtcgcacaaacaggacaggagggggcgaggggtgtgtgcgcgcgcgtgctgtccccaaatggatgagaaataagggaaaggaggggttggggaccgtgtgatgaagcaacatgctaggcccgggacaagtccggctccggcctcgggtctggagggacaaggccggggg

SEQ ID NO: 4321 - DNA, 2300 bp, Homo sapien
cagtccacactaacccatgctgatagaaatcagaacagtagtttcttatgagaggtggggattgcctgggaaaaggtagataaccttcaagagggacaggaatttatagatgttgatcgaggtggtggcctacgcagagtacacgtttgtcaaaattcatagaacttaacaattaaaatgtgtgcgtttcatcttatgtatatacattttacataaacatcaatttttgaaagcttcttaaaaactcttgcagagcctccggttataaactttaatcaacagagggcgctcggagcccaccaaacacgctttgggcccccagctacttagaaatgcaaatcagagcagctctgggctcccccgtctccgaggtggatcgcgcagctccccaacactccccctcgacaccccaccttccccacccgcggcctcgccggctcgtttcaccacacgctgctttttggctgataagcggctcgtggccaatggcgatgatgtgtttcgcggcacctacgcgaaatacagatgcgggtgggagctggcgcgtgctgcctggaggtgtacctgccccctaaggtcccctattgataggatcgcttttaaattggaagtgggaacgtaacggaaacgtccactctgttcttgccatcttccttttgacctttttacctcgctttggtggctgtgaaatattcccgcgcaggagctggagcggggaggagtggggcagagcacgggaggcacagaagaaattgtccccgaggaaggcagagtgggggcgtggccccaggcttccagaaccccgaacctttgtcttcttgccccctcctgcgtcgtccacagctcagaaggaagtcagcgaccagaaagccctgaacgtccttcgcgccctcgcccacccccgggctgggtctccccgcgggcgcggagatgccgttacaccccacgtgatccctgcgcccggccagtccttccagaggcgtctcgcggggtgttaattaaaggtcacaacaaaacagacctgctggctcaccagaagaaatgtcctcccgtgaaatgaaaaatgacaccccagagcagccacgtgtggagcctggcatacgccggcttcctgcgctcctgggcgctgcgccgggggactggggcggggggcgatcggagagggagcgatgacggggtgctccggagaccccgcggggcccaggcgcaggaagaaacgggcggcggggggcgaggggcccgatcccacgcaaggagaggccaaggccagctcgcgccacaccccctctccaggccagagtcgtccgcgtgcagcgcggcgaagccctcagtttcccctgcccggcagcggcccgctgggtcaccaggctcacctgtcccagccccgggcggcttagtccatcacagaccggggctcgggcgggcgggggaccaagggccctagtcctgcggctgcggtcggggagggtggccccccggccggcccggggtcggtagggcaattccagaaaaggtttgcccggcagctctccgagaacaaagggcggggggaggacccggcatgtttgtggacttgtttgtgactcaatcccttttgcacggcgtttcacagacagacctgcaagccttgtcaggaagagaaagaacttgggggcgggggaggctggggcaccgcatttccgtccagccacgctcgctcgcgcggcccccgggctccaggctcgcgcagcggcgtttcattagagccccgggcccgggccgcgcgccaggaacttccccgcacgcggcgagatcgacgatcccccgcccccagccccagcccggctccaggcctcgcaatgtcaggcacgagcgccgccacataaaatggatcccggccggcgcggcgagggcggcaggttcccgaggctcctccgcgctgcgcccgggcgcacacgcgcgctgtgaccgccgaccgctcccgggccacgcggagccgcccctctcccggccctcgcgcaactgtcaggcgaaacgggccggcggatattggctcggcgacacgccgaggctcctccccgagtctggatctttatattttgggagaatttctttgaactcagttaccaagctcggtgaaggagacaagttcccacagctgactcggctcggctctcccaccttcccggcagcggccgcgagccctgattgtatccctcgctttcctcgtgggggagcacggactgacttggctgaagaaaatgccagttctgtggatgtggccgtgacaagaggacgtgcggctggaagaggcagaaggg

SEQ ID NO: 4322 - DNA, 2300 bp, Homo sapien
cccaagagtcaagagtgtcttgttctgaccgtgggttacttctctgtgtctgtctgagaggggaaagcattgtcatcacacaggaggtagcaaatacctacctctttttttttttttttttttttttttttttgagacggagtcttgctctgttgcccaggctggagtgcagtgatgcgatctcagctcactgcaagctttgcctcccgggttcacaccattctctcgcctcagcctcccgagtagctgggactacaggtgcccgccaccacgcgcagctaattttttagtttcaccgtgttagccaggatggtctccatcttctgaccttgtgatctgcctgccccggcctcccaaagtgctgggattataggcgcgagccactgcgcctagtctgctctggtttctaatagaagtaggtatttgcagctaggcgcggtagctcatgcctgtaatcccagcactttgagaggctgaggcaggcagatcgcttgagcccaggggtttcagactagcctgggcaacatggagaaactccatctctacaaaaaatacaaaaaattagccaggtgtggtggcacatgcatgtagttccagctactcaggaggctgaggcgggaggatcacctgagcctaggaggtcaaggctgctgtgagctgtgattgcaccgctgcactctagcctgcgcaacagagtgagatcctgtcccctccaccccaaaaaaaagaaaacaaagaaagaaaccagaacaccaggtgtgtcttcctgagttttcaccctgatcactgcctctcctgccagctccctgctttccagggaagagttggctgcgccaggggacagagcactgactcccacccaggccactgggacagccatatctaggcctcaaaagactatgggggttcctagcaaattccaccttatttgacttctccgaacagcccaaactctgctgggcttcttcccttgccttcataggagacttgatgcagggggcagaggtgagagcccagggggacagctggccttcaggaggggtccttgctgggtgtttccaggagagcttcggcctctctctccgcaccatgttccaggtggcgttgaagaccagtgggtaatttggggggtgtgggaacagaaaatcagaggaacagctagtgttttcttccttgagacttgtttcccctttgacagtttagatggatagtaacaataatcaccgataggaaagtcatcctgactggggtctgaagccttccgtggatgttcccgtctaattctcacagtaaccctgtgggcttttaaggtaagaatgatcactgactccacttttcaccagtgtcggaactgagacttggagaggttcagtgaccagacgatggagtccagggtccagggtccagggtccagggtccggggtccagggtcttcacagcctgtgctccctccccttccgtttctcctcttgctttgggtttgggaagcctccgcggggtgaggtggagagtgcgcctcactagtcaggcaccccgaaggagtaaggcatgtgactgtacaatatcccaataaagcgtgtgggtggtggggatgggtgggcgaggttgagatccattctttaaggcattaaatactgtctctttcaaaaggaggttgtgctgttttgcagctggttttctttaactaccagaaacaccagcattgtttcagaaagccacagaatttccaaacacaatgagaattccaagaggatggggtgtgggttttgggggctggggtgggtatggacaggcttttggggagggaagaccacagcctgagtggttttgtcccccacgggtaatgaatttcacacggctccactgtcctcagttttatctgcaggatgctcaagttgaagcctgggaaagaaggggatcgggaaggagcaggccccagggattacagtggccataaaaaccaaacagtgacccaggacagccccatttggtgtgacctctaatgactgccttccctcagctggtgtcagaggaggcacatggtgtcagttaagttccaaagtgacatttgtataaataagtttgttaatgggaaatgagtttttttttctccctctccaatcttaagaaagtgtgtagcctatatccaaatatttctgaaagagcatcaacagtaacggcaaacaggggagctaatgtcaccaacaaaacttgtgaggtcaacccaaagaaagaagggaataaatgagcaaaactttggaaagagtttctcacatgctgaaaacactcagcaatatttc

SEQ ID NO: 4323 - DNA, 2300 bp, Homo sapien
catttaatctttacatcagcagcaggggataagtgttatcccagtcttactgatgaggaaaccaaggctcaagaagattgaatgatttggccaaggctgtgacactagaaaaggcaaagcttggactaaaacccaggtcttcagaattcaggtccagagctctggccagtctgttgactccttcatcagctcccaagatgaagatgaggagctattttctgttttgagcctttgattacagcttgttttgtaatacaccataaaggttgagaccatgtttgtttctagcacttacaaaaagacctggcccaattagacacttaataagtgttttataaatgaatgaaattagtgagtgaagaggtaaatgaatggatatattgaatgaatagattaactaggcaaaaacctacctgtctgcatttatattggaaagcactacatgaaaaaatgagatttgaaagttttagaatgtggctgtgtgtgtgagagagatcgtccctcaatctttcatttcttctgattgtctatcagtagggaaggtccaagtcccacccatactgtgtttctcaaatattctcaaattgtattgaaacctgtaaccaaaaccaaagttaaaattgattttaaagtgtcttctaggtttttattctaccattcctacctccagttttttgtttgtttgtttgtttgtgttcctttttgagacagagtctcattccttcactcagactggagggcaatggtgcgatctcagctcactgcaacctccgcctcccaggctcaagcaattctcctgcctcagcctcctgagtagctgggattacaggcacccaccaccacacctggctaatttttgtattttcagtagagatgggttttcacaatgttggccaggttggtctcaaactcctaactgaaagtaatccatcaaccttggcctcgccaagtgctgagattataggcgtgaaccactgtgcctggcccacctacttccagtttaaagtcacctgggaaatacttggagtacagttttgtcattttaatccttttttggaccacaacaatcactttacgaacatttttttaactttttcagaatcgattcaaggaaaagtgatagaggcaggtggggacggggaggtgagttttcttcgcatttttgggaatctcaactcctgagcctgtcttactagtacgggttccccaaccccacgactagaactatcttagtggtttcttcctaaagagatgtacacgtgtgtgtgtgtgtgtgtgtggtgggcgtgggtgggtgtgtagagtagggaaaaggtgagaagtggctctcttgctatagacttttgctttttactcttttccactgagtctgctcatattattcatacgattatcacgttagaggttttggagttgtagtggctatcgttttaagtttcttgtagaattaatttatataagtagacaatgtatatgaattgattgattcaaatctgtatcttacaggatctgttaaagatagtcagaaggctgtcttttaaaatgtgaggacaaatcagtttaacagtatagcagagaagtacagctgtgctctgtcaaactctaggctcctgtgtgttggaatgactagaggcagcagggagaggggtcctggtttactcaccccctctccctctttcacatactagcttgggcttgttgtggttgaggtggtgtgggaacatctagaaggttcattcaaaaaagacagcctcagcctttgctcagacgctcaagatgttctgccggctctccctaccatgaaagttctctgagaagccagtaaagatggcagcctctaaagaggttagctttatttggtggaggggcggtaggggtggcacacaccgaggaagattcggatcgtggcacatccttgtggtcaggcccagaaatcctcattgccctgcagccacccaggtcatgattcatgaggtgggggtctaagctgagaatggctggccggttctctgacttcgtgggtgtgtaatagttggttgcaactgacttctcaagaatgacagttactgactggagctggcagagaggtgtggccaagttcctggagaaatgcttcctgctcctcccgccctccccaccaccatcctgctgtatttaaagctgctttggtgatgctttgctcatctcagtgaattttcagttcagaccttttcactaaggatcattatggaagaaagaggggtaagaagtgtggctgagtagcctaggattaattcatcagtccccaaataagcaaacac

SEQ ID NO: 4324 - DNA, 2300 bp, Homo sapien
tcttttcattttccactaagtcataactctctagactaaatcctattaaagaaacatttaaagtgtttctttactgtgaagtgtatcatgcatgaaaatagtgtgtgaaatggaggtagatgttcagtttaaagaccaatagtagagcaaacgtctatataccaactcctcaggttaagaaatcctcttgtgatatatttatgcacgtggagtagctactttttccagaatttggggacatgtaatgatgactgagagatcatatagtctacataaaacagctcatcatcctagaatgagaaagagagaaaccagccaataaagaagggcagtgtgtataggtacttacaatgagaaatacaaacaagatgggattggagccgttctctatgtctgggagagttagaaaagtttccaagaggatgagacttttgaaaagtttccaagaggatgagactttttaagggatggtttgcctgaggaagatgagcgttccaggtaaagggaacagcatagcacgtgtagtgattcttctccctcctcattcccctctcaccattctgaccattcaccttcagtttcgtttccactctcctatcctccataaatgttggtgttcccataggtgttgcattaggatctcttctcacgtcattcaattttcatccattcacttgctcaatgtcaatgaagcaatgggtctccagaaactcctgcctgcagaactatctgtggagcttggtaaaatgcagatggtcccaccagctcaatcagaatctttggggtagggtccaggtatctttagtgcagatgactgggactccacatggagaaacacaggtgaacagggagggttggagagaccactcaggaatcagtcacaggtgaccttgtgcttcctgctaccatggctgcccctcccagcctgcctcacctgtgcctttctcccttctcccttcctgccttcagctcctctgttgcttcttcttccttaaacatcttcaccggttcctgtgctattacagagccccgtctgtgggtctcatgtctctgctccatgccacgccctcccttgggcatcatctgggctttggctgggtctgtggagggtcctgggctgcagtgccatgaacagtggagtggggcatgcgaagttgacagtcacactgaaagctcctgcctcgcctctctaccttcttctcttttgggggtttctttcctgaggcagggaaaaagaaacaggaacccagaccaaactgaggaaaacacgatcagagatgagatggggtcagaggcaaagggctgtttgttgggtttgcactttcattactgagagcattggaatagttttaaggcgtgcaaactgtgagactagacaatttcacttagaaaatgaaacgtgcatgcagatgttattctcatggggatatatatctgcatctgtttgtctacaagtgttcccttgcagagtcacagacatatacaaaacctgggttccatcagctttgtctgcacatacgtggctaaatgtgtacagggatgtacaattaaagattttaaacacttgattttgacagtatattttgcagctgctgtgccaagaaccctaagctactgtgggttaattggagttgtagcaagtatttctttctcggctgtctcttttagcagagcttctctctctctctctctctctctctctctctctctctcttcccctctctccctgtttcacccctccctgcctgcctgcctctgcccctccctccctccctccctctctctctctgagatagcagacaccagagtgaaactggtgcagcttcctttgagaagcgtgcttgcatgtgcggattggcaggattgtgtgagctcctctcccatccatgcactgttcttggagggaaatgcaatgttggagcaggggctgagctgcactgggaaggtggctgggagctcagtgaggccaggatcatggtttagccaaaggctggaatcacaagaatgtttcaccagggtctgctctgagagttctcagacccccatggattttagaattttccagcctttcctccttcaccttcgcacaattttactttctcctgagatggccccagatctgcaagagacatttgagagaagctatttattagcagacgtgaagaaatggattctgcacttgattatttagccatgacttatcaatgatgatggattggaaagcagtgtaagtaacgcagttatatatgttgctggagttaggtggtctgttttcttgctattttttttttactttaact

SEQ ID NO: 4325 - DNA, 2300 bp, Homo sapien
tggggctcacttagcttcttggatacatgggtttatgactttcattaaatgtggggaagttttagccattatttttctcaaatattttatttgtaccacactctgtcttctcctttagggactccaattacacatagcaggcacttgaagttgtcctacagctcttttttttctgtgttttatttgttgttttttttccctatatattttattctgaatagttttattgctagatcttcaaatttgctgatttttcattctgcaatatctaatctgccattcatctcatctactatattttttttatctcacacattgtagtttttatctctagaggttcagttttgtgtctttttaaatatatattccatgtttctacttaactttttgaacatctgaaatacagttgaaataactgttttaataaatagctgcttctgtcaattctaacatctatgctagttctaggttggtttcagttatctcttcattatgggtttcattttcccgagtctttactttgtaaatattcttaagctttgttttagaatgcagttgcattacttggaaacagtttgatcatttttttgttttgcttttaatatgtgttaggtgggatcaggtcagtgttcagtctgtggctaagtatgggaaagacttctgggtattcaacccaatgccctgtgaattgtgaagttttccaggctggctgttaggaagtggcactattcctggctttgtgtgagtgctgtgcaccattatctccaatctttttaggtagttaatttctgagccttgaatagttttctcacatgaatgttgtgttagtcccttttgcattgctgtaaaagacacctgaggctgggtgatttataaagaggcttattctgctcacagttctgcaagctatacaagaagcatggcacccagcatctgcttctggtgaggactcaggaagcttacgatgatggtggaaggtgaaaggagagtaggcgtgtcacatggcaagagagagcaggagagagaagggggaaggtgccagcatcttttaaacaactagcttttgcatgaagttaaagagcaagaactcactcattaccatgggaagggcactaagctgttcatgagggatccacccccaagacccaaacacctcccaccaggccccatctccaacactgaagatcacacttcaacacgacgcctgtgattctcagtgttggaacctgctgggaggtgtttgggtcatgggggtggacgacacatctccaacattgaggatcacatttcaacatgagatttggaggacacaaacatccaaactacatcaggtgtgctgatcagtactcagctgaacacttgagggaccttctgcaaatctctagagctctctcctctgcagtactctgtcttgtaaattgttgccaccttggtctccctgtacttcagcagcagaggtattcatgggcaagttgcttaagttttctgaacagttattttctcatcaatacagaaaggataatagtatttagcttatgattctactgtgggaactgaacgaaactgatgtttgtacagcacctggcacttggcagatactcagcaaatatttgggtcttccctgtctctgcacctggtcgttacttcttcctgatttttgtcttgggtttgcaacctgattcctggctgagctttaggttggtttctgtataacgatcaaccaaagcaggtaatcactcatgagccattcaggttttaacttgatgagtttcagaattctgctattcaaatggcatttaggtagaaacgtatcctcctgtaatttgacatttattttctccaaaatctcattcagttcaacctgcaagaattatttgaattcacttatttgtagtgtgaatgtcagtaggctttagaaggtcagtggtgcgtggtggaaagaatttaagaggaccaatgctatttgcaaccccagcgtgatttttctggggtttcctagtaggtcatgaacgtcaaccttttacttccccttctcattttgcctcagatttcccaaggagctacatgaagaacagatgagtgtttgtcagaacttaaccatttctcttttatcttctcccctgtggtagtgtctggaggtcgcagccgcctgcatctcattgatctcggcagctgtgtgaaagctcttagcaaaaatcgagaaggaggctcagggctgtgtctctcgctgtctgctctgggcaatgtcatcctggctctcgtcaatggcagcaaacacattccatacaagtaagtgactc

SEQ ID NO: 4326 - DNA, 2300 bp, Homo sapien
ctgacttccccatcgctcacctgtccagcgaccccgactactcctccagcagcgagcagtcctgcgacaccgtcatctacatcgggcccaacggcacggccctctctgacaaggagctcaccgacaacgagggccccccagactttgtccctatcgtgccagccctgcagaagacccggggcgacagccggcccgcagaggcaggagaggctgcagccggcaagtcagaaagggactgcctgaagtgcaacacgtttgccgagctgcaggagaggctggactgcatcgacggcagcgaggagcccagcagctttcctttcgaagaactgcctgctcagtttgggccagagcaggcaagcagaggcccccggttaagccaagcagcgggggcaagcccactctctgagtctgataaggaagataatgggtccgaaggtcagctgaccaacagagaaggccctgaactcccagcctccaagatgcagaggagtcactcacctgtgcccgccgcggcacccgcccacagccccagcccggcctcacccaggagcgtcccgggcagcagtagccagcacagcgcctccccactcgtgcagagccccagcctccagagcagccgggagagcctcaactcctgcggcttcgtggaaggcaagcccaggcccatgggctccccccggctgggcatcgccagcctgtccaagacctcggagtacaagccacccagctctccttcccagagatgcaaagtctacacccagaagggggtcctgccgtctcccgccccactgcctccctcgagcaaggattccggcgtggcgtctagggagtccttgctgcagcccgaggtgcgtacgcccccggttggaatgagcccccaggttttgaaaaaatccatgtctgctgggagcgaagggttcccggaaactcctgtcgatgatgagcagcaggcagctactccttcagagtccaagaaggagatcctgagcaccacgatggtgacggtgcagcagccactggagctgaacggtgaggacgagctggtgttcacgctggtggaggagctgaccatcagcggggtcctggacagcggccgccccaccagcatcatcagcttcaacagcgactgctctgcacgggccctggcctcgggctcgcggcccgtcagcatcatcagcagcatcagcgaggacctggagtgctactccagcacggcccccgtctccgaggtcagcatcacacagttcttgcccctcccgaagatgagcctggatgagaaggcccaggacgcagggagcagacgctcttccatcagctcctggctgagcgagatgagcgcgggcagtgagggtgagcagtcgtgccacagtttcatagcccagacgtgttttgggcacggggaggcaatggcagaacctgtggcctcggagtttgtcagcagcctccagaacaccgctgtggtgtgcagagagaagcccaaggccagccccgacaacttgctcatcctgtctgagatgggagatgactctttcaacaaagcagcccccatcaaaggctgcaaaatatccacagtgagcaaggccatggtcaccatctccaacacggccaatctgagcagctgcgaggggtacatccccatgaagaccaatatcacagtttacccctgcattgccatgagcccccggaacatccaagagccggaggcccccaccgccacccccaaagcaggccccacattagcccagtcccgggagagtaaggaaaacagtgcaaagaaagagatgaaatttgaggacccgtggctgaaacgagaagaggaagtgaaaaaagagacggctcatcccaatgaagaagggatgatgaggtgtgagactgccacgggcccctcgaatgctgagaccagagcagagcaggagcaggacggaaagcccagtccgggagacaggctcagcagcagcagcggagaggtgtcggcctccccggtcactgacaacttcaggagggtcgtggatgggtgtgagatggccctgcccggtttggccacccagagccccgtgcatcccaacaaaagcgtcaagtccagcagccttcccagggcctttcagaaggccagccggcaggaggagccggacagcctctcctattactgcgctgctgagaccaacggggtgggtgcagcctcgggcaccccgccctccaaggctaccctggaggggaaggtggcttcccccaagcactgtgttctggctcggcccaaagggactccccctctgccccctgtccgaaagtccagcctggac

SEQ ID NO: 4327 - DNA, 2300 bp, Homo sapien
taaaccttctgtttactagcccagaaagactaacacgtaacactcagactaatatagatgaaatccaggagctatggctcactcctgtaatctcagcattttgggaagccgagacgggaggaccacttgaggccaggagttcaaggtcagccagggcaatatagcaagactcctgtctctgcaaaaagttttaaaaaattagtcagaggtggtggtgccagcctgtagtcccagttaccccggaggctctgagggtggattacttgagctccggagttcgaggctgcagtgagccatgatcgcaccactgcactccagcctgggtgacagagtgagaccttgtctctaagaaaaggaaatagatttattagtgtcttctgtttgccaggctttgagccaggtacaggactagagtgatgaatgaaacactgtgtctgccctcccaagtattttacgatccagttgtgtatgatggcaagtaaatgggtaaataatgatccagtatgataaatgctgctaaagagggaagtcatcttaggaaatcaggaagagtttcccagtggaagagacaagcaagctgacatttcctcttgttagcttttccttcttaaacattccatcagaatccatgaaataaaccgatggaaaaaaactgataaagatttttcctattttgaaaaaaccgttaatttgcttcatagtccaggaaaaaaccatgctggtttgattcagaagttaacagatcagatgtgtttgacctggtttttttgttggtggattatttcaactaaagttctcattatactttaaaatatttgttaaaacttgtatcccttcccaaattatacacatttaaaaatgtttaaaatttcaaaaattaaacgtaggactttctgtcttatatttttaccatccaatttatacataagtatatatagacaatgtactgttgctgcttaatgcaaaatagttgtccttaaagcaatttagcatttgtttacaaatatatatgtataattttgctcctgatttgaaactgcaattttatatatttagagggaaaaaagccaaatcatgctagagtgcactagatttcatgtaagagctgtttggagcagtggaagagtctcagaggactcagtgtgttttcatacttcgtgttctttcatgtaaacctgatttgagaaattcgtcatcactttttcctttacagaaactttataacaagtcagcatccatttgtagtctctggttcatctcaaatgtttagcctcttctcctttttttgttttttgatggcctttgtcatgtttcatcctaaatttatatctctaggcgcaactcctcttgtgaactccaattgttcattcttagtcttggcttggatttcaaatttaacttaaccaaaacagaactgttggacttgctctcaactccctgtaaccaaatttgttcctgttaaattcttcctcatcttaataaatggtagctatgatcttccacttgcttcggccaaaaactcgagcattatcctgactcctttcattccccacaagccgtcccgcagtaagtaaggcctgttggctgtgctacccagttctcctgctaccgacatccgagtcaccattgtctatcacctgggctatagcagtgacttcctaaccattttctccacttccattcacctttttatagcccattctctacacaacagccagaatgatccttttaaagcagaagtcagactccttcatgccttggctcaaaatccagtggctttctatcttcttcagagcaaaacccaaatatggcagtagggccgtaagtgatcccactccgtctttgagctcgtgttttgccccctactttcttgctccgctttggtcacactagcctctttgctgttcctctgttaccacgggcattcctagcgtagggccttcgcacttgctctttctcctgatatgagcctttatcgcctataaatacacacgttcatttcagcagtcccttcaggtcattgcttaaatgtcaactcatcctaaagagctttcttgacaactttttttctctgtaaggaccttgtttctctccttggcatttatctacatgtgacagttttctatcattgggttttttaaaaaatctgtgtattcaactagaacttgagctccacggaggcaggaacttttgttttgtttttcttcactgctcttttcctcgcacctgtctgaagcagtgattttagccagaatctagatttcctgattctggtccagtgctctttccatggttctgtg

SEQ ID NO: 4328 - DNA, 2300 bp, Homo sapien
ctggattcaatatctggcaccacttaagcctctttgagccttagaagcctcgtttgtgaaatgagggtgatagtagcttctcccaactttcgtggtaaaaaaagaatctagacaggcacctcataaagtgctgggctcattgcagatagaaaacccgcttgtttctcccccccgctttttttttctcaaagtctctgaataattacattcagcgtccctaccttgtctgctaggagttctaacattagattaacattttcttgcaagaattctgtcattttttaaacctaaccacacaattctacattttggagtgaaggtaagcccaaagtaaaggtttcccttattactttttatggcttgatagagaaaataatgaggaaggtaagttatgacttttccacatatcctgttttaccaggccaagagttagatgatgaggatactcagaaggcaaagaaagtagacaaaaggtcagggaagctatttaatttggttgacgtatatggaggaaacagtactgatatgacagatacgttttgtttgaaaaagcattttgtgcctactcaagtatagacacaatatatcctgagcagcgagtgggcatgaatccaagcgggtgtaagaaatacagcaacgctagggaagattcagaaaagaaagagttgagttattttagtgaaatgatagctcaagttagagaagtgcatgctgagagaaacgttgacgttaaagagtaaggactggccacattttaatttcctctaaggatcttttctaagagaggagaaagaaatgttacagtggaagtgagtgtagtaggtgatgggaaagggaaagggggaagattgaatattgaaaacaggaatgaaggaaagggtgacatgtcagctttatttttacttctattgtgtgtcaaagcgatggtctttctttttttagctagtcaggtctaaactgtaataaaatgaagtcagagtgagatgaaccgaataatactcaatttcatggaaaatcttatctgtagttggcagtcgtctctttacttttggatttaattccttttcatcattttctgtatcagttcttttgagagtagttggctggtgctgcagatgaatacatgcctattggtggtttggtataatttgtcttacattgcatcttcactggcagtgttagcctgatgattcgtttctagtttagcaaaatgagaattagtttaataagatgttgagatggtgatcagttttccaggggtttggttctgctcaagagctggcatccaatatgccaaaaaggcaataagcagggtggatcaactgccttaagatgggtatgcaatgttcaaaccaaaggatggcatagtgagagacaaatcattgctccaacagaatggaagaagttgctggaagatgacttcgctggcaggcaaggaaggaaatcaagaagtcagtttttaccaccatcactaaacccttcccagagtaccgaagcaggctcatacccaggggagtaggggagtagtacaggaggaggaggagaagtagaaggagggagacaaagacagggagagggaattagctgaggctggggagacagagagtcacaagagaagaaaggaattcttgtgaactacagtggtttgtaggactcaaaagtaagcaggtggaattaacctcataaaaaataatgctctgcctgcctcgctaggggtaggcacccaacacgtcacacgtcctgttttgctccctcacttgtgtcagctcagattatttcctgcctgtccactgctagccttttgtggctgaatatcagatcttgactgagcatctgagcatgtgctggcctctatggatgaggaagccacaatgaatcagacataacttttcttctcaaattcgtttatcttaaaaagcatttattgtagagagtatactatgtgccatatacattagtaggtgctagtatagaaaataccaagaggctgaatactgtggctcacgcctataatcccaacactttgggaggcccaggcaggaggattgcttgatcccaggagtttgagaccagcctgggcaacaaaatgagaccccatctctgaaaaatgaaaaaatagaaaataatgttatctatttgtataacctagtaatgaacatagggtcatttgtaattttttgcatttacaaacagtgttcctatggaaattctcttcataagcgcctcctagaagacacatcaagaggtctgtcagctataaactatagcaacatgcatcaacataaatgaatcttaggata

SEQ ID NO: 4329 - DNA, 2300 bp, Homo sapien
ttacttggtagactttataaaataatactttgtgcctatttttttcctagctggttataaagaaaagttagttttagttatagcttgcatatgaaatgtcaatatttccaagttacagttataagaaactgagcatggaatgattacttgaggacattaaactttaaataaaatcacctcatgctactatatatattcctttgttatcttcgtggatatgaatggccttttctttgcaacctaatgtatggcattcacatttataagactaggctcccaaatcctaagaacatcgtgtgtgctaaactcagaattctgcatactaatcttacttactacgagtaagtactcttagcagataaaattgttttcttgatgccttagtacactttccccccaagatactataattgttcaactaaagatttttatataatgtagaatgatagactcttagacctggaagacgccttaaggatcataaagccttgttttatagagaagttgtgtgatgcgtcacaggcagggctgtccctggcagagcaattcacacttcttggactgttcttccccatggtactacactatcgtcttttctctccctactctattcttccctgttcaatagtctgcatatttgagcttcctgctaaatatgttatagaggttaaataactgcctttgtcttgcatcccacttcctctttagctgtagagtagaaccccatgcacataaccattggtctcaacaatctttttttttgtttttgtttttgttttgagaaggagtcttactctgtcgccaggctggagtgcaatgacatgatcttggctcattgcaacctccgcctcccgggttcaagtgattctcctgcctcagcctcccaagtagctgggattacaggcacgcgccaccatgcccagctaatttttgtgtttttagtagagatggggtttcgccatgttggccaggctggtctggaactcctgacctcaggtgatccacccgcctcagcctcccagagtgctgggattacaggtgtgagccaccgcgcccggctggtctcaacaatcttacattgtagcttaagtggctctttgggattgttgtgtcatgtccactggggccacttagagccaaggggtgtgtgtctccacagaagggagtaaggccctggctttaaaggacagtaggtactgttctccagtgctcttagaactgttgtgaagtctgtgagtcacatgtagtagcactttagggcctagaggatgctggacttgagtggttgctcctgtcatggtgtcaggaaggaacacagggcagcatgacttgttaaagaagttgctgcatgatcctgacaacagtcaggcagctctgcctagcgcttgtgttctgaaaatgccgactttattgggtgtattgttttttctttttaaccatttaggtatcttctcctctgtttatattttttattttgtataatgaattatcacatactttgtggcctaaagcagcatatattttttaatcgtatggtttctgtgggtcaggtgtccacacacacctggatcctccatgtagggtctcataaagctctcgtcaaggtgtcagctgggctgtgttctcgtatggaaatccggggaagaagccacttcccagctcgcttgggccactgaaagaatttatctccttgcatcagtaggactcagggccctggcttcttgccggctcttggctgaagtctacccacagttcctggagaccacccacagttccttctcaggtagggctttccccacatgaccatgtactttattaagtcagcaagaagagcttctagtgaagatctgatggcaagatggagttttatgaaatgtaattggcaggagtgacatatacctttgccatattctgttagaagcaagtcacagatcatgcccatacataaggggcaaggcgaggggattgtacaaaggcctgcacaccccaaggaggtagctaggtgtcttaggggaggggccaacttaaagtttgtcttctcagcttttttttttttcttaaacagaggggagacggaaagggacatcgacatacatgagagtaacccaggagatttgttcctgggtttcacattcacagcacttgtgggcctccaggccgacctgaggcattgaaaatcccagttgttggtttggtctgtgctgagctccttactcaccttttaaagttggctgtttgcagttgtactcccttcctcatttctgttttctttgtacctttttatttaaataaactttaag

SEQ ID NO: 4330 - DNA, 2300 bp, Homo sapien
gtgagataccatctcacaccagatagaatggcaatcattaaaaagtcaggaaacaacaggtgctggagaggatgtggagaaataggaacacttttacactgttggtgggactgtaaactagttcacccattgtggaagtcagtgtggcaattcctcagggatctagaactagaaataccatttgacccagccatcccattactgggtatatacccaaaggactataaatcatgctgctatagagacacatgcacacgtatgtttattgtggcactattcacaatagcaaagacttggaaccaagccaaatgtccaacaatgatagactggattaagaaaatatggcacatatacaccatggaatactatgcatccataaaaaatgatgagttcatgtcctttgtagggacatggatgaaattggaaatcatcattctcagtaaactattgcaaggacaaaaaaccaaacaccgcatattctcactcgtaggtgggaattgaacaatgagaacacatggacacaggaaggggaacagcacactctggggactgttgtggggtggggggagtggggagggatagcattagtatatatatctaatgctaagtgacgagttaatgggtgcagcacaccagcatggcacatgtatacatatgtaactaacctgcacattgtgcacatgtaccctaaaacttaaaatataataataataaaagaaaaaataaataaaataaaaaaacatatatttaccatcaaaaaaaaattaacaagcatataaaatagaaaaaaaaagaaatcattgggttattctgttgaataagtaatctaaaggatatgcatagacataagcaacagagttatgctgtagttcaacttgatgtatcttttcaagttttaaaagacagcaaagtattcaaattttcttgttatattactgctaggtaaataacatctgttaccatgggttttactcttcacattagccctactcagtactagtgtcatacacatgaccttaagtgaaatgctctcacatgttattaattgacctgttgtatcctttcagccttaacaccccatttgtggtatgattgaaaatgatatttaagggggtagtattggcgttagaacttttcttcttcttttgttttagaaccatctccttctgtttgggttgatgccacatcatatcttgttttttgtctttgttttttggagatggagtctctctttttgtccaggctggagtgcagtggcgcgatgttggctcactgcaaccgccacctcctgggttcaagtgattctcctgcctcagcctcccgagtagctgggattacaggcgcacaccaccacgccctgctgatttttatatttttagtagagatggggttccaccatgttggccaggctgctctcgaactactgacctcaagtgatctgcccgtcttggcctcccaaagtgttggggttacaggcgtgagtcacggcgccaggctcctttatcttgtttattcaactcagataacttgaagttgaaattgctgtgcttgatccctgttctattcatgatgtactagccatatgacaaatttaacctatttgaactttatctgaactttttagttcttattttctgtctttttgccttagaggtgatgctgtttattagtttagtcatgacctagttgtaaattatttcatggaaaagtctgcttaagtttactgacttaataagaactgataattgtttgtatgtgtgtacagaatgatgtagaaaatctggtaacacacaatctcagtgattttggttttaatgctttttcatatatgtgcgtacttatgttttgataggtgtttgatcttacattgcagacaaaatttggcagaatttaattgataacatatgcatcatatttagttgtcaaaagataaaacaatatgtatttgctctttgtcaaaatccaatgtaaggtaggaaatatctggtttaacagccagcattgaacacttgaaaattatccttcagaagtttactttgagattgtgctatttattttctctttaaaaaagatattaacaaactgactgaagataagaaagagggcctcaggcaactcgtaatgacatttcaacatttcatgagagaagaaatacaggatgcctctcagctgccacctgcctttgacctttttgaagcctttgcaaaagtaagtgttaagtttgctctttgctaattccatacatcaaccatttgctccttattttgttgttagttacaaaaatgtcgagaatcttgaca

SEQ ID NO: 4331 - DNA, 2300 bp, Homo sapien
ttttccaagactaccctggtctaccacgcccccatcctgggcctataaaaacccaagaccctagcaaggcacagacagaagcagctggagggtgagaggaacacattggtggaagaagacaagtggccggacatcgggaggacgtggagggtgtcacacgtgtccatgtgaagagaccaccaaacaggctttgtgtgagcaataaagctttttaatcacctgggtgcaggcgggctaagtctgaaaagagagtcagcaaagggtggtgggattatcattagttcttataggtttatcttataggtttatccctataagaacttatctatagttcttatagagataggcggtggagttaggagcaatttttgctagtggggggtggatcttacaaagtacattctcaagtgtggggaggatattacaaaggatattacattctcaagggcggaggaatatcacaaagtccattatcgcaagggcggggagggggtattgtcacaaagtcaattgatcacttagggtggggagggaacaaatcacaatggtgcaatgtcatcggttaaggcaggaactggctattttcagttgttttgtagttcttcagttgcttcaggccatctggatgtatacgtgcaggtcacgggggatatgatggcttaccttgggctcagaggcctgacaaaggggagcacgcaggcagaagagcacagcaacagatgccagcacgctgggaggccgtcggccagcagaacgacgtggagtttggctgggacggttggaggagagcccaggtcaccgagcgcccgactccgggagaaaaccatttcccttctggctcccccatctgctgagagctactttactcaataaaaccttgcacttattctccaagcctacatgtgatctgattcttccagttcaccaaagcaagaaaccccaggatatagaaatccctttgtccttgtgataaggaagggggtctaattgagctgactaacacaagctgcctacagacggctagattaaaagagcaccttgtaacacatgcccactggggcttcaggagctgtaaacatacacctctagacactgccatggggtccgagccccacaacgtgcccatctgtatgctccccctagaggtttgagcagcagggcgctgaagaagcaagccactccctctgtggcagagggggacaagggaacctttactctactttctcttcatgtttcttataagtggaaccatataatatttgtcggtttatccgtcttgtagcatgtggcagaatgtctgttgctttttggtcttagagagtataggtgtgaagataatttttcctccccctctggctctgaaatttgaaagtgctgaaatgacctgacattagactgattaacaggggaagaggcatataaatgtattaatgtgcagaagcacaggggccacacagtatatgagactcagagaactgaaaccaccttgctaaggttatgatggttagagaaatccaacacagctgactttatcttgcttctgaccccagaagctgactatctgctcattcctgggtgtaggtcaagctaactaaaaaggagtttagtttacagtttaactttaaagcaaggatgataatagtcccttcctgaaactggtccccttcttgcttgggaactgaaactgcatttgtaaaactaatgaaagtcaataagattagaattatgataagggcctgaattctgctaagtaataagcacagtgaagaagagataaccagccattgttccctagcttggttactgctggaggtcacaagatttgagataacatcaccactgtaaaccctaagatgggtttttgagatatttttcagacctttgcattctggtaaactgactgatgccatctggaccatgactcataccaaggaacagactcaactcgtcctgtgacccccacctagaaactgactcagcacgtgaagacagttccaacactccagtgatttcatctccaaccaatcagtagcatacattccctggccctcagcttgccaaattatccttaaaaaccctgggctccaagctttcgaggaggtggatttgagagatacctcccctccttctgctcagctgccttgcagtaattaaactctttctctgctgcaacacccctactgttctccgtgtattggcttttctgggcagcaggtaagaagaacctgttgggctgtaacagaaaggccagatagccacagcttaaatggcactctctttctagcagtcagggagatggg

SEQ ID NO: 4332 - DNA, 2300 bp, Homo sapien
agggtgtcctgcagccctcgcctcagcggctcagacgctgaaggtatctgtggttcatgtttctagtgctcccaccaaagagaatcactatggaggatgctcttggtcctgaggtgagcaaaacagcacgccctgtgaatggagccggcttctttcctggccaccatgcttgctggatgggcccacggagcaagtggccttgagacgggcatgggaacggaagaggctcagcatcctgcacgtgcccttaccgaggctcaccaggctgacaccactgctgagcgcccctccgtggatgagacacttgcacccagtctctgggttggcaccatttcccaggaggaccagctggccacctgctggcaggctaatcacactgtggagggggctgagattggctttcactgcaccaagccacaatgtggacgtggatttgccggccctgcagtgcacacagcactgcttctgaccaggacaccccattcacagctggggatgtgcagcattgcgctcccacctcagggccttggctctgccacctcgacttggaatgttctcagctccctccaggcttctagaagcatctgggacacagctcatggctggataagcacccgaggccccacaacccaaacaagcttcccatcctcattttattttttgtcaaacttatgaaaatttattaagatatgacttacatccctggtaagtgcacagcttaaaagatattcacagatggaacacaccagcccccagatcacaaagccaaccatgcccagcccctcccaacacccccagccctgaaaccagtgttctgacttctgacagcaccacgagcctgccttttgtactttacactcatggaagcataaccaccttcatgttttaaaataaatgtttacttttgaaatgactttagatacacagaaaaattgaaaggcactatagtgtactcctacaccttccatccagctgcccttaataatgacattttgcattaccatggcacgtttgtccaaactaagaaatttaggccgggtgggctgggcgcggtggctcacgcctgtaatcccagcactttgagaggccgaggcgggcggatcacaaggttagatcgagaccatcctggctaacacggtgaaacctcgtctctactaaaaatacaaaaattagccgggcgtggtggcaggcgcctgtagtcccagctactcaagaggctgaggcaggagaatcgcttgaacccgggaggcagaggttgcagtgagccaatatcgtaccactgcattccagcctgggcgagaatgagactccgtctcaaaaaacaaaacaaaacaaaacaaaccccaaaaacaaaaaagaaaattaagctgggtgtggtggctcacacctgtaattccagcaattcgagaggtcgaggcaggaggttcaggttcacttgaggccaggagtttgcgactagcctgggcgacataggtagactgtctctggaggaaagtaaaaagcattagccaggcatggtggcgtgagcctatagtcccatctagtcaggaggcccaggcgggaggattgcacatgcctgtagtcccagctactatggaggctgaggcaggagaatcgcttgaacccggaggtcagaggttgcagtgagccgagatctcgccactgcactccagcctgggcgacagagcaagactccgtcctaaaacaaaaaaaagttacagtgcaaagtactagttgtgatgtcatgatgcctgcaactttgaaatagtttaacgacaatacgtgtatacatagctacaggtggggagagagtgacgagcagaaatggcaaagtgctaggttgtctgatttaggcggaggtatataggtgttcactgcactgttttcaactgttccgtatgcgttaaaatgatcgtaatacaatgttagagggagaaaaaaaaccccgcctgtcttctgcgcagtcgccatgggcacgagccgcacgcggagccttacgaccaccttcaggtcccacacactccactccagccgtccctccagactccatctgcgcatgctcttgccccaccgcgcccgccccgcccctcgggcgtacgtgtgcgcgcagggcgcaggcgcgcgggtcccggcagcccgtgagacgcccgctgctggacgcgggtagccgtctgaggtgccggagctgcgggaggatggagccgctgaaggtggaaaagttcgcaaccgccaagaggggaaacgggctgcgcgccgtgaccccgctgcgccccggagagctactcttccgctcggatccc

SEQ ID NO: 4333 - DNA, 2300 bp, Homo sapien
tattatactttaagttttagggtacatgtgcacaacgtgcaggtttgttacatatgtatacatgtgccatgttggtgtgctgcacccattaactcgtcatttacattaggtatatctcctaatgctatccctccccccgccccccaccccaccacagtccccggtgtgtgatgttccccttcctgtgtccaagtgttctcattgttcaattcccacctatgagtgagaacatgcggtgtttggtttttgtccttgtgatagtttgctgagaatgatggtttccagcttcatccatgtccctacaaaggacaagaactcatcatttttatggctgtatagtattccatggtatatatgtgccatattttcttaatccagtctatcattgttggacatttgggttggttccaagtctttgctattgtgaatagtgccacaataaacatacgtgtgcatgtgtctttatagcagcacgatttataatcctttgggtatatacccagtaatgggatggctgggtcaaatgatatttctagttctagatccctgaggaatggccaaactgtcttccacaatgggtgaactagtttacagtcccaccaacagtgtaaaagtgttcctatttctccacatcctctccagcacctgttgtttcctgactttttaatgattgccattctaactggtgtgagatggtatctcattgtggttttgatttgcatttctctgatggccagtgattgtgagcattttctcatgtgtgttttggctgcataaatgtcttcttttgagaagtgtctgttcatatcctttgcccactttttgatggggttgtttgtttttttcttgtaaatttgtttgagttcattgtagattctggatattagccctttgtcagatgagtaggttgcaaaaattttctcccattctgtaggttgcctgttcactctgatggtagtttcttttgctgtgcagaagctctttagtttaattagatcccatttgtcaattttggcttttgttgccattgcttttggtgttttagacatgagccggtctttttcattgtctctacttgctagggctgtcattgggttgttatactgtattgtttagggaatggtgacaggaaaaaagtctgtacatgttcagcagagacatagccatccacactcccttttctgaatattttccacccactgttggctgaatccacacatgcagagcccacggataccagggccaactgtgctttgagggtaggatgggtgaggttactaatgagtacaggggagcaggtgttaatgaggagggccctgcattgggacatctggaccccctgtgtctcaggactcgagcctgcaggtttggatggcgcaggcaaacccagcccaggtcaaagccttccccttaaaccttctttttatcccaagctctttctggtctccggaactcggcatcccctaggccctgggtggaaggacaggtgagccagatttcagatcacatttctagaagagtgagcccctacagggtgccaggcactttccccacaggaccctctacctagaataaccaagggtcatggagagaaacatatcattaaaatatcagaaatacaaaaagggataccattaagagttcctacagatactgaaaggttattaggtaatagtattaacatttttattctgatattcaacagcaacagtaacttccctccacccctatgtgtatcccaggaccaccctggttggggagggctgaagttagggagcacccatggatgctctgatgctggtcctgggcctcgggggtaacagtgatgaggaactgggtgcagacatgagtggggcagccaggcctggccagagaagcaacacacaggtgcacagatgtgtttacccacatacacatgtgcacacaagtgcacacattgcatgcaggcatgttgacgcctcaggcagtggaggacgctgactctgggctctgatgacccaggcaaggccccactgtgatgtgtgccatgacctcagaatgtcactggtgctgagcacccgctcgccctccagcctgcctctgtgttccagagcagttgcacacgcacagtgctatctgtgagcagttctgtgttcatgagagtttgctacatgagaggcataactcagcccagccaattcatcagaatcaggtgagtgtgacattctcccttcccttcatgctgacttggggacagtggctatggggtgggtagtgctggcctctgggcagctgccgaggagggtcatccctgggcactc

SEQ ID NO: 4334 - DNA, 2300 bp, Homo sapien
aaaatgtactagatttgtttgtttatttactttggagatggagtctcactctgtcaccctgactagagtgcagtggtgcaatctcagctctctgcaacccctgcctcctgggttcaagcgatttctcccacttcacctccccaatagctggagttacaggggtgtgccaccacccctggcttacttttgtatttttagtagagacagggtttcaccatgttggccgtgctcatctcaaactcctgaccttgtgtgatccgccctctttggcctcccaaagtgctggtattacacgtgtgagccactgcacccggccaaaatttactacattttgagctggacacggtatcacacacctgtaatcccagacacttaggaggctgagacaggagcatcacttaaggccaggagttggagaccagcctggggacatagtgagactcatctcaataaaaaataagaagaaaaagtattttactagatttagaaataggataatataggttgaatacaaatgcttaagaaaaaataggtgtttgcattaataactttaagttacatcatttccaaccttaataaatattaatagaattttctgtgcacagaaacatcagtgtacacattaaaaacataatgccttcttactgatttttttttttgtaacttcgaattaagtttatggagtctataactgattcttgccctaactatgaaggtctctagtactactgcaagatgagcaaatcagagcagtgagaagactgagatatattagacctcttccagcaaacaaggtgtatagttgcttctgtctttagaaaaagtaaatgaaaattatggagatgagctaagttcatttatttggtggatagctgactagattcccctagaagaaagatattctcttgaatccatctgcctttcacttttatattttaattgtttttctttactgtgaaacatctttcattttttcttcccatgaccaaagcagatggctcacagttctctgtaagaggccaaccatggtgtcagaatctttgcccagtgcttcaggtaaccactactaagcaggcagggagtggtgtgaaaagcttttgaatagctgaagccattatgataaagaaagtaagtggggccgggtgcagtggctcacacctgtaatcccagcactttgggaggtcaaggtgggcagatctcttgagctcaggagtttgagaccaacctgggcaacatggcaaaaccctgttgctacaaaaaatccaaaaattggtggggcgtgatggtatgcacctgtagtcctagctgcttgtgggactgaggtggaaggatcacttaagcccaggaggtcaaggctgcagtcagctgggattgcgccactgcactcctgcctggttgacagcttgtctcaaaaaaaaaaaaaaagtaaacagataaagaaaaatttatgatagtttatttctgtttggggggctttttcttggtaatattgtacttttgccacttttcaggtattaattgatttttacttcctctgttaaattttgggtatgttagtaatattttctttacatagttatggaggtagaaatattttttgtaaaaaggtaattcagccgggcgtggtggctcacgcctgtaatcccagcactttgggaggccaaggtggacgtatcatgaggtcaagagattgaggctctcctggccaacatggtgaaaccccatctctactaaaaatacaaaaaactggctgggtgtggtggcacgcacctgtagtcccagctacttgggaggctggcacaggatcacttgaacccaggaggcagaggttgcagtgagccgagatggcgccactgcactccagcctggcaacagagcgagactctgtctctcaaaaacaaaacaaaacaaaacaaaaaaaccccaggtaattgaattatttttatttttacattttattatggttttttgaagtagagttttttgaattgctgcaaagtatacttaatgctgaaaatttttaacgtgttatctttgtctctctttagtccttaggaaaaaatctggatggaaaactacgagtgatccactgtgacttctttaaactagatcctagaagtggtggagtaataaaaccacctgctatgtcttctcgagggctctttaagaatttgggaatagaagcagttccttggacagcaggtcatttttggaatttactaaagcaaatacctagaatttgccaggtgtctctagcagtataactgatttgttgatgaaatttgtgttttatttatttg

SEQ ID NO: 4335 - DNA, 2300 bp, Homo sapien
ctccaaatgtggaataaaagttttgtcactttcgagcgcaaccactttggcaccagcttcaagtaatgcctgagtcaggattccaggacctggcacattaacagaacgaaaagtttatttgtacaagaaacataatctctttcaataccaaactttcattagatgtttcacacgttattacctggtttttaaatctgacagcatccgcaaagtagatgtcactctcctttttacatataaggaaacaggagattatatatacttatttgactccagcgtcaaaagtgatgcagcttggctttgaaatcattgtcagcgactgcaaaacctgcactcttttttttttttttttgagacgaagtctcactctgtcacccaggctggagtgcagtggggcaatctcggctcactgcaacctctgcctcttgggttcaagcgattctcctgcctcagcctcccgagtagctgggattacaggcgcccgccaccacgcccggctaatttttgtattttaagcagagacggagtttcaccatgttggccaggctggtctggaactcctgacctcaagggaaccactcgcctcggcctctgaaagtgctggattacaggcgtgagccaccgcaccaggtcaaaacttgcactcttcatcaccatgattcactacctcttagaagaaaaaagtcacagcaaaatagattgcctctagcctatcacttcctcacggactacacggatgctttaaccatcaaagagattgtcaagcctaaacagaactgactccctgtgatatgaaatggtgctttaaaaaactatcattcaaaaagcctataaatcttgtgttcttagcatcctgctatggtctatagggaatgcacggaagaataagataacatcattttttcagctggcagaggcttgcaactcttttggggagataagatctaagagcatgttttatcaaaatattgtgtaaagtgcaagctgctacagaaatactttgtggtgtcattaacgatacagactctacgcttatgtagtgggcaatctctccaactaaggagcttcaaacaaagacccgtatctggacgggcgcagtggctcacgcctctaatcccagcattttgggagacctaggggggaggatcacgaggtcaagagatcgagaccatcctggccaacacggcgaaatcccgtctctagtaaaaataagaaaattagctgggcgtggtggcgcgcgcctgtagttcttgctactcgggaggctgaggcaggagaatcgcctgaacccggtacgcggaggttgcagggagccgagatcgccccactgcactccagcctggcaacacagcgagactccgtctcaaagcaaaagaacaacaaaaaagaccccccagtatctaaaatagcaccccgaggagggtcaatacgtttgaataaatgatgaacatccaagaaaatgcaattcagctggactcacctggattgcactccagcagtaggtgtggaggtctacttggttttcccaaatagatttgcgccagggtctcagccaatctccgatcggttacgtaacgcttaaagtctaagctggccttagacgccttccttggcggattcctgaaatccggttcgggccacagctgcggagaggagtcagagagcccacagtggttcctcgccggcaaatgctttcgcgtcgccgcttcagaccctaaaatgcaaaagcgaccagcgcccgccaaggcggagagcctcagccgccgaggaagcccgaccactgggatccacatgtccttgtctctcaggcccgctccaagaatcacctagtgcagctactacagtgaaccccacgcagggtatcccacgtggaacattttctggcgtccgggccaggtcaagcggaagtaaacactagagcctgcgcatgcgaacagcggagccttcctgcttttctccctcacttccgcttccgcctcggctcagccgcccgaggattgtgagtggaccgttgaggagagcgaccgaccatccggctggtgtccggactcgtactctatggttgtccgcgctctgcgcttcctctctagccgccagtgctctatgctccgcggtcgcgggccgccagcctccagccggccagccgcgaggggtgcgcagagggaggcggggcggaaaggcgagaggtgtctcctccaccggagccaggggagacccgagcaagctccgtgacagcacgtcggccgccatgtcgccgagtggggctggaaacagacccggcgcccagcggtagccctcct

SEQ ID NO: 4336 - DNA, 2300 bp, Homo sapien
actgtaaaaagggaatattataatgtaattctctttcccaaaaccaagagaaaataataacactcaaaagcaaaataaaaaatgacatcagtttttctaggactcagtaggctaactttggtccacaaacattatgaaataagacagtgcattttaaaataactgttttgtttttaaccacaatgtgtttatttttctttttctctttttctttctttctttttttttaaggagacagagtctatgttgcccagtctggcttcgaactcccggcagcaagtgatcctcccaccttggcctcccaaagtgctgggattacaggcatgaactaccatacccagccaccacagtgttttttttaaaaagtcagaaattcaacgacacatttctatgagtgaaccatgaagacataattctattttatctgatttaaaaatatttaggactccaggtcctggagggggaaaaaagtgtatttctgaatctatgaaaatgttttttaaggggagagggggaggcagctcagtaatggagagaggttcagaggatgcaaagtcacctctagaaaattgtcagtgagaaaactgtacgaaaaaagaatttaagcaaattaagaccaatgagtgagtccccacagtttgcacaacagttgatgagatattttctatgatgtcctaacaaatttataatacacaaaaggtcatatttagttgtcaattctttatccgcttgagcttcatcagatgagtataatcttcagactatttgctgggtgatacattccttaggaaccttttcctcgtgcatttaaatgccaaactcaattacactctcagtagagtaagcagaaaggattgtacgtattctaagacacggagttgattggctgccgtttcttgccttggtggtaaggataatgggtaaaagctctaagtttgatcctgaaacacggaaaacactctcaaagaaccgtgtcttctaacattgcccaataggtaaaaaaaaaaagactgccaaaatttccattacagcatcctatttttagtcttcaaaattgggtcttttaaatcgcattccacagtacgatgtgtttgactaagtttacataaggaatacagtaagcatcctaaagtcttaatctttttaagcttagaaaggaattgtaagcttttacatcttcatttttaatcttaactttaagtcttttaaacacacaaactgaaaaaattaaggaaaatattggcccagagagaggaatggaagggagacaccacgcggttcttgacaaccaaagtggtagtgatgggggggaccaggtgtgggggggaaatgaaaaccatccacgagggtggggagagcgggctgtgggccacacaacagaaaggaacggagaccgtggaagccgcaggctcctccaggagccgggtgaggaacgacttctggcgctagtcccctagggagggagaaattggcgcgacgcgcagcaataggagacccacagtagctgagaaaggagaggaaaacaggcgacctgagaggcggaggaggtaaggggaccgggctacacctcacccggagggcagaggctgcgcggctggaggaggacagcgcagggggaggagcgagaggcttccgaaaggctttccatcccggccgcgagccggcgggtcccctgcatcccgctcctcctctcctcacctgggaatcggaggcgcaaggagggctaccgctgggcgccgggtctgtttccagccccactcggcgacatggcggccgacgtgctgtcacggagcttgctcgggtctcccctggctccggtggaggagacacctctcgcctttccgccccgcctccctctgcgcacccctcgcggctggccggctggaggctggcggcccgcgaccgcggagcatagagcactggcggctagagaggaagcgcagagcgcggacaaccatagagtacgagtccggacaccagccggatggtcggtcgctctcctcaacggtccactcacaatcctcgggcggctgagccgaggcggaagcggaagtgagggagaaaagcaggaaggctccgctgttcgcatgcgcaggctctagtgtttacttccgcttgacctggcccggacgccagaaaatgttccacgtgggataccctgcgtggggttcactgtagtagctgcactaggtgattcttggagcgggcctgagagacaaggacatgtggatcccagtggtcgggcttcctcggcggctgaggctctccgccttggcgggcgctggtcgcttttgcatttt

SEQ ID NO: 4337 - DNA, 2300 bp, Homo sapien
agggggatggggtgacagctaaaggatgtgggatttctctttggggtaataaacgttccaaaatgtaacatggtgatggttgtacaacacagtatactgaagtaaagccactgaattatgtgttatgagaattatatctcagtaaagccgttaaaagaaaaaaaggctggacgtggtggctcacactgtaatcccaccactttgggaggcctaggcgggtggatcacctgaggtcaggagtttgagaccagcctggccaactggccaacacggtgaaaccccatctctactaaaactacaaaaactagccgggggtggtggcgcgtgcctgtaccattataggcatgagccaccctgcccggctactggagagactgaggcaggagaattgcttgaacccgggtggcagaggctgcagtgagccgatatcgcgccattgcactccagcctgggcgaagacgcaagactccatctcaaaaaaaagaaaaaaaaaaggggcttggtgatagttggtttgatgatatgaagaaacggtgtagttatttgtctccacaaaatttaaaaactactagtgtaatggaaattgatgtaacaattttctgtaaactataataaaatgccattaaatgtgtttctctgtgcgtttgttttgatctattgaaagttcagggttaacccctgggcttctaatgcttccgttcttatatgatttcattaattgcaaagagaatctctgatgttagtagcttttagagaattatggaatattaaagaaggggggcttttaaggaaaatttcactgtttggtttgctttggctattaggctctcccccttctcccacaaatatatatattttcaggagacggaatatatatatataatacttatatttattgttattattttgagttgcactcttgctgtattgctcatgctggagtgcaatggcgtgatctccgcccactgcaacctctgccttctgggttcaagcgattctcttgcctcagcctcccaagtagctgggattacaggcatgcaccaccatgcctggctaatttttggatttttagtagagatggggttttaccatattggccaggctggtctcagactcctgacctcatgattcgcctgcctcggcctcccagagtgctgggattacaggcgtgagccaccgcacatgcaccattatttttgttttgaatttaaatacatgcctttatatttgttagagaaacaaaatatgtttattttcagacatacgagaaaatcatatacttgtaagaaaatcatatactttcttataaggtcatgtaaattttgagaattctgatagttgatgaattcagtgtgcttggaatgaacagggaaaatatggtaaaatttagccattttgatattagcaaagtcagtgtacttccaatggataaacaatgaatttaatcggatttgaaaaatccaaaatatggtgcttgagttgtttgtggacctggataagtagttttaagaatttggctaggcacggtgactcacacttataatcccagcattttgggaggccaaagcaagggagtcgcttgagtccatgagttaaagaacagcctgggccgggcgcggtggctcacgcctgcaaggctctaatatcagttggaaccccgggagcgcgccaacagacagcacaaggcggtgtggagcatcacgctgttttaatgcgcgcctgggtgcagacgggctgaggcctaaaatggcgtcagcgccacatgaggacggggcaggggttttacagtctcctgtaaacaggaagtgtccctgtctgatgtaacggctacgtggtacctggatggcctctctgtctatcctcggtggtgggtgtcttccggccggggtgcgtgtcttccggccggggtaggtgtcttccggccggggtaggtgtcttccggccggggtaggtgtcttccggccggggtgcgtgtcttccggccggggtaggtgtcttccggccggggtaggtgtcttccggccggggtgcgtgtcttccagccggggtaggtgtcttccggccggggtgcgtgtcttccggccggccctcttcctgcttctgcttctcgctgacgcgcgctgctggtgcaagcggccttgcgccttgggactgggtctgaggagggaggagttattcatccccccaagctttcggccccggggagaatctttcattcctgtctatttggttatagaaaaagggaaaaggggcgactttctccataactacttcaggtgtgacatagggggtggcgtggg

SEQ ID NO: 4338 - DNA, 2300 bp, Homo sapien
tctgaaatctgcaggcaatgtttcaggaatgccttttgcttgatatggtatgggcctcaattgtcagttggtgattagtattaaagtatcaatatgtttttggagtccagggtgaaaaagaaagaaaaaaaaagtatcagtaaataaacaaatggaataaaattatcatcatattttctcttttattttcacctttggctcattatttatttaagttaaacaacatattagtataaaaaggttaaaactttttttttttttttttttttgagatggagtctcgctctgtcgcccaggctggagtgcagtggcgcaatctcggctcacagcaagctccgcctcccgggttcacgccattctcctgcctcagcctcccgagtagctgggactacaggcgcccgccaccgcgcccggctaattttttgtgtttttagtagagacggggtttcaccgtgttagacaggatggtctcgatctcctgacctcgtgatccatccgcctcggcctcccaaagtgctgggatgacaggcttgagccaccgcgcccggccaaaaaggttaaagcttctaaaatagttatgaatgctaagtgtaccaataaagcgaggataagcaagcttctctgttacctacccatccatgcacttctcattcattattcacacggaggtttttaactgtttcattttaaagtgaaggaaaaataagttggttttactcaaagtagaaattgaaagagatgtcagaattcaaacccatttctacttgttgcaaaaacttatcctttttattgctaccctttgctacctccctttaagaagttgctcggcgtggtggctcacgcctgtaatcccagcactttgggaggccgaggcgggcagatcacgaggtcaggagatctaaaccatcctggctaacacggtgaaaccccatctctactaaaaaataccaaaaattagctgggcaaggtggcgggcgcctgtagtcccagctactcgggaggctgaggcaggagaatggtgtgaacccgggaggcggagcttgcagtgagccgagatcgcgccactgtgctccagcctgggtgacagagcgaaactccgtctcaaaaaaaaaaaaaaagttgcaagtaatttgcaaacacatttattagtggtattatggtcaaattataaatttgaagagaaccgagtttgttcctttaatcttagtaaaccagaccagtactacttttcttacatttaaaatgatgaatgtgttactgaggttcatcatgtaaaaatatttacttaatacaccatgtctttttttgtttgtttgtttttgagatggagttttgctcttgttgcccaggctggagtgcaatggcgtgatctcaggtaaccgcagcctccgcctcccgggttcaagcaattctcttgcctcagcctcccgagtagctgggattacaggcatgtgccaccacgcccagctaattttgtgtttttaatagagacggggtttctccatgttggtcaggctggtttcgaattcccgacctcaggtgatccgcccacctcggcctcccaaagtgctgggactacaggcgtgagccactgtgcctggccccatacaccatgccttaaatgtgctgaaaataatttttgtaacttcattttaatgtaaaagtttaataaagttcagaatatcttttaaacctttgaaaatgactttgttgattttaatgaggactaagtgatttattcatattcacatgcttttgaataatccctgttatgtataaggattctttactaaatattttgggtatttcctctacctaaagacactattatgcaacagacagaatttccatttgaaagggttagaatattgctgtattacacatattcatatgtcccttcttttccttcctatacaaagtgttgttttgaatttttaacaatttatttttcttcatctttagagagtaaaacttgtctcggcacagagtcaagtaaagaaagccaacatacagtggagcccctggggagcagtccctgctgtcatcagatggacgtgcaaacagattccccaagcctttcggtaactgcaggaaaggaccacatggaggagctgctctgcagcgctgaagccacgttagcgctccacacccagtcctccgagacagcagggagcccgtctgggccagactcttctgaggatgcttgtgaggatgacagtcgcttgcagctggctcaaacagaggcctgccaggatgtggccagaatagagggcattgctgaagaccctaaggtgtttctt

SEQ ID NO: 4339 - DNA, 2300 bp, Homo sapien
tagtagagacggggtttcaccgtgtcagccaggatggtctcgatctcctgacctcgtgatccgcccgcctcagcctcccaaagtgctgggattacaggcgtgagccaccacacccagccttaacactgtcttttactctcaaaattgtccagtctgtaggataaattaattttaaattttaatagatactgccaaattaccttccaaaaaggcattcctacactttaatcatgctgcagatcagaagactttttggtctttttgaaattaaaattttttttaaattatgaataattaagatatttttcaaccaaagaatgattgttttcttcaatatagaaagatgcaaaagagatcccacccaaaggcatttttattgtttaatattaagtcgactttgctctcaggtagtcccattatgtgaaccccaaggatcttagaacagccaggctgtactgtagactgtcaaataatgctgtcggggtgggcatgctggctcacacctgtaatcccagtactttgagaggccatgacatgaagataacttgaggccaggagttcaagaccaccctctgcagcatagtgagaccccatctctaccaaaaaataaaaaataaatagccaggcatggtggcacaggcctgtagtcctagctgctcaggaggctgaggcaggaggactacttgagcccaggtgtcagggctgcagtgagccaagattttgccactgcacttcagccagggtgacaaagtgagaccctgtctctaaaaaacaaacaaaaatgaatgaattcattaatgcgtgctatgagcacgtgagctgtttttcttcttctcatggagtgattctgtccattgtataaatgagctagttttaattttagcttgtacaagctccacaagtctgaatcttcttggtatttaataggtaggtctttgtagagtcattagcagcatgagttttctgtcaatacttcctatccgtagaggaccaacagtagaaatgtgtagttatcttaattagtgaaaagacagcagatgctaagatttccatttcggtgacaatgtaacctcactctttctcatgtttgcagatgaagttggaggtggctcctgtattttgctggtcttgctgtgcatagcaacggttttcctcagtgttggaggaactgcattatactgcactttcggtgacatggagtcacctgtttgtactgactttgcagacaacatggacttctattacactaagttacttcagggagtggcagaactgaagcactggatctacctctcctagcagcattccagacacagacatgctggcagtgagagtgaaaggcgggagactttctaaacagtttttctttcaggaattctgtagcattcccccttccctctgttaggaaccaaggacatcagaaatagcaactttaagtggcaagccggaggaactctgttagaataatccacacagtgaggcaaatatcaatctaagcattgtggatggaaggaatggtctttggagagagcatatccatctcctcctcactgcctcctaatgtcatgaggtacactgagcagaattaaacagggtagtcttaaccacactatttttagctaccttgtcaagctaatggttaaagaacacttttggtttacacttgttgggtcatagaagttgctttccgccatcacgcaataagtttgtgtgtaatcagaaggagttaccttatggtttcagtgtcattctttagttaacttgggagctgtgtaatttaggctttgcgtattatttcacttctgttctccacttatgaagtgattgtgtgtttgcgtgtgtgtgcgtgcgcatgtgcttccggcagttaacataagcaaatacccaacatcacaaagatgatctttcttcttttaacttgatgatgatgtgcaggcacaaatctttggagaaggcttaactgtggaatagatgaattctagaactcttgaccctgcaatgagaaactgtgacagatctgtgtcaattaacttgattagccagaaattaatcacaggcctagagaccaaagaaaaagctcccctgagtctcaggcaacagttttgtcacggatgcaaagcttcctgaaatcatgaatgctggactcagtttggcaaacgcttacacctattatgttctgagattctgagaaccagaatgcaaacttaagtaagatacagttcccactgtaggtgttttaatcctggtcttatatagaataaaccagtactttgctgagtgaaatcaccatatagaattca

SEQ ID NO: 4340 - DNA, 2300 bp, Homo sapien
acaccataatttatttaataattcctctgataaaggacatttcagttatttctactttttgttattacaaagcaatgctgcaatgaccattatgttagtccatttttgcgttgctttaaaggaatgcctgaggctggttaatttataaagaaaaaagtttatattttggctcatggttctgcaggaagtacatcaagtgtagtgccagcatctgcttctggtgaggcctcaggaagcttccaatcgtggcagaaggtgaaatggagccaatgtatcacatggtgagagagagaccaagagagagaaggatgagtgctctttcaactaccagctcttgtatgaacttatgcagagagaacatactcattatcctggggatggcaccaagccattcatgagggatccacccccatgacccaaacatctcccaccaggccccacctccaatgctggggattacatttcaacatgtgatttgggggggccaaacatccaaaccatagcaagcatgcttcccaaaaaacaaaatatatatatatatatatatatatatatatatatatatatatatattctgtttttttagggttttttgttttcttttgtttttattttctttttagagacaatatctcactttgtcacccaggctggagtgtagctcactataacctccaactcctaggttcaagcaatcctcctgcctcagcctcccaagtagctgggactaaaagtgcatgccactgtacctggctctgtaagattattttttagtgactgtttactccactagaatgtaaacttcttgagggcaggggctttatttgttgccatatccccagtactttattcctagtgcccagtatatagttaagtgtttaataaatacttgaatgcttactactttacacccaccagatggacaagcatgaagtctgagaataccaagtgctgacaagcacgtaaagcaagaggattcttgtatcccgctgagagcgaaaattagtgcatgtgctttaaagagcagtgagataactcaaatatggatattctagcaccaaccattttcattcctgacacatattcaatacactttcgcacaggtgctttaggagaaaggtacaagaattttattgtagcattctttgtattatattgcacaaaagcactatacaacattgtacaaaagcattgtagaatttggtgtatttctctctctctccctctctccacacacgtatcacagacatttttttttattctgaatcatttgggaataagttcacgacatcatgaccaaataagaaagctgcaggattgacatttacaaaatattcaaaatatgcaaaacggtactataatatttataaatacatacatatataacaagcagaaagataggaataggaataataaacactaaattcaggcaagtggccgtcttggggacgcaaaaggaaatgtgttcaggaatgaatacctggaagcctcgctatctggaatatttttcttaagctgtgttgagggtacatatttgttattggctgtaccttttttgcaagacatatatttcaaaatttttaaaagcattcatttattcctattttaatgagagtttttaaaaatcaggaatgggctgggtgcagtggctcatgcgtgtaatcccgaccctttgggaggccgaggtgggtggatcacctgaggtcaggagttcgagaccagcctggccaacaaggtgaaaacccatctctactaaaaacacaaaaattagcagggcgtgggggcgctcccctgtaatcccagctactcgggaggctgaggcagaatcgcttgaacccaggaggcgaaggttgcagtaaatcgagatcgcgccactgcgctgcagcctgggcgacagagtgagactccatctcaaaaacagaaaagagaaaagaaagggaaaaaagggaagaaagaaaggaagaaagcaagcaagctcaagggttctcggggtgggccatccccgaggccatccgcagattttctcgcactctttgctccacccccacgtgcaacaaggacaaccggctgccgcctccagcttccagcagggctagaagatgcgctgcccggggcggccagagccctgcagaacaaaccgccgcacggaattaggggccgccgtccgcgcctgccaggcttggaagcggactcgcccccagggccaccgccctaggaaacctcccgtcggaagcctcccaagcaagccgctcacccgcggctcccgcgcgaggcggcgtgggcgtgggcgcggccctggc

SEQ ID NO: 4341 - DNA, 2300 bp, Homo sapien
tttttaatttcctcttttgtgaagttcctgttcaaatcttttgaccatttttttttctattgggttgtctatttttctttttggttagtagttctttattttggatattagttcattatatgttaaacgtgttgcaaagaacttttcccattccttctggctttttcattttggtgtcttttgatgcaccaaagttcaccattttaatttagctgactttatcggtctccctctttaaagctaggggggtgtgtgtgtgtgtgtgtgtgtgtgtgtgtgtgtgtgtgtgtgtcatgcataagaaatccttttccactgtgaggtcgtaaagacagtctcctaaagtatcttctgaaagcatttgaggcagggcatggtggcttatgcctgtaattccagcactttgggaggctgaggcgggaggattgcttgaagctaggagttcgagaccagcctgggcaacataacaagaaccccatctctatttttaaaatatttaaataaataaataaaagcattagggttgtgccttccacatttagctctttaattctcacctgaaattgatttctggggtagttttagataggaatccagtttcatttgtccccatacatattcctaattccccagcactgtttattgaaaagtccatccttgccacattgatttgcagttccactcggttgtatatcaagtctgtagtcctgaataaatctgtttctgagccttctgttctttttctttggttatttatctatctttgggccaacaccttaccttactgcctctgttacagaggcattaaaatgaagtgttgatatcaggtagggcaagtctttctgtcttgttcttgggtctggtctcatcttggctagtttttgcttttgcaattccatacaaattgtagaattatcttgttaggttctattacacttgattggaattacaatgactcttggggaagagttgacagatgtacaataacaaatcttccaaaccacggagagatggcagtttctctatctatttatatccttttaaacatctctcaaataagttttaaaattttctccgtacaactcttacatattttatgtcagctataggcctaagtattccatatatttgatgcaattatcaatggtgtcttttattttaaaaataattttctgcttgctgctgttatattcaaatacagttaatttttaaatcttgatttttgtatctagcaactttgtaattcatttacaaattcttggggattttctgtctatacaagcaggtcatctgggatgatactagaggcagcgcagtatagactggggaacagcaccggcagggtctggacctcagcgctgccacagatgagtcatgtgtctttagacacgttccatgaactgtaaaataaggtgaataatagtacctgcctcatagggttgctgtgagaattgagacagtaaatgtaaagcaggttgtaagtgttacataagtgtatgctattattgtaattacttttctttcctttccagtcatactttgtatttcttttccttactgcactggctagaacctaaaggacagaggtcaagaaagctggcatccctgacctcctgatctgaaaagaaaagctttcagtcattcatcactaagcattttgtccactgtgtgtttgtcttaagattgcctttatcagattaaggaatgtccattttattcctagtttgccgagaatttttattgtcataggatgtttaatttggccacatctttttctgcatctgttgaagtaatcaaattattttatcttataatctcttaatatgatgaattacattgggttttataatgataaaccaaacagggtagtctgtatattgcattgtaaagtgagtgggtatcagtcgtgcagtgaccgtggtagcgtggagccagccggatgtgcactcaaataaaaaggtcagagcagagacggacggcggcctgagagggcagcagattcgcgctaacagagcaggtcaagcagggcctcctcgccttgctcttccgcttcagcatatacgtctccaagctcaggaaatgcagttacatcaaatgtctaaattggatggaaagaaattctgtgtgctcccaggattccagttccttaccggaggttggtgccgtctgagtctgaaaagctgccctcttgccgtgttcatgctttggtagaacaccttcagagccttggcaagctctcggtcagagccggcttgctgtgtgcacatttggctcatctccccggcggatggcagttgcgc

SEQ ID NO: 4342 - DNA, 2300 bp, Homo sapien
catttgatttgcttctgaaccagcggcatcagtttgatgtagtcctggaacgcagccaggacactggggcccgccttgccgtctccaccgtccgcagcacctggcaacaatcacagtggaggcgaaagtcagtcacttgttccgccatgaagaatttttttttttttttttttttgaaatagagtttcactctcgttgcccaggctggagtgcagtggcgccatctcggctcgctgcaacctctgcctcccaagttgaagcaattctcctgcctcagcctcctgagtagctgggattacaggtgcgcactaccacacccggctaatttttgtatttttagtagagatggggtttcactatgttggccaggctggtctcgaactcctgacctcaggtgatctgcccacctcggcctccaaaagtgctggaattacaggcgtacaggcatgagccaccatgccaagccctttttcttttttttttagacagctgtcttgctctgtcgtccaggctagcgttcagtggcatgatctctgctcattgcagcctccacctcccagactcaagcaatcctcccatctcagcctgctgagtacctgggactacgggtgcaagccaccatgcctggctaatttttaaaatattttgtagagatgaggtctcactttgtttcccaggctggtcttgaactcccaggttcaagcgatcctcctgccttggcctctcaaagtgctaggattacaggcatgagacaccacgcccagccgccatgaataaatgtgtatgcttatttgttcattcatttgttcagctgttcatcaaatatctacattttaaaattacaagcatgtaatttaaaaacaaacaagggaaaatgacactgcctggcttctccttacgtggttgcttatctcgacccatgaatcctggccgcaggcaggaggtcctctgcccccagttcccattcttggtctcagggtccttgacccaaggtggctccagactggaggagggtggggcgaggtgaaacatggctggctagacggaaggcctggaggtatcctcaagctgctgctggcacagcaagtgacctgtgcttctcttatacttggggtggcttgaaggaggggctcgtggagattatgggaggatcaatctccctcccaaacccaggctggtactgcctctaatcaggaaatctcaactcttagagacccctggcctgtgggtgcacacagtgcccttggccctgaggtctgaccccaaactgctcacacagctgctgccttgttggggacccaagtcttccctagggtccgagccagggtctggggctggttcagcttcatggcgccaccagggccacaggggcagtggcacggtcaacctctgaggacaggtcaatgaacagatggcttttccgggcctggtatgacagagtcttactggttcgttgttttgttttgttttgttttgttttgaaatggagtctcgctctgtcacccaggctggagtgctgtggcacgatctcagctcactgcaacctcctcctcccaggttcaggcaattctcctgcctcagcctcctgagtagctgggactacaggtgtgtgccatcacatccggctacttttttgtatttttagtagagacggggtttcactgtgttagccaggatggtctcgatctcctgacctcgtgatctgcccgcctcggcctctcaaagggctgggattacaggcgtgagccaccgcgcccggccttgttcatttttaaaagtcgaaaacttcagcagaagaagagcaaggaggtgaatttctaatcgatttattttgctgaaattctgagagaaacactgtggtgtggggacagggaggagctcttgcacacacacaggtggatctgcccactttccaccagcggtttcattactgcgagttcaggcagagtcccggtgccgagcaaagcgtggggcccctccgggaagcccgcaggtcactcagatcgcagcgggctccggcctggccaggattctgggggagccgcccggagcgcggtgaatcggggcggggagaggggcggggaaggcgcgcgaaagccccagcagagaccggcagcggcgggcggcccgcgtgggctactgctgggggctgcgttcgggcgaggaggggagattctgtctcagaggcctcgggctgcacgttcttccgggccgcgcatttgcagcccacagcaggccccagccggcccctctggagttgggccactgcttctgcaggcccagcaggcccctgggggcgg

SEQ ID NO: 4343 - DNA, 2300 bp, Homo sapien
aggagaggtactgaacttgaaagccttaggaatttcatggtttatgcagccccagcaaagggaagaggattgagtctagcccaagggagcttatgtaggtgaattgttcttcaaccttacggggatcgtgctatttagaaaagtgtggatagttaggtaatttggggaataccattaaaacacagtttgggggttgtttctgttttttccggttaattttttttcttgggtgagaatagaataagtccttaaatgttttcagaactgttagcatcataattttcaagcttttgttgactgtctttttagctagggaaatgtagaatttctagttaaatttcagtcataatctcaaaatgtagttattttgactgaatgagaaagtctgattgcttaaagggataattttgtaaagtaaacccataagtatatgccatattaaatataatttatgttttaaaaggcacacagccaagggtcatcaaaaacctgtgtgcttcaagttaaaacatgtattaaaattctttaaccagtctcttatctttaattcatttaggtgattgaacaagaaaagcttgaagctcaagattcaggagaagaggctaggaatctttcatttaatgagttatatccctctggaacacttaagcttcagtacaattttgatactattgaccaacagttttgtgacttagctgataacaaagacactgctgaatgtgacattgctgaagtagatggggaactttttgtggctcaaagcaactttaccttgatattggaaggtgaagaaggagaagttgagccaggtgattttgcatcatctgatgtgttacctaaagcagctaacacagcaactgaagaaaaacttgtatgcagtggggaaaatgataatcatggacaaattgcaaatttgccatctgccgtaactagtgaccaaaagtcccaaaaagtagacactttaccatatgtgcctgaacctattaaagtagcaattgcagaaaatttactagatgtaattaaagacacaagaagtaaagaaattacttcagatacaatggaacagtccattcatgaaacaatacctttagtgagccaaaacataatgtgtcccactaaattggtcaaatctgcatttaagactgctcaggaaacaagcacaatgactatgaatgtcagccaggttgatgacgtggtttcctccaaaactcgtacgagaggtcaacgtatccaaaacgtgaatgtcaaatcagcacaacaggaagcatcagcagatgttgctactcctaagatgccagggcagtcagtcaggaagaaaactaggaaggcaaaagaaatttctgaagcttctgaaaacatctattctgatgtcagaggactatctcagaaccagcaaatacctcaaaattctgttacgcctaggagaggaaggagaaagaaagaagttaatcaggacatactagaaaacaccagttctgtggaacaagaattacagatcactacaggtagggaatcaaaaagattaaaatcatctcagctgttggaaccagcagttgaagaaactactaaaaaagaagttaaggtttcatctgttacaaaaaggactcctagaagaattaaaagatctgtagaaaatcaggaaagtgttgaaattataaatgatctaaaagttagtacggtaacaagtcctagcagaatgatcagaaaattgagaagtactaatttagatgcttctgaaaatacaggaaataagcaagatgataaatccagtgacaagcagctgcgtattaaacatgttagaagggtcagagggagagaagttagtccatcagatgtgagagaagactccaaccttgagtcatctcagttgactgttcaagcagaatttgatatgtctgccatacctagaaaacgtggtagaccaagaaaaatcaatccatctgaagatgtaggatctaaggctgttaaggaagagagaagccccaagaagaaagaagctcccagcattagaaggagatctacaagaaataccccagctaaaagtgaaaatgttgatgttggaaaaccagctttaggaaaatccattttagtgccaaacgaggaactttcgatggtgatgagctctaagaaaaaacttacaaaaaagactgaaagtcaaagccaaaaacgttcattgcactcagtatcagaagaacgcacagatgaaatgacacataaagaaacaaatgagcaggaagaaagattgctcgccacagcttccttcactaaatcatcccgcagcagcaggactcggtctagca

SEQ ID NO: 4344 - DNA, 2300 bp, Homo sapien
aaaagcagacccaacaactttttaaaaagtaataatgcaagactatcagtaatcactaaatatttagcataaataatattcttatttgtatgacttataggcaatttagaagatgcagaaacaaaggatctcttagttgcagcagaggcattttcagaattgaatcacttaagcccggttcaaggaactgaagcttctctttgtgcaccatcagtctatgaagggtaagttaatggagagaaattcaaatacttttagaaagaagtttaatgaaattatgaaccagaagtaaaatattctgtgcatgttagatttcacttagatctttaacatctccattttggtaatgttggctgttttaaaagaagtttagttgtgcagttatatgtcatttagtagttactataaagtttcggaaatatacagagacacggtaaattgaggcagaactctggtgattctgtttttgttgaagaccaagatttcgctcacagctgtgcatacctccatgccctctgctttccagtggtttcaggatgatcaggcacaagactcttgtaggtagacacagtagagcacaggggagatgacagacagttttatttccttccatttgttcaatacatgactctaagtttgtgttttttaacgaccatttgaaacatactcccaaataattttcattgacactttaccagatgacgtattcaaagtatggtcaagcagattggtgagagtgtcagtttatgttctgcaacaagataaacagcctgccttggaatatagataagtgcactgcctcctttacggaaagtcagctgtactaatcagtatgattagtgaagcaattgattcaccttctggcaagaggtccttgtctcattgcgagactgacacagattgcatgtccgcacttttgaataacaccgttgtagaggatacaaaaaagggacagcttcagttatcaagtagtagtaagggtgattcagtaaaattaaccgacacaaaatataacttacaacattataaatggttcgttactttatacataatgaaagggacttaccagaccacctatacaattcagtatcatgatagtcaccccttgtaccttgaactaaatcacatgctttacgcctgagaaatctagattagctggaatttttgccaggcctgcatggaaaaagtagaagccagtatgaaaggattatccaaattattttttcattgtaatgttttttgaattttaatgaaaactaatgttatttattgcaatggctttcatggataattgcaaagcaaagagcagtcgcatgagaaggaatcacatgagagttaccagcatgagaaggaatcacatgagagttaccagtgagaacctgggtgcatattcactatcttggctaactagttccttttaaaatataagcttatttgatattttgtggtgatgtatcactgttacttttatggtaaaatctataaatgtttcaaatacctttttattgaatttactttcaaatactatttgttgtaattttcaaaattagcatgctttaattgggttttgagaaaggtcagattagaatattaaaggaacactgtcatcatattccaggatttattttcatgtggattaatacaggtttcattggtctcttattctgagtcatttatcatactttttctaggtagcattaaaatattgaaccttgcctctactgagttcatagaaaatattccagaatacttgacagacttatttgaagactggccacagattattaaaaattggcttaaatataatgtatactgacaggcattttaaaatcatttcatttctactttaaggccatgccattgttgccaaaagagtaaaacattagaaaatgggtaaaacaagtacagcattgtttctgaattcacttttaaattttatattattgttcagaatgagcttgagttgtattgaattctctgaacctcagtttacatcaccaaaatgacaggttaggtggtaggactaaagcaggttaaagcagatgggatcttcttacacactaaggtatgtatttctttttctaaaggaaaatcttcacccagaagtccaaggtaccagtgttggacgaaggattaacatctgttgaaacctacacccctgcaattagagcaaatgacaataaatgtatgtataataattttgacttcaggattattccatttttgtgttttgagtgaagagttttctgttcttagaacaaaataatctattgtgttattcagatttttcctcctcagtt

SEQ ID NO: 4345 - DNA, 2300 bp, Homo sapien
ttttaaaaagttgttgggtctgcttttttgttcttttaggtttgctgctgtgttatcagactgctaacactttcttctttttttttttttgagatggagtcttgctgtgtcgcccaggctggagtgcagtggcgctatcttggctcactgcaagctctgcctcccaggttcacgccattctcctgcctccgccccccgagtagctggcactacagatgcccgccaccatgccctgctgattttttgtatttttagtagagacggggtttcactgttttagccaggatggtctcgatctcctgacctcgtgatccacccacctgggcctcccaaagtgctgggattacaggcatgagccactgcacccggccaacaccttcttcttctaattctctgaacctagctcaagagccccccttaacctctcgcttttcactttttgctgaacaggcactaatgcaactgttttatatacattaacttacttaatcctcaacattcaaaaaaagtagataagaaaactgaagcctaaggttatactgcgtatcccagctcatgacgcatactcagtaagtagctgagctaggattcaaatctagcttcactatagagtttgtgttgtatgaaaccccacccaccacaaacacaataaagatttctggccaggcacggaggctcatacctgtaatcccagcactctgggaggctgaggcaggcagatcacgaggtcaggagttcgagaccagcctggccaacatggtgaaaccccgcctctaataatacaaaaattggctgggcatggtggcacgtgcctgtaatcccagctactcgggaggctgaggcagaggttgcggtgagccgagatcacaccactgcactccagcctgggcaacaagagcgaaactctgtctcaaaaaaaaaaaaaaataaatacaaatttctatttgagactgcctaatattgtaagaataatcagtgaagataatgctatgaacattcttttaacagctaccatttaaacatgttagtagaacaaggcacatcaaaagagcaatgtaggccaggaccggtggcgcatgcctgtaatccagctacttgggaggctgaggcaagagaagaggttgcaggagctgaaatagccccactgtactccatcctgggcgacagagcaagactctgtctcaaataagtaaggcagtgtaaatttctagacatatgctatttatgggcatggtcctaaagttcttagagtaattaataatgcccatgcttactaagtaaagatatcgtagtccaaacttcagtggactctcatcttaaactacttaagatgcagatttttatgtaagtatgtagttttacagctttagagttaggagttacctttaaataaccttgttaaaaacgtgtgtagggtaagaaacatacaaataggttcagttttctgacccaccaattctaggtgaagtctctcccatttactagtgttcccctggccctcttgttaaccaaactggattctaagtgtttgtcagtatagtccaccatgctctgtgtgacatgggagcaggtgccatttctacttgactcactgtttgatcttcaacacctagaataaacacagtaggagctaacaggaatacatacttcaggaactcaaaacattttttgatcactaaaataatattttttttctttttgagacagggtctcattctcttgcctgggctggagttcagtggcgcaatcacggctcactgcatccccaacctcgacctcctgggtccaagcgatcctcccctctcagtgtcctgagtagctaggaatacaagtgcatgctatcgtgcccagctaatttttttatattttttgtagagatggggtctccctatgttgtctaggctggtctcgaactcctgggctcccgaagtgctggtattacaggcgtgagccactttacccagcctgaacatttattttcattgtccagtgattattttggaggtgaggacagagagtagaatgaaattcttaatttctgagaattatagaaacttaaaactggtggataagttaaaaattgcaataatttggcagggcgcggtggctcacgcctgtaatcccagcactctgggagtccgaggcaggcagatcacgaggtcaggagttcgagaccagcctggccaatatggtgaaaccccgtctctactaaaaatacaaaaattagccagtcatggtggggggcgactatagtcccagctactctggaggctgaggcagaagaactgcttgaacctggt

SEQ ID NO: 4346 - DNA, 2300 bp, Homo sapien
aagaagtattatgagcattttttaaagccagtgttaactcagatgtaagagagccagttgagttttgaatatttaccttctgtgtttttcatgctgagtttgcattactgggtagacagtatagcctgcaatgaaataaggcagaatagataacatccgtgggtacatcatatagtaaggctgaagtgctaatttatgtaattgatgttttatttttatgtgatataggatgcattctttatatggattatggtaaaaaaaaattagctctaacaagtaaaaagttacataaatcaattttttaaataccactatagatttttgaaaataaccttgcagatagtaatgaaatcagaaaaggttagttctgaaagaatatttggtctcagggttgaagacctgagacctaatgcaatatttaacatttcatttagaaaataccttaaaaagatttctcagaacctttaaactattaagtcttgatgatacagaagttttgctttgacttggtaggtagcttttgttgcacagtccttgcttttgagaagcattcattcataaataggtgccttaaacataaatattaacacaatgcaaaacatttaacagtgttcctttgggatagctcagtataaaagtgagcaaactgttttccaagtttggatcgaatccaagtacagaatttaaatgcaaacaagatagagaaagaagagaatctagaagaaaagaaatgtctagcagcctgattggatattcttggtttggtggaaatctaaaagctgtgtttgatacagagtaacaagtgggaagacattgaaatatttccccattatcacctgtgttggtctaccgctcctaatagcaaaactctcatttgatagatagaatgacaaggaaggtactgcaactacaagtttttatttctgggctccaaagcatactctccttttctggttattctcaggtgagccactttggcatttgggggaaataaaaagggattgtttttaccactaggaaatacaaccataagatagactgtttattaggaaatcgagaagagagtgacctgtgcaaatggtccaccaaaaattaccacctgaaaacccgacttttgagtttaaatttatctgtaaattaagctttaaaacttacttggattatacatgctcagtacaagtaatcagtgggatcagttttatcattgggactaggacattacggaaaaccttgtagtagaatcttaaagttgtactttgtcaccaaactcattgacttgaaaaaattaacttttggttgtggtggtgggtgtgggttgtcagtctagtctttttttttttttttttttttttttttttttttttttttttttgagacggagtctcgctctgtcgcccaggtcggactgcggactgcagtggcgcaatctcggctcactgcaagctccgcttcccgggttcacgccattctcctgcctcagcctcccgagtagctgggactacaggcgcccgccaccgcgcccggctaatttttttttttgtatttttagtagagacggggtttcaccttgttagccaggatggtctcgatctcctgacctcatgatccacccgcctcggcctcccaagtcagtctagtctttattgtaatcagaaccataaaggcaaaatgaaccaatattcattatatatattacatgtaggtgaatggatattttgcatgttaatgaattttagtaaatagattgccagggaagccttgtcctgttttctttagtattttaaatcattggcagttcatcttcatttgaaaataaatgccaggcacatagtaagagctcagtaaatataggtaaagggaaggaggacgacgcaaactctttttaaaaatcagttgctatgtgcagttcttaattctgttttgcgatgaataattttctgactttttgaatgcatggtagcactttggattacattaatatacttgactgtatttgcatgtggctatcatagttaccagtgaatatagaggtctgattaaatgggatactaaattcttttgttttttcagtataactcaataaatgcgcattctgattacagactgctagatttggttgttcagcctgtcccccggccttctcagtgttcggagtttattcagcaaagctccatgaaatctcctttgtacctagtatcccgttcactgccctcaagttcgcaattaaaaggatcgcctcaggccatctccagggcttcagaattacatttgcttgaaactcctcttgtagttaaggttag

SEQ ID NO: 4347 - DNA, 2300 bp, Homo sapien
ctattaaaatctttggctttttttcctgtgttgttgggatttttcttactgatttatagccgctttgtatgcattagggaaatcaaccttgttgtgagatttaataatgaaatgttcatcttatcctctatttttctttatacaaaaatgttctgcttttaacgtttctagattttggtttagggaaaaatgactatatttctgtgcacatgaacacacgcagatgaacactcttctacacccaagttacaatgattccaccgtctagtaagagaagcacgaggcaatttcagatgtaaatttttagggaatacctctacacattgtacttcttgagttgttggcctgtataagccctgtggagcatgtggaaatactctagttccagaacaacaaaagtaacagatggccctgatctgccaacagtgggtaccatttgcttccccaagtaactttgtattcacagaacgtatagggcagtgcaatcttgccattttttattctgccttggaagttgtcagcctccaaaaattttaactgccagattgatcattaccattcttagtgtatatcttcagaactttttcttttctacttaaataaatatataaacaagttttattggttaatgttttgtcattttcatactgtttttaacttgctttttaaaaaactaatgattttccaagttaatacatattttccttatatagggctacatcgtaattcattgtttcactgtatttttttttttttttttttttttttttttgagacagaatcttgctctgtctgccaggctggagtgcagtagcatgatcatagctcactgcagccttgacctcctaggatcaagcaatcctcccaccttagcctactgaatagctgggactacaggcacacaccaccatgcccagctaatttttgtatttttttgtagttagggtctcaccacgttgcccaggttggtcttgaactcctaggctcaagtgatctgcccaccctggcctcccaaagtgttgggattacaggcatgagccattatgcctggctcttactgtatattcttatacttaatcttttgcaatttttgctggtgtttctgtagactgtattctttgcattgggatcattgggtcaagacctatatttaattataatttttatagatatgctcaagtgaaccttcaagataatcctgtcggtggggtatgagttgaacactggcattaaaaaaaataaaaataaataaataacagtaaaaaaattctcctacctgattctggaagacttctgtgtaagaaacactccttcatttaaatgatcttatggcccacaaaggacatcttagcacctctgcatggtgtctgagactgccaaatttaactcaggttctccaatctgatcttgctgcaaatcaaccaaaaaacatctactaccaagctctactcttcccttcctcatggacacagcgtgcttgtttccatctatagatctcagtctttcgcacgcttcccactgagtgtcacttcttaaaaacctgatgttcctctgtcacaccacaccaaccattcagctctatccaggccacattagttttttgtcttctttgaatttttgtctactttgcttttttattattttatatctaaaaagcagcataaaattctttaaacgtgtcattttactgacattcttagcaagattattatgcagtacttagtattcaacaaatttttaaagtacttttcaattatttataaagatactttacaaagtatctttgaaattctacatgtagatttcttgttttgtacatttaaatagctttttctaaaactaaactttgataaatactgctttcaggtgtatggttgaagcctggaattttttgcggcaacattgcaataggttgaatatagaggagttactgaagcacatgtatgaagtctgtcaggaaatgggcttgatggaagatttactgaagttaccatttacagacactgagcaggtaattacttaccgatgtaaacttgtcagaaattcaagataaattggtagtttacaatctattttgttctttttaggaatgtttagtgaaatttttgcagtccagtgccagcgttcagaatcatgaattccttttagtgcaccatttgcagcgtgccaattatgtgcctgccttgaagctgaaccaaactctgaagattaatgttatggtacgattaaagttgtcttattatgggggataagagaataaggaaaactggaggcttttttggttgttatataagagctta

SEQ ID NO: 4348 - DNA, 2300 bp, Homo sapien
ctagttttatattgaaagcactttttaggttccttggaggttttgccatttctagcttgtctttataaatctcataatgaatagaataattcttttgagtgataggagtttgagaaattttgcattgtgattctaatttatttagatttactgtatggaaacttatcttttcttttattcttgaaaggtgtgccattatttgatggttcgtgtcatttcatggatccacaaactatacagtctatccagcaatgctatttgcttcttagcaatcttaatatagtcttgagctgttttgcatcagaagcccgagagatcactgagagaggtacgctctttgttttatcaaatgagtgttttattaaattttacttcttgactaagagaaacgaataacatttcccatgtcttagatggatcattatgtaaagaggactttatttctccagtgctagggtttttgtttgtttctttgttttaatgaaaagctacagaatgttgttagacatgccatgagcccatgcttaaataagcttgggaaattctgaagttaatgattattaagattaatgtatttgcagtaaagtttcaaattaagttatatgtattttttattcaaagaactcataaattttttctgttttgcaatttcaaaacaaaaacaagccaatttcatttaaatgcctgttttgaacaatctttattagtgatactatgctagtttgtattaatgagtaaatctgagttctggaattagctaaatgaaagtgtagctgaggtgaaagtgtatttacctaaaatgtctattttagggagtgacttacttattttagcattttggaggtttgcttgacatcattttggaccaaagtaaactaaatacaaagatgaattagttcaagagagatacatatatcttgaacaaatatgtatatgtaaaatatatatttacaaattatgtaaattaccaagtgattaattttgaaaactgtggagcatcttgatttttttgtaagtaaacaactgatgttaactcttctttacaggactgatagacttaagcaataagtttgtggtttcccacctcatctgtcagtatgcacaagtggttctttggttctctcattctgggcttttaccagaaggcataggtaaaatatttacttaatctataagtattaattaaaacattctgaatctttataattttgttattgtattctaatgctttgggtttcttttcttccacctcacttatttttctccttaatttaatttatgcttaaccttcttttcttacatttttccttactttgtatcttcatcctatgcctgacacacagtgctcatacatgtttattggattgaataacatttagaaggaaagcaaatttgagaaaacatagctcctgaaaatgagttcagcaatattactagctattatttagatccatagaactatagtttctataactcagttttcctgtttcctggtaatggtccttttaatatggttactgactaatatttcttcaattaaatacccccttttatctagtgatttatgccagtaccaacaataagataatttttggtatttgacttgtgctatatttgtttagaatataacttgcaaagccttcagcttcttgcatttccaggaagccattagattttatttagaagtgcctctgccactgtacataattgttgatcttattttttcataattctcttagattttgatttgtagtgaacatttcttgctttcaaattattatttgtgcctaaggagtaaagttatttagaacagtttccaggattttaagcccccatccatgtagttagactttcatgacagatcattttctcacttgtgcctctgtaaataaaaagatgtgtagtaatcttttattacctaaatatacccaccctgtgggttaaccaggggttgctgtaaatattaaattacagtaaaatattaatatgtattgttgagatatttggggattattaccagctttttttccaactcttaaaaatctagatgattctgtgcagttgtcaaggttatgctacaactaccctgtaattcagaactactacaccagtcgtcgacagaagtttgagcgtttatcaaggtatagtaaaacaattttagaaattacatctgtaagaagtcaaagtttctcagaatagtgttcatcgttttacaaagtgattaaatgggtagaattctcagttaagtatcagaatttgctattaccattactattttatttctcttttttaaaaaagta

SEQ ID NO: 4349 - DNA, 2300 bp, Homo sapien
tattctgacattcattcatattgttgcatgtagctgtgattcactctcattgctccattgaatttttatacccattgagttttagtttttatttaatttttcatttttagaaattttttcaaatctacttgatttttcctttaacatttacagtttcttatcaagctaaatcgctgatttacacaaatatattagacatttactttctaatctctggtaatttcaatatctgaagtcctcagtcatctgattctgctggctattggatatccttgtgtgttttgttatttggactgtgagcttcttttcttttttttttttttttttttttttttgcgggggacagagtctcactgtgtcgtcaggctggagtgcagttgcacaatctcggctcactgcaactgcctcctgggttcaagcaattctcctgcctcagcctcctgagtagctggaattacaagcgtatgcctccacgcccggctaatttatttttgtatttttagtagagacaggttttcaccatgttgtccaggatggtctcgatctcttgagctcatgatcctcctgccttggcctcccaaagtggtgttacaggcatgagccaccctgcctggctctgtgagtttattttctttgttgctttaactttgagaattctttaagaattctttgagattccagaggatatgtggttgtttccgtggattgcttggagcaacgaacctgaaaataacttgataataaattcttctcttgaggattttttttttttttgagatggagtcttgctctgtcaccgaggctagagtgcagtgaggctcactgcaacctccacctcctgggttcaagtgattctcctgcttcagcctcccgagtaggtgagactacaggtgtgtgccaccatgcctggctaattttttgtatttttagtagagacgggttttcaccatattagccaggatggtgttgatctcctaaccttgtgatccgcctgcctcagcctcccaaagtgctgggattacaggcgtgagccaccacgcccggcctcttgaggatttccatataacctagcttgaattctggccacacatttgtatgaaagaaaatgttgtctttctgagtaagagactcagagccatggtcaatgtggacagctttattgtacccatcctgtacaatgggtattgttcttgctcacctttaggctgatgtagcctagtggagtttaatggggttgagggatgagcttattagttctctttgtcctaggcttaatcttttgcccctggatcttagagtgcccagaataagatcagggttcccaggactggatttcatagctaaccaactcagatggctaaaatctttctgtattttaactagtatttttggttgtttataatgggagtagtcattctgggaatctgatcttctaaatgaaagacaactttatgcctatattatttctatcctgcaaaagatatgtaccaaacttgatttctggggtttctgtgaatttatacatttttcttggactttctccccctttactgaagaagtgatttttctaaaagacaccaatcactttttcttttttctgtagggaggatggtggtggtgaggtgttctttgcaaggaggttagacaatgagatgaattgcactgaactagtgtttaaagaatctagggaataatgtatatccttagtacgtctggcttaatgaatgtttactttcctaaagctgtttgggaaatactttcttaggagacagtagaataccttggtcccagatgcatgtcatttgtttttaagactggattttgctctgtcgcccatgctggagtgaagtggcacaatcatagctcactggaggcgcagcctcgaacttctgggatcagttcatccgcctgcctcagcctcccaagtagctgggacttaaaggcgtgagcctccgcatctggccaatatgtattttgtaaccagattttagtttttctttattttgttggtggcttttactgtttttcctggctggacataatcaagtatattgtctacaaatgtgtcataataatgttttcttttaaaaatatttacagtggaagtatgcgagacttaagagctcaagtgactagtggtctcctgccatttccagaagtgactcttcaagcccttggagaagacgaaataacattagaatctgtgcttcgtggaaagtttgctgcaggtaaacataatgtcactgaacatttactaatacaattgatttgtaagataaataataataagtatatattat

SEQ ID NO: 4350 - DNA, 2300 bp, Homo sapien
gaggctgaggcaggaggatctcttgagcccaggagtagagaccagcttgggtaacacagtgagacagtctctacaaaaaataaaaaataaggccgggcgcggtggctcacgcctataatcccagcactttgggaggctgaggcaggtggatcacgaggtcaagagttcaagaccatcctggccaacatggtgaaaccctgtctctactaaaaatacaaaaatcagctgggcatggtggcgcacacctgtagtcctagctactctggaggctgagacaggagaacctcttgaacctgggaggcggaggttgcagtgagccgagattgtgccactgcactccagcctggtgacagagcgagactccgtctcaaataaataaataaataaataaataaataaaataaaaaaattaatgggacgtagtggcgcatggtggtccatgcccatagtcccagctacttggagggctgaggtaggaggatcatttgagcccacgagttcgaggctgctgtgagccttgattacaccactgcactccagcctgggcgacagagcgagacactgtctcaaaaataaaaaaatttaaaaagcacatatgaaaggtaacagaaaagtagaaactttcctgataaaagagcatcttcttaaaatccctactctacctcatgttataatccttttacttactacttagtattaaggatacgttccctatctgtttgaaacatgtttggcgctgggatttgcttcaaaggaagatactaacaagaaataagaaattccacaatgaaaacccgcggtgaccaaaaagataacagtgatttggggtaaaattttgactaaaaagattaggctaggctgcgcgagcatttttggccatgaaagcacaggaggatgctagaaaaaacagcaccgtggaaaaagcgtttccccagaagtctgggagcccacctttggcatgaaaagcgggagcacaggttgtagtgagccaagatcgtgccacagcactccagcctgggcaacagagcaagactccgtctccaaaaaaaagaaaaagaaaaaaagaaaagtgggagcacagaacagaaaatacagaatgcaagctgccaattatgggagaaagattatcactcggcccccagctggcagggccacacgattacgtgacaagagagtccgcctgcaatcgcagcaggcggctggcagagcccggcgcgacccccagcgaagactaccactcccaactgcgcacggggcgcgccgccggggccgccagggcggcttcacgcgcaaggcactgtgggactcgtagtctttctccccaccagctcctcggaggcggagagacccgatttttttgtaaatgatccgcccttccaggccctgcttctctttcctccctttccctcccacctccttctttcaccgagagtttgaaaattcccgcggagccggcgctagagcgcggaaccatcgcgagaactctggtccctgcagccgcgatctcccgccggttctcccctccctctccgccctttcctctgctccctcccttccggggcgtgtggaactcggttttgtcggcgcagggtaatgcgcagagcggggccggcgctgtccgaggcgagcaggcagcgttgcaaggggaaggacccagaagcgcggcgggagcagcgactgcgttttagccgctgagcggtctgcaggcctacagcccgcgaaggcactctcgggggcgtgtggctctgaggtggccggggaggtcgcaggcggcggccggagcgcagaggagcggcttcagccgggcggaggggtgtgagcccggcccgtggcggccacgtctcccgggagatgctgtgacggacccgcacgggaggagctcgcgcctggcctggcgacccggtggactcggcccgcggcggcgcgctcacccgccccgttcaggtagggggaagggagggagggggttgggcccgcgcggcggagggcgggtcgcgcggcctggacccgcggcggcggcggcggcggcggcggcggcggcggggcttctgccccgcgagcgccgggcctaggccgggcgtgcgcggggccaacggatggggctcgagggggcgagcggtggcggtggcgggtacggcaggctcgcgggcgccgggcttcgttacataatctcggaccggaggagcggcggcacatggcggcggagcggcgctggtggttcgcgtcctgcgccggcagtcgggtccctttacggacggccggggccgcgaccctttcccactgttctcccacgcgatgga

SEQ ID NO: 4351 - DNA, 2300 bp, Homo sapien
tccagtctgagcaacacagcaagacacagtctctacaaaaataaaaataggctgggcatggtggctcatgtctgtaatcccagcacgttgagaggctgaggcaggaggatctcttgagcccaggagtagagaccagcttgggtaacacagtgagacagtctctacaaaaaataaaaaataaggccgggcgcggtggctcacgcctataatcccagcactttgggaggctgaggcaggtggatcacgaggtcaagagttcaagaccatcctggccaacatggtgaaaccctgtctctactaaaaatacaaaaatcagctgggcatggtggcgcacacctgtagtcctagctactctggaggctgagacaggagaacctcttgaacctgggaggcggaggttgcagtgagccgagattgtgccactgcactccagcctggtgacagagcgagactccgtctcaaataaataaataaataaataaataaataaaataaaaaaattaatgggacgtagtggcgcatggtggtccatgcccatagtcccagctacttggagggctgaggtaggaggatcatttgagcccacgagttcgaggctgctgtgagccttgattacaccactgcactccagcctgggcgacagagcgagacactgtctcaaaaataaaaaaatttaaaaagcacatatgaaaggtaacagaaaagtagaaactttcctgataaaagagcatcttcttaaaatccctactctacctcatgttataatccttttacttactacttagtattaaggatacgttccctatctgtttgaaacatgtttggcgctgggatttgcttcaaaggaagatactaacaagaaataagaaattccacaatgaaaacccgcggtgaccaaaaagataacagtgatttggggtaaaattttgactaaaaagattaggctaggctgcgcgagcatttttggccatgaaagcacaggaggatgctagaaaaaacagcaccgtggaaaaagcgtttccccagaagtctgggagcccacctttggcatgaaaagcgggagcacaggttgtagtgagccaagatcgtgccacagcactccagcctgggcaacagagcaagactccgtctccaaaaaaaagaaaaagaaaaaaagaaaagtgggagcacagaacagaaaatacagaatgcaagctgccaattatgggagaaagattatcactcggcccccagctggcagggccacacgattacgtgacaagagagtccgcctgcaatcgcagcaggcggctggcagagcccggcgcgacccccagcgaagactaccactcccaactgcgcacggggcgcgccgccggggccgccagggcggcttcacgcgcaaggcactgtgggactcgtagtctttctccccaccagctcctcggaggcggagagacccgatttttttgtaaatgatccgcccttccaggccctgcttctctttcctccctttccctcccacctccttctttcaccgagagtttgaaaattcccgcggagccggcgctagagcgcggaaccatcgcgagaactctggtccctgcagccgcgatctcccgccggttctcccctccctctccgccctttcctctgctccctcccttccggggcgtgtggaactcggttttgtcggcgcagggtaatgcgcagagcggggccggcgctgtccgaggcgagcaggcagcgttgcaaggggaaggacccagaagcgcggcgggagcagcgactgcgttttagccgctgagcggtctgcaggcctacagcccgcgaaggcactctcgggggcgtgtggctctgaggtggccggggaggtcgcaggcggcggccggagcgcagaggagcggcttcagccgggcggaggggtgtgagcccggcccgtggcggccacgtctcccgggagatgctgtgacggacccgcacgggaggagctcgcgcctggcctggcgacccggtggactcggcccgcggcggcgcgctcacccgccccgttcaggtagggggaagggagggagggggttgggcccgcgcggcggagggcgggtcgcgcggcctggacccgcggcggcggcggcggcggcggcggcggcggcggggcttctgccccgcgagcgccgggcctaggccgggcgtgcgcggggccaacggatggggctcgagggggcgagcggtggcggtggcgggtacggcaggctcgcgggcgccgggcttcgttacataatctcggaccggaggagcggcggcacatggcggcggagcgg

SEQ ID NO: 4352 - DNA, 2300 bp, Homo sapien
tgacgggtctattatactatttcgtttattttgtatatggctaaaattttctgtaataaaacgcttgtatgaaaaggcaaaagtgatgtacaatgttagctcttaagatctttaaatgaaccagttgtggtggttgtgtgcctgtagtcccaactactcagttggctgaggtaggaggatcgctagagcatcttcagcctgggtgaaagggttagactctgtctcaaaaaaagaaaaaaaaaatcggcagggcacagtggctcacgcctgtaatcccagcactttgggaggccaaggcgggtgcatcacctgaggtcaggagttcgagaccaggctggcctatatggtaaaaccctgtctctactaaaaatacaaaaattagccgggtgtggtggcaggcgcctgtaatcccagctactcgggaggctgaggcagcagaatcgctcgattccgggaggtggaggttgcagtgagtcaagatcgcgccattgcactccagcctgggggacaagagcgagacttcgtcttaaaataataataataataataataataataataataataataatcttacttaccactggggaggtagataagggaggcagatagtaattgttgggatatgagtgatgctggttctatttcttggttatacaactgtatttgctttgtaataactcacagagctttacatgaatgctttgtatttttttgtatgtgtgttgtgtatcaaaaaaattattatatatttttacataaatcctaacttagaatctcagaataacagtagtgttttattttgtttgaagtgagacacactcacccatgataccatcaaatgactttaaatattctgagctattcattcatgttgtaaccttgggtgctcccctaggtcttttcagttttactccaatttggaaagtggaatggtttcaatctggggggatgcaactttttcccagcaaagtcctctccccacaatgatgttcaccaaggccagggcagctagtacagtgccctgtgcatagcagggcagttgtagaactgggctgaatcagaaacaaaattagtagcaaccactggttcaaggtaagagatgcattaactgtgcatgaattccatatgtgttgtgagggtttgccccatggccagtccagggtttaggtcttagaaaatagctttgccctgttaagaaccaaagaatgacttcaagacatactcagctgtttggctaaatttctgcaggaggaaatgtcttcacagccgatttttttgttttgttttgtttttgtttttgagatggagttttcctcttattacccaagctggagtgcaaaggcatgatctcggctcactgtaacctccgcttcccaggctcacgcgagtctcctgcctcagtctcctgagtagctgggattacaggcgaccaccaccactcctggctaatttttaaaaatacttttagcagagacggggtttcgccatactggccaggctggtctcaaactcctggcctcatgtgatcctccctcctcagcctccccaagtgctgggatcacaggcgtaagccaccacgacccgccagatcctagaaaattttaaatgacacgcgtggctcaccttttatttatattgcatattgctgcctgagaggattgcctcactttccacagctcaggctgcctggtcaaaagaccagaggcccggaaggttatgaaatcggaaactttaaaataattatcattcattgtttctatttgtgaaatatatatgtgtgtgtgtgtgtgtgtgtgtgtgtgtgtgtaaaacttatgaatggatataatcttatatacaaggttaaatgccattatcccccaggcaggtgggtccaggtcgaagtgccgtgaggaatgtcgcttcaaaagggctgcacccaaaaacctgtcactcttgtttcattcggcccagtgtctgatcgcacctcctgtcactcaagacctgagggggtggggcctggagccccatccagtcagcggcgctagcgtgagaactgtccaatcaggcgtgcagccagagaggaaggggcggccttggggatctggcggggcctttgtctccttgcggccggcggggtgctgggttcccgtctgctgcctctcggagagtcccgggtgactgccgcaggctccatcgccctgtggcctgcaggtattgcgagatttatagggaggacgctgggacccccaaaagctgggaaatggtgagtgtgcggagcagggtgtcccgagaagggagagggggtggttggaatc

SEQ ID NO: 4353 - DNA, 2300 bp, Homo sapien
cataaaaatagaagaaaacgttgataaatatttctacaagctgtgaggataaatcgggcttatgactaaaaccaagaaatattaaattaaaacattgataaagatacaatataaaaccagaatattgtgagtgttaggaaacgccataagccaagtaaaaaggaaaatgccaaatggtcatctttttgcaacgtatataacagaaaaagggaagcacacagtttctgtctgctccagaaaataagaaagctctcaaaacatatggtacaaggacaaaggaggcaatgtatagagcccctcacttacgatgggacaatttggccgggcgcggtggctcacgcctgtaatcccagcactttcggaggccgaggtgggtggatcacctgaggtcaggagttccagaccagcctggccaatatggtgaaagcctgtctctagtaaaaatacaaaaattaatcaggcgttgtggtgggtgccagtaatcccagctactcaggaggctgaggcacgagaatcgcttgaatccggggggcagaggttgcagtgagccgagatcatgccacactgcactccagcctgggcaacagagtgagactcggtctcaaaaaaaaaaaaaaaaaaaagggataatttgagctcaaaaaatagatacagactgcagtgtatggaatctcattaaatacacaaaaaataaggttagaaaaaagtcactcacattttttttgtttgctgaggccacgccgtcattgttatgacaattgattaaagggagaatcaagcttttattcttcctttcctaatagggtaggttttaatgtaatggagagagttcatgagaaaacgccatttttaatagaagaatgagaactaatacctgtagagaaaataattagaaaaccactatttggcaactctcactgagataagtgaaattaagaaatagtaatcaataaataatgaacagttacatgaaaggaacaggcagacattcccgaacaaccttaaaataaagtggtaaaaccagacacgtgtatccaaatgtgcaggctgaattgaaacatgctggaagcttaatatatagagtgatttttcattaataatatatcgattgtaaggccgtctgagcaggctgcgccatggtcaagccattgtgatccctgtgacccacacgtgtacatccagaaggtcctggagccagaaagtctgggacaacaggaaaaccacaaaggaagaaaaacggctagtttctgtcttagctgattagccaaccttgcagcattttaccgttgtgacgtgcactaccctaactgatcaatcagcctagtgacactgtgacccctccctcttgtgacaatgtactttgtgacattcttcccccgccggtaataaacggcccctgactgtaactttccactgcttacccctcacctataaaactaactccaatcccacgaccctccgctgaccctcttttcggactcagcccgctcgcacccgagtgagtaaactagccttgctgctcacacttaacctgtttgggtagtctcttcaattaggcgcgagcttaacatcgatcatatattgaaacaatatttttggatatatttggttaaataaatcattgtaatcaatttcacgtgttgttttcttttctattgctactggaacacacgcggctcacattttatttctatggggcgttgctacctgagaggacattgtcttttcaaaattcaagctgcctctaatcccactagaagcaagaaaaaaaaaaaaattcaggctgcctcctcaaaagaccagaggccaggaaggttgtgaaatctgaaattttagaataattgtcatcatagtgtttccaattgtaaatatcacaaatattactcataaatggacataatcctgtgtatgagcttgaatgggaaagtcccccggggggcgccaggtctcagcacagggcagaatccatgccttagaaaaggactgcagggaaagaacctggcctcactcagcgccgtgtctgattgcatctcccgtcactcaggactgaaggggcggggcctaaggccctgtccaatcgggcgctgggaaggggactgtactctcaagcgcgccgcgaaaggagggagcagcttccgggacctggcgcggcttttgtgttgggcagcgcgaatgtggcgagctcggtgcgtctccgctgctccttccccttatccctgggaggtccaagtggtcccgcggcagcttctgttgctctgggacctgcaggtcccggaaggtccttagggaggaccccagac

SEQ ID NO: 4354 - DNA, 2300 bp, Homo sapien
atctgccataataaagtcctacctgatgtgcataagtgagttaataatatcagtcctaagactacttattcttaaaaatgcctgctcacaaagttcaatctttgtttgtattagtaacttacattttgaaagggattccaccaacctaagtaataagaatgactcactgcatctaaatggtttatgcaatatagttgccaaaactttttctgctaaaggtctattattttgtgtcactgcagtggtgcttagggaaccagacaccaaaacacagtctgaacactaagtgtttaatgagtttccctggtagacaatattttatatgtgctgtcacttgttaattggggagttgagcccattccatgtgattacaccaagagagaataggcttattaaatttaattgagtagtaaataaaaccaataattgatatttaacaatttactaatacaatttttaaatttctattgcacaatgtcaaggcagaatggaataagaggaaatatggcacatgttttttaaaatgacattaatgtcaccacttccagatgctattcctgtgaaatcacataaattcccaaatcaggcttttttaggcaagaaaaactagtttttcatacctagtaaaaatgacaaatgtctaatgattttcagtcatctaaaaaaagagttatgtcttgcctaacatacttttaagattttcaaccaaaaatattcaggacagcacagtattagcagagagatgagcaagcagaccaagggctgaggacacaacaccctgtaaagttttcacagggggacatcaacctaaagacattttggtaatatgcacacttaggaaagatgaagagaggcacaaagatttttttacagtagagtgtcagatggtttattctccgctttcctctcatgtaaaatgtttgtaaacagaaaaatattttggccgagcgcggtggctcacgcctgtaatctcagcgctttaggaggccgagacgggcggatcacttaaggtcaggagttcgagaccaacctagccaacatggcgaaaccctgtctctaccaaaaatacaaaaattagctgggcgtggtggcgggcgcctgtaatcccaactactcgggaggctgaggcaggagaatcgcttgaacccgggagtcagaggttgcaatgagtgagactgcatcattgcactccagcctggcgacagggcgagattccgtctccaaaaaaaaaaaaaaaaaaaaaaaaaaagaatatggtttgcttcctcattaaccttatcaaagcctctcatttacgccccttctgtggaccccaaaccacaaaccatgactgcggtacctggtttatgaatcgccgtttgctcaaacacacggtttaacgttttaacaaagcctcggcttaattttaggggaagaaaggtgggactggaagccccatgaaccacagctcctcccatgctggaaccccgcacaccgagacaccgagtcggggctctcccgcatcaccctcccgtggtcaccacactacctggataggggaggcgaggggttcccgacagggctccggccggcggaagtggcgcccgcaggtacagacaggatgcaggggttccgctgcccgccccgcccggcccggccctgaacagaagaggactgagccccggctacgccacggcgactcggtccgcaggttccggagccgatggcgtggaggcccgagtcgcgccacagcaggtttcaaccagccctcttctccacttcgggaagccaggcgcagtccactcaccattcctcggcttcccgggtgtcctggcgtcagctagggatgtcccaatactcgcaggtcacagggtggcagaggctgctgcagagccacctgggcctcccagagccaagaactagcagcggagactaacaggaagagccggctccggcgaaggagagacaaagcaaccgccaggcagatcccggaagccgccctctcctttccggcggcgcgcctgattgaacggtccccaccccagcgcccctgattggatggggcttcaggccccgcccctcaggccctgagtgacaggagattgcgatctcacgtgaggctggatgaggtcagaatgaccgcttttggcctagcggtttgtaggcggtgcgtccttcctgcgctgggatccgaccatgcaagaaggacattcacatttaacctgtatacaagttatagctatttgtgccttttatatatatatatatatataaaattggaagcaatataatgacagttctgtaactgcccagggagttca

SEQ ID NO: 4355 - DNA, 2300 bp, Homo sapien
gtgtggaagggctccagtgctgttttaattgcaggccacgcagaccaagcaagaagggaatatcgtggccctcttgttgtgctcgttttaagtctgatccgaccttgtcccagtcttttacattcatggttccatattccgggaaccaaagagaatacttttttaccagatagaacaaagatgggagattttgggtactcacaattacccctccgcggcgcagtaactgccggacaaggcttcagtaattagcaaacttactctcagcctgacccatagtttccggaggttaccctggaattttccgagcgccctacttacctgtagagcttgaagtgaaaacgtactcgggcgtcctttgtcagtcatcctccactttccactctctggcattccttcactggattatttgtagagattaccgggagcccggcgttgggcaccagagaccagcctgggcaactgagggagaccccatttctacgaaaaaaaaaaaaaaaaaattaggcaggcgtggtgtccagtgcctgtaatcccagctactccatgagagattggacaaaacctgggaccagagactgattttcttctaaaatgctttctccaaaatatttttaaaagaaaagggggaaattggaaaggaaaatgttttgagccccccagatcactaagctaaaggggaaagtcaatctgggaactgcttagggcaaacctgcctcccattctattcagagtcatcccctgctcactgagatgaatgcatatcttattgcctcctttggaaaggctaatcagaaactcaaaagaatgcaaccgtttgtctctcacctacctgtgacctggaagccccctcctggcttcgagttgacccgcttttgcttcaggttgtcccggatcaaaccagtgttcatcttacatatgttgattgatgtctcctgtttccctaaaatgtataaagctgtcagatacagtcagtttctcttccaaggtttggcatgttaactttcttgtttttttgttttcgaactcaactttcttgttctccatgcctccttgcccttagttactgtaaacaaccttccgtcagttctaatcaataactcacatctgttcccttggttacctgctctgcacccatttctcccttggaaaccgcaagtcccaccattgtaactcacatcccccttcccccttccttatttgggaaaatattcacaaatagccaaccgggtcagtttagatcgtgcggtctgaccccagcccatgccagaggtagggactgcgttaggaataaaaacccctgctttcctctgttcagtgtgctcttgcgatcgtgattgatgcgagcagcacgcttctgcagaagtaaattgcgttgctgagaaaactttcgcttgagtgctggtttcactttgcggcaccgagcatttctctccaacaaaaccaagctgtgctctgaccaccttgggcacatgtcatcaaggacatcctgaggctgtgtcatgcatatgcatccccaaccttggcaaaataaacgttctaaatactcttaccccaaatgctcagggagactgatttgaataatcataaaactccaagcctgcactccagcctgggagacagagcaagattctgtttcaaaaaaataaaataaaataaaaaaactccggtctcccgcacagaggacactgcgtgaattactctttctctattgctattcccctgtcttgagaaatcggctctgtctaggtagcgggcaaggtgaactccctgggcagttacagaactgtcattatattgcttccaattttatatatatatatatatataaaaggcacaaatagctataacttgtatacaggttaaatgtgaatgtccttcttgcatggtcggatcccagcgcaggaaggacgcaccgcctacaaaccgctaggccaaaagcggtcattctgacctcatccagcctcacgtgagatcgcaatctcctgtcactcagggcctgaggggcggggcctgaagccccatccaatcaggggcgctggggtggggaccgttcaatcaggcgcgccgccggaaaggagagggcggcttccgggatctgcctggcggttgctttgtctctccttcgccggagccggctcttcctgttagtctccgctgctagttcttggctctgggaggcccaggtggctctgcagcagcctctgccaccctgtgacctgcgagtattgggacatccctagctgacgccaggacacccgggaagccgaggaatggtgagtggactgcgcctggcttcc

SEQ ID NO: 4356 - DNA, 2300 bp, Homo sapien
cccacgccccagtgcctgctgcttctcagcccagagaagggactttcaccccaagggcccagtctctgactcgccccaggaggaccctaggtgcccctcacagatggaaatggggtccctcaggcagcacctcctgggagtcctctcctctccaccaatgacaagcaagaccttcagggtagagttgtggcagccacacctccagagaccccttggctgctcctggaccacacagctgctcagggaactttaacctctggccccctccacacagcctggtatgacccctgcaggcactcacctgtcactcgcacacagaagggcacagtacacacaacctgggtgagccgctgccagcagctattggcctcagcgttctctcgaaggcattgagcaccagcagccaccgctgctgaacatcaggatgcagttcaggacaccagccctgccccaaccttgacccagacagggggtgtcatgggaccactgctgggtgggtggcagctcagctccaaggtgtccccattggttaagagtaaatattcctactggccagaatcaggcactgggatctctgccagggagatggtcaactgtgatgcagggaccccaaaacctggcactccaggactcaacacccccatagggaggccccatggcacccccactttacaggcacaccagcagaggccactggagccctgagtgaggaaggagccagcccagagcctggggtctcagcagacagtgctcaaaaccaggcatgggctggaaactccctaaagagccgagggtcaatattttcaactttgtcaatgcatccgtctcaaggacggggccctgcagttgcagcgtgaccgcagccttccacagacaacatgtgaatgaacaggcaaggctacactcccagaaaactttactatggacatggaaacttctaattggaaagtgtcataaagtgttcttcttcttttgatttttttttttcccatcacacacatcagagaacaaaactgctgtgccaggatagggtgaaaatgttcccctcctgctgtgggtcccacagcacctgctcctgccagcacccccaccccacaaggtgctgacccaaccagggtgccacatgccaagaaccgcccaaaggctgtggcaacctggaagtgctgttcagcgcctgggcatgtttcccggtcacagtctccctgactttgctggtcactggccctgtgcctgtttttcccactgtggcaaaaggtgatctcaccccgaaggcaggagggtctgacagtagagggcggagatatttcctgtcctgggtctcctgcccagagatcactgttcatcaggccatggctaggccagtctgctgggggaactgtgttccctgtcccctgccttgggagtctagtggccagatccaggttgttacagttaagagcccccagtgtactgggggaagccccggggggagggggtggggatggaggtggaatgatgctccatcaaaagggccctggggtgggtcccagagaacaaacatcaaattgaggcccttttctgaagctggctgcccaaggaatttgcgttttggagtaagatgagaacatggggtcagggaagaaagcattttggttttggaaatgcacaaagttctctgaggctctctgaggtccagatgtttcgctaggtatgtgctttaaaagggcccaggaggagtgggggcgcccagaagggacaatgcagccaggggccaaggtctggcctgcctgcctccccacctacaggcattccagagtttcgtacaaagtcagaaagatgtgcggccaaggagggctaatgcgagtttatttggattgtccagtttaatcgtcaaaacacccctgacatacgggtccttcctggcaggtgaggaaactgaggttcgagtagggcatccagagctggggcgggcagttggcagcctgcagcccctgaggtcccggcagatcttccctggcccccagccaggcacgctgcacactccagctcattcacctgccaatcacctgtccaggactcaggccggcggggcctcccgtcctcccgccagcccccttgctcatcgctggggcctccctgcgaggctgtcagcggccgaggtgggggcccttgccggggtgaggagccgatcgtccaccggatcaggccccctgcagcagcccgcctggagcccgagcatggccgggcggggaaggggcggcggcaccggaattgctccgcccagctaaggccggggccgtggctcctgtgcaagatgggcc

SEQ ID NO: 4357 - DNA, 2300 bp, Homo sapien
ggggtggggaacatttttagcccaaagataccaccagataccaccttgtgatcccagtcacttattctcagggatggacactatattgatctctaacagcataggtcactttcctcttttatactttatataaacatcatgcagcaggagcccttttgtacatggcttttaaaatccagtaggttgttttgagtttttcggtaattctgcatgttgttttggttttttttttttagcattgaattctgttgtgtgaatatcagacaattaatcactccgtgctgatgcacatatgcatgtgttttagttgagggtattaggaacagggctgctatgtaaattccagaaaatgtattggtattggtgaaacatgtacaaatttctgttgggaacatgtgtaataatcacattgttgtgttgtatgtttacgtctcttcagctgtaggtgatattaccagttttccaaaattgtaccactttttacttgtaacacttttcatgccaacaagtaacgtgtgaatttcctagggtacccacatccttgccaacacatggtttttttttttttttttgagacggagtctcactctgtcacccaggctggagtgcagtggcgcgatctcggctccctgcaagctccgcctcccgagttcacgccattctcctgcctcagcctcccgagtagctgggactacaggcgcccgccaccacgcccggctaattttttgtatttttagtagagatggggtttcaccatgttggccaggatggtctcgatttcctgacctcatgatccgcccgcctcgacctcccaaagtgctgggattacaggcgtgagccaccgcgcccagcccaacacatggtattttctgtcattttcatttagtcttctggttgctgtgtgatggtctcaggctttatttacatttctccgattactaacagacttgaacatttcagcacactttttagttattgaataacctctattttgaagacttactttgctcatctcccgctattttagggctctttttcttcttgatttatggtggttctttacatgaagctggataggattcctttctttggtatctctctcactcagtctctctctttctgtattttaataagctcttaattttaataaaattttatttgttatttttcccagtatattaaatattttttatttaagaaatatttctcttaaggccacagagattttgttttttaaatgaggatgtatatttaaatttttattttgcaattcattcataattgagtgtttttgtggctaggaattccattttttccagtaagctaacaaaatataatttattctgtattttgataaggtcttaattttaatagaattttatttgttctttccccagcatattaaatgttttttgttttatttaagaaatctttctctattttaaggccacagagatgctgtttttgtttttttaatcaggatgtatatttaaaatttgattttgcagttgattcagaattgagatttatgactagtaattttatttttttccagtaagctaacaaaatataatgaattctttttcatttgctgtcacctgtcattgtctcacccaagttaatatctcaccctcagagctgacttttctgtgaagactgtataattctgttattttcttcatctttcagttttcagcagccccacagcaccaaagagtcaatggtagttttggtcagaaatcttcagtgggccttttttgctcaatggataagttattttcatattttatttatttgtatgtttaattttaaaatattagttgacagataatattggatatattcaagatatctccaaatacacattgtgtggtaattgttacaaaatcagtatcatctgccgtgacttaaaagtttgtcctccgcctaaattcatgttgaaactttaaactccaaaacaatagtgttaacaggtgggggcctttaggaggtggtgaggtcataaaggctgtgccctcatcattgagatgaatgacttcataaaaggacttgagggagtgagttctgccctttctgcccctctgctgtctgtgaacataacattcaggatgtcatcttgaaagcagagaccaaggtcttcaccagagacagtctgccaatggcttgattttgcacttcccagcctatataactgtaagcaattgagtttatgtcatgtataaactacctagtcaggtattttgttaaagcagcaggaagggactgagacaacatctattgccacccgtgctgtacattag

SEQ ID NO: 4358 - DNA, 2300 bp, Homo sapien
aagatgtgtcagaagcattctctggaggcagttgttccaaatggtgaagagtactagatggatcccaatctcacaggattcttgcttctattgcagaagagttactttccaggacttcaaaggtttagagaagctgcttgattcgtgtggcttgcagaggtgcatgggctttggagtcacgaaaagttaatcctggtcccagcccagcctcttagtagctgtgaggctttgcacaacttccttgtcttggaaagttatataaacctcatctgcaagaaaaggcatgatactgattgcaaaaatggcagcaactcttcatcccttcctgtatttatgccctttgtgatgtgcttttatagctgctttcattgagaggcagaatctgtttcccaaaccttgaatctcactggccttatttgctctggcagtagaaagctgtgaatatgaccatgtgccagtttggggccgaggcacaaaagctcttgaatgcttctgctttttatttcacaaccctgtcatctccataataacaagtccatgttagcctgctagaggatgagatactatagggaggaaaaccaaagtgccacagttgacaggcagctcaccctcagaagcagcattgcctagtcaaccagcagctgaccacacgtgcctgaaagggcccagcagagaccagaagaatggctcacttgagcccagcctagaaggtggaccagctcaatctaatacgttttggggaattttactgtgaagcaataggtaatacgtacacctagtgcagacaggatgccaggattcaatgacatgttgattgcaatttaccaggcaaacacaaggcaccctgtatgtactgatttccttttccctttatgtaaagttggatttctggttagacggtgttgagccatacagaagtgcacgtagacatgcatgtgatttgtgcttaaactcacacacttaaattccacaccacaggaggaaacagaaaaccacagcctgaccattagggccaaagccaaattgcaaaatgagaagtttgtctttaatgtattccctctacatctaaagtcctgaggttaaggctgtggacaaatctgaagacatgggttttcttctcctggggcccctcatctttttttcactgtcttatctatagaagaggctgggcccctggcaagagcaggtgggaaatagtagactccctctagatacttctttattgcagcccacttctctctctgggcactgtctctgccacccttgggcctgaggagagatgttagcagaaggagggcattccctcacctctagcagaaaagaggggttcgggcccttcactccctgaggtcaggggaaccagagccctcaaaactgcacttcagtgtgacagtcattgcccacaggggtctacttagcacctagaatgtggctggtctgaatcggtacatgctggaagtttaaaacgcagagtgactttgaaagatttagtaccaaaaaacagaacaacaaaaaatacttcattaatattatatttatcatatatttaaattataatattttgtatatattgagttaaataaagtattgcaatcaattttacctgtttattcctcgtttctgttgctactagaaattttaaaatgacacctgtggctcacatgtgatttctgtggaaatcgcagccttggaggattgcttcccttttcaaaactcgggctcctcagactgcttcctcagaagaccagaggccatgaaggttaataagtctgaaattttaaaagaattattattatattgtttcctattttaaatatcatatatattattcacaaatgaatgtaacattgtatacaaggttaagtgtatataaatgaatgtcccctaggcaaggctgggtcccaacccagagaggaaaccctcttggagaagagctgtagccagaacgctgcctcattcagacacgcgcgggagctgtcacctgtcactaagagtctgagggggcggggcctgaggccctacccaatcaggggcaccggggcggggactgcctaatccggcgctccgctagaaaacccgaggcggcttccgggtgtgcccggcctttgtctctcgtgcccgcacgtgcgtgtctcggtcagtagccctgcgcttctccttcactctcggcggttcaggaggctctgccgcagccggggccctcctgtgacctgcatgtactgggggattcgcagggaggatgtcgggacaccccggaagctgggaaatggtgagttgcgccgccgggggtctggagaagg

SEQ ID NO: 4359 - DNA, 2300 bp, Homo sapien
aaggcattttgttcagtatatttttgttatattatgttcatcaaaaaatcagggcctgtagtattttattatgctatctcgctaatgtgtttggtataatttcatatattagctttttaaattatattcatctaagtccagtaagttggataatatgttattttaatttttttcagctgtttcttctcatttcacccaagacctcttgccagagcatggtataaaagattcatttcaaaaagtgatactgagaagatatggaagctatggcattgagaatttacaattaaagaaagattgggaaagtgtgggtgaatctaaggtgcagaaagaatgttgtaatggacttaaccaatctttatcaactacacataccaaaatctttcaatttaataaatgtgtgaaagtctttagtaaatcgtcaaatctaaatagacataagataagacatactggagagatatcttccaactgtaaagaatgtgacaattccttttacatatcctcagttctaactccacttcagagaatccacactgcagagaaatcctacaagtgtaaacaatgtgggaaagcctttaggcactgctcatgctttcttgaacatgagacaattcataatgaagagaaacattacaaatgtaaagaatgtggaaaagtctttaaatccttcacaagcctttctaatcacattataattcatactggaaagaaactctataaatgtgaagaatgtggcaaagcttttaaccacagttcaaaccatgccaaacataagaaaattcacactggacagaaaccccataaatgtgaagaatgtggcaaagcctttaactggttctcatacctaactctacataaaagaattcatactggagagaaaccctacaaatgtgatgaatgtggcaaagcttttaaccagtgttcaaacctcactaaacataagagaattcatactggagagaaaccctacaaatgtgaagaatgtggcaaagcttttaaccggtgctcacaccttactgaacataaaagaattcatactggagagaagccctataaatgtgaagaatgtggtaaagtctttatatcttgttcaagcctttcaaaccataagagaattcatacaagagagaaatgctacaaatctgaagaatgtggcaaaacctttaaccactgctcagacctcaatgtacctgagaaaattcatacctgagaaaaatcctacaaatgtaaaaaatgtggcaaagcctttaatacctgctcatgtcttactcaggaccagagttcatattgaactaaagaattataaatataatgactgtcacaacacctttcacagaaaaaaataattttaccacagattaatttgttcattaatggaactttaattctgtggttttttttttttttttttggtctacataaatctgtccttatgccagtactatattgtttaattactgtaacattgtagtaagaatttatatcaggagtgtaagttactgaattttgttatttttcagaattcttgtgtgtttgattttctttatatgtttatatggattttaggaagagcttgtcaatttatattaaagaaaagctacattggaatttgcattgaatctgtagataaatttgttgggtattttgatcttcatattcagtattgctatatttgaatattgagtatatctcagtttattcagctctttgatttctttcagcattttaaataattttcagtgtatagtatgtgcagttattttgttaagttcatttctaatttttttttctaggatactattaatgaaattttaatttaattcttattttgtttattcctataatataaaagtactatctaaccttgtatgttgatcttgtggcattgatgaacttctatattagctcaagtaggtttttatttatttattactttattttattttattttattattatttttttttgagacagagtctcactctgtcacccaggctggagtgcagtggccggatctcggctcactacaagctctgcctcctgggttcacgccattctcctgcctcaacctcccgagtagctgggactacaggcgcctgccactgtgcccggctaattttttgtatttttagtagagacagggtttcaccatattagccaggatggtctcgatctcctgaccttgttatctgcccgcctcgacctcccaaagtgctgggattacaggcgtgagtcaccatgcccagcctcaagtaggtttttaatgaatttcttatacttttaaaatacaacattat

SEQ ID NO: 4360 - DNA, 2300 bp, Homo sapien
tcagcctcccagagtgctgggattacaagtgtgagccaccgtgcccagcccatgaacagactattacgggtgatttctagtgaggctccaaaagaaaagaggagatttgaaatcctcaaccagaatgttggtaaaaatgtgaacagtaaagctattcttatgaggtcccagatggaaatgagaaacgtgtggtgggcaatggaggaaaggccatccttcttatagtggcaaatcacttggctgaactgtgcttatgtattagtgttttgtggaaggtagaacttacgggccactgcaattggatatttggctgcagaaatatctaagcaaggttttgaaggtgcagcttgtgaaatgtgaaaagagagaagtgatttaaagatgggattgttacttaaaagggaagcagaacttaaagatcgggaatatttgtcagcctatgttggtaagagtgagccagcctgtttaggagagaagataaaggttttgccattgaaactgaggctaggagctagtccaagaaaatggaaaaatgaccccaaaggcaattcagaaatcatcagggctcttctgcccatcacaggcccagagcgcaagacccgcagcaagcaggggaccacagcagagagccccgcttcagtcacccctgaagccctagatggtggggccatcagcgaagttccagcccaagagagccttgggcttctgaaagagacagagctgccacagaggtggggccactgcagagaaccacctcaagggcaggccctcaccaggggctgccatggggcgggaccacccagggccttggggactcaactcctgcccagtgaagctgccacctgtgggtttggaaggcggggtcacctcccaacacagtgggcctggggagcacagcatcaagacaaaaaggattattctgcagattattctcaagccgtaaaccataatgtgctgtgacccataggttcaggacttgctggggacctgttactccttttctttttttctgtttcccttttttggaactggaatgtttatcctgtgcccgtctcaccactatatatgtgtgtgtgtgtgtgtgtgtgtgtgtgtgtgtctctgtgtgtgtgttttgtttttttttttttaagactgagtctcaccctgttgcccagggtggagtgcagtggcatgatctcagctcactgcagactccgcctgccgggttcaaatgattctcctgcctcagcctcccaagtagctgggattataggtgctcaccaccacgcctggctgctttttgtatttttggtagagatgaggtttaaccgtattggccaggctggtctcaaactcctgacctcaggtaatctgcctgcctcggcctcccaaggtgctgggattacaggtgtgagccactgcgccggcctcaccactatttggaaggcacataacttgtttcatttcacaggttcacagctggagagaattttgtgtcaggtagaattgtgccttgagtttcaaccgtaactgatttagatgatatttaaatgagatgttggactccggacttttgagttgatgctggaatgaattaagactttgagggttattgggatagaatgaatttgtttggcatgtgaaaaggatatgaatttgggggaaccaggggcagaatgctatggtttcagtgtttatatctccccaaaatttgtgttgaaattgtaatccccaagatgatggtattaggaagtggagacttttggggagatgatctggtaacaagggcaaagtcctcatgagtgggattagtccctcctaaaagaggccccagagaactcccttgccctctccatcatgtaaggacacagaagacacctgtcttttgaccaagaagtgggccctcaccaggcacccagcctgctggcaccttgatcttggacgtccagcctccagaactgtgaggaacagatttctgttgtatagaaactgcccgtcctacagcgttgtgttgtcacagcctcagtggactaagactgagacacctagctcgtcccggactgaggcatccctgttctcctgtgctttcagagtcgggtttctccattcaaggacatgattttatgcttctctgaagaggattggtcccttctagatcctgcccagactggcttctatggagagttcatcattggggaggattacggggtctcaatgcctccaagtaagacttaacttccccccacacctcaagaccagggaactgggcaggggagttctcacttggagtaagagtcaacttcgtcccataggatcag

SEQ ID NO: 4361 - DNA, 2300 bp, Homo sapien
ttaattagcttaatttaatcatttcacaatgtatagttatcacattgtacagttttcgtatacaaaatacatacaatttttgtcaattatagcttaataaaactgggaggtaaaagtaagttaaataaagatgaagatagaaacttaaaatggaacatacacacagaaaaataccacctcctcaaatctacgcccatccagcctgagcttccccttcagacacagtgaagaggctgccttccactgagacccctagaatggcactgccatctgtgtgggctcctggccccgtcctttgttccacatagccactcctgcagctgctgtttcctgcaggctttgtattccaggtctgaaaggccagggacactggcctctggggtttgctttgataatgacttaacatgtgacctggggttaaccagtagactatagcacagctctccaagtcttaatctgagaaaggagtaccttttgaaacagagctcatttttacatggctgcactgttggcaggggatgtggctcatggcagaagcctgaacaaagggtagtttccaattccaggagagaagagtggcagagtccctggtagcccaaaataaggctggtgagatggtcccaaagccacactttacattttgtatgagggtctttaggacactgtgtcaaatgctctttcaggagtacctacagtggtaacagtttttcttttttgtttaatttctgtcttcaaattgacaaaaaaaaattgtatgtatttacagtgtacagtgtaatgttttgatatctatacacattgtgaaatgattaaaccaagctacttagctgggcatggtggcacacctgtagtcccagctactcaggaggctgaggtgggaggatcccttgagctcaggagttctgttccagcctaggcaacctagtgagaccagtctcttaaaaaaaaaaaaagtcaagctaattaatataatgcattacctcatatacctatcctttttctgtgtgtggtgaaaatacttcagatctaccctcttagcaattttcaagtacacagtacgttgttactgcctatagtcaccatgttgtgcaataggactcctgagtttactcctctcatgtcactgaaattttgtacactttgaccaatgtctccccagtcccctcattccctagcctctggtaaccagcattctgatctctgcttctatgagttcaacttttttagagtccacatttaagtgagaacatgcagtatttctttttgtgtctggcttattgctcgtagcatgtctttcaggttcattcatgtcgtcaaaaatgacaggattttccttctttttttatggagttccacagtaattctgattgccaacagcccttactttttttttttttttttttcatttgagacagagccatgttctgtcacccaggctggagtgcagtggtgcagctgtggctcactgcagcctccatctctcaggctcaagcaatccttctgtttcagcttcccagtttttttatttttaatagagatgcggtctccctatgttgcccagactggtcttgaactcctgagcttaagcaatcctcccactttggcttcccaaagagctaggattacaggcatgagccaccacatccagaccctaagagtccttatagattcctcaactctacggctttttctttttcttcttctttttttttttctttttctttttaagaaacaaatactctgtgttgtccctgctggtctggaactcctgggctcaagtgattctcccacctcagtccccaaaataagaatagctgagattacaggcatgtaccaccacacacggctgaactccatagagttttaacctttattttcccatagtttggataacaatgctgaggtccggggacctacccgaggtgaaagagttcatttaattgaccgtgctatcatgaacccaggcacactctgttacagccccccttgttatatctggaaacaaagtcgcagcaatctttgtggtttacagagtacttttcatgtgcgtcattttgtaatcctcattttacagttaagaacagagactggggttttatgaaaagcaccatgaaacagttccctgttggtgcctctcttgtgattttctttgctaccaaaatggaaatgaagagccgcaggaagctcagaaggtatcagcaccaggcctggccctggcccactttaggacaccattttctgatctctttcagttctgcaagatgctttccttcttcaggaagagaatgtgcgggacacac

SEQ ID NO: 4362 - DNA, 2300 bp, Homo sapien
acagcgaccttctccttccctttctgccgatccagctcggtccctcctccgcgaaaggctgggagctcgctccgcccctgcggggccctcctccgcctcactcacgttagttcattcatcaggcatctcctccgagcctccgacgcgccaggtgccgccgtgacaaagacggacgcggccgtctggttggagacgatccgagtggcagcccgggtgggcgccggtgctcgggggggcgggcctgagtagtcctgggcgctgcaggtgtgtgatgggcgccgcagggggccgccgagcagggcgggcggggcccaccccgggctccagatgccggagccgccctggaagcgatccggtggtggggagcgctgtaatgcgtccagcccgacgccgccacggcccccatatgggtttctgtgtatgttgttactttggaaagcaaagagattcagagcagtgggtgtttctggaaccactcagttgttccgtagcttttctggcatcacttgtctttctgtgaaatgggagtgaggcccgagtcccccttcccaccttgtgagctgttggaggttaagacgcggccacgctggacaacctcgtgcagatgggggagtggcaggcactgccggtcctaaggatcacagaggcctgatggcagagaaggggactgtgagtgtccccatgtgccctttcacgggcccagcgttctaaagtgggaatcataaacaccaggtatactggttgctggtctcttgccaccctagttgtggcaaaagtgtcggctagttgtctgcacaccagcggggaggtgtagggacccctgagtcccaccttgggggtgtggcagctgcagtgtccaggggttctttgagggctgagctgtgcagtgacggacccacttttctgtcctggccgaggaagggctttggcgagtgtgcagttgccttcaatgtggtttgaagagggcaaggatagagaatagggtggaggcgaggttgaaggtcagggcagaattggcagaaggctcataggaaaccactgatacttctagatgcagtgttatttgtccctggtagactgcatgtagctgtctcatgtgatgttttcccttgcctcccattgcagactctgctgggcaaagctgattctggctgggttgtccatccagcacgcagcaccatcagccctctgccaccagaagggtggattttccattcctggatgtgcttgaaggctcatccgatgcatgtctttgtcattccagctccatttgtaaaggtcttaataacaagaacagtgacttcggctccggagcttcaagatagtggcctgcttggcctgcccatctcggatctctccaggaggacccagccacccaaggtaccagagcgtcttgattacatctgcatgtggcgctgttggtttcctgggatgctcaaaacagcagtgtcacgttgaaatgccaccactttctcccagatttcctgtcttgttcatccagtcacccacttaacgggaatccacacgtaatggtactgatggggggagggcatctttctgtctgtttcatcctgtgtgtaaagaccagccacaccaacactccctacctttcccagggcttctccaaagggctggtctctgagggcattgacagtttccttgtcactgtcccccagaaatgaccacaggagaccagaacactgaagccagtgatttctgtttggaaatagggtcgtcttctgctgctgacccccatcaaatcccatcatgcccacagccctgtgcccccgagtcttggctccgaaggaaagtgaggagcccaggaaaatgaggagcccacctggagagaaccctagcccccagggggagcttcccagccccgagtcctctcggcgtctcttccgccgtttccgctaccaggaggcggcgggcccccgggaggccctgcagcgcctctgggacctgtgcgggggctggctgcggcctgagaggcacaccaaggagcagattctggagctgctggtgctggagcagttcctggccatcctgccccgggagatccagagctgggtgcgggcgcaggagcctgagagcggagagcaggctgtggccgcggtggaggcactggaacgggagcccgggagaccctggcagtgggtgagtagaagaggtggggctgggacgggtagagatctggtacttagacactttggctgggccatgcatgtgctggctggggaatgaggagttccatcgagagccatttactttggttaggtccagactagagtttcctaaga

SEQ ID NO: 4363 - DNA, 2300 bp, Homo sapien
atgtacctgagcacctggaaggctggctgcctagcactcatgagtgtacagtaggtactcggtataggtttgctgaatgactgaatctttgatcctgcacaaccatccaatgaggtagacagcatcatccctgttttctggatgaggaagttgaggtacagaaaggttatgtaggcctgaggtcacctggctaggaattcatagggcaggatttaatccgggtgcctgagtccagaaccttgactctgaagccctgttttgagctaaatgcagcagcagcataaacagcccgttttgtgcctcaaaaggtgaacagtgggaggcacagctgggcagggacgtgtcaggtcaggggaagaaactgaattgggtagtggggattaattggatgctgtctgccagcaatttctgcctcctgcattttatctgctttagggttgcaaggggcagagctatgaacacggatgcccactcaacagccagttcctgggccaatcaaagggttgggagctgtagcaccagagctctggaaccccacagactaggatgtttgctagagcacctaagccctaccagcctttgatgacccctcggttcctcccaattcctctcctccatgtcacggttcctggctggtgttcctgagagtgggctgtacatgagttctgtaaatgccagtccagttacgtcaaagggggtggctctcacttgtacctgtaggctccagctaagatctgcgtggccctgcccggcatctggctgtcatccgggaaacaatcactgttcacaaacaagggcttcactccttcgctcgctccatctcctgctaaagtcagaatgtgaacactgacaaacagcggctcccagtaactctgctagtcagaagtgattattccagcagttcagaggaggaagtggcggtgcccagggccacgggattagaagagcaacggagctaaaggatcccgtgcctcagtccaaccaccttgttcccacttactcagccgggccactttctttggagaaactgatttccttctgcttgcccttgaaaggggatccgaaggaaatcggagctaccggcagtagctaccctccggaagacggagaatcttctccaccttctcctctgcgtaggagaatccaatttcggtgcagagcagatggcgaaggggccatgggaatcagacctgctcagggaccgggttcgcactttctctcaagctctggagcctgaaaaatgagcattccccggggacgacccatgtaagaatttgggctatattcagcatagtgcagcggccagcagccctgtctcggggtggggtccggaggcccccatttctgcttgcccctcactgccacataaccttgggtcagagtccctcatcctctccctccgccactgtgcacagctgcaaccgtgttcacttcagcgagcaacgagccccgtgacccccactcagggtcaggactcaccgcagcccctctgcgcaagccccgaggctctgcgtggcctccggatgcgcggcctttcctaacccggggactccgcacgtgggcgccaggcccggaaggcgcggatgtgagcgctaccttcggcgtcccgcagcggcaggaggggctgggcggcccgggcttcggctggcggcggggggggggtcgcaggggagtctgaaatgaggcggccgacggcgcgcggggcctcctctctccgctccatcccgcacccccaattccagcttccatccccagccgcgactcccggtcggccgttccgggcgtccactggccgcgtgtcctgggggcgccagagaaggagaacagcggagaaaagagccccgggccgaccttccggaccggcgggcccgcggggaagcccgggcgcggcgacgtggctgacccacaaagcccccggcccggcggccaggcccaggcgcgcgcggagcggggcgggccgggggtgtcggatgtcacccccagcgcacacctcggccggggggcgggggagcgaaccactgagatgcggagacctccccagtcctagagcggagcaggaagtgtcccaggggagggagccggagggctccggcctttcctttcctcggcgtccggcgggctcccgcggcggccaggcctgcgccgcccgccaacagggacgcgccgcggcggtgagtgcaccccggctcccgcggccggccccgccccgccctcctcggcccgcgcccggcctccgcggcgccgcctcccagcccagagcccagcgctcaggaaggtgcgggcgggggagaaagcaacac

SEQ ID NO: 4364 - DNA, 2300 bp, Homo sapien
ttcttctaggagttttacagttttagatcttatgtttagatctttaatccattttgagttggtttttgtgtgtgccaagttttattcttttgcgtgtggaaatccagtttcaccaaaagcttaatttttcaaaatcttatatttttcttgatttttttttcacacttctatagccaacatctttattgaagagattgtcctttctccattgtgtcttcttggtgaccttgtcaaagaattagttgactgcatatacttgagtttatttctgttccactggtctatgggtctgtttttataaaggcatggatttttactgcatatgaattatacctaaatttgtcttttttttttcctttttctggagaatggggtctcactatattgcccaggcaggtctcgaactcctgggctcaagctatcctcccgcctcttgcctccctgagagctgggattacaggcgtgagccactgcgcccggctgaattatacctaaattaacttgactaaacaaacaaaaacaaaaagatcccaggttcagccaatgagctcctttttttttttttgaaatggagtcttgctcttgtcacccaggctggagtgcagtggcacaatctcagctcactgcagcctccacctcccaggttcaagtgattctcttgcctcagcttcctgagtagctgggattacaggtgcccgccaccacacccagctatttttttttatatttttagtagagatggggtttcgtcatgttggccaggctggtctcaaactcctgaccttgtgatctgcctgccttggcctctcaaagtgctgggattacaggcatgagccactgcacccaggctgagctcctttcttttggagcatatttggtctgctttctctctagcttcagcacctgaagtttttgctgctcctgcctcagctccagccccgaatgacacctttcacctggttcatggagactcaggtctgctgtcatgcccctaagcaggactagatgcctctctcatgttgtagagcattctctctgcagttctgtagaaaggtggtagtcatcggaaccaactgcttattctagcttctctgtgccaggctctgttttaaaggcctcacgtttagccattcactcagtgttttctgacagccttctaggataggtaccgttatttgggttgatgtagtgcttggtcaaatgcagtataatgaagggatcaaggagggggcaattccaagcaaaaccacttgttcatccatcctgagtctaggagatttggaagatctaaagaagtagcaggcaattattgtcacccttttacaggtatgaggcacagacagacccagtcatttgctgacatccctccactgaactgggtgctcgtccttttcactcacccagaggctgagcgagtgcctctcacccaccaagctctgttgaacttgtgcctttgccggtctgtggtcctgcggccgtctcatgagctgcagagtaggtctgtgtgtgtctctcctcaagctactcaagctgaggctttgtgtgcatgcctgccacataccagccattccgtgagtgttagtggaacaggtgagtcaatgagtcagggagtaaaatttgtgctttaaaagtagaacatgtcggagagaacctgtactgccttccagccatcttgctgtgagaggacagggcatggactctggagtttgaaggctgggtcaggtcatgctctggattctttactcactcgcatggcatgtccttagtttcacttccctcactctcagtggagccgttgcagcgggcagtgtcagaggcaacatccatttagcactgccgatttgacccccagccccatctcatactggcctcccaccctgcttctgtggggtgcctcagaggagagcaaggtgaaccccagtatggaaccgagacacggttttgacaacactgttgatcccatttggaaaatccagctatgtgattaaccattagtctctctgcctctgctctgatgtaagtggagaccacatccttcctgccccttctggggctgcgactgctataaattcattgcatttcctctctagctgttcctgaggctggcatctgggtaagtccagctccgcggggcagtgtgggcgacaggaccgggagagcagtgggggagattgtgttcagagggcagaacttgtcctggttaatgcactaggaatttcttctggcgtctccaaggttgtgcttcaacaacatttctggaatgttcttttatcattatttgggctctacgtgtgcaagtt

SEQ ID NO: 4365 - DNA, 2300 bp, Homo sapien
cctcccaccctgcttctgtggggtgcctcagaggagagcaaggtgaaccccagtatggaaccgagacacggttttgacaacactgttgatcccatttggaaaatccagctatgtgattaaccattagtctctctgcctctgctctgatgtaagtggagaccacatccttcctgccccttctggggctgcgactgctataaattcattgcatttcctctctagctgttcctgaggctggcatctgggtaagtccagctccgcggggcagtgtgggcgacaggaccgggagagcagtgggggagattgtgttcagagggcagaacttgtcctggttaatgcactaggaatttcttctggcgtctccaaggttgtgcttcaacaacatttctggaatgttcttttatcattatttgggctctacgtgtgcaagttcgtgtgtgtgtatgtggcggggggaagcggggaggacagcggcagcaaccatagtttacacccacgacttcagcagatttgcccagtatccctcccaggggagaagatggatgggatatacagaaggaaacaaacctccttaaagaccaaagggcagcagatttttgtgctggtgttagggtggaaggagcacagaagaaaggcagaatcctgatgcagatggaaggactgatggggcaggagctgggagggtatgcggagctaatagggctgtctggagagcagtcacctcaggatgggcaggagctgggagggtatgcggagctaatagggctgtctggagagcagtcacctcaggatgcacagggctgggtttgcagggctcaggaggcgaggagtagataggcaggaatggagatgggacgggagagatgagtgagtctgaggcatcttgacattgaactgcagtcacagaaattccaatttggagagctccaccgttttccaggctctctgcctcccttgagtgttatttatggctttaggttgaggtgctttgccaaatagagtataatcaagggatcaaggagggaacaattccaaacaaagccaacttgttcatccatccggactctaggagatatggaagatctaaagatacagcaggtgattgctagtttttgtggaactcacagtctagttgggaagactatgttggtgaatgctgcagtgatacacctgtgataaatgctggggaagtgtgtcttttagtcatctattttgttgtctttgtctttgtctgactgaaacaagtgatggaagacatggtctcatatctctggtcaaaatcctggctctgttccttcctggttctaaacccctcggcaggcttcctagtccccctaagactcagtttatgcatctataaaatggggctaggaataggtgcacctcatagagctctgtgcaggttagatggggaaaaacatcagtgagtgcctagcctgtggaaagctctaaattaatgtgaattataatgataacaattgcgaattttgcaaggagacattaaaggatgtatgtttttatttattttattttattctattttattttttgagatggagttttgctcttattgcccaggctggagtgcagtggtgtgatcttggctcatcgcaacctccgcctcctgggttcaagcgattctcctgcctcagcctcccgagtagctgggattacaggtgcctggtaccatgcccggttaatttttgtatttttagtagagacgggatttctccctgttgtttggtgagcctggtctccaactcctgacctcaggtgatccgcccacctcggcctcccaaagtgctgggattacagggatgtatgtttttattattctccattatgcactcccagcttcatctcacttcaatccactggttgatagaagtgcagtcaaagactgtcccctcctctgcaagcttttatgttctctctcctctctccctagccacgtcctgttctgttatcaacacacttactcacctcctggccttctccttctattgtctctcatccctcttccctcacaaaaacagaagcaaagagccagagccttcagtttggaggaactgaaaacattctcttctgctttctcattttgtagatgaggaaactgaagttgaggaatagtgaagagtttgtccaatgtcatagccccgtaatcaacgggacaaaaattttcttgctgatgggtcaagatggcatcgtgaagtggttgttcaccgtaaactgtaatacaatcctgtttatggatttgtttgcatatttttccctccatagggaaacctttcttccatggc

SEQ ID NO: 4366 - DNA, 2300 bp, Homo sapien
ttaaagaccaaagggcagcagatttttgtgctggtgttagggtggaaggagcacagaagaaaggcagaatcctgatgcagatggaaggactgatggggcaggagctgggagggtatgcggagctaatagggctgtctggagagcagtcacctcaggatgggcaggagctgggagggtatgcggagctaatagggctgtctggagagcagtcacctcaggatgcacagggctgggtttgcagggctcaggaggcgaggagtagataggcaggaatggagatgggacgggagagatgagtgagtctgaggcatcttgacattgaactgcagtcacagaaattccaatttggagagctccaccgttttccaggctctctgcctcccttgagtgttatttatggctttaggttgaggtgctttgccaaatagagtataatcaagggatcaaggagggaacaattccaaacaaagccaacttgttcatccatccggactctaggagatatggaagatctaaagatacagcaggtgattgctagtttttgtggaactcacagtctagttgggaagactatgttggtgaatgctgcagtgatacacctgtgataaatgctggggaagtgtgtcttttagtcatctattttgttgtctttgtctttgtctgactgaaacaagtgatggaagacatggtctcatatctctggtcaaaatcctggctctgttccttcctggttctaaacccctcggcaggcttcctagtccccctaagactcagtttatgcatctataaaatggggctaggaataggtgcacctcatagagctctgtgcaggttagatggggaaaaacatcagtgagtgcctagcctgtggaaagctctaaattaatgtgaattataatgataacaattgcgaattttgcaaggagacattaaaggatgtatgtttttatttattttattttattctattttattttttgagatggagttttgctcttattgcccaggctggagtgcagtggtgtgatcttggctcatcgcaacctccgcctcctgggttcaagcgattctcctgcctcagcctcccgagtagctgggattacaggtgcctggtaccatgcccggttaatttttgtatttttagtagagacgggatttctccctgttgtttggtgagcctggtctccaactcctgacctcaggtgatccgcccacctcggcctcccaaagtgctgggattacagggatgtatgtttttattattctccattatgcactcccagcttcatctcacttcaatccactggttgatagaagtgcagtcaaagactgtcccctcctctgcaagcttttatgttctctctcctctctccctagccacgtcctgttctgttatcaacacacttactcacctcctggccttctccttctattgtctctcatccctcttccctcacaaaaacagaagcaaagagccagagccttcagtttggaggaactgaaaacattctcttctgctttctcattttgtagatgaggaaactgaagttgaggaatagtgaagagtttgtccaatgtcatagccccgtaatcaacgggacaaaaattttcttgctgatgggtcaagatggcatcgtgaagtggttgttcaccgtaaactgtaatacaatcctgtttatggatttgtttgcatatttttccctccatagggaaacctttcttccatggctcaggacacactcctggatcgagccaacaggagaactttctggtaagcatttggctaacttttttttttttgagatggagtcttgctgtgtcgcctaggctggagtgcagtggcgtgatcttggctcactgcagcctccacttcccgggttcaatcaattctcctacctcaacttcctgagtagctgggattacaggcgcccgccaccacacccggctcatttttgtacttttagtagagacacagttttgccatgttggccaggctggtcttgaattcctcagctcaggtgatctgcctgccttggcctctcaaagtgctgggattacaggcgtgagccactgtgcccggccttggctaacttttcaaaattaaagattttgacttgttacagtcatgtgacatttttttctttctgtttgctgagtttttgataatttatatctctcaaagtggagactttaaaaaagactcatccgtgtgccgtgttcactgcctggtatcttagtgtggaccgaagcctaaggaccctgaaaacagctgcagatgaagatggcaagcacccgctgca

SEQ ID NO: 4367 - DNA, 2300 bp, Homo sapien
ctagtaagaaaaagtaggttcttacccagatctgtgacctcacacctgaagccctggctgtattcaggtctttccagggaactgaggagggctgtgtttgcataattgtgcacaggtaaagagttgacatgcagggatagtgagcagtcagtggcccagcagggccttggggtaggtcttatggaagcaaggagcccagaggatgaaactttgaaaaagtgatcttacttccttggtgacagaccccaacagaacttataattctggtaacccagcactcacatcctagagacagccctgtatccaggtgggaaatgcttggtgggaaatgcttaagagagcacaatgtgctcctgctggatcccaactctcttaggctcttgcttcaggaaggcctaaagtgaaaatctttttggaaatgctggtattggcttattcctcaccccagacgtctctggagattttgcaggggtcgcccagaggtaacatacgttaagtctaaggcaggctcctccagcctaggtctcattagtgctttcattgtcctttgctttagaatgtaaggaaaaatcaggaatttaaaatagcaaaaattgaccaaaactacatttttgtgagatttcctaaggttctgtgttgttgttgttttgtttgttttagacaggacctcactctgccactcaggctggagttcagtggcacaatcacagctcactgcagcctagatctcctgagatcaagcaattctctcacctctgcctccgaagtagctgagggactacaggtgcacaccaccacacctggctaatatatatttttttatttttagcagagatgaggtctcattatgttgcccaggcttgtcttgaactcctgaactcaagcaatcctcaatttttgatacatagctttgctaggtgtaggattcttagttgacagtttttttttctgtgaacaccagctaaagaaagtttaaaaagaagaaatagagaaacttcaagtaaggcaattaaatgaacaaattaagagctaagaaacaacaagatggggtattgaggttgtagttatggcagctaatgatagaatggatccaggcagagagttcaggcagaactgtatttgcagagagtagaagtctgagggtgaaggtgtcctaaatgaggccaatttggaagactttattttattatagaatcaaagacaacgcacgggaacacaccatgccaaacccaaacaggctaagctggtgctctgtgcaaaggtatataggtttacgggaagaaaagctaccattataacatcaagtttttttttttttttaaattaaaagaatcacaaatgtggcagttctagtcagggttaaggttaaagttaaagttatatttcaggtttggttggtggatgtcacaaagcaaaaagtttgttgccaagaagtgggtgttctagtttgtgaaataaaacatcccaatgacaggcacagtagagaagaaaaagggatgggatggcaaacacaagttcctggaaatttatattaaaataaggtttataaaggaggacagtgtgcatctcagtcatcagtgctgcctgcaatggaggtgtttatttctgcccaagataaatacaccaggcctactatgtgagaggtgaaaaggagcctacattatgcttcccacgccagatgccttgacttggggttctgttcccagggaaaaagagcacatctttgaagtagttttggagcaggaggtatcttccaaattccaacgaagtatcttatatttctaggtgaccctgagaccactggagaagaaataaatgaaggccatgaaacttccttgaactagtgggaatccatgagaaaatctgacattatgttctcttctcttggaatagaaatattgtttgacttccgttttgctgaacaagaaacgaggccagaccacccacctgagcaaggctacctgggacaatgacctcacacatggaaaacattggagcccatctgcttccaatctgctgttttccaaaaattagggaagttgttttccctttgataccctctgtttgtaacaatcccaatgccaacactgtcctgtttctacaagagacaatgacaaatatgagcctgaaggaagatgagctgatggcattcccagcttattaccactccttgggggccttatcttacatacatggattcaattcgtagattcagctgggtgagtatctattattcagctgtgttagaagtgactgcttaagacttaggtgtgtggtgaaatgaggcaggattttctcct

SEQ ID NO: 4368 - DNA, 2300 bp, Homo sapien
caaggaagcaatctgccctcatgatccagtcacctcccactaggcccctcctccaattcaacatgagatttgggtggggacacaaatccaacctgttatcacacagtcttttcagtaaacccagcagtgatcagactcaggaagcacatttattatactaaccacacctacacatagttagctgataagactcttatctgttggttgaggggggaggagacccagagaaggaccagaatattgtcatttagggtatgatgtttaggctgttaggtggacagcaaaaatggcagaggaaggcagggtggtacaatgagtgatagatgatgcaatgtgaatcgaaggcctaaaacccacaagaacaggggtgttttgccacctacagtaagaacactcatgtcaatacggcaggaccacttccttcttgtgtgtttctgaaaacacatatgggaactcctaatctctcattccctcttttctaaatgttataagacaatttgtaatactgtgttgacattatggattttggtttagagtttaggcatttaaaagacactggaccctacgtctgcgacagagcaattagcgaacacaggtgatgagtactgaacaacttgagtaaatgattccttgtgtccatgttacaatttccaagctccaattcatgctgacctagtttagttctagatgtgtattctcatgatgagatctgcagatacaacatgctcataatagattcagtttctaaagtgtcccttaaactggtttgtctacaactttcatgttgactgtttttttttttttttttttaaactccagatctaactgcactttatatatggctggtgatcagacagtaacccttttctgagtttagggtctacaatcctttcagattagacctcaaatggacacatcctgtacgtggacagcagagctatggaaaacaagagggatgcatttgtaaccctctgtttacactacaacctaacttcttcagcagctgagtccttgtcaagccaaaaggagtgatagtagaaaattatattcgtacagccaacatttaattgttgacatacagaaaatacttttttttcagttaatttcttaattataggcgagatctatgttcccagcgcagatacttgatgggtgtctatttaataatgtgaatatttagtttgctttcacgaaggagtgcaggtcataagacatacttactaccaaaataactctctacaatgatcctgattattctgcttaactgatctctgggcactgaataatattgactggaaaggcacaaaagaacattccttgcttttctgctctttgtgagtggacatggcaaggaagaaaatcctttcacctttgcacaatcaaagctgcttttggtcttttggataatgtcagactaatcattgagtcaagagattggaccaaatctttaacaattcagagtaaaatgaattcagggctcccctgttctctagggcccccaggctattttccccaaaatgtacaggtattgtgagtaacttattactaggtgtcttgtctctttcctatctaaacctgcagttcacagtgcaaggtcggcacagagtgtgagactgtactctttatgcagtggattttaaatcactggaacaaaaaaatgtaaaatgtggaaatgtgagagctgatcgtattaattgaagctattgttccacaaattttaggagattgtatccagtagcagagaaattggttcatggttagtagattctgacaaaatattttttttaatattatttacttatttctgaaaataacaaaaagcttgtttaaaaaatttttatttttaaaagtctacccagttaactcgcttgactagatcagagtgctactgagaaaaaagttttagctttcttctcttcacaaatatctttacttaacgtcttgcccttcagtgctagataaccagcaggcaagtgagactcgctaaaaactgtgggtggtggaatggatcctccgcactgagaggacagaacaacacgtgccattttctaatcactgcagcctgtgaacctctctaaataggcaaatgaggccaagggcgatggagggtcaatgagagctcgcggggtgacgccattctgctggggttctggagaggccaaagctggagacggtcccgtttgtggtcagcacggccttttactttctggccgtgactggcaactgcaccaacgtcctcctctccctcccactgcacactcccacttcctcagcgaccgggcccttctccacctcctgcc

SEQ ID NO: 4369 - DNA, 2300 bp, Homo sapien
ctggcaaaagagattgactgattacctactagatgagtcatcttatctaccataccaccaagatccatctctgcagtggatgccctctcatgggcatttatgtcagacagatatcttcatgatctgtgcacttttcaggaaattcttcaatgtcctcttctccagatttgcctgccattaattttccagccttattcttcacaaatctctcagcaaaataataacttgttatccaatgctcctaaatcagtgcatatccaaacttctgtgcctgtctccttctataaaaaattaacaaccagctaaactgcctgtagtttgaccactgggaagtttcccttcctcaccatctttcagcaacacctggaggggtactgtggtttaatgccatttgcttctttctgttgctggtgtataatgcagattcatttgtaaactggcccatgctttttccttctttaacagttggctaaacatgaaatatgggtgagatcatgcaggatttgtccctttgtgtttggcttatttcacttaacacaatgtcttctaggttcatgcatgttgtgaagacaggattttgaacgctctcaccacaaagaaatgacaagtgtttgaggtaatggatatgttaattaccttgatttgatcattacacaagtatacatgtatcaaaacatcatactgcaccccataagtgtgtacaattgttatttgtgaattaaaaacaaactaaaatgaaatttaaaaaataattatacaattttgggggcttgggggtgggggaaggggaagtaaaaaagcagacagcaggtactctaggagtcagagacacatgataacattattatgagtcaggaaggtaggaaatcaagttactgacattttttactcagtttagaacccaaagaccgaagaaacagaaacaaatgggggaaatcataacttttaaagtattagataaaatttttgagaaagttaaatactgcatgttctcattcatctgtgaaagctaaaaaagggttgatctcatagaaataagtagaacagaggatacttgaggctgggaatggatagcaggggtgggggaatgagaagagatttgttaaaggatacaaaattacagctccattggaggagtaagttctagtgttctataccactgcgggatgaccataacaataatatattctgtattttcaaacagctagaaggaggatattgaatgttcccagcacgaagaaacgataaatgtttgagatgatggatattctaatcacacttatctgatcactatacattatgtgcttccaaacatcactgtttaccccagaaatatgttcaattattatatgtccactaaaagctaaaataaaaaaattttcaaacattcaagatctgaagaaaaacttcaatctgaatactaaaaactttccctaacctcttgaaaagactaattaaaaatctctggagtttggatgcactgtaattttcatctgccagttcatggctttgtttaagctcagtagtcaagttggtagaacctccagagaaagcaatgaggaagtggcagtaggaccctctgggacccgttaccccaaatatctgtcatcttcttgacctcaaggctgggtgtcaactcaggacaggagtgcaggtcctcatcagtttatgtggggatagcagacaacgcagaccctcccagaaccatgaggacagcactgtgctttgccctgaccatccatcagcccctgtttggcacagaggagaatgatgaccataactcacactctcctccaactgccttaaatgctcaggctgattggtcatgtgctcacccaactgctccctaaatgcttaacagaaaatgaagacatcctctccagaacccaaggaaatacacttgaaatgtgatttgtacctcagattggcatccaagaactgaaagaaacaccaggcattccacacaatttctggctccacatccagtagaactattggaatcctccaacataaccatcttgaggcagtaaatcctgaaagaaagtgaaagaagacctttctaaatagagggaagtcccatcttacttggatttaagttatagtaaatgaagaggaaaatgctaacatgccatattggacaccacttgtctttcgatgccaggtcccttttcagccgaatatgtcagaattttctaggctccatcttttcttttattcctcttgcagcaaccataggctttgatggcttctcacaggacagaaaacctggatcatcccaaacctgctctgtgaaccctcta

SEQ ID NO: 4370 - DNA, 2300 bp, Homo sapien
tccattttccccagacagtgaacaccccccacccagtcttttattatacagtccaagttggccgtgaggaaggtaatgcaatgccatccacgtagctgttgagtggctacttttgaaaacaatgggtataaaatgtacttttagccagacatggtagtacgtgcctgtattctcaacctaccaaggaagttgaggtgggaggattgcttgatcccaagagtttgaagttagcccgggcaacacagtgaaattgtgtctctaaaaaagaataacataaaatgaactaaaatacacttttaatgtttgctaactgatgtaattgcttcatgtctcatgccctgtatgccctgtgctcttcccacaggtggccttttgccccacccccagcatacaatgatggaaatagccaatgtgagttctccagaagtctttgtcctcctgggcttctccacacgaccctcactagaaactgtcctcttcatagttgtcttgagtttttacatggtatcgatcttgggcaatggcatcatcattctggtctcccatacagatgtgcacctccacacacctatgtacttctttcttgccaacctccccttcctggacatgagcttcaccacgagcattgtcccacagctcctggctaacctctggggaccacagaaaaccataagctatggagggtgtgtggtccagttctatatctcccattggctgggggcaaccgagtgtgtcctgctggccaccatgtcctatgaccgctacgctgccatctgcaggccactccattacactgtcattatgcatccacagctttgccttgggctagctttggcctcctggctggggggtctgaccaccagcatggtgggctccacgctcaccatgctcctaccgctgtgtgggaacaattgcatcgaccacttcttttgcgagatgcccctcattatgcaactggcttgtgtggataccagcctcaatgagatggagatgtacctggccagctttgtctttgttgtcctgcctctggggctcatcctggtctcttacggccacattgcccgggccgtgttgaagatcaggtcagcagaagggcggagaaaggcattcaacacctgttcttcccacgtggctgtggtgtctctgttttacgggagcatcatcttcatgtatctccagccagccaagagcacctcccatgagcagggcaagttcatagctctgttctacaccgtagtcactcctgcgctgaacccacttatttacaccctgaggaacacggaggtgaagagcgccctccggcacatggtattagagaactgctgtggctctgcaggcaagctggcgcaaatttagagactccagtgccttctgagaaggaagatcaagtttacatcgagcaaagtgaccttggaagacagggcacttgggatgtcgtttttcttctaatattgtttgagctcaaggtagatggaaatctgaaaggagtgtgctcatgccatttccagaccaagaaaatacatttattatttgctaattatcatagttttgttcaattgcgttgttggtttttgctatatatacacatgttgactgtcatcttgttttgtaaactccttgcgttgttgttcagctgttcctcagtatccgaagcgggtggattccaggacgctccgtggataataaactttgacgacgctgagagcgcgcggggagaccggagccggcctgttccccagagcccccggagccctcccagccctcaggcctgcgcctggggtgagctgagcccgggactccgccttgcaggctccggaaccctcgctgtggctcccccgctcggcccaggccttgaagccgcggcgaacctcttcctaccctacctcggggacctggtggcagcggcggcctcccccagcctggaccccgccggccgcgggtctcccggcccaaccccaccgacccagaccaagaccgcgccgagccgccgggactcagcgccttcgggtggcggcggtaagcggggaggaaacatggcgccgcccaaatgcgcccggaggccgttaggctgtggagggcgaggaaggcggtccagaggcggccggcaggtccacgtcctgggcgaccgctctgtcgcagttgggcgagacctacctagtcctgacgggtcgtatttccaagacattttcatattctatccattgttttgtgtgcattttattacttctgtatatagaggtaacaacgctaagcttttttgagatgtctgtttcttctagatgttctgaagtacctgatac

SEQ ID NO: 4371 - DNA, 2300 bp, Homo sapien
acgtttccttaactttcagtatgctatctttgtcttaatggcacagtgtttgggatagggttgcattttgaaaagtgagtttttaattgtgacaattttggtgaatctctgcgggtaagcaaacctcttcctttactgaaaacgctatttttgtactaagaatctgagtatcttgggtatagctccagtatgactaagcagcccaggggctttggataagttactaaacatttctagaagtagatcagatcaccacaaagatctctttttcctcaaaaattctactaaactattacctcatgagtgaccttgtggttcctctcagcatcatttacacattttctgcatgttatcaactgtgagtcaacaaaatttttatctttccacagatgggatatacttacacccacgggtcataatgcagttgtcagtttaacctgttgtttttcagctcacctgcggtgactctatatacagtacacccactttgactgtcatgactcagttgtacctaactctcccaatcccagttcatcttttctctctcacattcacatgatgaaaacatccacgttttgacaggtctcaactctacctccctgattggtttgtttgttgttgttttgagacagggtcttgctctgttgcccaggctggagtgcagtagcacaatcatgcctcattacagccttgatctcgtgggttgaagccatcctctagcctcagcttcccaagtagctgagactacaggcacacacagccacactcagtcattttattttatttttttgtaaagacaatctctcactatgttgcccaagctggtctcaaactcctgagctcaagtgattccccccacttcagcctcccaaagtgctaggaatacaggcatgagccaccgcccccggcttgcctccctgatttggaggaggttggaatgtattctccaggatgccttctcccatagtattaatgcttccctggcctactatatgcaggccagatgattgtctcagtattctgacacagtaagtccacaatgggacagcttccacgtgtgaattttaacaaatgcctagagttttctgagcctcatttctatacatgcacaatggaaaacctacctgtatttttaaaactgaatgcacatgtctgttcatgtctattttgtttaattgacttccagttacagggataggtaaattctactctctgggattttaagaaggctgatagttaagttcacagctgctctgttcccctaatctgggtgaatcttaactataataaattgattctcctttttaaaatacaggctagaattaatgttttgcaaagaagggccccaaaggtcttcagggacatcggaagcacactgaaattgtccagtttctgactttatgcactgcccctgctaaatcgtgctcgttttattccaactgtacaaaagcagaggatagtccagacccttctgcatgactctggcagttccaagagctctctcctgacaacactaccgaaagtttatgctgagtccttccactctgccttcatattactctagtcctgcctcttccaccccacagaacctttctagcaacctgtttcatgatgcacgtccatgaatattgattaagggactactgtgtatcagacactgggttagacactggggacccagaggtaaacaaaagataaaactatggctccatggaatttatgatctagtggagcgagacgggtagcaaacaaaagaaataagagtagtttatttgttataagattatcaccttatataaaaataattcaggaaagagagagaagggagttgtgagggttttcaatattatataacacagtcagggagggcctcagtcagaaggtgacttttcaaaaatgacctgaagaaggtgaggaagggggtgtgtggatgtcttggggagaaagcactgtaagtatagcaaactgcagctgcaagccttgtaccaagacaatgagggtgttgagcagcagactgatgtgatcatatgtcttaatgtaatcctgtgattgctttcgtaggagtgagggaaaatttcacctttgtcctctgaaatttcacagaaatcaactgacaaatggcagattcataggagaaaagacatacacatttatttgatcatagttttacataacagaggagccttcagatgagaatccaaagatacaagagaaacttcccatttttatgcttaggttcaaagccatatggacagccatgtagaaatatgattgaacatgaagggcatgatctaatactg

SEQ ID NO: 4372 - DNA, 2300 bp, Homo sapien
gctgcagctgagccctgatcatgccattgtactccagcctgggcaacagaacaagaccctgtctcaaagacaaaaacaaacaaacaaaaaagcacaagaaggtagttgagggtagtaggattctgggttatttaaatattttattttttcttatttgtacttaattttctacatggcattgagaacttaaatcaagttgaatattgtgcatgtctttgttctcaaacagcagccatggccataataatggcaggatacctacggcttactgagactccctttcacgtagctcctatccattctgcagatggagaacgtgagttccaggagatttgtttaccagaccaatttatgctaggatgggacagaatgggagttagaggtgctgaaaagatggaaacctttcgtgttaccacatttctgtcattcggtgactaaaaactaacatggagctacttacttgagcatttgaggattaatgagcttatttgtgagtaatcagataagagaaacaaagatttatttcagtagctctcaaattttagtagggaacaggaggaatccacccctgagagtttctgattcagcaggttttaggtggatcttgagagtttgcatttctaataagttctcagagatgccggtgtttctggtcaaggacagcaatggcggaacacgcttcttagtgcctttaccgctccatggattggctggagtggcatcacctgggaacttgttagaaaggcaaaatattgatcccagtttgaaagagtcagaatctgcattttaacaggatcctcgggtgatttgcttacatgagaaagtttgggaagcagcactttggtacataggttgtcacatacgaattagataaatcataaatctgaaatggggtgtgtgacattcctgcttgtaatatatttttctcatgtttataatcgataaataaacaatacaaaacttataaataatgataaagcactccagactcctgagttctgctgctggttaacagtcaattaaacttcctcagtcctgatttcctcattgggagaaaaaaagagttggaataggtgagcatatagtttctgatttcagcaaatagattttgtgttggttggaagctgaagaaaatcaaccacctgtggtataaatccttcggcaggagacatcatgaataagcgatttcagtctcctgacagccacggctcagagtcagctgttagctgatctcctgccgctgatattgtggcctcgaaattatcactagaaccagcttgtgctttgtggctctggtgggcagcctaggggaggaagtgggggaccagatgctggcaacaggtcttccaggccctgcattttccccattgtcatgttagtctttgagctgacaaccagaacaatggcttcttaacctaccccaaataattttgataaccttctattctcatccttttttttcctttttctttcccatcttgtctttgaaagtatcagacctctgaggaaaggctattgacatttgatctgattatcgttgctagagccacaaagagaaattttatttctaacgttgtttttttcttttccccaagaagaggctttctctttgtatgtttggaagaggacaacatatttggaatcttgagatctcagatctctgtaatgagcagtttgcctaagaaatcatgaatccagattaatcacttttattccagcaaaaatgcaactctcttattgcattgtgtaatcttattattatgctcacttcggaggaatagggaagtccttaccttgtttcgtcttgcaatactagaatttccttgaaagcaaagtgaacctggagtgatagattcactttcatgtttcagcctgattttttcccactgtatgcccacgcgtgtgtgtatgagtgtgtgtgtgtgcgtgcaggcacacacacgcacactcacattttcctttctgcctcccctttcgagctcttcctgccttctctatcatgcgcaggcccctggcagctcgtggttggcaagagcacgaacccgtggtcagatgcaacgtcctgcctcatgcattttcctcttggtgctttggtcagaacttccccaagtggagtgaaactcaggagctgagaaaccgagtcactgtgaaaagatgggaaattatctcctgcgaaaactcaggtgagtcttgactcttggtgccgcctttcttgggagaaagagaacagagataaggaggctggacataacgcatttgtaatggtgaggtacattgtgcttctagaaggttaagcctga

SEQ ID NO: 4373 - DNA, 2300 bp, Homo sapien
atagtgtttataaagcactgagattaaataagaatgtttgattcctactaaaagctcaattaatggctggggttattattattactgttcttattgttaggcatggttttgaattcctcaccatcctaattgccacttaaaatgaacaactgtctttgtggatacaatttcagaggcagcatggggactaacttttccagaacatgaacctagtgcctcctacagtggtagaaattaaaatcctgtgtgaaaacacaaatatgcttgggagagttactgattgccaagaaagctctttagtttcctttctgtgtgaagaagcaagcagggctcaaggggccctaccaaggccatggagaatggtaagtgctgctcacagccacccagtctgcgttctcctttctaaaggaggtctaaagaggtgggagtgaatcagtttagtttgcaaacacacacacacacacacacacacacacacacacatatgaaaatatgcaagacggaatcccagggccactttggggtgagaccttccccatgagcaggaaggatgttgaggaactggagcagagcccaggcgggaagaagaaccaacaaggtcacgtggcagcttgatctggctgggaactgagctctgcagtgtgcttgggaatataaacaatggggacagaaaagaaaaaaaaaagatttcattagaaatgtaaaatcaaccaggagggcagctctgtcctgctggggcataaagccatggtggaggcccaggaaagttctgttgatggaaaacagtatctgggcatttggcagcaacagatgacttagatatgttcccttgatttcagtactctcacttttatattgaaattatgctatttgatttctcagcacctggtagagtgcctgcacaaggactgtgcagttagcatttgctgaacttcacagaattggggatggggtggagaaaagagcagagcccatcacgagagggaggtaaagttgagataaagaagtttgagatgctctagacaccctttgcgtacttcacctttttttctggcattagccttgagcattaagatgcaaagtaaaagcgaaggaaaaggaagaggcctggagtgaggatagtgcatggagctcatcctcatgaaattcttctctggttgctgttcccatgaggttatgcgatgcctgagcccaggaactgtgctcctgggtcctgataccagtgcccagcccatagcgggggatccccattttatgataagaataaatgagcacctcccagatcggtgacttgctccaccccacaataaccccgggaggagggtgtggtcagtccagctgtacaggtgagaaagtgagctgggagctgtgacttatccacaccctctcagcagcagttgtgacagctggggtcacacagttgattcactgccataggggaaaagtggaggagggagaggggcagagagcgaagaacaactcaggaaaatgaaggaaaagcagaggcagagagcgaagaacaactcaggaaaatgaaggaaaagcagaggagaaattaactgactggaaaaatgacaatagttggaagacagacgaaaaagggacgagtgcatcagagtgtattttggcacttattactctatctcctttttatactacttcgctttttcaacttaatagttaaggcacgtcggtctagtcttccccgaagggagcttgccaggctctgcgacaggcttggaagttggagcccgggccctgggttctctcagcttccagctcaggaggcggagtgggaggagcgggcctggcggccgtgggggcggggctgctccactaacggttactggtcgctgctgccgccgcgctcctcccccggctgcggcagaggcgcgcgcctgcgtcctgaggatcccgcccttgggccgccgggaacctcgcagagcggcggggtggccctggcgaggcgcggttgttgggggttcgctcgagcctcacgacgcccgcgactggggactcggaacctgggccaggctgggacgaggccgcgcgggagggcgcgctgggcggacgctggggccgcggagcccaaccgcccttgtcctggacgccccttggcggtccgcactggcgggtgccctctcccgaggggaactgaggcggggcgcctgccaccattcgtgattttccgtgactcaccctctcaacagtgtcccgtcagcccccgctttctggaattaagatgattttccatgggcattatagtcagaggaggttttctgtgagacatctgggaaagg

SEQ ID NO: 4374 - DNA, 2300 bp, Homo sapien
aagctaaatttagaacttcatgaagcctcttgggtgctgatctcaagggacaaaactgtgccatgttaaaggcctgcccccctttgtattatcaaaataaatgaatctaaccaaatactcaccccgtgagatactgttattctctgtcgaaagaaacacacttgtctatatctcattcttctctttttcactcttgactagaaatctgaatcaatgcataggtccatctatgcttttgtgattggatattcaggaaagagaaaagtcataggtggcaaaggtctcagaaaagggtatgtattcatacatttttttctttgttttagtgaagacatacctaatgtataatcctttgagttgtaatgcatggaagttttttgacgaagctgttaagcatttcaatggtggactaactttttccaaatcctagttgagaaaattttgaaattaagatgatgtgctgcaaatgagaatatagaattaaaagatatcttgcaaaactcatatattcattatataatcaaatgatttctccagaatttttcattcatttgttgtttccataagcactcttttgcaccaactctgtgcaaactacgtgcatatatgtgttatatcctaaggattcaatataataaatcgcaattctttccttaaaatttcactaactacaatgaagtagaccaagaaaaaggggaattgttatgcttgtcatgaaaggaatattgtatagtgagtatgagattaataaaaatgatgtaactgatagtgcctacaggggaaggagactgtctttgaaagagtgcttctccctcaaaggcatgcaaatacatgcatagtttcttttccgtacagattttatcctgacatgcttcaagttgggtaaaagggggtgcatggaacttaattaaagttgacaggaatcagaggaagatgaatgtaataattagtgttagtgaggtttctgattaagttggaattcaaaacattgtaatagaaacaaatacactgcattgtgttctctagggttaatcagctgtcttagcataaaaccagaacatgtatattatctagtgctacattatgttattttcattaggatccttgtcatacaaatcaataaaatagaagtcctagataactcttggaatattgtgagaaaataatgatacttggactaaaaattccaaatctcttcccacttctacaacatgtcctttacttgatagccatatggcttaaataacataactgaaataatataggtttgaaaagactagaaaggcctcagatgtcaaggagaacgtttgggaaggtatcacaaattttgcttcagtcagaaaaaaactttggtcctaaattgtgcacagcacctggatcatagaaattgctcaataaatgtttgctgaaggaaagtacggattacatgaatgatgtatgtttgcttgcttattgttatacaacactttgtataatttgataatttttataattaaaaagaaggtataaattggattgatacagaagtgagaagttggagagtacagtgagggacgtcaagaagtaagacactctatgaaaaatgttgataggtatgggagaatactggcaccttctagagaaggtagtatgaccaagatgctacaaggaagggtcctgaaagcacaggccacaaacactgggctctcaatgacttactacacaagtcagaggctccaccaaatgatgagcagagaccaaaacagcaatggtcaacccaaggaacagaggtgagcttgcagttatcagtgaccaaatacgttaaaagaaaagaaagctaacatgaggatatcttccatcataagtataagcatcagattgggaggaaaattatttattagaggtaaatatttctactgggtaagcataaatagcttgactactaaaaaaataacaaataaccttatatataaagtcgatatgaattttgtggttactgtaggcaaggcaaaataacccaattaaaatggttattattcacataatttgcattttcttttgggggaagaagtcagtcttgaaagaagttgatactgacatgtccagcatgtctatgtgactatgaagacagaatatcatgaacacaagatgtcattggaaagcattcaagcaagcaagtttggatgctacttacctgcgcacgcatgcacacacacacacacacacacacacacacactgtctctctctcatgaataagagacttaacactgctggcttttacaatttaataacttatttttctagatttgttgggaatat

SEQ ID NO: 4375 - DNA, 2300 bp, Homo sapien
tacttccttttgtttgtgagattctgttgcactgatttttctaggaaaatgaatggcctttggtgagatgagaacatgcattgcttctctgggagtcatttagtttacaccactctagaatttgcctccttctaagataaaataatactatccacaccttgtttattggatcccaaaagtgcagcagcatgcacttatgaccataagctgtaactactgtttaacataaaaatgacttgctttgctttccttaagcatggaatggctttgtgatttgtttgtttctacttagactttactttagatcttggactctagacttccaacaacataaactctaatactcaaagtaacaaattgtattatactctgcccattatgaaaagcatgtgaaatcagttccactcatgaaatcaattccattcattgaggaatcatttattcattcactcaatacatttatttgagtcttgaatctcagccaagtgttattctagttgctcaagtttgatcagtgaagtaaacagcacaatcttctcttggagcctgaagcttacatagaaacagtgtgctctcatattagttaggctaaattatcagaacacaaggaaaagtcaaaaaatcatagaagtatgattacagtttcatgaaatcccaaagatctggagaattgaaagttgtaatgaatttttaaaaaaagtttctgataccttctcactgagaaataaattaattaagagttatttaattaatggtacaaattttatgaaccatggtacagttcataagaaaagagagcaaattcatctccattttgcatttattctgaataaaaatgtccatttactctgtctttgaatcttcccagggtatgtttatttccattttgtatagagtaagaaacagtatcaggaaatttccaaatgacaaattaccacacacatgcaaacacacacacgtatacatgcacacttacacacatatgcattgctctatcccatgcttcctattccacagatggaagtcactccccacaatggaattccaacttattatagttcaagtagtcctaaggtaaactgcctaaatatattattgttttgtatataatatttaataaataatggaatgtacgagagagagagctattataggtaaaaagaaataaaaataggttgataatcactgatttagaaagaagccacatcaatgattacaataaaaaggtctaatttgtatcacaaacctagcacatattgttagatttctttcaccttataatataaccaaaatgtcataaatcgattcaaaatatatcaaacagatagtatggtaggataaagagtgcccttccaagatgtccatatggtaaattatgaagcctgtggatatattaccttacatggtaaaaggaaatttgcagatgtgaatattaaaaatgttgagatgagataccatcctggtttatctggaaggatccaatgtcatcactaaggtccttctaagagggaagtaggatggtcaggtacaggagatgtaagaccagaggcagaggttggagagaagatgctgtgctgctggctttaaaagcagaaaaaggggccatagaccattggatacaggtggacttcagaggctggcaaaggaaagcaaacacattcttctctggagcctccaaaagaaacatgagcctgctaacatattataggcctttaaagcttactctgcacttttgtcctctggaactgtaaattaaataattcctattgcttaaaactattaaatctaagataatttgttttaatagtaccaggaaactaatagaaatgtgaccaaaaactctaagttaattgattttacaaacataatcaactccacttgccagcatctccctcagcccagataacaattcttgtaaagaaaaactaactaaatagttgagtctcaggtgtcatcatgtctttctgctctgattttgagacctctttagattaaaaaaaaagctaatgatgtggagtgaaaaaaattactcaaaatacatgagtattttgagattagagttgaattatatggagccatatttatagaggcagactatttctacataaatgatttatttcccatttctttctcttacagctgaacttttctctttacatgaaataccaaacacagcagaccaagacattattgcattaaataatttttgcgttggcttataagtgttttccttcttcctcctcctcctctcccatctctctctctctttttctctttctctctccctccctctctctctc

SEQ ID NO: 4376 - DNA, 2300 bp, Homo sapien
aagtgccacagcccttagtccggagccagagtctgtttttctttgctaagccttctgctctttagcttttttctctaatgccacatctttcgtgttttgctaatacagatccatgtgtgttctccaagaatctattcgctttaattgcgcacttaacctttaggcctcaagatcctctgctctgcctgtcgccagagatccagcccaagagtttgtccttataatgaagacccacaaaccccagaggatccccaaggacctgagtcatctggccccgcctcttgctgcagccttatctgctgccaccatattctggcccagcttgccagcctgcctggcttctcactgtcatctgggtatgtcttgctcccacctgctgaagtttaccttgtacctttcatggcttctgggggcacggccttgcggagccccccttcccgctggccagcttgtgttcacctatcagaggtttgctcagagacctcaggtgtctgcccccgaccctgcagcctcattcagagtcctctgttatattcctgcaggactggtgagcgaccttccttgcagttattggtttgtaattatatgtttgcatgatttcatatccacctcttctagttgatcttaaggctcctggagaaatggggtcccacctcttttccttaacatgtgtattttcagtacccggtgcaatgtctgagactcctggctacaaacagacacaatgtgtgctcagggacagattgatttgccacaggtacaccccaccatcacttcaaactcgaccatactaaagttattttgcacagatgcagacactgcctcagacttgtcgactttctggacgacattagagactttaatgtactttatcctgattcagccttccactggatgaagtaacatactctgtcaaatcattttgctcctgtctcagcctcccccatctgacaggtacaccactgagaggctaagcttgaattattcctctgatgagtatctctatagctttgtcatctccaagactggctttgcaacaatcctacaacatgtgtgtattccttgtaggatcctcattgaactaggccagatatttatttaaatatttagaattatttttggctgggctgtaaacctatagttacacacacctatgcaggcatcttcccgtgtcaggcggtgtctcatttctttatcaagaggtaattagtgcaagagaaaaaaatgaagtttgaaaaaaacatttaaaaattgattatgccatataaagggggaaagccttttaagaaacgattatggcatgagaggaccatggagtagctcagtaacaatggaaggggctcggagggtggaaggcgggcgagggatgagagatcacctaatgagaacaatttacgctatcacagcgatgcctgcgctaaagcctagactttatgcagtgtctccatgtaacaaaactgcactggtaccccagaaatctgcactaaatctatataatgatgatggaggctgggcgcggtggctcgcgcctgtaatcccagcactctgggaggtcgaggcgggcagatcacctgaggtcacgagttcaagaccaggctgaccaaaatggtgaaaccccgtctctactaaaaatacaaaaattagccgggcatggtggcgggcgcctgtaatccctgctgcttgcgaggctgaggcaggagaatcgcttgaacccgggaggcggaggctgcagtgagccgagatcgcgccaccgcactccagcctgggcgacagagcgagactccctctcaaaaaaacaaaaacaaaaacaaacaaacaaagatggaaggaaggagggaatttagcaattctccagatctactgccagtgaaaatagcatatgaggagggattccagttagaaatgcccagtttcctgggtgtgtgtgtgacgggggcggggaaccacaacgttaattttatccccgacatagggagcgcctgagtggtggcttttcaccgggtgtggctcgtctgagctcttgaactgaagccagcggacaccacccgtcggcgcctgctttcctggggcgtgggctcctccccctgtgcagaccgcgaggggagacggtgcgggcggccgggagcgcagccctccgggaggcgggtcatggcctgggcgccgcccggggagcggctgcgcgaggatgcgcggtgcccggtgtgcctggatttcctgcaggagccggtcagcgtggactgcggccacagcttctgcctcaggtgcatctccgagttctgcgagaagtcggacggcgcgca

SEQ ID NO: 4377 - DNA, 2300 bp, Homo sapien
ctgtagtgcattgcaaatactttcttaaaatttttatttatttattttgtttgttttaaattaaggtttaggatattttccccttccttctctaccaatatctctcttggtatttcttcttgattttcgttgtcatttgcgagatgtaggtactagtactaggtaatttctagctaaacttttctggaatgttcttgcctttttaaaaaaagtccagaaagaggattggtagtaacttttttttttttttttttttttttttgagacggagtctagttctgtagctcaggctggagggcagtggcgcaatctcggctcattgcaacctccgtctcccgggtcctggtgcaagcaattctcctgcctcagcctcccgggtagctgggattacaggtatgcgtcaccacacccggctaatttttgtatttttagtagagacggggtttcactgtgttggccaggctggtcttgaactcctgaccttgtgatccatccgccgtggcctcccaaagtgctggtgttacaggcagcccagcctctagtgtaatatttctaaaggtgttctccatattttcagtagttcttcggttaaataccaaataaatattatctaaactcctgagcctctcagtgaaagctttctagggccctaagttatgtttccatagctctcttgtcttaaccagccaggaaacccagcaaatttagccgaatcactgttttcctaactgtgctacatctccttgcttttgctgacagtttctttggcctgagggagcttttctttatctacaagtgtcaaagtgctccgttctttgtaaacaccaaaacacatgccactttccccactgagtcaaatggtatcatgaattctactgttattttatatataacaattataatattctccttttaaaaacaattgatgtgtatgtaggatttattgagtaactttgggaatataattttttaattaaaatcctgtttatgtatgtatctttgtgagtatttaaaatacacatatttacctctagtgagcgccctatcattgaaggaagatttagttctcattgtatttttactcattgcaaggtttacaacatactgtgttttttcatataaaatatgataacctaccaagttccttctgacctaataatactactaatactacaataataaacccatgctttatcataaagtaaccaataacttcaagaagttgaagttatatagagaaatacagaatacagttatatagagaaatatataaatatagagaaatgtataaatatagttatatagagaaatatatgaaatatagagatataatagcatcactcttcatccaaacaccaatagatgacattttatctaatatcattctcatttacatcagcccagttttaatatattcattaccagcacattttttttcaaaattcatgttgttttgtaaaatatttttattcattggacattatcattgtatttctagtcattaaacattctgtaacatcttattttaattctatccagttaatataatttttttctcccctatctttaatgttttagtttagttatgctatcgtatataacaatgcagtgagcatacttttagataaatatttgattgtatctggtattaaaatacatttaaggagctaggcccagtggctcatgcctataatcccagcactttggaaggccaagatgggagactctctggaggccagcagtttgacaccagcctgggcaatatagtaagaccccatctctacagaaaacaaaattagctgaatgtaatgatgtgtgcctggagtcctagctgcttgggaggctgaggtgggaggatcatttgatcccaggagtttgaggctgcagtgagccatgatcgcaacactgcacaacctgagtgacagagcgagaccctgacactaaaacttaagtacatttatgtttagtttttaatgatattgaacatttttatgtgctttctagggactgtttaagttgacttttgtatttcctcacacatctgtgtgacgttaggtacagattgagggcatctgtaacagctgaaatgttcccaaacaggtaaagctccagatggctctggaacttatgaggaaagagttggaggacgccttgactcaggaggccaacgtggggaaaaagactgtcatttggaaggtaagaccatgttggggctttaggaggcttgcctgtttgaaggatccagattcgggtcagtaattcttctaccatcttccattctccagcacttttgttccatc

SEQ ID NO: 4378 - DNA, 2300 bp, Homo sapien
cggattccaccttttctgactcagttctaggcactgaaagtaccatgaatataaataatcctattaactgtctgtataatatttgcaagtacaatgactaaacaggactgattatgaggcaggggaccattagatgaatttataaagccatttaatttgtctcattttatcttatatatattaaatttatattttattattattgctatgttcatttccttgttagcaaactaagagtcagaaaggaattaattttccaaatagcagagagcaaaatacaagaactttgacggtttcttttcttttgtttttttgagacagagtctcgctctgttgcccaggctgagtgcagggtgcagtggtgtgatcttggctcactgcaacctctgtctccttggctcaagcgattctcctgcctcagcctcctgagtagctgggattacaggcatgtgccaccgcacctggctaatttttttttttgcgtttttactagagatggggttttgccatgttggccaggctggtcttgaactcctaaccttaggtgatccgcccactttggcctcccaaagtgttgggattaaaggcgtgagcccctgtgcccggcttgacaatttcaacaatagtatttattgctctgcctgccttggcctcccagagtgctgggattgtaggcatgagccaccccgcctggcatgggaggatatattcttaaataaggtatcttatctatctatttttctaaaagggcaggatctcactctgtcactcacgctggagtgcagtggctcaatcatagctcactgcagcctcagtctcctaggatcaggtgatccttgtgcctcagcctcccgagtagctgggactaaaggtgtgcaccaccacgcccagctaatttaaaacaaatttttagtagagatgaggcttggttgtgttgcccaggctgtatatttttatactttcctttccctttcttccctggtactaataagctacattttacccctgaaggccaagaccaaggcctgacattcccatacagggtaaagcaaattattcccctgcttttatgtcattaaaacttatctgactggcaactgtttttaaggggagaggggaaatgtatcccaaatacaattattaatataataaatgtatcacagatatatttatttaataatctactttgagaaaataatgttactagttattaaaggcttcctttattaatctatttagataacctcctcataggaatagctctggtacgttggttcagagaattaggaatttataattcctataaagatatttagggaaacattttgtgtctttatttgaggaacctatccatgcccctcaaataaattctatgagtacttaggatctattttatcctgttccgtctgaattacatgcagaatgttactctgttacaatatccaagtagcagaattattaattcagaagataattaaattgataggtgttgcaggaattaacctaaactttgtatagctttaaagaaaagagatttgtctgagtgtggtgactcacgcctgtaatcccagcactttgggaggctgaggtgggtggatcacctgaggtcaggagttcgagaccagcctggccaacatggtgaaaccccatctctactgaaaatacaaaaaaataaaaaaaattagccaggcgtggtggcgggagcctgtaatcccagctacttgggaggctgaggcagggaggtggaggtcgcagtgagccgagattgcgccattgcactccagcagcctgggcaacaagaacgaaactccatctcaaaaaaaaaatagaaaagagatttattgtcccctataattttatctcaataatgttttgcagtagtttctaaggaaatttttatggggtcttcagtctgactgtgaaaagcagttcagagtccaactcacactgtgtttttctttccttttcagggtgtgagaggagtcctgagcaggtatgtgtgctttctgaattggtgaagggattgggagaggcagaggagctggtggagaaccctgctgacttctgtggtttctgtgctcttcccagaagtaaggctgtcacaaggctggaagcagagaacatccccatggaactgaagacagcatgctgcatccctgggaggagggagctcttaaggaagttccaaggtagttgcatcttagagactgggaattaggctgcctggggtttgaagaagttccaaggtagttgcatcttagagactgggaatgaggctgcctggggtttgcctcgtattg

SEQ ID NO: 4379 - DNA, 2300 bp, Homo sapien
ctaacaatcacttatcaaaaattcacaaattccatatgaaatcattattctttgcctggtttatcaacacctttatttagtaaaattttacagatacacatatatatgcacacacacatatatatgtacacacatatatacagatataagttgtgttaaaattgaattactcatcctatgctagaagcaactatacaatattagataggaatatcataaaaattgccttatttcatttatacatacaggatgatgttttacaaactcttctagcaatttatcctaatagttatttcaaagaagataataaatatttctattgagaattcatttaatttttttccttttttttttttttttttttacaaacactaagacacactttgtaagtttaaaatgtatgggccaggcgcggtggatcacgcctgtaatcccaacactttcggaggcctaggtgggcggatcacgaggtcagcagatcgagaccatcctgactaacacggtgaaaccccgtctctactaaaaatacaaaaaaattagccgggcgtggtggcgggcgcctgtagtcccagctactcgggaggctgaggcaggagaatggcgggaacccgggaggcggagcttgcagtgagccaagatggcgccaccgcactccagcctgggccacagagctagactccatctcaaaaaaacaaacaaaaaacaaaacaaaaacaaaaacaaaaaacacgtatgaacagcttgagtcaaatctgccttctggcagctgggcaccaagtctgctcccccgcaggctcctgccttccttcacattgcactgctcattgtgtggttctggtcctgggacctggtggtaggggctggagaatggggattgggcagcccagttccgctctcctcatgcagtgtcctgcgtctgtcatctgcttgggttgtggcttgtgtggaaggaccacgactgaggttgccaggccagcaaagacggggtgcagaagagtctcagccagagtgatgtgctgggcagcgtccaattttaccaccctccgcatcaggtcaaacagctgcacgtgctccagagagtcttggagcatgtcactcttcagacgtttgcagttcttcacatatgggctgtcagagctgttctcatcccaaactaggccccatttgtagaaatatttctgcttcttggtacaggagatcacgcgtaatgggatgagccgtagggtcttcaacatcaccaggcgctcttggttttcacaggtctggaagagtgtgaaacctggtagtacttaaagagaaggtagcccatgccctggacatggcaggggcgtgtccagcccagatcaaggatcagttcaggcaggcgacagtgaccgtggtcaccatggcgatgtggtgcccacggtcagaggtggcattggggaagtcagccactcggacgctggtgctcctcactgacttctcatcgctcctgtgctcgctgtagacggtgtttaactcagaatccacatgcaggatgttctcggttttcaggtgtgcgtgggtcagccggttctcgtgcagaaatctaagggtgtggcagagctggtgggccatgtgccagacatgtgggaggggaatggctggatgttattctccttcgggaactcaagggttttcctgcccaggagctcaaaggtgatatgcatggaccgcggagggtgaaccagtcacaccccaagacgcacagcagctggttctcttagtccttctcgtttatttttttcgagagcgttgagttttggcggtgccgcctcccggtgcttgcccacattgcagatgaccctccggcaacccgagacgtccttctggcagggtccaagcactcacccccttgccacaggcgccttggcccaggttcccacttgtctttattgctcttggggccaatcaccgacccggccaccaggtggcgcctgtttatcatcttccgcacctgcgccctgggctcactcgctggggctgccggaggacgcgctccttcaggacccgctgcggccaccaggtggagcctctttatcatcttccgcacccgagccccgggctcactcgctggggctgccggaggacgcgctgctgcgagaccagccgcggcgtctttggcagtagtgggcgtgcttgcgggtccaggagggcccctctcccgcgaccgccgaccacgatgagagcgtgaagaccctctcgaaaggaagggctctgctctacacactggtgtctcctgcggaagggcagctgggcacgccttccagaccgaggtatca

SEQ ID NO: 4380 - DNA, 2300 bp, Homo sapien
tgttatgtgtgaatttgatcctgtcattatgatgttagctggttattttgctcgttagttgatgtagtttcttcctagcctcgatggtctttacaatttggcatgattttgcagtggctggtaccggttgttcctttccatctttagtgcttccttcaggagctcttttaggtcaggcctggtggtgacaaaatctctcagcatttgcttgtctgtaaagtattttatttctccttcacttatgaagcttagtttggctggatatgaaattctgggttgaaaattcttttctttaagaatgttgaatattggcccccactctcttctggcttgtagagtttctgctgagagatctgctgttagtccgatgggcttccctttatgggtaactagacttttctttctggctgcccttaacattttttccttcatttatactttggtgaatctgacatttgcttttcttggagttgctcttctcaagaagtatctttgtggcgttctgtgtatttcctgaatttgaatgttggcctgccttgctagattgggaaagttctcttggataatatcctgcagagtgttttgcaacttggttccattctcctcgtcactttcaggtacaccaatcagatgtagatttggtcttttcacatagtcccatatttcttggaggctttgttcatttctttttattcttttttctctaaacttctcttctcacttcatttcattcatttgatattccatcactgataccctttcttccagttgattgaagtggcaactgaggcttgtgcattcgtcacgtagttcttgtgccttggttttcagctccatcaggtcttttaaggacttctctgcattggttattctagtcagccattcatctaatttttttcaaggtttttaacttctttgcaatgggttcgaacttcctcctttagctcagagtagtttgatcatctgaagccttcttctctcaactcgtcagtcattctccgtccagctttgttccattgctggtgaggaactgcgttcctttggaggaggagaggcgctctgatttttagagtttccagtttttctgctctgttttttccccatctttgtggttttatctacctttggtctttgatgatggtgacgtacagatggggttttggtgtggatgtcctttctgtttgttagttttccttctaacagtcaggaccctcagctgcagttctgttggagtttgctggaggtccactccagaccctgtttacctgggtatcagcagcggaggctgcagaacagcggatattggtgaacagcaagtgttgccgcctgatcgttcctctggaagttttgtctcagaggagtaccaggccgtgtgaggtgtcagtccacccctactggggggtgcctcccatttaggctactcaggggtcagggacccacttgaggaggcagtctgtctgttctcagatcttcagctgcatgctgggagaaccactactctcttcaaagctgtcagacagggacctttaagtctgcagaggtttctgctgccttttgttcaggtatgccctgcccccagaggtggagtttacagaggcaggcaggcctccttgagctgcggtgggctgcacccagttcgagcctcctggctgcttttttttacctactcaagcctcagcaatggcaggcacccctcccccagcctcgctgccaccttgcagttggatctcagactgctgtgctagcaatgagtgaggctccgttggcgtaggaccctctgagctaggcgcgggattaatctcctggtgtgccatttgctaagaccattcgaaagtgcagtattagggtgggagtgacccgattttccaggtgctgtctgtcacccctttctttgactaggaaagggatttccctgaccccttgcacttctcaggtgaggccatgccttgccctgctttggctcacgctcagtgtgctgcacccagtgtcctgtacccactgtccgacaatcctgtgtgagatgaacccggtacctcagttggaaatgcagaaattacccgtcttctgcgtcgctcacgctgggagctgtagactagagctgttcctattcggccatcttggctccacctccagaaaatttattttcattgagatataaaagaaacatttttaaaaatcgggtggctcataaattttcagaaacacagaagaatcaggcttggtatacacacattatgcacaatgcccaatatgagcctggaataaattccacacatcaccaggacacagacagataaatg

SEQ ID NO: 4381 - DNA, 2300 bp, Homo sapien
ttctgggaatgcctgtaagtatatgttggtcctgttgcattaattttctaatatttttgtctcttctaatcttttcagtttttttttccttctgatagatttttcactttcgtattttgaaactttcatttaatgcggtatcaattattgtatctttaatttcaaagagtcatttattgttacatttcacatccttgcatatagctaatgatatttatttggtggattttataacatatcatagacatcttcattcctgaaaataggaattcttaattttaaaaactcactctttttgcaggtttgtgatagttttaactcagtgtacatacacgtgtattgatccttaagtgagtgttcatctttgtgtgtgtgtgtatagatgtgagtttgcacactgtgtagatcttactctttcatattgttacacttcctcaaaggtcggctgacctttggctctaaaataattttcaagcctaaaaacttcattccttttatgtatcctgtgcaaagttgtccagtgatgtcttctatctggagaagaatactcgaaccacctctacccagaaaactgtcaggttgctgtttccttttttccatttaagtgaatggtcatttctccaaatcctgtcttttgaagatgtaaagtgatttattgtttttgcttccctaatgcttagattacattatactttatggatcttaacaaaaaattgataaatatacttatgatcccttcatatgaatgggaggatccctaaagtctatgtaatctaagcatgagggaagcaaagacacagaatatacatcgtatacggggagagcttgagcagagacatggaagctaaaatgaacttggcatatagatattgagatagagagtctgcattaacttgagaattcagaaattggatgagaaggcaaaagagaatggacatttgatggtggtggacattcaaaatcaagactatgaattacatttcatgaaaaaggtacttaaaataacaattcattctacatttttaagtagaagaaccaaataatgatgtctaacttagagaaagtttgacttcaaattattatgcaaagacaattcaagaaggaaatataagttcctccaaatgaatcataggctgctgcagttctacaagtaagtcttaaagaataaatttagtgagaaaaatcatccagaaaaagtaatgctaatttattcataatatggatccatagcatatgcatttaatttaccttcccatgcgtatgttttaagcatagcacatgatcttaatggcatctgagattgtgttgggcatcaaacattcatatctttttgaagttgtaagacaaatgatttttcctataaatgtatatatttcttagaaaaactttggttataaatatttgtctcatcaaatattaatctctgtgtaagaaaataatttttttctaaatagaataaatgagttcatcatttaagtgttgtaaagttctataaataattcacagccttactaaactaaggatttttaaaaacaattggcttactattctataagtagtcccctctcattcactgttttgctttccgtggtttctcctgtaatcaaatgcggtctgaaaatattgcatggaaaagtccacaaatgaacacttcataaattttcaattggttttcagtcatagcccaacgtcacatcacagtgcctaccttgttctcctcactttatgtcatcatgtagacattttgatttcccatgaagcattttgtcatcacaagaaaaatgagcactttttcaatatgatggtttgaaagaaagaaaaatatagattgcattcacataagttttattacagtatatagttgtaattgttctattttatttgtagttatttttgttaatctcttccttgcctaatttataaattaaagtttataatatgcatttatggatataaaaatagtttatatagggttcagtatcaaccccagtttcaggcatccactgggagtcttgtaatgcagccactgtggataaaagtgaattactgttcttaatttacccttttgtctcccttcaggatggattgtaggaattccccatggaaaattacaatcaaacatcaactgatttcatcttattggggctgttcccacaatcaagaattggccttttcgtattcaccctcatttttctcattttcctaatggctctaattggaaatctatccatgattcttctcatctttttggacatccatctccacacacctatgtatttcctacttagtcagctctccct

SEQ ID NO: 4382 - DNA, 2300 bp, Homo sapien
tcatggacacatactccctcctaagactaaatcaggaagaaatcgaatccttgaatagatcagtaacaagttctgaaattgaggcagtactaaatggcctaccaaccaaaaaatgcccaggaccagatggattcacaacctgattctatcagaggtacaaagaggagctggtaccattcttctgaaactattccaaacaattgaaaaaaggggacttcttcctaactcatttatgaggccagcatcatcctgataccaaaacctggcagagacacaacaaaaagggaacacttcaggccaatatccctggtaaatatcgaggcaaaaattctcagtaaaatactagcaaaccaaatctagcagcacatcaaaaatattatctaccacgatcaagtcagcttcatccctggttcaacatacaataaacaataaacataattcatcacataaacaaccaatgacaacaaccacatgattatctcaatagacacagaaaaggccttagataaaatccaacatcgcttcgtgttaaaaactctcaatagccaggcacggtggctcatgcgtgtaatcccagcactttgggaggctgaggtgggtggatcacctgaggtcaggagtttgagatgagcctgaccaacatggtgtaaccctatctctactaaaatacaaaaattagccaggtgtagtggcgggcgcctgtaatctcagctacttgggaggctgaggtgggaaaattgcttgaaaccaggaggcagagtttgcattgagccaagattgcaccattgcactccagcctgacaacagagcaagactctgtcccccccaaaaacaaaacaaaacaaaacaaaaaaactctcaataaactaggtattgatggaacatacatcaaattaataagagctatttatgacaaactcatagccaatatcacgctgaatgagcaaaacctggaagcattccctctgaaaaccagcacgagatgagccacgtttcatacagttgagcctttgctcactgtggtagaacacgccccgtaagtctccaaagtagcacattgcagagaagctgttaaagaccacagaagggttttcttttgtccctagatgtttatccgatttgatttataacactttattgtaaaaagaagaaatcaattttttcaaaaatacaaaggtttttgaatgtcctcactacaaaaaaatgataaatgcatgaggtgatggtcacactaaataccctgatttgatcattatgcaaaatatatgttttgaaatgtcaaaatgtgcccccatagatatttacaactttaatgtatcaacttaataaaattaaaaatagaaacaaaacaagcaaataaacaaacaaaaaatgcagcttcttttccacacagaattggaaggaaaaaaattatcctcagaagataagtgaacgatttagtcttccttagaaaaatattttaatgggggttttgattaaataagacaagacttcacgacttggtctgagatagaaaagttaaaacatagagtactatacccttctctgaactgaagtgtacaggtgtccccaaggagtaatgtcattgatctcatataatccttcactgggctgcaggtaggatggtagggaaaaaaaaacatgcgaacaggaattctgttgtcaacgagactactaacctggagaaatattaggacagaaggagaaaaaattctgtaaggaattttcttttatgaggtatgatcctaaaatttagcaataaaggcatacagtgatttttctcctaggttttctattgactgtacatgtgggtaagtagggaagctcttatacacttcagcattcttgtctgtaaagtaaatgtccaaatgtactccatgtatactctgtgaaagttggatgaggaaataattgtaaaagcaatggactaatccacacaatttaccatgactaaaggaaggtaactgaaggttggtgagaaggccttatgcatgcatataaactgcccagtagagtatgtcacagtatgtgtttgaaaactgaattgataaataagcttgtaccttctttggaattctcagataaggcaaattatccaggatggtgtgggaaaaccagaccttcaactccatcttcatcctgctgggaatcttcaatcacagtcccacccacaccttccttttttctctggtcctgggcatcttctcactggcattgatggaaaatatttccatggttctcctcatctacatagagaaacagctccacacccccatgtacttcctcctcagtcaactgtc

SEQ ID NO: 4383 - DNA, 2300 bp, Homo sapien
gatttcccatttttcgattttgtggaatcatgtcaataagattggtatcatttcttctttgaatgtctggtagaattcagctgtgaatccatttggtcctggagttttttggttggtaatttttttattaccattttaatctcactttttgttattggtctgttcagggtttttaattcttcctgatttaagctaggagggttgtatctttccaggaattcatccatctcctctaggttttccagtttatgcatgtaaaggtgttcacagtagccttgaatgatcttttgtatttctgtggtgttggttgtcatatctcccatttcatttctaattgagcttatttgaatcttctttcttcttttcttggttaatcttgctaaaggtctatcaattttattcatcttttcaaagaaccagttttttgtgttatttatctcttgtatttctttttgtttgtttcaatttcatttagctctgccctgatcattgttatttcctttcctctgctgggtttggatttggtttgttcttgtttctctagttctctgaggtgtaactttagatggtctatttatgctctttcaggctttttgatgtaggtatttaagactatgtttcctcttaggagtgccttagctgtatcccagaagttttgataaatggtgtcactattatcattccattcaaagaatttttaaatttgtctcttgatttcattgttgacccagtgatcattcaggagcaggttatttaattttcatgtatttgtgtggttttgaaagttccttttggggttgattttcagttttattccactgtgttttgaaagggtacttgatataatttcaattttcttaaatttattgagacttgttttgtggcctatcatatggtctattttggagaaagttccatgcacttatgaagagtacatattttctgcagttgttgggtagaatgttctgtaaatatttgttaagtccatttgttccagggtatagtttaaattcattgtttctttgttaaatttctgtcttgatgaccgtgtagtactgtcagtggagtactaaagtcccccactattattgtgttgctttctatctcatttcttatgtctagtagtaattgttttataaacttgggagttccagttttaggtgcatatgtatttaggatagtgatatttcccattggacaaagccttttaacattccataaagtccctcttgttcttttttaaccactgttgctttaaggtttgttttgtctaacttaggaacagtgactcctgctcacttttggtgtccatttgcatggaatgtctttttccaccgctttaccttaagtttatgtgagtccttatgtgttaggtgagtctcttgaagatatcagagagttggttggtcaattcttatccatcctgaaattctgtatctttcaagtggaacatttaggccatttacattcaatgttaattttgagatgtgaggtactattctattcattgcgctatttgttgcctgtatagcttgtggtttttgttattgttgttgtatttttgttttataggtcctgtgggatgtttgctttaaagaggttctgttttgatgtgtttccaggacttgtttcaagaatttgagcttcttttagcatttcttgtagtgctggctttgtagtggtgaattctctcaacatttgtttgtctgaaaaagactgtatctttcctttgtttatttgttttgctggttatgaaattcttggctgataattgcttgttcaaggtggctcaagataaagccccaatcccttctagcttgtagagtttctactgagaaatctactgttaatatgataggtttttcccttataggttatctggtgcttttgcctcaaagctcttaagattttttccttcatctcgactttagataacctgatgacaatgtgcccgggtgatgatctttttgtgatgaatttcccaggtgttctttgggcttcttgtatttggatgtctaggtctttagcaaggccagggaagttttcttcaattatttccataatatgttttccatacttttatatttctcttcttcctcaggaacaccaggtgatggtgcagattgagctgtagactcacctagacaaatacccccttggggttcacttcctacccaagaagctggatgaggcagtggctgaagtccacctgcacaggctaaatgtgaagttgaccaagctgactgagaagcaggcccagtacctgggcatgtcctgtgatggccccttcaaactggatg

SEQ ID NO: 4384 - DNA, 2300 bp, Homo sapien
tatcaggaatcaggctttagggtatatcagatatgtcagttctaacatcctgttgttttcatctgcgcccatttcctcttccctttggttcatgtctctcttctgaatcttttctttgcttactcctcactcttttccccatcccacaccccttttttctgtaacaaattacttttaacaaataatatgtgttcaccattggaaaaacataataaaacaagaaggaaacaaaaatcacccaaaatcctaccatgcacgtttcatgcattttgtttcctgggatttgttgtcatcctgtatggtgaggtgacagatacagacaactgccttggaagaagagtttgttcccgagaggaggggacatccatgccatgcagggccacacggggaagcagccagggtccttcaggaggcagaagtgaaggagaaagcaaagcgcagcgccttagtgtggttttcgtggaaaggagtaggtgaggcagggtaggcaagtttggataagtttaggagtggatagttggaataactttgctaggccctgggctataggggcggcctctaattgtctagtacctggccctgggatgacttagggcagaggaaatatcggcttggtcggggagaagtaggtaaaggagttagctggggatccaggctttggattaggtggttggtttgcatatgaaaggcacacttacaggggagtttactgtttctaggaattagccctggaaggggcagtttgtccttggccagcaaggtcccccaagacatgaaagcatcataaagtatagaaaataaaaatatgattaatacagcacagataaccatgtgtgctgtattaatcatatttcgtgtccttgtatatccagccaaaatgggattacacagtatgtgctattttgttcttttattagcattatgacatggttccatgtcaataactatacatccaagccgtcattttaaaggactgattaatattttatttttttaagaaatggggtcttgctctgttgcccagactggagtgcaatggtgtgatcatagctcactgtaacctcaaactcctaggctcaagtaatcctcctccctcagcctcacaagtagatgggctcacaggcagaagccactgcgcccagcttattttcttatattagatgtactattatttatttaaccgatgtcctataactgaaaagttaggtttgttttgttttttgcttggttggtatggctatgatgactgtccctgagcacttgtctgattacttccttcagcttgcctgctgaacatggaattgatggtctcaaggtcatcttttctgtaagactctgtctatgttgctaaccaccttacactaaaatggtttgtgttttcctttgttttccctaggggaaaaggctagcagcctttgggagtgctggatttcacacatctaccctccactggcaaaatttttatttcttctagtccatatccttatgaaatattctttatagaatgttgcttccttggcatttatcctcagcacagtttgggaaatgaagccgacattgctagtaggccttcctccttctcttatcctcacgtctattatgggtctccatgggcagctggggtccctcagggttccccatcctgatatccctctccccccaggctcagcaggagacacagaaggcagcgctgcggtacgagcgggccgtaagcatgcacaacgctgctcgagaaatggtgtttgtggctgagcagggcgtcatggctgacaagaaccgactggaccccacgtggcaggagatgctgaaccatgctacctgcaaggtgagccgggcggtgccagcaggtccccttcgctggttctcgtccatcctttgctatgtctttatcacctcacctcctcattcttccctctattctagccttctttcaactttgattctgtttcaggcaaaacctgttcctagttttctgttctgtttggcctccattgcttcccatattccatttccctctgacttagaatgtcatcccgggctcttcttgaacgtttgcctccaggtgtgggactaacccaaacaattcatccctggtggatactgaggattcaacattcacattttattatgtttagctgtgtgactcctcgcttctgttttcagagtctgctccctttcctgcttttgagctctgacagtacacctcgagttttgaagtataatttatgtatcatttccaagctcctgaaaggggactggggagcggaaggatctctgccgttggccctgtctgccacctt

SEQ ID NO: 4385 - DNA, 2300 bp, Homo sapien
aggggctctgggaacttttgtgttttctcgggcaagggaggatgacttgaggccagtacccctctcagctctcttccatttcatggaaagccctggatggttctattgcttctctctccagtccttccaggggccaggaaggcactcaaaccagcttgtccagcaacttttccccaggactctccctccctcccacaggatctgctctatagggacctgcggtcatggtcacccattgcccaagcaggccaaaaggcttcttggactctatacactttcctgatcttgaccttagtcatccaccaagcccctgtgattctgtgtcctgcgttgccttgggatctgccctctcctctgccacctggaatactatagacagcctccacctttttttttttgtttgttttttgtttttgtgatggagtctcactgtgtcgcctaggctggagtgcagtggcacgatctgggcttactgcaatccctgccccccgggttcaagccattttcgtgcctcggcctcccaagtagctgggattatagatgtgtgccaccacgcccagctaatttttgtgtttttgctagagacagggcttcaccatgttggccaggccggtcttgaactcctggcctcaagtgatctgcccacctctgcctcccaaagtgctgggattacaggtgtgagccaccatgcctgtcccagcctccacttttgtctccctggctcccccaggctttcgttacattggcaccaggctctgagagacccttttgccattgcagaaagtcctggtactacctcccatagtgctgtagccttactgaccttctcacctgccaacttgtctgcccagggtacctgctcccctttggttccttggccctttgttcttcactggcactttatttttttgagacagagtctcgctatgttgcccaggctggagtgcagtagtgtgatcttggctcactgcagcctctgcctcccaggttcaagtgattctcctgcctcagcctcccaagtagctgggactataggtgcacgctgccacacccggctaatttttgtatttctagtagagacagggtttcaccatgttgcccaggctggtctcaaactcctgacctcaggtgatctgcctgcctcggcctcccaaagtgctgggattacaggcgtgagccaccttgcctagtcattcactggcacttttgtgtctatgaagtccttccagctgctgagcaagtgttccaggcatcctaccctgaccttctgctgcccaattaggtgaccttgctacccagagagcacccacacccacccctcacaaggctgcacatactgcccaggacctgctgctgacttgctgggtttccttacaggctgccacctctatgtcctgaattctcaggtctcacggtcctgagaggtgataagtgtgcagtaaacatgtgctgactgagtggccctgccctggcccaggtggccatcctctcgcagagagcgagccttcaggtccaaggagactccctcagtttgaggaagtgttgcaatctcacggagagagtgagggctcaccacaacttcacgttgtgcatattagtgttgcattctccaaacctcaatttcttcatccttgaaactggggttttactacccaatacaaggtagagttgtgaggattacgtgagattgtatgtatcaggtccctgatagacaagaaagcttttggcaatctccgtatcttctttcctttcctgagtgtctcacctcatttccctgggcaagtggggctctctctctctgtgttgctcctgccttgcatggttcattcaaggctacttccttccactgcactaatttgccacccctctctgtggcaggaggagttggagcacctgaaccaggccagcgaggagatcaaccaggtggaactacagctggatgtgagtgtccttttccttatgtgcttgggctggtccttggaagtatctccatctgtctctttcccagattgaggcagtggcggtgggaggggtgtgtctgagaaacaagaggggctgggacccaaacatgtgcctttcctctgccttgttcctttccaggaggccaggaccacctatcggaggatcctacaggagtcggcgaggaaactgaatacacagggttcccacttggggagctgcatcgagaaagcccggccctactatgaggctcggcggctggctaaggaggtatggctggctgaccacgtttgaggaaggctacgtgctgagcctggccctggattcttctgtctctatat

SEQ ID NO: 4386 - DNA, 2300 bp, Homo sapien
aatcgcatctatgccaatcaaatctgtaatttttcacttctccaacactattgagccctgatcaccttccttccttcattctccctttgaaatgcccagtcacttctgtacaaatcggaacagaggtcagttcttttcctttctgtaagtagttactgaaaaaagtctttttcactgcttcaatgtctagctgggttgtctttgacaggatccaaaaaggaggggaattcagcccatttgccttttccatctgcagggcaaagttttgagttgactctgaggaagttacgccttttgtaaaaacaaaacatccaaccctgaatgaagcccttccccttaggcctaggccctcccctcaccaagcgacacctagaggtgacaagcaggcgctcgctcagggacctaggtaacgatacacaatgccatgtaacaaactcctgctcatcgagggcatctgaccctgggtgcacgagtgaattaactgagttaatgttgactaagttcctggttagtattcacggagcaattggtgaccccaccaaaacgtcgttcaaggtgcaaggtccagaggcctcgaggagtgggatttacacatcggagccgtccgctcagacgccgttagtggagggttccgccgacttcacgggagtgaggaaagtcacttttggaaatcgactttgccttcgcccgcgaagcccgccagcgtccggactcgagttgcccccggagccactgccggaagtttaccagctcactttcggcgtcgcgcccgcctccgtggagcaggccggaagtggctttccggcagccgccgccgcagctccgtaaagcaagatggcactactcactctgaggctattatctccgttttatatctagtattcctcttctcaccagttactctcgatttccgtcccgcgccctaattttcttcagcaccacattctcatgtttttctttcattcagccttggtggagtatggtctggaggcaacctacggctagcctgagcaacgtggggcaccattttgtacggaaactgaaggcagggcgggggagtgtgaggcctcccgaggaggcccggcttgagagagagcgtgggagggagagcgttgttcaccgatgatgtatttccgcttctggtctgcctggtcgtttttggttggatcggcttgttgcggggagggagggggggagattgtttgcagcatagaagctccgcggacgggaaggtaaactgaggtaaggctgtgcggggggcttttgcgcatggctgggtagaatggacgggagtagggtccttgggattgcggaagagtgtggaattggagacgggaggcttagatgtctcgggttggacagagaaggtggggtggggctcggggttacaaggtgaatcgcaaagccgggctggggtggagtgggacgagcgggagaccacaggagatggaggagagcctaggggtgcagaggaaagtctcgaaggcgctggttgaggagggcctgggtcgagaggagctgggacgggggaagagtagaatctaaagtccttgagggctaaggagagaagttgaggtagggactggtcggaatacatgggtgggggcgtggtgagagtgtagtttttgggaggctgtagagttggaaggggctggtggctgcggttttgatgctgacatgaccatatacttggcctttgtttctctgcagctccccagagacgctcatcctacagcctcagctcgggcccagccttctctctccagctgccaccacagcctggaggcgcctgcctccaccctcccgaatggtgctcctcctagcaggcctcggtccaggatccaagccccctttgccccctgccttggagctgttgctccgggtttgtcacagtggactccctgtggcgggaagggaagaacttttgcacagacaaggcttcagctctaggaaccccactgacaacttgaatctcaacctctaacctagtgtgaggttcttcctgtgcccaccttttctgccttttgagaagagaaactcttctcctggccatctagagcccaggaagccccaagctggggccctggtcccagcatgtcagtcctctcttgtgcatagggctctgccctccccctgtcagcatggctgagctcagacaggttccaggagggcgggagaccccacagggggagctgcggcctgaagttgtagaggatgaagtccctaggagcccagtcgcagaagagcctggaggaggtggaagcagcagcagtgaggccaaattgtccccaagagaggag

SEQ ID NO: 4387 - DNA, 2300 bp, Homo sapien
aagactgaggcattattatccatcaaagctgtccacttagacaatgttactcaaggtcctgctgacttattgaaattagaaaaatcacttttgtaattttaaaaacaaaacctccaatttaatggaaaaatctgttttcaatcacctcttttaaaggaatatattttgctctgctcaatttaaaaaaatcgttattcatgggatgaagggatagaagaaatggactgagaactgtagaactcttggcacatgactccatccaaacctctgagttactaagagacaaactttagcatgccttctagcagtgtcagatcatgtccctaggagaaccccagctcccccatgaaaatgcctgcctgagaaagctcaatgctaccaggagaatttactatttgttctagccaacacctgatgataggctcctgacctccctttctcagggcgtttattaagggcttaccattatgaatccttccttcttctctttaaggtgtttatgcgtctgctacaactcaagaggtccttctaaaggacctgagagccattcctttgaaattgatcgtcaagaagggcagagcctctacctcccaatctcagtgcaagaatagcaagctaggctgggcgtggtggctcacgcctctaatcctagcactttgggatgcccaggcgggtggatcacctgaggtcaggagttcgagaccagcctggccaacgtggcgaaaccccgtctctactaaaaatagaaaaattagccagatgtgttggcatgcacctgtaatcccagctactcgggaggctgaggcaggagaatctcttgtactcgggggtgggggtggggcggaggttgcagtgagccaagatcgcgccattgcactccagcctgggcaacaagagttaaactccgtctcaaaataaataaatacataaaaaagcactctaacttctatagctgctagctagcagacacatctggccgaatcgcatctatgccaatcaaatctgtaatttttcacttctccaacactattgagccctgatcaccttccttccttcattctccctttgaaatgcccagtcacttctgtacaaatcggaacagaggtcagttcttttcctttctgtaagtagttactgaaaaaagtctttttcactgcttcaatgtctagctgggttgtctttgacaggatccaaaaaggaggggaattcagcccatttgccttttccatctgcagggcaaagttttgagttgactctgaggaagttacgccttttgtaaaaacaaaacatccaaccctgaatgaagcccttccccttaggcctaggccctcccctcaccaagcgacacctagaggtgacaagcaggcgctcgctcagggacctaggtaacgatacacaatgccatgtaacaaactcctgctcatcgagggcatctgaccctgggtgcacgagtgaattaactgagttaatgttgactaagttcctggttagtattcacggagcaattggtgaccccaccaaaacgtcgttcaaggtgcaaggtccagaggcctcgaggagtgggatttacacatcggagccgtccgctcagacgccgttagtggagggttccgccgacttcacgggagtgaggaaagtcacttttggaaatcgactttgccttcgcccgcgaagcccgccagcgtccggactcgagttgcccccggagccactgccggaagtttaccagctcactttcggcgtcgcgcccgcctccgtggagcaggccggaagtggctttccggcagccgccgccgcagctccgtaaagcaagatggcactactcactctgaggctattatctccgttttatatctagtattcctcttctcaccagttactctcgatttccgtcccgcgccctaattttcttcagcaccacattctcatgtttttctttcattcagccttggtggagtatggtctggaggcaacctacggctagcctgagcaacgtggggcaccattttgtacggaaactgaaggcagggcgggggagtgtgaggcctcccgaggaggcccggcttgagagagagcgtgggagggagagcgttgttcaccgatgatgtatttccgcttctggtctgcctggtcgtttttggttggatcggcttgttgcggggagggagggggggagattgtttgcagcatagaagctccgcggacgggaaggtaaactgaggtaaggctgtgcggggggcttttgcgcatggctgggtagaatggacgggagtagggtccttgggattgcggaagagtgt

SEQ ID NO: 4388 - DNA, 2300 bp, Homo sapien
gttctaaatggccacatgtgtctacagactaccatactgtgcagagctgattaacatttccttctttgcagaaaggtctttcagacagtgctgctgtagacaaaagttttaattcatcatgtttgtgctggcttcaataaacaagttcaggttaaatcaatgcacagcatcgcccaatctcttcctacccaaaacattatccaaacccagcagaaaaactattgtgggattatatcacaatctatacatgatagattcacatgtggtctcagtgggtgagagttaaccttggaagaggccagtggagactttaaaggagctgctaaatctcaggatgtgatctaggggtctggccattatatgtattcataatgttttcccaccaaagatctgtgacacgtagcagcagtttgtgattgctaagcattacacagagaaaaggagctatgggatggggtataagaatgacaggtattggagcagtgctgaataagaaaggttagataattcaggctagggtagacagaacatcctgggtaaaatgaggttattacagtgaaattctagttctacaaaagtaaagtgactggtagacaacaaataaatcatgtttatcaccttatatttaatttttatggtttttgtatggcaccttaataataaaaaggactgtggtagaagactgaggcattattatccatcaaagctgtccacttagacaatgttactcaaggtcctgctgacttattgaaattagaaaaatcacttttgtaattttaaaaacaaaacctccaatttaatggaaaaatctgttttcaatcacctcttttaaaggaatatattttgctctgctcaatttaaaaaaatcgttattcatgggatgaagggatagaagaaatggactgagaactgtagaactcttggcacatgactccatccaaacctctgagttactaagagacaaactttagcatgccttctagcagtgtcagatcatgtccctaggagaaccccagctcccccatgaaaatgcctgcctgagaaagctcaatgctaccaggagaatttactatttgttctagccaacacctgatgataggctcctgacctccctttctcagggcgtttattaagggcttaccattatgaatccttccttcttctctttaaggtgtttatgcgtctgctacaactcaagaggtccttctaaaggacctgagagccattcctttgaaattgatcgtcaagaagggcagagcctctacctcccaatctcagtgcaagaatagcaagctaggctgggcgtggtggctcacgcctctaatcctagcactttgggatgcccaggcgggtggatcacctgaggtcaggagttcgagaccagcctggccaacgtggcgaaaccccgtctctactaaaaatagaaaaattagccagatgtgttggcatgcacctgtaatcccagctactcgggaggctgaggcaggagaatctcttgtactcgggggtgggggtggggcggaggttgcagtgagccaagatcgcgccattgcactccagcctgggcaacaagagttaaactccgtctcaaaataaataaatacataaaaaagcactctaacttctatagctgctagctagcagacacatctggccgaatcgcatctatgccaatcaaatctgtaatttttcacttctccaacactattgagccctgatcaccttccttccttcattctccctttgaaatgcccagtcacttctgtacaaatcggaacagaggtcagttcttttcctttctgtaagtagttactgaaaaaagtctttttcactgcttcaatgtctagctgggttgtctttgacaggatccaaaaaggaggggaattcagcccatttgccttttccatctgcagggcaaagttttgagttgactctgaggaagttacgccttttgtaaaaacaaaacatccaaccctgaatgaagcccttccccttaggcctaggccctcccctcaccaagcgacacctagaggtgacaagcaggcgctcgctcagggacctaggtaacgatacacaatgccatgtaacaaactcctgctcatcgagggcatctgaccctgggtgcacgagtgaattaactgagttaatgttgactaagttcctggttagtattcacggagcaattggtgaccccaccaaaacgtcgttcaaggtgcaaggtccagaggcctcgaggagtgggatttacacatcggagccgtccgctcagacgccgttagtggagggttccgccgacttca

SEQ ID NO: 4389 - DNA, 2300 bp, Homo sapien
agagtttaagagaacagactggaaagacaggttggaataggtgaaagagggtcttgaatattacaccagaagagtaaacttcatttggtgattgtacagacttttttgactattactgagcaggaatgtgatacaatcagaactttggggagattcatctggtaggttcacagctgttatctccaacgtctagaatactacctggcatatagtagaccttccataaacattttgagtatttacagaaccacattaagagttgtcatttattgatgtagatgtgtagagaaataaaaccatttggatgtgatatttttaattgacaaatatacacataacttcatccttgaactttctttcactaccctccatcttcctgttacaattatcatcccccactgtgatgacttccataacataggaaacctaaatccagcttcctgttctttccccccattgtttgagtttttccctccaaagctacacagaagaaagtcatctaatccagtcctctttcacatgaaagtttgttagaatttgtgtacagtcattatgtgcacaaaaaatgtttctctttctaggttaaatatccccagcccctttaattatgtgaccaccctagtcaccatcctcttcatgtctctgggattagccaagtgtgtcagtgtccttaaaaacatgacatcagtactgagcaatgagtccagaaatgtctaaattagtacatttctctggcttaaagactctggaaatatcctcaactaatcattctctatataatactaccttatctgtgtatgattctttacaataaaaatatatatacttcaagcgcattttccatgtctctctcaatgttatcccttcctggttcaggccctgatcactccagacctgcatcctgtgtcttgcttttcagctttcttgcctgctgctaccagatttgtcttccttaatccgtgttgtcatatgcgggtcagcaaacactcattgatcatctgtggcgtgctggccctctgctcatgcttcaagggatcaattgttcatgagtaggacaaggcctgtcccttaagctatgggggaacagtattcatctgactataacaacagtatcaacatgcgggaggttgcgctgcagcatagatatgtccccaggactgaggacagagaggggcattctagcataggtttatggagatggcatttgactaaggttttacaaattaaaacagagaagagggtaagagttttccaggccaagcatggcaggtcgaagtacactaattaggggaccccctgagcagagctcagaagagtggtactaagtgacctccaaaggaagattacagcagtaaaggaccttgagggccatccctgggcgtctgttctgatgatataggcacactaaaggatggccaggttcccaaaatgcatttccggaaaggaatactagtagcatttcctagtagaagacattagggtcaacatttggacaggcagttcaaccaggaagctcatggagaggcagctggcaagccgaccaggagtaacccctatccctggcattgcgactttgggcgtatcattaacttgtggggtccttacctaaaatacaggataaatgctcatatttcccctggcagggttgtggtgagggttgagagataatagctatccagtctggcctcacttaataagaaggcgctaacttaactacggggatggctgccgcggccccgtccgcgccgggcaccggctaccgcgccggaagcaccgaagggtacacctgtctgtgtcccgccagcggccgcgggaagagctgctggaagactagacggtggaccgcctagctcccgggactccgcggctgggggctgaggcgcgcgcagggatcggcgccctttcctctgattgggcgggacgaggcccaggggtgggccaacagacaaagcgggaggcaggaattggttaagccagaagagagggcggggccttggcccgcgcgggaggcgggagtggagtccccccgcaggctttctcttttagccccgcctgcttcccggctccagctggggccggagaggctgagtggttggtacgctgctcgctggcctcccagtcttcccagcaaccggtgacactgcccgcgccagactgaccactagccgacgcgggcgagagggacaggagcgtgacctccccatcccgaggggccggacgctcgggcgcctccccgctccccccactcggaggccgcgcgcgccgttagccccttcctcgctcccccgccccagtcccgc

SEQ ID NO: 4390 - DNA, 2300 bp, Homo sapien
tccaaggactgaggtgggccagcctcctttcaaatgttccaggatttggaaaggccatttggacaagcactattcaataaaaataaactataagccacatttataatcttaaattttctttaaaaatgggtaaaatatattgtgatatatttcatttaacctaatatatccaaaaatatttcaacatataatcaatgctaaacattattaatgaggtattttgcattcttttttaatactaagtctttgaaacgaggagagtatttggctcttacaaatcaactcagtttgaaccagccatgtttcaagtgctcagtcaccacatgtggctctgggccactgtagtagacagcatagcagggaacagttcccctcagccctattccctgctgcccaaaccaggtttaccaactctgacttcaagatgaccgcttgtttcttgtgaatcatgactttttgaggtcttttgtcccaccccagaaatgctggcgtggcagaacagataaccagggaagaaaaatctttattctgattgaaaataaggattttcaattattttcttttcaattattattaaggaaaaaaatgacatatgaaactcagaagtttatcttgcccctattatagatattggtttttccattagcttatcttccttcttagtacctgttttgtttcgggtttttttagttatatgtatagtatttgttttaaatgcttgaaaggtacttatatactttattcaacaatgagaattttcaccaattcacacgtaatttcccccttccctctttccaaactttcctgtactttttttccaaagtgaaagaaatttggtggtatagcaactgtaaaactcacactcaatcaggagagtggggattaggatgatctagaagtcagtctttttttttggcacagtaataatttttctttcaggtttccacttcaagcgtgacccttttgcctgtgggatgagctccagcatggggtgaggtacagaagagagacttgaagagcgtgccttgggactcaagcgccaaacctgtaccctagcgagtgtcctactccgcatccgtaatggaaggaaatggtattgttgtttatatgccgtttaagtctacacgttggtatttgtgcatttgccttccttgggcatgtgccctgggaggcagtggcctgggagagggtgggctcctagacacatggtttgagaggtgccatggtctccagatacccgaggaggaggcagagcactcagtggggcctgagcattgctttctttggcatttgggatcagccactgagtctccaggaagtttttattttcaggagggcaagcattcctctgacctgacatctaactagaatcagcagccagtgtctgggtcgaaagtccctctggaggaaccaaggagctctctaaagtctactccagcctgggcgtgatggctcacgcctgtaatcccagcactctgggaggccaaagcgggtggatcacctgaggtcagaagttcaaaaccagcctggccaagatggtgaaaccccgtctctactaaaaatacaaaaattagccagacacagtgtcacgtgcctataatcccagtactcaggaggctgaggcaaggagaatcctcgaatccgagaggcagaggttgcagtgagccgagatggagtgactgctctctagcctgggcgacagggcgagactgtcagaaagtctactccagagctcctgcttgcattttttgtttaaaaatcatactaatcatactctttgtataagatgtctgggatttaaaatactctagagctttgccccaccaaaaaaaaaagtggagtgggggtgtggatgaaacaagaatggtaaaatggtgactgatctatgatactgttcaggttttcgtattttaaaatgtccattaaataaataccctcctccagaaaacatttccctccctttcttcccctgctcagttgtaattcacattttcccttttactttatctctactgggcacagcacatcttactccagaggcacaagaggaggacatcccatgcggctactcctgcccagcgtggtggggcagcagaagctccagagcccagacttgcaggtttgctattttcactttaccccatttgtatccaaaacataaggaccctgtatatgggggtattttaaccaaagttctgagtatttatgatgaactttcatctgctaagaagaaagtgacagctgaccattttgtttgtgtcctctcccgcatctgttgagcgacaaggggctatactgta

SEQ ID NO: 4391 - DNA, 2300 bp, Homo sapien
tgtgagagtacaagttaaagtaggaggcagatccattaggaagatgtagccacagaccaggtgagagatgatagtggtatggtaggcttaaaaatagtcccagaaaagatatctgtgtcctaatccccaaaacttgtggagattactttattttattttagatggagtcttgctctgtcactcgggctggtgtgcagtggtgcaatttcggttcactgcaacctcctcctcctgggttcaagcaattcttctgcctcagcctcccgagtagctgggattataggcccatgccaccatgcccagctaattttttttgtatttttagtagagacagggtttcaccatgttgggcaggcacatctcaaactcctgacctcaagtgatccacccgccttggcctcccaaagtgctgggattacaggcgtgagccaccgtgtgcagccgattactttatatggcaaatactttacagaagaaattgtcttaggatactgagatggagagattatttggattataaggatggactctaaatgcattcacaagcatccttgtaagagagaagcagagggagatttgacacagaaggaggcaatgtgacctcagagacagagattggagtgacgtggccacaagtcagagaatgctggccaccattagaagctagaagaagcaaggaaaggattctcccctagagcccttacaatggcctgtggccctgctgatgccttggcctccagaactgtgagaaaataaatttgagtaaagggagcaagtttgtggctgaaaacaacacacaacacaatttgttacaacaattacagaaaattaataccagtggcttggagtagggttttagcagttgagagggtcagaagtgattggatttaagataaatttttggagacaggaccaacaagatttgctgatgtatatggtttaggtatcataaaaggcaaagaatcaaggctgattcccttttttctgaacaagtgggtggatgatgacatagtttactggcatgggggagggtacaggcgttattgttatatgtttgccatatttatgttggagaaaatatcagctatcatgtgtcagcgctctctacatgccaggcactgtcctacattctttacacgtgttagctcagttaacacatgtaagtcaagcgggcagtaagatatatgactggagttgaaagagggctaggctaggagccatcagtgtatttaaagccatggaactaattagatcacccaggagaacatatgcagacgagagaagatctggttcaaggcctgagccagggcacacttcatcttttggcagaacagagggaatggatccaaaaaaaggatagaaggagccagtgaggagggtggaaaacctggagcatatgaagtcacagaagtaaaactggggcccaaaatgtagagggagccataaagatgaggaggacgagagctacatagtcgcgctctttctagggcagagaggcggacggaactgacagctgctatgtagcaatatgaccgtctcaagtgaccttgtgaagcgccactgcagtggctgggtggggaggaaagctccatcagagccatttgaagagaagaggatgggaagtgagcgtacacagagaatgcaggcaacttttaggaggaattctgatggtaatagaagtgggctgtagctggtgggactctgcggtccacagagggctctagctggaccctctgtgggtctttcaaagtgactgattctgcatcatgtttgcgggtggcaactgtgagggggaaatcgaaggtgaatacaaaacgggaacaagtgaagaggcaacgtccccatacaggccgggtgggctggggttggagcacaggaggcctgaccctgtctcttccactttccctcaaacctttggtcaccaagcgcagacgctcaccacagaagccacccaaccacaactgccgcggggctccgcgacacgcgcgggcgacttgagtcgggcaaccacgattcccggcgggcgttgcgcggggcacccagtgcgcaggcgcacggcgtcggcctccgactcgcccctccctctggggcgcgggcctcagttccgggctacagcagccgacgccgagaggcaccgtttcttcttaaaagagaaacgctgcgcgcgcgaggtgggcccctgtcttccagcagctccgggcctgctcgctaggcccgggaggcgcaggcgcaggcgcagtgggggtgagggcgcgtgggggcgcacaggtaaggccggggtgggggtgggtcgcgacggg

SEQ ID NO: 4392 - DNA, 2300 bp, Homo sapien
ccctaaagcaagatagtatctataaacaaactaggctgcaaggcttttatgaaatttactcataatacacataatttaaatattttccccaattttttccttaaagcttatttagcctatttctcaattaaagaacttcaaaatatgtattttcctcaaaggattctagcttaacgggctaaatttttttttttttcccaattcctatcatgcagttcttctgccattctaccccaaatttgacattgttttcaaagatttgactttgtttttaaacgtagctttattcaaagcaatgcactgaaaatgtctagatggactctttgcagctccataaacacttacacttggtcccgatctttttattaactttaaattacatatgcaagtatccaaattgcagtgagaattctctctggatcataaaggtatggaagaaacagccagcaagcaccttattactccttgttgaactcaccccctctttgacctcatttctttgactttcttttgtctccagccattctcaaatgtgctaggcttgcttcgcctcagagcatttgcacatgccattctctctgcttcaaatattttcccccttgaattctgcatggggaatttgctcttcatattctttggcttttccctcaaatacaaccttctcacttaccaaccttccctgaccaaattatttaaaactgaattcacaacagtcttattggtcccctttgcttcctttattttcttcctagcactttccactttgacatgccatatattttgtttactgtctggttctcccactgaaatgacaagagggtttttctcttgtgccttttctttttcactgttctaacatcactgctcagaggagtgattgtcacagagaagacactcatttaacacttgaatgaatgaatgagacacaggatctggggaacaaagcaagttagaaacaccaccctaccttacctagagtagcactcccattttcccatggcttattgcctgttttctcaatttgctcatatgtggaatgaatgacaaactaatacgtgcccttcacttcagaatctcacaaatgagcatgatttttttcttctgatccaggggttttggaacacactttacagtgaccaaaaaacctttgtgaagtgtcagtgtggagaagcaaatacaaactcttcactaagtggccctctttttgaatgttaacacggtttggtcccagggatttctgtgttcaaagcctttcagggcaaggcagttttctgcggagtacactgtcctatatacctaatgggctactgggtttcagctggacaaagtccttatagagccgtgattctcaagaagtagggggagatacttttatttgtcataactagagtggagagagtgtggtgtgctactggcatttagttgctagggatgctcaatatcctacaattaaggttctatttttaccaagtaaaaatataggtaggcaaggtagccagatgaaatacagggacttccagttaaatgtgaatcttagatgaacaacactgttacctgaaactcaaatttaactgtattttatccgtgaccctgcctcctataatgcacaggacagcctccttccctctcaacaaagaattatccaggcccaaaatgtcaagagtggaggttgagaaaccctgccatacagcagtggttctcaagccctagtttgtaccacaattaccttcagggttggtaaggccgattattgggcacaccctcagagtttcttactcagaaggcctgtagtggggtcccaagatttgcatttccatcgatttcccaggtgaagctgctgttagattgggggcacatttgagaaccactaccctagaaagtccccatgctctcctgattaggaaggagcgaggaaggtttccaaagtaggacaggggtgggagggtaagggagagtggcgggaagagctggcccgctggggtgggttatttcggccgttctggcctcgcaggcgttttcgggatccctctaggcgccgcggaggtcctggagtctcgatggtcgctcgggccggggcgtggcctggcccgggggcgtggcatggaaggccggccgaggtgcagcgagccctctggtgccggacgttgcgcggccgcgacgcccgacgccaacgcaggcgcagcgctccgattcggcgcggctcatggtccggttcgggctcgcgagtctccgtctggggtagggcaggtaggcctcagtgtgctcgcgctgcaggcagggcttcgcttgagtacaggagt

SEQ ID NO: 4393 - DNA, 340 bp, Homo sapien
cccttcgatccggctcgccccggcccggcgcgccgctggaccgcgccccctccgcagccccggccacccccgcctactgggacggcgagaaggaggtgctggcggtggcgcgcggcgcccgcgttctgacctgcgtgaaccgcgggcacgtgtggaccgaccggcacgtggaggaggctcaacaggtggtgcactgggaccggcagccgccggggtcccgcacgaccgcgcggaccgcctgctggacctctacgcgtcgggcgagcgccggcctacgggcccctttttctgcgcgaccgcgatggctgtgggcgcggatgcctttgagcgcggtgacttc

SEQ ID NO: 4394 - DNA, 2300 bp, Homo sapien
ccctctcctctccacagcctgctgggcaactccaggaatcggggggtggcaaggggctcagccacaggcagggaacaaggccacggccagcgactgagcagagcctgcctgccggtcaacgctggccatagagcctggcagtggcctcaggcagagtctgacgcgcacaaactttcaggcccaggaagcgaggacaccactggggccccagggtgtggcaagtgaggatggcaagggttttgctaaacaaatcctctgcccgctccccgccccgggctcactccatgtgaggccccagtcggggcagccacctgccgtgcctgttggaagttgcctctgccatgctgggccctgctgtcctgggcctcagcctctgggctctcctgcaccctgggacgggggccccattgtgcctgtcacagcaacttaggatgaagggggactacgtgctgggggggctgttccccctgggcgaggccgaggaggctggcctccgcagccggacacggcccagcagccctgtgtgcaccaggtacagaggtgggacggcctgggtcggggtcagggtgaccaggtctggggtgctcctgagctggggccgaggtggccatctgcggttctgtgtggccccaggttctcctcaaacggcctgctctgggcactggccatgaaaatggccgtggaggagatcaacaacaagtcggatctgctgcccgggctgcgcctgggctacgacctctttgatacgtgctcggagcctgtggtggccatgaagcccagcctcatgttcctggccaaggcaggcagccgcgacatcgccgcctactgcaactacacgcagtaccagccccgtgtgctggctgtcatcgggccccactcgtcagagctcgccatggtcaccggcaagttcttcagcttcttcctcatgccccaggtggcgccccccaccatcacccacccccacccagccctgcccgtgggagcccctgtgtcaggagatgcctcttggcccttgcaggtcagctacggtgctagcatggagctgctgagcgcccgggagaccttcccctccttcttccgcaccgtgcccagcgaccgtgtgcagctgacggccgccgcggagctgctgcaggagttcggctggaactgggtggccgccctgggcagcgacgacgagtacggccggcagggcctgagcatcttctcggccctggctcggcacgcggcatctgcatcgcgcacgagggcctggtgccgctgccccgtgccgatgactcgcggctggggaaggtgcaggacgtcctgcaccaggtgaaccagagcagcgtgcaggtggtgctgctgttcgcctccgtgcacgccgcccacgccctcttcaactacagcatcagcagcaggctctcgcccaaggtgtgggtggccagcgaggcctggctgacctctgacctggtcatggggctgcccggcatggcccagatgggcacggtgcttggcttcctccagaggggtgcccagctgcacgagttcccccagtacgtgaagacgcacctggccctggccaccgacccggccttctgctctgccctgggcgagagggagcagggtctggaggaggacgtggtgggccagcgctgcccgcagtgtgactgcatcacgctgcagaacgtgagcgcagggctaaatcaccaccagacgttctctgtctacgcagctgtgtatagcgtgcccaggccctgcacaacactcttcagtgcaacgcctcaggctgccccgcgcaggaccccgtgaagccctggcaggtgagcccgggagatgggggtgtgctgtcctctgcatgtgcccaggccaccaggcacggccaccacgcctgagctggaggtggctggcggctcagccccgtcccccgcccgcagctcctggagaacatgtacaacctgaccttccacgtgggcgggctgccgctgcggttcgacagcagcggaaacgtggacatggagtacgacctgaagctgtgggtgtggcagggctcagtgcccaggctccacgacgtgggcaggttcaacggcagcctcaggacagagcgcctgaagatccgctggcacacgtctgacaaccaggtgaggtgagggtgggtgtgccaggcgtgcccgtggtagcccccgcggcagggcgcagcctgggggtgggggccgttccagtctcccgtggcatgcccagccgagcagagccagaccccaggcctgtgcgcagaagcccgtgtcccggtgctcgcggcagtgccaggagggccaggtgcgccg

SEQ ID NO: 4395 - DNA, 574 bp, Homo sapien
agttctccaaggtgatgagcaccccggagtacagcctgtccccgatcagcaccccctgcgaccctgagggtgcgcccccagatcccggggcccggccgctgccgcgggagctgccgaccctgcagcaccagccgccgccgccgccgccgccattttgtgccgccgactccccttcggcttcttccctcagggcggctcctcgcgaagtccacggccgccaccgccccgccccgtcgcgtgccattggttcggcccgcgaccaggcgacgccgcctagccgcaattggctacataacctgcccgtcagcaacgcgcctaacgccgacgccggaacctggcgcgggtggggcgggctcgttacccaggggactccgcggtgccggccgacccggaagcatgtctgtccctagcggagcgcgggtgccgtgctgagagcgcctgcctgtgcgccccgagcggcgtgggactcttccaagatgcccacgttcgcacagagaccccggatcgcggaactcgcgtctcgaaaggcctgtgggtcaaggggggccatctcggtgggatctggggcgggacg

SEQ ID NO: 4396 - DNA, 2300 bp, Homo sapien
gttttttttttttttttggcaatagagtcttgctcgcccagggtggagtgcagtggtgtgatctcggctcactgcaacctccaccttcagggtgtcaggcctctgggcccaagctaagccatcatatctcctgtgacctgcacttatacatccagatggcctgaagcaactgaagatccacaaaataagtgaaaagagccttaactgatgacattccaccattgtgatttgtttctgccccaccctagctgatcaatgtactttgcaatctcccccacccttaagaaggttctttgtcattctccccacccttgagaatgtactttgtgagatccatcccctgcccgcaaaacattgcccctaactccaccgcctatcccaaaacctgtaagaactagtgataatcccaccaccctttgctgactctctttttgaactcagcccgcctgcacccaggtgaaataaacagccttgttgctcacacaaagcctgtttggttgtctcttcacacagatgcacatgacacagggttcaagcaattttcatgcctaaacgtctggagtagctgggattacaggcgcatgccaccatgcccaggttaatttttgtatttttggcagagacgggggtttcaccatgttggccaggctggtctcaaactcctgttttcaggtgatctgcccacctcggcctcccaaagtgctgggattatgggtgtgagccattgtgcctggctggcattttctggcttttttttttttttttttttttgagacagagtctcactgtcgcccagactggagtgcagtgatgagatctctgcagctgtgttatatgtaaattttctgtgccaccaaagaagtagaactcgaatataaagttttctcagctagataatttacttctatagaagggggggtctcatagatggagcaatggcaagcgcttggacaagggaggggaaggggttcttattcctgacgcgggtagcccctactgctgtgtggttcccctattggctagggttagaccgcagtctaaagtaatgcccattggctttaaagagagcaggagtatgggccagagtggcggggtgagtggtttggcaggaaaaacagttatgggacgggtaactaaaggtgactcaggtcaaagcagatgaccaggggaacagatgtgaactgtcagtcctctgagcccaagcctgcacgtatacgtccagatggcctgaagcaagtgaagaatcacaaaataagtgaaaatggctggttcctgccttaggtgatggcattccaccattgtgatttgttcttgccccaccttaacttcctggctcagaagctcccccaactgagcaccttgtgacccccgcccctgcctgcaagagaaaaacgccctttgtcattttccattacccacccaaatcctagaaaacggccccaccccatctcccttcgtcgactcttcggactcagcccgcctgcacccaggtgaaataaacagccttactgctcacacaaaacctgtttggtggactctttacatggacgcacatgacatgaactactgattagaactggtggaaaaagttgtttattgcaactgcgaggaagttagactttaaaatgcagaacaaagactgaacatactgacataccggttctttgaagggaaatttagaattcattgtatataacattattcaggcttaaaatagtttccaatccagtgggacgagtcactccatataattctgtgaagtcaaccattcctatcaaggagagagtcggggccgccgcgagcgcgtgaaccgtgggctccggggtggtgccgacgcggctgcgggccgggactgacgttgcgccgggttcgagtactcccctccggagttttgtcccggtgcggctccggtacccagacgcttcaccacgccccccgccctccgcccgctcaccccggttcccgccgccccggagcacgctcctcaattgcggcgccgtcgctatggcgtcactgccctcgcggccaatccaagggctgcgcgcgtgtcccttacgcatttccgtcgccgggaggaaggggtgtgtgtttcgcctgcgcagtggtcctggccaccggctgcggcgcgtggagctgctcccagccgcgctcgagtcagactcgggtgggggtcccggcggcggtagcggcggcggcggtgcgagcatgtcgtggctcttcggcgttaacaagggccccaagggtgaaggcgcggggccgccgccgcctttgccgcccgcgcagcccgggccgagggcggg

SEQ ID NO: 4397 - DNA, 2300 bp, Homo sapien
cctttggggttcaagcgattctcctgcctcagcctcccgagtagctgggatcacaggcgcccgccagcacacctggctaatttttgtgtttttttactagagacggggtttcaccatgttgtttaggctggtcttgaattctggcctcaggtgattcgcccacctcggcctcccaaagcgctgggatgacaggcgtgagccgctgctcatggccttcctcggtaattttaacgatcaggttaggatgggaatcaagggctggacttcagggcacctcggaggacagcggatgttggtgactgactttcttgctgcaggcttatttggagggttcctttgtgtcctagttcctgggggttttcacccgctaacttcacttagagattgaaacttctcccacttccagaagctgaatcgtagtgatcagcctgcggccccctgcagtggtacaggcctggttgagcagcctcaggccgcctccccatagtgcagacctgtgcctctgagttgctccagtcctggcggccccggagctcctgacccgcagtccgctctgccggcgttgccagtgccttggtctgccctctctgtggtggagcggggcccggggcagggtctccaggtgcaccgtggggagccctccatcaggcttttgtttcctgtggattgtgttccaggtgtgggctctttcattttgatcccttctctccttcctggcctcactgctggcgggtgagagaggtttctccggagttgactgccccctttccccgggtgccccctgccctgcccctctgcctggtagcccctctgcaagcccggcccctcccgacgctcctggcttcctccgtgcccctttcctggcagcggggtcgccgagattcgcccgttgctttgtccttgctgctctccaggcaaacgggcggctcctcctcaccgactgcctcctctgtcccttgaggctatagccccatgccgcctcgttcccagagtctgccctgacccctcctccggcctgtccttggaagtcacagcagtacattatcccagaactgtctgtgagcaccagcgctcgccctgcactccacagagggggtgcctggaggagagcctcgtgccctgtgggtgtgaattcacgcgctgggacgcacgtccctggcacagggtcacaccaaagtggtgaatgattgttctcattctaataaccgagaggccacacgggcacctgacctgctctttcccctctcctcctccccagagtcactgggggtgggaactgtcaatgagccattttcaggggagggagtggcctcagcttaatccagccaaaggtcccctcgggaggaaacaggcagagctcctcaccgtgacacccacgttcctgtcactgctctgtggcaggaccctgggggactgacacaccctcagtcccctcggggtcagagtgagagtggttgagagcccggggtcgcttcagcccttggcttcccgagcttagcagccaaacccgttgacctggcactgtcttccctgagaggcaggtcccggtctcatctgtgctctgttcactggggcccccgaggttagctaccaaggcgcttcctgaaatgtgacgctgatgcccgtcagcccagttcgtgcctaaccacaggcccaagcagacccaccccaacaccaaagcgtcgctgcctctgtctaaatgcaacgagtgctccccacggcacttccccctgcgtcagtcacctccaaaaattacacctgagctgagaacagacgctgggctctagttagtgacgtgtttgctgcagttgactctgaaggcttaaaaaagtgagacgggctgcgggaggaagagagacgggaacaacgcaccaacccaggagcatcgggggtccctgcctactttacacgtctttctgtgttagaataatttttttttttttgagacggactcttgctgtctcccccgctggagtgcattgcttcgatctctgctcactgcaagctctgcctcccaggttcacgccattctcctgcctcagcctcctgagtagctaggactacaagtgcccgccgccacgcccggctaattttttgtatttttagtagagacggggtttcactgtgttaaccaggatggtcttgatctcctgacctcatgatccacccgcctcagcctcccaaagtgctgggattacaggcgtgagccaccacgccctgctagaataatttttttttagagacggagttgcgctctgttgccccggctggagtgcggtggtgcgatctcggctcgctgc

SEQ ID NO: 4398 - DNA, 718 bp, Homo sapien
ttcttaccgcaggggtctgatcgggacagttatacttcgggtcttataacttgaaaacttcttcttcttaagacaagttcgttcagccgtccatgtcgacggcttgaaaacgaaacagaaccaaactccgcttattgctgcgagtttatccaggcgtcggtatcccttcgcctgcgcaggtgagagccggccgccgatccggcccaggtatacgctggagcgccacgcctttgttggcggcgagtcggccctgcacagcccccgcctagaccccgaccccagcccctgccccgaccccagcctcggcgccattccctagccagccctatcccctgacccgggcctccccgcccgccagtgcgctggatcccgagacggcgggacgcgaagagcctttgtggacgtgggaagcgtttcagtgtttggttctgcgtggggagtcccacgttactcgatgactttcggccgcgaaggctttgaatggtgcgtttgaaaatacggaaactttcttctactctaggtggccatggctaccgggcaggtgttgttccagcggttcttttataccaagtccttcgtgaagcactccatggaggtaaggcttcctcctgcacttcattcccagcgaagtatgttgagggtaaaacggtttgttactttgcccggttactaagggagtgagtacttgccccccagtctgagctctgtgccggagggt

SEQ ID NO: 4399 - DNA, 2300 bp, Homo sapien
ataggttgaccatacctcaaaggctgtatggcaactgcatggaatcttgagcaagtttatggaaaattattgagcccactcttttcatgatcactgttcgctgtgtgtcccgagggcactaactcagagtgtcctttgaccccttcatcagtgtgtcacccggccaattcgctgagctcactttctcctctctctctctctccctctccctgtctttctctttcattcttttccacctgaccctggtctatcccaacctaaaggcaataattcattacctcattaatggatctgtcctttttctttttaaacagttccttatgttagccatgaaatctagctggggctgtgtggtttctgattccccctggcttattctttactttttcctacttttccaggctcagcagggagctgctggatgagaaagagcctgaagtcttgcaggactcactgggtagatggtattcgactccttcaggttatcttgaactgcctgacttaggccagccctacagcagtgctgtttactcattggaggaacagtaccttggcttggctcttgacttggacagtgagtaccttactatgaaggtgataagcctccacctggtcttccagatagaggtgatattcctgttccaagtggcccttactgacctgagagatgtcattgccacaggcaggacctatgggcgcatataggttgtaatgaaactgtagtctcagctggaagcctagacatgaaatgggtcagtgagcaaggctccattcctagtctccagccatgcctgtggcaacctgagcctgctctcagcacattggacccaggcagatgtaaaaaattcacagaagtatgatttggactcaagggtttgtagatttcctccttcattctaatttcagtgtctaaaattcttgcatccatgaacgagctgggcatttgatgagacagggctgaatactgcagttttcctcctagaaatcatctggggcattttctttgaactgatgggaacaataaggcataactgtttgcacaaacttgggataaatgattttgggataacgatctaccagaatggggatatttcacccttggttctgagatgcaaaccaaagaatatcatgaccagctttcaggcttcctgaagtatatctgtcacattgtcctgtgctcatgctgaggagcctgagatccctgtgtggggattagacagtggactgttatgggtgtaggtgaattggcttattttgtctgtccctgtctgaatgtattgcaggaattaaaaaggaccaagaagaggaagaagaccaaggcccaccatgccccaggtaactgagcaattgtgaacagctacttctgtgttgacatctggagactcctggttcagggaaaacagagcgggctgacattatcgattacatcttttcaagcaagcctgaattattcctactaacattgctgttggttttcattgcagtagatatttaggtttccatttcttcctccccttatcatttactaacctactgtaggtggaccagacttcaaaaactctattctcatggcgactgcatggaaatttgagcacattttatggaaaattattgagctcagtcttttcatgatccctgtatgctgtgtgtcctgagggcactaactcagagtgtcctgttactccctcatcagtgtgtcatctggacaattcactgagctcgttctctgtgtgtgtgtgtttgtgtgtgtgtgtgtgtgtgtgtgtgtgtgtgtctatctgtctttctctttcattcttttccatttggccccgttgtgtcccaacatgaaggcaataatttgttacctcattaatggatctatccttttagttttttaaccacttccctatgctacccatgaaacctagttggggctctgttgtgtctgatttcccctggcttattctttactttttcctccttttccaggctcagcagggagctgctggaggtagtagagcctgaagtcttgcaggactcactggatagatgttattcaactccttccagttgtcttgaacagcctgactcctgccagccctatggaagttccttttatgcattggaggaaaaacatgttggcttttctcttgacgtgggaggtgagtacctttctatgaaggtgataaggatccactgagtcttccatataaagatcatattcctgctccaagtggccattactgagctgagagatgtcattgccacagggaggacctataggcacatgtaggttgaatgaaactctagttctacct

SEQ ID NO: 4400 - DNA, 2300 bp, Homo sapien
ctgttggttttcattgcagtagatatttaggtttccatttcttcctccccttatcatttactaacctactgtaggtggaccagacttcaaaaactctattctcatggcgactgcatggaaatttgagcacattttatggaaaattattgagctcagtcttttcatgatccctgtatgctgtgtgtcctgagggcactaactcagagtgtcctgttactccctcatcagtgtgtcatctggacaattcactgagctcgttctctgtgtgtgtgtgtttgtgtgtgtgtgtgtgtgtgtgtgtgtgtgtgtctatctgtctttctctttcattcttttccatttggccccgttgtgtcccaacatgaaggcaataatttgttacctcattaatggatctatccttttagttttttaaccacttccctatgctacccatgaaacctagttggggctctgttgtgtctgatttcccctggcttattctttactttttcctccttttccaggctcagcagggagctgctggaggtagtagagcctgaagtcttgcaggactcactggatagatgttattcaactccttccagttgtcttgaacagcctgactcctgccagccctatggaagttccttttatgcattggaggaaaaacatgttggcttttctcttgacgtgggaggtgagtacctttctatgaaggtgataaggatccactgagtcttccatataaagatcatattcctgctccaagtggccattactgagctgagagatgtcattgccacagggaggacctataggcacatgtaggttgaatgaaactctagttctacctggaagcccagatgagggatgggtcagtgggcaagactctcttcctagtctcaggccatacctgtggcgccctgatcctatcctcatgacattggacctgggcagatgtgacaaattcagagaactatgattttgactcaagggtttgtagatttcctttttcactctaatttcagtgtctaaagtcctcacaaccatgaacaatctgagtatttgatgagacagggctaaatattgcagtttttctcctagaaatcatttgagggtatttgctttaaattgattggaaaaatatggcataactgtttgcacaaatttgggaccaatgatattgggataacgatctactagaatagggacattttacccacagtttctgggagaaaaactgaggaatttctatcataaccagccttcaggcctcctgaaatatatctctcacagtgtcctattcttatgctgaggagcctgaggtccctgtgtgaggattagacagtggattgttatatgtgtaggggaatcagcttaatgtgtctgtccatgtctgaatttattgcagaaattgaaaagaaggggaaggggaagaaaagaaggggaagaagatcaaagaagaaaagaagaaggggaagaaaagaaggggaagaaaatcaaaacccaccatgccccaggtgactttcagcaattctggatccttagttctgtgttaacacctggaggcaacagattcagggaaaccagagtgtgtttgatgtcacgttttcaacgaaggctgaattactcctactgtcattgctgttggttttcattgcagtagatgtttaggtttccatttcttcctccccttatcatttcctaacgtaccataggttgaccatacttcaaaagctgtactttcatggccactgcatcgaattttgagcatattttatggaaaactattgagctcactcttttcatgatcacagtttgctgtgtgtcatgagggcacgaactcagagtgtccttttactccttcatcagtgtgtcacccggccaattcactaggtcactttctctctgtctctgtctctgtctctccctgtctttctctttcattcttttctacctggccctggtctatcccaacctaaaggcaataattcattacctcattaatggatctgtcctttttctttttaaacagttccttatgttagccatgaaatctagctggggctgtgtggtttctgattccccctggcttattctttactttttcctacttttccaggctcagcagggagctgctggatgagaaagagcctgaagtcttgcaggactcactggatagatgttattcgactccttcaggttatcttgaactgcctgacttaggccagccctacagcagtgctgtttactcattggaggaacagtaccttggcttggctcttgacgtggacagtgagtaccttactatgaaggtg

SEQ ID NO: 4401 - DNA, 2300 bp, Homo sapien
ccaaataaaataattcctttcccatataagtatgtgtatatatgtattcattgtattttgaagataaatttttacacagtcatgttaatcgctttcatttaaggatttgagtttgaggtcttgcatacaatgtgatcccactgtatgactacacaaatgttggcaaaagtgagttcagaggaagtggtaggcaagtacttcccagttttggccagaagatggagaaaaaaataattctcaaaaaatgttaaaagtatgacatgttatatcttcttttcacagtaatttagacagaaattagcaaaatcaaacatgtataaatactttggtctgacaattccatctccaggtgtctacggagaaataaacaagtgatgcacgacagatacatgtgtcagtctggtccctgcagttgtatttgtaataatacacattggagcaatttcatggccatcagttagagaatgtttgaggaatgatccattcatatcaagaaggacatttcaaagatcaaagcctgatggaaatgctggagaccatggagctgataggagctcatgcgtgttgaccaattactacgtgacaggcattggctccacgcttttcctgcactgctcatttaaacactggacaacctaagtgttctgatttagcccattggacagatagaaatggaggcacagaagattcatgtgtttaacttcaaaccctggcagattaggtttttcatccagagcctgtggcttcaccatagctgtgattcacgttctgtcattctccactttaggaatttccagtattccaaatatgagaagctgagaaaacaaacaacaaactcaaaaccctaaaaaccaggatacgtaagggtagatgtttgttgggtgtggattaaaaacggactttttttgccccaagcaacaaagaggcaccttagaaaatagacaagagacaagaagaagagaagctttaagagatatttggtccaaggaagagactcttcagatggaaggtcacgtcagctagaaacattaatatgactggatgggctcaaaccactgacttttcagtcaacatccgacagcactaacccagtgttccactagacactgcttgttaaacagtgaaagctgttgctcaattgtgtcatccgtaattgtcaaatattgccatttagtagcacaaggaagtattctctgttgccaagctagagtacccataactcttctgttttgttgaacattcttccccaccacaaaccctctttagaagactgggggctcctaaagcattgaggccaagagtcccgtccttgtgcatgtttgggcattgacccagggccaagtcagtgggagactcctccacgcctacgccaggtccccaggtgacaactgcagtctctggatctgaagtcatccactttcccattcctagctcacctcacccatcgtgaagcctggttagtattgccagagacccgagtgggcagatgcccacaccaaagacagaacctgctgcgtgcccaccttgctgatccctccctccttctagacaaaggcttcataagccagggaccttgggtttgctcacaaggcagcccctcacctagtaggcattagttcattatgtatatgtatatgtagtcctcaggttgtattccttaaatatatataatttaaggatatgtattatatatatataaatatatatgtaattccttaaatatataattttaatacaattttttttttgagatggagtctcactctgtcgcccaggctggagtgcagtggcaccatcttggctcactgcaagctccacctcccaggttcacgccattctcctgcctcagccttccaagtacctgggactacaggcgcccgccatcacgccaggctaatttttttttttgtatttttagtagaaatggggtttcaccatgatagccaggatggtctcgatcttctgacctcatgatccacccacctcggcctcccaaagtgctaggattacaggcgtggaccaccgcgcctggccaaaacaaagtttttaaaagattcctttaataaacatttacaataacatcaagaaatataaacgacatagcaaatatgtgaaagccagccagactctcaatggcatccagaaacataaactacatagaaaagacatgaaagccagccaggcttggcttcgaatcccagcactttggaaggctgtggcaggagggttgcttgatctcagaagcttgaaactagcctaggcaacatagtgagccctcatctctactgaaaatcagaaaa

SEQ ID NO: 4402 - DNA, 2300 bp, Homo sapien
aaacctgcacgttgtgcacatataccctagaacttaaagtattttttttttaaaaagattatttctttgaataagtgttctactctttgctccttctcaagtccctctttaaggccaatgaatctttgattttctcttttcaggccctcttctagatctcttaagcattctgtgttcctgctcattcttcttttcttttttctcctctgactgtattttcaaatagcttgtttgcatgctcactaattctttcttctgcttgatcaattctactgagacccactaatgtattttccagctccagcatttgatttttttctcttacttcagtaatcttgttaaatttctgatatatttctgaattgtttctctgtgttttcttgaagttcattgagctttctcaaaatagctattctgaattccctgagaggttacacgtctccatctctccagggttggtcactgagtgccttacttggtccatttgttgaggtcacattggcttcaatgttattgatactgttgatgtttgtcagtatctgggcattgaaggataaggtatttattccagcctttgcagtcaggtcttgtttgtacctgtccttcagaggactttccaggaattcaaagtgggctgacgagttccctaagccagtgatcactgcagccatttttgtactacagggcaccctaggcccaggtacactgcaattcttaccgattcctaggtccccagccctgtggacttgggggaagatcagggattgttctccgcattcccaggtaaagcccctagcttacttccctttctttcccccaagcaagaggaacctctcttcaggctgcactgcctggagtgtggggaggggtgatacaggcattcccatagctgctgcagctgctgccatcatactggctcacaccacaagtccaggggtgttccagacctatgcagcatcatggcttgcccaaagactgccgtcactacagcctgcctgccactgaaatttatttgaagcccaagaaatttccagtgataaagccggccagaactttgctgggttcttcctgctggggcagctggttcccttgtggcccagggtgggtctaaatgcttcttctgtgggcaccagcctggaatcaagtgctgtggggttctgcccagtgccgtgtatcactatggcaagactggtactaagtttcaatataaagtctcacactttcccccttgtccccaagccattagattctctctcagagaatttcctgtggttgggggagaggtgtcataggcaatgcaagactgtccttcctcccttcttcaatgcatcttttcttgttagcaagttaaaagcgggtgctatgatctctcacctggctagcccttgtgaaagtgttttcttacatagatagttgtttaatttgatgttccttcagagagaccattgctggagaattctattctaccatcttactccaccttctacctgtttttattttttaaatgtttctagtacataattgtgaagtgatagcttattttaatcttgggaatcaaaagcatgtagctaagaacttttcccaaggaatattttaaaatttttatatcaatgtttatggaatgacatactttttgattcaaggttcttaaatgtagttttagttttgattcaatgttatagaacactgttttttaaactgtgatctgaagcccacatgtaatggaatcacctggggtgcttatattaaaaaaatgcagattctagggctcacaccaactaaatctcctgggattggagaccaggaggtagctcctataatctccacagctgcttctcaggcacaccaagtttaagaaccattctttcatattttcagactggggattcttacaaaatgacaaagaaggaaaaccttaatcttttaaagttagagttcaagcattagactatatgcttcttaaacacagtttgtctttcccattttctctttccagttctttatactgtcaagggattggtgcagaaatgggaaacaaagcagtgaaagaaaaactatttatttctttatacacatcttgctttaacaatcaccaaaaaggctttcattttctgtcacccaccctgtccaccagttatgttggccttcaatatatggcgatagcaacatatataaatctatatcatatatttatacacacaaacacattctaccagcactgtgaagacacagactaggctttactaggcttggggcctctcccatgccacttaaaaatgagcacaggtttgctctatgca

SEQ ID NO: 4403 - DNA, 856 bp, Homo sapien
ggtgtagatcaccaggaggctgcagtgcctcaggacccagttctcagtgagttgcttcatataatgatcaatgaaatacgggctcagagtccgttgtagccactagttggggttctttgtgtcatgcttgtgtctcagactacataaatgcttctgaaagtatctgtagtgaaggacacagtggttttttttgttttgttttgtttttatttctaatctatcatagaaacatatatggtctgaattcagttaattacatgattccacttatcatgctcttggatgttgggacagtggtttgttctgtgtttctcaatgcttgctttcaatttttatacttgtcttgttggagatggtaacaaacagttcgcaggctgcaactgttccagggatcatacattaagcagcagtgccttaaaaggagggctagctatgtctttgcttgtcctcagcatattatgtggccagagcactaggtagctattctctctccatctacaccccacctacactccatccctaagcagaggtgggttatttccataattatctgcaggcatggtccccttggcttacttggcttttcctatgagccatagtcaggacaggttggcttcggtgaccttggttttacccgttgtcccccttctccccaccaggctcagcagggagctgcaggagaaggagaaagtgattgaagtcctgcaggccaagctggatgctcggtccctcacaccctccagcagccatgccttgtctgactcccaccgctctcccagcagcacctctttcctgtctgatgaactggaagcctgctctgacatggacatagtcagcgagtacacacactatgaag

SEQ ID NO: 4404 - DNA, 2300 bp, Homo sapien
gatgtgtcaggagcaccacaggcacgctcactcttccattggcaggagatgtgtagggtggaaaggaaaccaaaatcaagaccctttgttgctccagttcttttattacatgtcacagtcgaatgtgtctccatttaaattcagattttttgatgaatggccagaccagctgcaggccctttgggccagaagccttgatctcgccaactgttcattttcttgatgggcttccttatttcaggcatttgtgtgtagctggtctattgtggagttgtcagaggggtgtagagccccctctttgggacagtcagtcctccctgtgcagcatgtcctgaagctggcctgcctccatcctctttctaagtgtgtgaggtcttttgttaaacagggtaaagtgagggaggactcctaaagagagaaaaactcctccagcatttgctggaacatgtttgtgaactgagcaagatgtaattgggatggcataaaaaaaagacttacatttacttaatttcttgctgtctggtttgtgatatatggtgccccaaattgaggttagaaggagctttgatcatatgtcaaggaggtgtcatatttaattctactccctgtggcctctcttacaataccagtcatgcataaagcccgtggttttgctgcatctagttttactgaagcaaaggctctgcactttcatagtttacactgacatatttctagtttgcatctgaagtgtactctgaggatgctgacttccagatagccatttttgggttaagggaagttcaagtctcctgagtatagtagctacaccacctggagagcttcattttggtttggtgacaaaatttattttagcttagttttcttacattaggtgggcaaaataagaaaggccagaaaagtttaggacagttttctgagacactcagcaaaactatgaggcctagaattgagaactgggtattaccctgtagatgatgtcttttcaagctgggctagtggagtttctgagcagcagctgcattctccttgtacatcttcaggttttgtaggattacctttagccctctaagtgatcagatccgcctcactgtcactcatgggagcccttgatctggacaacgtggaccttgagtagctgagttcaaacaactgaggtggcaagagggatctcccccttggttctttttttttttttttttttttttttttttttgagacagagtcttgctctgttgcccagtctggggtgcagtggtgcgatcttggctcattgcagcctccgcctcctggattcaagtgtttctcctgcctcagcctcctaagtagctgggactacaggcacccacgaccatgcctggctaatttttttatttatagtagagatggggtttcgccatgtgggccaggctgttctcgaactcctgacctcaggttatccacacgcctcagtcttccaaagtgctgggattacagacatgagccaccgtgcccggcccttatatatattttttaattgaagaggtagagaagcaatctcaaggtcaggacaacttaccctgaggttctcacttgtcagggattgtgctggattctgacttaggttctgccatcaaacacagaatgccctgatccttagaggcagaggcagctctttagcctatagggtaaataaccgggaatggaattctcaccaattcttatcttctatgctaaaagttttactttaagatttaggcctgcttttttctttctctctgtctctctctctttttttttcccccagtaacagtttaaaattggtgccttagacgcaagcaaaaagatattagcacagctttagaaataagtgtgagtccgcatgtaattttttagtttctcctctcccttcgctttttgctttcttggtagtatgctaattgtattctttttctgcatcttttttccccattctttggcagatattattacttgtcttgaaagagtaggtgaagagctgtttttaggactctttgaaagggtacagtatggatgacagtcttggctaaatgtaatcagatccaggaagctggagtcagtgtgagctggaatcagttcaaattagcaaagcactggcgctcagtggcaggaatacaagtgaccacaaagtgttaaacacatctggaaagggattctgacatcatcctgagaatctttggggaatacatatagcctgtagacccattcctctttgaccctataaagattctttaaagagtaataccctgagtggttttctggccagcttgcctgctcattta

SEQ ID NO: 4405 - DNA, 2300 bp, Homo sapien
agtgcaatttttagagtcaaagtgattcaggtttaaatcttggttctgccagtagatagcctttcacttcaggcaagttacatgacttgtctgagcctcagtttccttatttggaaaatgggtaaaataaaatacatttcctaagatagtagtgagttgttgatgagatatataaattatttagaacagtatcttgcacttgtaagtgctcaataatggtacggtctacttctctgtgagcctttcttttgctgaattgggctgactattgaggctgcattgcatattcactcccaaagtgccagctattaaatgataggaaataagtaaggaatgaaacttaagttctagcttaagatcatttagtcgtaacaaaacatcttgggtcagtcacttaaaccctctggacatcagtttctttttctgtcagtgaacaagtaaactaattattggccactgtggttcggcctgtctttgaccagagtcccaggtcctgttttttcaatcagaattgtttgagtcaaatggactctaaatgggaccctcatctcatgggactttctgggaccctacctatcccttgatttttgcctccctataaaccacctgcttgcatgtgccctgaggaactcctgaggcttcagccccaaccctaccccagagtggttttatgaggggtgtgcctccttagtcagcctgccttgtagtgtcttcttaaaaaccatcattgtttcaggtttgtgggtgcccacattccttggaaagttcatgcctctcaatgtctgacttgaaagcaataatattcttagtctttttacatagctctttccaatttacattatgcttttatatgtagttgtccgtcagtatcctcaggggattggttcaaggactacccccacttccctcaggataccaaaatctgcagatgctcaagtccctgataaataatggtgtggtatttacgtataacctatgtacacacatccttctgtatactttaaatcatctctagattacttataatacctaatacagtgtaaatgctatgtaaatagttgttatactgcttttaaaatttgtattattttaaattgttgtattggtatttttattgtttttttttttttcttgaatattttccattcccatttggttgaatctgcagatatggaacctgcaggtatggggagggctgatgtacattaatctctggaaattctttacaaccctggtcagattcatggtcataaactgaagcctttggcctctagcctgttagcttgttgctgggattggagcagcgaaggtggtaaggtgcagggcatggttaccagggttgtgaatctgggtggtatttgggtgaatacacatgactgtatacagtcccagctattgttctttccttatttaaggcccctttcctttaccctctctataccttgagtttttacagtctcccagaaagcttgagattgacagttcatgcaaatattccagaagaaatagtctgaaacagggtggcactgtatgctgagcagtcacattttctttctcgagaacattaggggtcttgtcttttttttttttttaatgtcttaggagaacagtgtgtgtgcaccacagagctggaagcgaaattttgtaatttccatctggagcattttgatagaaaaagtgcaggcctttgcttggaacagtttaaccctttcaggacccttcaagagcaggagatgaaatttaaaactggagtcgtattgtgtatgtatatatacttgggaatgttgatggctggtatataaacaagctctttcccttgggaggtctgagcaatttttcattcatgccaacaaaggtcttctccaaagcttctttcctcacagctcccattccccaagggagctttaaatataatcagttaatcagttttaaatataatcagttaaatatagtcagtttgaaaagctgcagtaaaacatttagttggaatcctcaagcagatgctatcattttcctgcaagatgattgagggctcctgtcccttgctcaggggaaaaaacagcaacaaaaaaagctactctgcagcagtaaggtgaactcctggaagaaaatgaaactcttggaaactttcaagtaccatactctgcatcttgcaattgaaagaccctagaggaaggtggtaggcaaggagccaggggatgcagtgtactgtgcaaagaagcagtagttggaaacagtgttcatgaggggtccttagctttttcaatttcaggtgttcttggggaatgagaacagaaatt

SEQ ID NO: 4406 - DNA, 2300 bp, Homo sapien
acctccttgttgactcccacagatccaagccataagtgttcccatttagttaaaagctaccgttgcccgccactagcatgacttacttggtaggagggatgtctgtagagaaaaggtctatttcagtatcagccagcaaaacagccttcattcccctagagctgagcacttgtttacagaatttgcaacacaggatggacacgcacctgtccttgaaactacaaatgttggtggacatggcgtcgcaggaaggatgaggtgtgggattttgaaaaaggaaacaagagtaatgctcctactattttgattcccctaggctaaaattcaaattgcgggacctagagcttttctaagtcctaatattgggaaggaaattagtttttttttctgttttcccggtggcggagtagaagaagtatttattgagtaggaacaggggagcgtggtaaacttggctttccttttaacttttggagaagggagtggagtttgaattggagaggaggcaggtggagtttgaagggaacttctcaacggctttccctttctgctgtctaaaggagtcctctacacttcagctcccgccccttcatagcaattccctcagccttctccgatcgtctaatttaaagcttctcctcttttaagacatcccttccccagcattaagcccctcccccggagcgctccggttccctgctgtcggatctcgggctaagcgtccctacccacgcctcctcttcccaggattcagaaactcccttctctttttctgccaggcgatcccggattctcctccgtcccgccccttttctcccggaccttcctccgctctgcgggtccgcgggcccctctcctggcaacccccggccctcagcgtgctcgcgctgtttctctcgcgtcctcccttccctcagctgtccctcgtgccccccgcagtcccctcaggtttcttcccggagcggctgttcccgggcgcgcggtggtgttggtggggcagagctgaagtcgctttagaggctcagtcggcgctggggtctgtcaccgaacacgttggttttcgctccctcttccgcttttcctgcctctccaacccggtatcagtttgaattgccagcgccgcgcaccgattggaagaactagagttagccccagtccctcattggaaggctccggggcctcccctcacgagagcttagtggcttgaagaccgtaggcaccgccccagtaacggtgctgagatcaattcggctttctggtcggctgagcttggctccgcctccgatctcattggccggcttcgggaggtttcggcaaaccctgctttagccctagtgaaagtggcaaggcacgcccttcccgcttcttattggaagagggtctacagtctccaccggtctctactctttattggttaaaattccccgcaacacccctcctctctaccccggcccaattggccgtgcctcagctcaagagtttgtgtttggtcgtcggttccaccttaatcccgcccatcagttctacttaggggttcaacaacccggggtggagcttaatctgtgaccacgcctcggcagtgctagtcacacctccaagttttgccagctcctccccctcattccgggcctctcgggatcagctcttcctattggctatgggccccatcggtcgatagaaaacgggcggtgattggtaaaggggtgggctctacttcccggcggggtcctgcggagttggcggaggctcctccagggactggggcacagatctgcgtagaaacgggtggcggggaagagaggggaggagagctctgagtgggaagcggagccgggggcctgggacccgtcgcgtcagagccaggtaaaggctccttccctcttccttttcttcctcccggccgccgggctggagccctgactgaacaaacccgggctggggcgggaaggagagggcgcggatgctgctcgcggcatcgccttagcggtgccgcccggaatccctcagaccgcccctcctccaccctctccaaatctcccagtacagcccataatacttctcaggactgcgagtctctccgcccatcactgtacagcctgggactctgtcctggctcacggaccgcagcgcagccggcacccagccgcctctccctttcctccgcacacgggcagccgcggtccaccgtagggcagtcgtcgttggcatcgcgcgtaatcatcggccggcctcctccagtgtctcccagccctggcggacagcccgggtcccagcctaggacccaggaggatgggtgttcc

SEQ ID NO: 4407 - DNA, 2300 bp, Homo sapien
ctgaggttgaggacaaacctctcgtgtttaacttgggaggagatgtgtacgttccttttcttttttggactctgagtatgaggcaggctgttctgaggtccccgtggggtgagcctgtctgtcctccctcagagcccaccgttcctatcatcatctagcacctgtccggttccccacgtgagccttgggcaggacgctgcagtgttgatggtttgggttacgtggcgtttacctgggcgccgtccttgctgaaaaaggaaacgtccacactgaatgtttctggggcgcgtggtgtgtgtcaggcgcccaccctgtcccactctccccaagggacagtagtacggcacactggggccaccagccagctcaactcatcctcctgtgtcacgcacccccgagggcgcaggaggcctgaggagtggctactggagccgtgtgttaggcagaggcttctgaccatgtctgagctctttacccccaatctcgcagctggcggattcccatgcccggtgcagcctgttgccagccagcctttgagacccagagctccagggcttgtcagaggcagcatggggcgccagtggtcctgagtctcatttccctgcctgctctttaggcctttggcacccatggtcacttcactggctttccatttggcttctcacctgggaaatacaaaaatagcccctcctgaagataaaatcattcagaaacagagcaataattctgactcattaacttctacctactcaaaaaagtctgccatgatgatggaccgaagtgaggctttttaacccacaagtaacctttttatttttttgagacagtcttgctctgtctgtcacccaggctggagtacagtggcatgatcttggctcactgcagcctcgacttcctgggctcaaatgatcctcccacctcagcctcccatgtggctggaaccacaggcacgtgccaccatgcctggctatttttttgttgagctgggctctcgctttgttgcccaggctggtcttgaactcctcggctcaagcaatccttcctactcagcctcctgtagtgtcgagaatataggcgtgggctactacacctgcttcagccgcttctataaaaccgctgacctgtgtgtggaggacaggccaggtgtgtgctcactgcgctgcgaagatgttttgtcacgtgactttccccggatttccatttctttttttctgctttcctcaaaaactaatagaagactgggtgtggtggctcacgcctctaatcgcagcactttgggaggcagcagctggcggatcacaaggccaggagttcgagaccagcctggccaacatgatgaaaccctgtctctaccaaaaatacaaaaattagctgggtgcgatggtgggtgcctgtaatcccagatactcaggaggctgaggcaggagaattgtttgaaccccggagatggaggttgcagtgagccaagatcgtgccattgcactccagcctgggcaacagggcaagattccgtctcaaaaacaaacactattagaaaatgccctggaggtggcggggagttgttgatttgtgaggacagattgaaagcaactcccagggtggtaatgtggctgccggcctctttgaagattgtggtctggcataaggagaggtgcaggcgcctggttctgagcaccttggaatttccagccgcacagcatctggtgccctcccctccaccctcacaaggagctgccatcctgtttggattttctgtttgtggaccagaaacaaacgtttttccaaaggattagcaaatagggtaatttcctgtgtaacgctgctctggggcctcttcctcatcctggcagaaggagcctggagcccatgaggcagccagcactgtgcccttgctcagtcgtgctgtcccctccctctccctcagtctcctctccatgcccaagtcggtttccagccgctggtcttcatggcattcccagcacagccgggcaccaagaggcaaaacccaaggcctggcttggccgtgttaacgattgtacagacattttttaaaataactttgtgtaatacttttctggaatagtaagttcttgttgaactgtcacaggtgagcttctaggaacacaccgggtgtggttacttccactgggtgtgtccatggtcgtggtctgtgcttttgtaaacgaacagaacacttgaaccacctcccgaattgggtcatcggcttctttacgttgatacttagagatttgcagctctctttcaaggaaacttcccctactgaaaggcataaaaaggtt

SEQ ID NO: 4408 - DNA, 2300 bp, Homo sapien
gaccagcctgggctacatagtgagacccacctcgattggatgaagctgatgaggcggatgtcatgaattcctgcgtctagatcacaggacgtggccgttacttaggtttctcctcctctgccttttttaataatgaaaagtacccctcaaaaaagaagggacgagggagcaggcaagccccgctgaaagctcccaaacccctgggctgatctcaccaccaccgaggtcccgttgagcacccccgccccatcctggcctccagacccggggtcagccgagctgctggccgcagggctgatgtcaccgtgacgctgagtcccccaaccccacccagcctccagacccaggctcagccgagctgctggccacgggctgaggagaccatagccctgagcgcccctgctgcctccccttgcctccgcagcgtcgccagcaccgtgaaacatgccttgtccatctggctcagcgtaatcgttttcggcaacaagatcaccagcttgtcggccgttggcacagccctggtgaccgttggggtcctgctctacaacaaagccaggcaacaccagcaggaggcgctgcagagcctggctgcagccactggccgggccccagacgacacagtggagccgctgcttccacaggaccccaggcagcatccctgagagcaggaagctgccagctgctgctgtcctcgtgacactgcatcccccagaaatgggcagggacgccctcctccatggccctgctggggtgcaggacatggggagctaagttggccattgcctgcggctttctcggtttgtcggtgaagaccagcagaaactcaaactggggattccaggtatcagcttcctggagtagagaccagaccagtagctgactgtgtccgccgagcccatccccgtgtagtgtgaaaacagcctctgaggctcccatgctgggggtgcccacttcctctctgggcgacaccccagggtccaccgggagccagaggtgggtccagtgccaacgagagccgctccctgccacagccaagagagccctcggcttcccacaccagccatcgaaggccctgaggccctggaccggcggcagactggccctgggcatgaggccacagagcagggccgaagggaggggacagagggccctggaaggaagggtctcctgctgccacggtgggcactcagaacttctccccacctgacccagggctgtgggcatcctcagactatcccagaggcatcgcaagcctcaagctgcagcattgcacggcactcaagggctatgaccacggaggccgttcagtcgcttctgtttagaggaaggccccctacctcttccacaccctgccctcctatcccttccacaccctgggctgcgtgagctccccgcaaccccagggcaccctgccctcctacctgtgggggtttccagccctgaggttgaggacaaacctctcgtgtttaacttgggaggagatgtgtacgttccttttcttttttggactctgagtatgaggcaggctgttctgaggtccccgtggggtgagcctgtctgtcctccctcagagcccaccgttcctatcatcatctagcacctgtccggttccccacgtgagccttgggcaggacgctgcagtgttgatggtttgggttacgtggcgtttacctgggcgccgtccttgctgaaaaaggaaacgtccacactgaatgtttctggggcgcgtggtgtgtgtcaggcgcccaccctgtcccactctccccaagggacagtagtacggcacactggggccaccagccagctcaactcatcctcctgtgtcacgcacccccgagggcgcaggaggcctgaggagtggctactggagccgtgtgttaggcagaggcttctgaccatgtctgagctctttacccccaatctcgcagctggcggattcccatgcccggtgcagcctgttgccagccagcctttgagacccagagctccagggcttgtcagaggcagcatggggcgccagtggtcctgagtctcatttccctgcctgctctttaggcctttggcacccatggtcacttcactggctttccatttggcttctcacctgggaaatacaaaaatagcccctcctgaagataaaatcattcagaaacagagcaataattctgactcattaacttctacctactcaaaaaagtctgccatgatgatggaccgaagtgaggctttttaacccacaagtaacctttttatttttttgagacagtcttgctctgtctgtcacccaggctggagtacag

SEQ ID NO: 4409 - DNA, 2300 bp, Homo sapien
gctattgtaactattaaggtttactctttcctagagttaccgtgacagggcgtgttgtagctgttgtactactgagattactctttcctaaggttaccgtgacagggtgtgctgttgtaactattgaggtttactctttcctagggctactgtgacggggtgtgctgttttaactattgaggtttactcttccctagggttacgtgacggggtgtgctattgtaactattaaggtttactctttcctagggttactgtgacagtgtgctcagtgtgctgttgtaaatactgaagtgtactcttttttttttgagacggtgtctcaagagtcttgctcacccaggctggagtgcagtggcgccatctcggctcactgcaagctccgcctccctggttcacaccattctcctgcctcagcctcctggctaacacggtgaaaccccgtctctactaaaaatacaaaaaattagccaggatggtctcgatcttctgacctggtgatccgtccacctcggcctcccaaaatgctgggattacaggtgcgagccacgacctaggattactgtgacagggcatgctgttacaactattgaggtttactctttcctagggttactggtgaaagcctgtctctactacaaatacaaaaattagcctggcatggtggtgtacacctgtagtcccagctactcaggaggctgaggcaggagaattgcttgaacgtgggaggcaaaggttgcagtgagccaagattgtgcctctgtattctaccctgggggacatagcaagattctgtctgaaaaaaataataataagtccgggtgcgatggctcatgcctgtaatcccagcactttgggaggctgaggcgggtggatcatgaggtcatgagtttcagatcagcctgaccaatatggtgaaaccccgtctctactaaaaatataaaaattagctgggtgtggtagcgcacgcctgtactcccagctactctggaggctgaggcaggagaattgcttgaacctgggacaggaggcagaggtttcagtgagccgagattgcgccgctggactccagcctgggcaacagagcgagactccatctcaaaaaaataaatacaggccgggcgtggcggctcacgcctgtaatcccagcactttgggaggctgaggcgggcagatcacaaggtcaggagatcgagaccaccgtggctaacacagtgaaactctgtctctactaaaaaatacaaaaaaaattagccgggcgtggtggtgggcgcctgtagtcccagttacttggaaggctgaggcaggagaatggcatgcacccaggaagtagagcttgtagtgagccgagagtctcgccactgccctccagcctgggcgacagagcaagactccaatctcaaataaaataaataaataaataaaattaaattaaataaataagatgtgatgtatttttacatgcccctgaaactgtcaccacagtcaagctaatgaacctgcccctcaccccctgcaggtcctctgagaggcatttcgttccatctgcacaaaacattgatttcttacatttttcatctgaatcttaagactcctaggccgggcgcggtggctcacgcctgtaatcccagcactttgggaagccgaggcaggcagatcaccaggttaggagattgagaccatcctggctaacacagtgaaaccccgtctctactaaaaatacaaaaattagctgggtgtggtggcgggtgcctgtagtcccagctactccggaggctgaggcaggagaatggtgtgaacccggaaaggtggaggttgcagtgatccgagatcgcgtgtctacactccagcctgggtgacagagcgagactccagcctgggtgacagagcgagtctaaaaaaaaaaaaaaaaaaagatgcctgaagttggagaattaatgtaattttttaaatgatgtttcagcttcgttcctatctgaatcatgcatttttctgggttgaaaaaacctcataatagcctgatgcttttccgcactttctcaagcatgacgcagtgctgttgtgttttatttcagaggagaagaagatgattctttggccatcaaaccaccccagcaaatgtcttggaaagaaaaagttcatcacagaaaagatgaaaagaggaaagaaaaatgtaggcatcatagccattcagcagaagggggtacagaagcatttactttctttgacatcatgttcaagtgtggtttctttcctgttcctactcttctgccttccccagagcaccactgaaaaaccag

SEQ ID NO: 4410 - DNA, 2300 bp, Homo sapien
aatctagacacagctttagtgtgttaaatctgcctttaatgtcaactgaatatttgaatatttttgttaatttttagaatagattttgggctcacctgcgacatttagaagtacaaaagaacttcatcgaagtattgttctaatggaaaaatgagggcaaagaaattaaatctcctttaagaaaaccacttacttaaaaaaatatggcttacattttttaagcgttttatctctgctttctcctcttgttccttccttcgtttcttttcctgaagaatttcatctaaagttttcactttccaagagtccttttcatcacccatttgagttaaaacactgcaaaaagaaaaataattcagcctacatcaggacacagcaagctatggtgctgaacacttgaacctagtcacttttgagggattcagaataaatcctcattaagaataagttgtgcccggcgcagtggctcaagacggtaaccctagcactttgggaggccgaggcgagcagatcgctggagttccggagttcaacaccagcccgggcaacatggcaaaacctcgtctctacaaaaaatacaaaagttagcccagtgtggtggcgcgtgcctgtattcctagctacaggaaggaggctgctagaggcaggaggatcacttgaatcagagaggtcaaggctgcaatgagccaagactgcgccactgcactccagcctagataacaaagtaagacttggttaaaaaaaaaaaaaaaaaaaggtaagctctaggctgaggcgggtggatcacaaggtcaggaggtcaagaccagcctggccaacacggcgaaaaccctgtctccactaaaaatacaaaacttagctgggcgtggtggcgggtgcctgtaatcccagctactcgggaggccgaggcagcagaatcgcttgaatccgaaaggcggaggttccggtgagccgaggtcgcgtcactgcactccagcaagaccccgtctcaaaaaaaaaagaaaaaaaaacaagaatgataagttgtaagccaggcaaggtggcgagcgcctgtagtcccatatactctgcaagctgagatgggagaccgattgagcccaggagttccaggctgaagtgcgcttgtgaacagccactgcgctgcagcatgggcgacaaaaaagagtgatgggttctgaaaaatgaccgcttgaaatcaagtctcgtttctgtcattcttgtatggtcttgggtaacgtaattcacctcagtttagtcttccgtacaaccagaataacaacacctacgtgatagtatcgatcgcggattaaagatcatccgtttaaaggctcttaactcaggacctgccactcatcaaacactgcttttactgtcagaatctgctagaaagaccgcttggactacgtgaagccactagcacactggacagctgcaccttgagaccggggagatgctccgagatgtgctcgcgaacaaggccacctgacccgggcactgggctatttcctcgggttcagtcccgcacacttgaggttcagcctggcagacgttggctccagacagcgtttggacccgccgcctccaccacccaaagttccgtgcgggatgagactgtccgcggaagcgagggtgtcgctcgcccccgggcccgggtccgccccgctccgaggcctgctcggaagaaagacctcggtgcgcagttctcgtcgcgctcccacacctggtccgcccagtcggaactcacccctacggggccgcggccggtccctgagcctgagaagaaacagcaaccggcgctcgccagaagtatcctcacttcctgtgttgacgcctaatgatgatataatagccgacctctggcccagaactcaagacgacaggggctcgctctgtgcggcacttcctgtgtctgcgcgggatgatgacgcataaaacagcgcttgctcaggtccaggacgccaaaagaaactgcgcggtgagcgcacttccgacttcggcgcgggccggggcgccgagcagagcgacgccgacttttggagcagtttgcgcctgcgcggaacgcgtggccggcttccggaatcctaccgggacttttccggtagcgaagcccgcgcctgtgccaaggcttgcgagcagaatgccttcgcgatggacgcccgcattccacccccttgaccgctgggacccctagtggcgggtgggtggagcgcgctccatttacctgctggttacctcgtgaggcgcctcaggtctgtgtgtcttgtaaaggccgatctcggaatttaactctgaaccttact

SEQ ID NO: 4411 - DNA, 2300 bp, Homo sapien
gggaggaggctgcagtgagccaagaccacgccactgcactccaacctgggcggcagagcaaggctccgactcaaaagtaaatacatgaataaataaaataaaatcacatcgtaagagctctccctgctttgtttctgagtaaggttcagagttaaattccgagatcggcctttacaagacacacagacctgaggcgcctcacgaggtaaccagcaggtaaatggagcgcgctccacccacccgccactaggggtcccagcggtcaagggggtggaatgcgggcgtccatcgcgaaggcattctgctcgcaagccttggcacaggcgcgggcttcgctaccggaaaagtcccggtaggattccggaagccggccacgcgttccgcgcaggcgcaaactgctccaaaagtcggcgtcgctctgctcggcgccccggcccgcgccgaagtcggaagtgcgctcaccgcgcagtttcttttggcgtcctggacctgagcaagcgctgttttatgcgtcatcatcccgcgcagacacaggaagtgccgcacagagcgagcccctgtcgtcttgagttctgggccagaggtcggctattatatcatcattaggcgtcaacacaggaagtgaggatacttctggcgagcgccggttgctgtttcttctcaggctcagggaccggccgcggccccgtaggggtgagttccgactgggcggaccaggtgtgggagcgcgacgagaactgcgcaccgaggtctttcttccgagcaggcctcggagcggggcggacccgggcccgggggcgagcgacaccctcgcttccgcggacagtctcatcccgcacggaactttgggtggtggaggcggcgggtccaaacgctgtctggagccaacgtctgccaggctgaacctcaagtgtgcgggactgaacccgaggaaatagcccagtgcccgggtcaggtggccttgttcgcgagcacatctcggagcatctccccggtctcaaggtgcagctgtccagtgtgctagtggcttcacgtagtccaagcggtctttctagcagattctgacagtaaaagcagtgtttgatgagtggcaggtcctgagttaagagcctttaaacggatgatctttaatccgcgatcgatactatcacgtaggtgttgttattctggttgtacggaagactaaactgaggtgaattacgttacccaagaccatacaagaatgacagaaacgagacttgatttcaagcggtcatttttcagaacccatcactcttttttgtcgcccatgctgcagcgcagtggctgttcacaagcgcacttcagcctggaactcctgggctcaatcggtctcccatctcagcttgcagagtatatgggactacaggcgctcgccaccttgcctggcttacaacttatcattcttgtttttttttcttttttttttgagacggggtcttgctggagtgcagtgacgcgacctcggctcaccggaacctccgcctttcggattcaagcgattctgctgcctcggcctcccgagtagctgggattacaggcacccgccaccacgcccagctaagttttgtatttttagtggagacagggttttcgccgtgttggccaggctggtcttgacctcctgaccttgtgatccacccgcctcagcctagagcttacctttttttttttttttttttaaccaagtcttactttgttatctaggctggagtgcagtggcgcagtcttggctcattgcagccttgacctctctgattcaagtgatcctcctgcctctagcagcctccttcctgtagctaggaatacaggcacgcgccaccacactgggctaacttttgtattttttgtagagacgaggttttgccatgttgcccgggctggtgttgaactccggaactccagcgatctgctcgcctcggcctcccaaagtgctagggttaccgtcttgagccactgcgccgggcacaacttattcttaatgaggatttattctgaatccctcaaaagtgactaggttcaagtgttcagcaccatagcttgctgtgtcctgatgtaggctgaattatttttctttttgcagtgttttaactcaaatgggtgatgaaaaggactcttggaaagtgaaaactttagatgaaattcttcaggaaaagaaacgaaggaaggaacaagaggagaaagcagagataaaacgcttaaaaaatgtaagccatatttttttaagtaagtggttttcttaaaggagatttaatttctttgccctcatttttccattagaa

SEQ ID NO: 4412 - DNA, 2300 bp, Homo sapien
taatcccaaccctttgggaggccaaggcaggcagatcacaaggtcatgagatcaagaccatcctggctaatacagtgaaaccccatctaaactaaaaacacaaaaaaattagccgggcgtagtggtggacgcctgtagtcccagctactcgggaggctgaggctcgcaggataatggcgttgaacccgggaggtggggcttgcagtgagccaagattgcgccactgcactccagcctgggcgacagagcaagactccgtctcaaaaaaaaataaaaataaaaaaatagggagatttccccagttaccaagaactcaggaagcaacattaagagcttgggggaggccaggcgcggtggctcacgcctgtaatcccagcactttgggaggcagaggcaggctgatcacgaggtcaggagattgagaccatcctggctaacacggtaaaaccccgtctctacccaaaataaaaaaaaaattagccgggcatggtggcaggcgcctgtagtcgcaggtactcaggagcctaatgcgggcgaatggagtggaggcgggagaatggcgtgaacccgggtggcggagcttccagtgacccgagatcgcgccactgcactccagcctgggcgacagagcgagactccgtctcaaaaaaataaaaataaaaaaagagcttgggtacacaaagcaagcagcatttcattccgggatgaaaaaaattccgatacccatcgcccttcttgggcccttgtcagtttcttgccacatctttcattttcccatttcaggcccagtaaatgcggatgtttatcttccattgtttgtttcctgagattcagatgtctaaagcatttttctgtgacttttcaagtcaagaggaaaacctgacatatggaaagggaattaattgctcgttttatcctcttctcctgcaatgctctgaatccatgggtttggagtggggccctgggagttgggggaagcaccatacccagtgagtctgcactttgaggacccactgccagtgtcagcttcaaaatcacattgtaaaaggcccggcgcggtggctcacgcctgtaatcccagcactttaggaggacgaagcaggcggatcacttgaggtcaggagttcgagaccagcctggccaatatggcgaaacctcgtctctaccaaaaatataaaaattagccgggcgtggtggcgcgggcctgtggttccagctactcgggaggctgaggcaggaaaattccttgaacccgggaggaggctgcagtgagccaagaccacgccactgcactccaacctgggcggcagagcaaggctccgactcaaaagtaaatacatgaataaataaaataaaatcacatcgtaagagctctccctgctttgtttctgagtaaggttcagagttaaattccgagatcggcctttacaagacacacagacctgaggcgcctcacgaggtaaccagcaggtaaatggagcgcgctccacccacccgccactaggggtcccagcggtcaagggggtggaatgcgggcgtccatcgcgaaggcattctgctcgcaagccttggcacaggcgcgggcttcgctaccggaaaagtcccggtaggattccggaagccggccacgcgttccgcgcaggcgcaaactgctccaaaagtcggcgtcgctctgctcggcgccccggcccgcgccgaagtcggaagtgcgctcaccgcgcagtttcttttggcgtcctggacctgagcaagcgctgttttatgcgtcatcatcccgcgcagacacaggaagtgccgcacagagcgagcccctgtcgtcttgagttctgggccagaggtcggctattatatcatcattaggcgtcaacacaggaagtgaggatacttctggcgagcgccggttgctgtttcttctcaggctcagggaccggccgcggccccgtaggggtgagttccgactgggcggaccaggtgtgggagcgcgacgagaactgcgcaccgaggtctttcttccgagcaggcctcggagcggggcggacccgggcccgggggcgagcgacaccctcgcttccgcggacagtctcatcccgcacggaactttgggtggtggaggcggcgggtccaaacgctgtctggagccaacgtctgccaggctgaacctcaagtgtgcgggactgaacccgaggaaatagcccagtgcccgggtcaggtggccttgttcgcgagcacatctcggagcatctccccggtctcaaggtgcagctgtccagtgtgctagtggcttcacgtagtccaagcgg

SEQ ID NO: 4413 - DNA, 2300 bp, Homo sapien
aagtgattttaaattggtggttgaaacctttgaggacattaaatgttcaaaacgggtgatgtgtttccttttcttaatattttagcgtctgcttctacgctttgcctgggagaggccctggtggcctcgttcctggcgcccggagtccctgctgcggccccacccccgggcggtcacggtgacccatgctgcccagcctggaggtaaaatcgttcgtggctgtggcttcagcatgtcgtcctcggtgaaaaccccagcactggaagagctcgttcctggctccgaagagaagccgaaaggcaggtcgcctctcagctggggctctctgtttggtcaccgaagtgagaagattgtttttgccaagagcgacggcggcacagatgagaacgtactgaccgtcaccatcacggagaccacggtcatcgagtcagacttgggtgtgtggagctcgcgggcgctgctctacctcacgctgtggttcttcttcagcttctgcacgctcttcctcaacaagtacatcctgtccctgctgggaggcgagcccagcatgctaggtaggcggcggctcgggcagggtggaagccggccacctgccaccccacagggagcagccagcaaccacccgggagggccgggggagcccaggtcaggatgggaggccgggggtggagcccactgcaggcacgggaggggtgattctccctcttgtcttcggccccctccctcccgcaggtgcggtgcagatgctgtccaccacggttatcgggtgtgtgaaaaccctcgttccttgctgtttatatcagcacaaggcccggctttcctacccacccaacttccttatgacgatgctgtttgtgggtctgatgaggtaaagaatctcctggttttggttgagtgtctctttttctttaaatgtaaagtccctctcgttactagagcggggactctgctggctggtgagttttcagtgcagactttataaaagcaccagggctgtccagatttcaggacaccaaatgaatgtggcttcgtggctctcactgccacgtgtgttcagtcagcttctttccgggctggtggtctcaggacagggtgcctccttgtctctgggacgttttcaaggggtggcagaagtcacttcccattggacgcagtgccgtttcctgggggctcgacctaaagcgtcacagaagcgggtccaggcaccatgttggtgatgaggaggtgggcggagaggggccgacgtgccaaccgagcgagcgagccccttggagagcctgcccggtgggtgcaggcagacagactcgttctaaggtgatggtgcttttggctcatttttaggtttgcaactgtggttttgggtttggtcagcctgaaaaatgtggcggtttcgtttgctgagacggtgaagagctccgcccccatcttcacggtgatcatgtctcggatgattctgggggagtacacaggtgaggccccccgggccccacccctccgcctgcgccccaccatcccaggcctccatccgtggtgcccgtctctgctgcctgccatggggctctgccgcgaggaccactcaagtggtgcccacactggcagtgccttcacttctctcacggtcacatgtgcgggggtgtcttggagcctggcgtctgccaggtgttctcacactggcatgcggaggtcagggcagggttgtgtctcgtggccctaactgggtggggagacaggtgggggctgggcagattcctggcaagcaagattactgcaggtgccaatcactgatccgaagaggacgggcgggggccgccttcggccagcaccatacaggcggccgtggcccctggtccgtgggccctcctgtgccagcaccccacagcctccccagcacccgccaccacaggcctgtcctgggccccagcccctgacctcagctgcaacccaggctcctgcctctcccacctcttaatgactcacaggcgatttccagtgacatgtcggccccatgtcgcgtacccagtgtggctgcatgaaaaccagcgaggagcagaggcgcccacagagcgcggcatcttgaacggagtaggggggtgcacacgtgttcgcttatttaagaaacgacaagatcttaaggccgagggaagtgtctgtctgcctttggggacgggaggaggccgagggtccaggatggggttgggcttgccccacatgcacttgagacccgcacacacgtttaggtgattataacaaaatcaaagcctaaaagtcaactctggtttttttttgttttttttcttttg

SEQ ID NO: 4414 - DNA, 2300 bp, Homo sapien
ctcttaaaggtcctgcttcctcctggcgcgttggcgatgaagtttcagcgtgagcgtgggggggcgggcatgcaggccacgatgccaggtctctgaccacagcgcccgtgagtcgggaacctccctgcaggagggtggggtctgcaggtggaatgagcaggttggcactttgcttccaggagaacatgatcgtgtatgtggaaaagaaagtgctagaagaccctgccatcgccagcgatgaaagctttggggcagtgaagaagaaattctgtacctttcgagaaggtgggctgtcagcagctctgtccttggtttctccagcacagttccccgccccattggaagcttctggcactgttgcccttgtcattggtgtctgcgcactgcgccacagaggggccactgtgtgacagcctcttcttggttttgctttgtgtttcctagattatgatgacatttccaatcagatagacttcatcatctgcctggggggagacgggacgctgctgtacgcttcctcgcttttccaggtgaagcgctgacatttccagacccacaccaggttctagtctaggtgctgcgtaacgaggggctcacaagcatggcttccattgcttttcacccctttatacgagagcagtcacctagagcggccagcactgaggcccatggtggcagcccggtggggtgcgacggtggggccaggggcagtgtggacacagtgctacggctgggggtggccagagcccgcctgggacagcagggagtggcgcagggtggtgggtcctgggaaacgacctcgcctactggcccatcccctctgggcctcccttgagctcctcttcctggtttctcagcagcacagctctcccctggggctgtagggccacgctgtgtgggggaccctggctctgcccttggcccactgcatgttggtgacaccggaaatgcccgcagcccgccctgcttttctccccatctccccattagcacctgtggggcgcgaggctccgaccccaaggctgcctcccacccgccctcgccagctcccccagccctccgtgcccagggggctgctcagccctgccacctttgttcctcaccagctccccacaccaaccttggccctggtggcccggcccaccctggcctgcgacgtccccctccgcttgtccacatggccagtccctcctgcagagggtcggggtgctgtccccacagagctgggtccctcctgaggtgctgctggaaagctgggtggtgcaggggtgcacggcgtgggcgctgagtgacctctccgtcggctcacagggcagcgtccctccggtcatggccttccacctgggctccctgggcttcctgaccccattcagctttgagaactttcagtcccaagttactcaggtgatagagggtgagttggaatgttctggagcccacaggagctctgatcatggcgctgctgtctcgcttgcttgcggggggtttattttcatttaatgatgcatggagcaacatttaaaggtttcaagattcagggatttctaaatcttgagtggttcaaaccttttactgacactgagaagtttcagcagatcacaggttgaagctgccatgtgtgttgggcagaagtgagctgattctcactctcagaaggcacagaagtgtcggccgggcgcggtggctcacgcctgtcatcccagcactgtgggaggtcgaggcgggcggatcacgaggtcaagagatgagaccatcctggccaacacggtgaaaccccgtctctactaaaaatacaaaaattagctgggcgtggtggtgcgcacccgtagttccagctacttgggaggctgaggcaggagaatcacttgaacctgggaggcagaggttgcagtgagccaagatcacaccactgcattccagcctgggtgacagagtgagactccatctcaaaataaaaagaaaaaggcacagaagtgtgtcaacttgggagaagaaagagccctctgactcccactggcctccctggggtggggcccctgaccccactgacttccctgatgcatgccctctgactcctgctggacctcagggaacgcagctgttgttctccggagtcggctgaaggtcagggtggtgaaggagctccgggggaagaagacggccgtgcacaatgggctgggtgagaacggctcgcaggctgcaggcctggacatggatgtcgggaagcaggccatgcagtaccaggtgagtggaggcgcctcggcctcggtgaggggcccagggatgaggaccttccggag

SEQ ID NO: 4415 - DNA, 2300 bp, Homo sapien
gtgtgtttagcctctgttgagtgatttttattgtttctgtgcacggcccctcttctgttcttctgaagcttgttttattctatttctggctttattggcttgaatgctcagttcatggtttcccatgggctgtgacccagctttgatgggattgaaccgaccctggcagcctgtttatgtcacctccaccttctgggtgttccagatgttgggtctgatcttcactttgatccctgggttgcttaagagaaagttcagaaacttccaagtggctgagggcttttctttgtttctatctcttcctggttttattgtattgtggtcagaagatgaggttctaggctgggcgtggtggcttacgcctgtaatcccagcacttcgggatgctgaggcgggcagatcatttgaggtcaagagttggagaccagcctggccaacatggtgaaaccccatctctactaaaaattcaaaaaaattagctgagcgtggtggcgcacgcctgtagtcccagctgctagggaggctgaagcaggaaaatcacttgaacccgggaagcagacgttgcagtgagctgcgatcacaccactgcactccagcgtgggcgacagagtgagactctgtctcaaaaaaaaaaagatgaggttctaggccaggcatggtggctcatgcctataatcctagcactgtgttgggaggctgagttgggaggatcacttgaggccaggaattgaagaccagcctgggcaacagagcaagacaccctgtctctaccaaaggaaaaaaaattagctggacgtggtgctgtactcctgtagtcccagctacttggaaggctgaggtgggatcctgtctcaaaaaaaaaaaaagaaaaagaaaaaggggaaaaaaaggtgaggttttctaccctcaccagttttctttgaggcttaatattggtcagtttggtaaatatttcattggcgctgaattcacgatgcaaggcatggagttcacaacatatctgctggttcaattttatttgacagcttttctggactagggtatttgaaattgcacactttctctctcattaatgtgttgtattgtttacgagaaaagagcctgtcttttttttttttttttttttttttttttttttgagacggagtttctttcgttcttgttgcccaggctggagtgcagtggcacaatctcagctcaccacaacctccgcttcccgggttcaagcgattctcctgcctcaacctcccaagtagctgggattacagacatgcgcaaccacgcccagctaattttgtaattttaatagagatgggggtttctccatgttggtcaggctggtctcaaactcccgacctcaggtgagccaccgcacctggccagagtctttcttttcttaagacagggtctcgctcatgggctaccatgcccggctaattttttttttgctagagaagagttctttgttgcccagagtggtcttgaacccctggcctcaactgatcctttctctccagcctcccaaagtgctgggattacaggcatgagccaccacacctggccacacagtgtgactttctattttgttcttttttgaaacaattttttttgttaatattattttacagaaaaaattttgagatgaagtttcactctagtcacccaggctggagtgcaatggcatgatctcgacttactgcagcctccacctcctgggttcaagcgattctcctgcctcagtctaccgagtagctaggactacaggcgcccaccacagctaatttttgtatttttagtagagacgggatttcaccatattggtcaggcgaggctggtttcgaactcctggcctcaagtgatctgcccgcctctacctcccaaagtgctgggatgacaggcgtgagccacggcacccagccaaaaacctagagtagttcttaaatatctttgcaatggaaacagtctgttttcaaagtactttggtaaattggacttcagccattttttccccttgatgaaatggaacatatgtatgtgtaaattattattgtttcatacatatttatttactttatttacattatttattttattaaattaaggcatcagtgtttttctgaccgaagttctcatttcctgacaatggaaatggaacaagaaaaaatgaccatgaataaggaattgagtccagacgcggctgcttactgctgctcggcctgccacggcgatgagacctggagttacaaccaccccatccggggccgggccaagtctcgcagcctgtctgcctcgcccgccct

SEQ ID NO: 4416 - DNA, 2300 bp, Homo sapien
tacagcagcactggcttgtttacttaacggttttctgagctccccaaactatatgctccattggaagagagactttgtgcatttcgctcactgctgcatcccaatcaatgtagagaacggtgcctggcacgtaagacagactcaacaggagagtcacataggacttttatttatttatttatttatttatttatttatttatttatttattttttgagacagagtcttactctgtcactcaggatggagtgcagtggcacggtcttggctgactacaacctctgcctcccggcttcaagcgattctcctgtctcagcctcctgagtacctgggactacaggcacatgacaccatgcctgggtttttttatttttttaatttttttatttttagtagtgacagggtttcaccatgttggccaggctggtcttgaactcctgaccttaggtgatctgcccccctcatcctctcaaagtgctgggattacaggcgtgagctactgcgcctggctagagaccttatgggctttgattttcttccctttgaagtagggaagtatctgtttatttactgagctaattgagtagaagcaaatttgcaaactctaaatggctgcatgagagtgtgccatagtgatggttctctttccacagcccccttctattctctagtattggatccttaattcagcctcccttctccctttttcccagtctccgagagtggacagaatgagcaaggggacacttaagagtgggtcatgttgcttcttgatagctgctgtgataagtgtcttaaatggaaacagacaccccgaggggagcctgcgaatctctgagctccttcttccactctgcccaatgaccgaaagctgactctgcagcgtacaatcagaggaaataagagagaacagggaactcacatatatatgaaaaatgctgctggtccttttgtgaagcgatggcagcacagaggtgaatgagatggttctgcacaggctggctggctcaggagagtccttagtgatcagaagggggcttctgggccaatgggtgaactctgctctaatgcacggctccaaacgacaccctttgaattgggctttcttaccttcctaatctcagttgcctctgtctttcatcactactgggagtcgctcgtctgctcacactattctattttcctcctaaaaaatgttatagtctagggaggtccaagtagcagatactcctttgagcaaatagtccttatatgtttgtgtaaggagcaggcatattgccctatagccacaattcaaatgtgtataggttccagcatggtactttgcatatattaaacactgaaatttttaaaatcaataattaaagaaattgctaaacacctaatctctgagagtgatacatccaatgtcaattctgataactttatttttcattgtaaaatattccaaaaatatggaaaagcacagaaaaataattaacactgtatctccaacaaccagatttgaacaaatgtaaaatttttgccaaattgtttcagatttgtataaagaaataacatcttggtagatatagcatccataagaaaatgaggctgggccgacatggtggctcatgcctgtaatcccagcactttgggagatcgaagaggcaggagaatcacttgagcctaggagttaggaatcagcctgggcaacatggtgaggccgtttctatgaaaaataaaataaaatgaaaattaaaaaataagaaagagatctagaaatttagtaatatctttttgaaaaaatattcatgcatcatttaataaaactttaaatgtcaaaaactaagctgaaatgttagagatagtacagtgaatatgagagattttccctgttttctgccttctaggagcattaactaggtagaaaatcacagagaagagttttagcagcagttggtaacaaaaactccaaaatcctgattttttccgcctagcaccattttttctttctgcttgctcaaaacttgagacaagtgccggtgtggcaggtctgatgctgagcctgagctccgcgttcttttttaggagtgctcgccctacgcagcccacctctacgacgccgaaaacacccagacgcctctccggaatctcccgggcctctgctctgattactgctctgccttccattctaactgtcactcagccatttccctgctgaccaatgaccgcggcctccaggagtctcatggaagggacggtacccgcttctgccacctcctggaccttcctgacaaggactattgcttccctaatgt

SEQ ID NO: 4417 - DNA, 2300 bp, Homo sapien
ccacattccttttttattctcgttagctgtgatataggatagtctatttatgatgaggtctcttcaactgtttggctatgtgaagtttgttctttaatagattgcacaggaagcgttcatggaaataatattccttaaatgacagtttgcaactttaaaaacaacataattcatcaccatattaagttgctctgtagcacaaagtaattgtaagaacatgtttttcttaggacatgttttcttatagattgaaatctagaaaagtctttgcatgctttatgttttcatatttgtcatgccttttttttttttttttttgagacatggtcttgctatgttgcccaggatggaattgaacttttgagctcagcgatcttcctgcctcagcctctggagtagctgggactacagatgcctgccacggcaaccttccctccttccttcttgtttatgctattggatgtgatctagttgattttttttatctcttctctccaacacattttctgtcagaattgcagcatgggaaagaaaaagcataggtagggcacgtttcctactgctccttagagctgtttgagaacttcgaggaaaatctgaaagctcttcctcattttcgggagaacataaacttttttccatgtaaaatcatttctgggctggttttggtgaatttacacctcaagccaatgggagaaaagtagccagactaagcctctagacaagaaagtaatgattatgtatgttattttgtgtgtggtctcctggactacgcataatttatgttagccctgcctgtagagtagagccaagcttgagtgaggactcaagaactaatgacagagagagcagcagaaggaacttttcttgcaagtccttaactactgcatattgttttatgcagaagacaacatagaatcaactatttgtagcattttaaggaatccatgtacaaaatttttttttgacagggtctcattctgtcgcccaggctggagtgcagtagggtgatcacagctcactgcagcctcgacctccctgggctcaggtgatcctcccacctcatcctcccgagtagctgggactagaggcatgcatcatcaccccagcttatttttttttatttttattttgtagggacggggtttcatcatgttgactaggctggtttcgaactcctgagctcaaactttccgcctgcctcggcctcccaaagggctgggattacaggcatgagccaccgcgcccggcctcaaactcttaccagaccctttaatttcctctccgatactccgattctactcaaactgttcacctacacagaggaaactcagtgattcctgggggagcctatgctatatttgtgcatcctcatttgtggacaaaattctttcttgctgtgacttgaaagcagcctccctttacctttcacttattagtcctagttctgttctctgcaggtaagcaaaagggtttgatcattctttcgagaatcagccctccaaatatgggagaagcacatgcagtttccatgggcttgcagtccttttccgggatcatgttcacttagaactccgtcaccgtgtctcattcacacgttaccatgttaccttaacctatatctcattgttgtatcaatgtccctcatgaacttgacccagaggggtccgcagaacaacttttgctgagaaggcaaaggaaattctcgcccaaattgtggagaaggcagtcgaaccaattaaacctaaagctaaaactgtaatagaaaagaactttcaagctcgcaatgaaaaggctatgcatggatttatctcatcacagccactagccacacctccactcgtgcagtgcgcctgcgagccgagcagaaaccaatggcccatcgtagtgaatttctcgggtaaagtgacattctccgcttttgaatgctcccttcgcccagccgccaacccctcgccccaatttccattttaaatgaaagtctcccactttctatctgagacagacaaaaataaaactcgggcaaaaccaatctcagagaggcaactcactgtcacttcctgggtcacttccagaagtcacttccggggtcgaggcgaggccaacaatacgcctgctgccgcaggaggagttaccaaccgggccgcgcgctgcctaaatacctaaaccacgtttagcgcctgctcatataaagctctcctaactcgtcttccggtgggaatttcttcacgtgggccggagtcggagactgagtttagctttactgaggagctctaaatttaggcgggtaagtgccgcag

SEQ ID NO: 4418 - DNA, 2300 bp, Homo sapien
aaaccaatctgcagtgacagaaggttgtctgaagacagctgggacaagggagggagggattataaaggatcatgagaactctttcagaggtgatgttgatgaatatgttaattaacttcattgtggtaatggtctcatgggtgtagacatatgtcaaaaattatcattgtacactttaaacatgtgcaatttattgtaggttaattatacttcaacaaagctattaaaaaagacatgggattgtctgatggattggacttgggtgtgagaaaaaagaggtcgaggatggtttgtatgtttttggcttaagcacctagaagataggaattaaattgtcattcctattcctcaaatagggaagaccgaaaggagcagagtttgagagaaaaagataaagagtttggttttcaacatattgttagagatgcctattagacacatctaagatattaaaacaaataaatacacagtagaaaagaaatgaagaatgaacagaactactacttggatagaaagtgcttgtccgtgaccttaccaaatgtatatttctcaagacagcattggaattacattggcccagtaggaactctcacggctcctacagacaaaaatttgtgagcatctgtttaccgttttttccttattcgatataatggattgcacagacaagccacattctttcttcttgcttttaagtaatacgatttgtttgggaaaccagctgctgggtttgttgttcaaggttgatgagtaaccttagagattgcaatgagaagctgctggtcacagacagatgccaagttcttcaaccagggctggagagcattgtagccactcttctctgggctgacctgctcatgcagtcccccgcttttttaactgcacatataaatcatccagttatagtatgatttaaataagattttgcttccctgctcagaaagaaagtacaaaaattgcttgttgcttgatggaggctttacagagctgtgattaaaaaggagcatactacctgggtttgaatcttagctccatcactcactaggtgtttgaatgccttaaggtagtcatctctgaaatggggatcataataggacctactactctaaggtgcgattgttgtgaagattaatcttaattctggcatgaaataagtataaaatggaagctcatcacactgttattaaattaatttacttttttcctatggatatagatctaggaatctcaagatctcagcccaaggaccattacccatttctatcaacgaccaagcaggccacgggctctgatttatatcctcagccccctattccactcacctccccctttcttaatcaaagagcaccacgggatggtgcccccaaggaagccctgggaggctgaaaaggagggagcctgaaaccagagactaacagtggcaaatcgcgggtgggatttggcagttcagaaaaggaggtaccatgccaagagtgggggtagcggggtgaagtagcggggtgaagtggggggctggttcgggacaggccacaaaccagaaactgcgagaaggcgccagaagggacctgttgagatggcgcagggttgggggacccaagcgcgcggggaggggtgaactaagaatggagtcacgcggaggtgctgcgagggactggggcaaaggcaggtgattgggcgagggagtcctggttgccacggcagcgaccagaggagaaggcttcgaggagaggaggaggctgctgtcagtcctcctcctggaggtctcccgcatccctcctagagcctctgctgacgtgtcagtcggaaactgctcagaccttcgcgggcgccgcccctctgcgcttgtcttcccacatgcccccggcgctccgcctggtccctgcccgcgtccctgcccccgtccctgcccccgtccctgcccccgtccccgccccgtccccgcccccgcccccgcccccgtccccgcccccgtccccgccccgtccccgccccagcccccgccccagcccccccgtccccgccccgtccccgcccccgtcccgcccctctgcgcccgccccggcctcctcctccgcgtcaccggctccccgaggtgaccacaacatggctgcggcgcctgggctgctcgtctggctgctcgtgctccggctgccctggcgggtgccgggccagctggaccccagcactggccggcggttctcggagcacaaactctgcgcggacgacgaatgcagcagtgagtgcgctggaggggcggctggcctcggggcggctggccttggggtctccgccggccccgg

SEQ ID NO: 4419 - DNA, 2300 bp, Homo sapien; identical to SEQ ID NO: 3995

SEQ ID NO: 4420 - DNA, 2300 bp, Homo sapien; identical to SEQ ID NO: 3996

SEQ ID NO: 4421 - DNA, 2300 bp, Homo sapien; identical to SEQ ID NO: 3997

SEQ ID NO: 4422 - DNA, 2300 bp, Homo sapien; identical to SEQ ID NO: 3998

SEQ ID NO: 4423 - DNA, 2300 bp, Homo sapien; identical to SEQ ID NO: 4008

SEQ ID NO: 4424 - DNA, 2300 bp, Homo sapien
tactcacagcagaaggcaaagcgagagcaggccatcttacatggtgggagcaggagcaagagagagtgagcggggaggtgctgcacacttttaaaaccagattccacaagaactcagtcaccatcacagaatagcaccacagggatggtgataaaccactcatgagaaatctacccttatgatccaatcaccttccaccaggccccacctgaacactgggtactataatttgttatgagatttgatggagacacagaaccaaaccatatcactttttaaaaccataatagttatgctgagaagttcttttttgtcatagtgcaagataacatgtctttgctgctgatacattgggtaattcaatttcatttagtgatcataataaccttattatttttttcttttttcagtcacggaacagcaaatttctgagaagttgaagactatcatgaaagaaaatacagaacttgtacaaaaattgtcaaattatgaacagaaggtatgattattctttgttttgtttttttttcatggtcccagcttgaattatttgtcacctatcttatagttcagttactatggtatttttaaatagtatttattattacattaattcctataaaccatccagatcttaagcagtcatatgtgtaaagtactgttttcttctgtaagaggtcagtcacttgaaaataagttctggtagcactatactttatatttctggattctgaatgctttattttatatagatcaaggaatcaaagaaacatgttcaggaaaccaggaaacaaaatatgattctctctgatgaagcaattaaatataaggtaaaaacttcttttggggattacattttaaaacaaaagtaaaagtaatgagtataactaaccttaatatcttttttgtaggataaaatcaagacacttgaaaaaaatcaggaaattctggatgacacagctaaaaatcttcgtgttatgctagaatctgagagagaacagaatgtcaagaatcaggacttggtaagagttttgctgctaagtattactaataatttgggttttgaactcttttgtagattgagttgaactctttattttccatgctgttatgtgaagtaagagtgcgagtcagggaagttgaacctacttctgtccatttttgtggaattttaagtacttacacaagaaattattcttacaggcctaggaagtattttggttctcaaccctaggtaattgtcatattgcttggctctgccctccgaaacatgtggaacaactaagaaacccagttgaacagtccttgtgttttgttttgttttgcaaagtttttttttttttttgctataaacattttattttattaatagaatagttttagaatgacctaaaagttgcaaagatagtagagagggttccataaatcccacaccctattaatcttgatgacctcgttgaggtagtattgccaggtttcttcactgtaaaattactttttttttttttaaactttttgcattattgtactctttggaaggaagttactatcgcagcccacagttaaaaagtgaagggttatgctccatcctcttgaggagccagaatcttcataaattatctagaattctatatgggtgatctgtctattctcactccaatcctaccatttttaatttaggcaagagcaattggtgtttgacaaaacaattgtcaaattgtactaaattaaagtaccttggggattatttttttctcttgccacaagaaaaaaaaaaagtcacattgatttgaactggtttacttaaaagttttttcagtttcttttctttcaccttttagtctggtcatctaccacattttattgtaaccaggaaggttgtgtatgctgtgaaatatttatgcctttgattattttcccttacctctttaagttcttgatttttcccgagggcaaaactgaaacacctgcttttacctgaaacataggggatggctctgggacatactttgttgatgtttcttcttcttagtatgtatcccagtgtttctactaaaatcctaatatgcattttgtgttctgtttttacatggcagatatcagaaaacaagaaatctatagagaagttaaaggatgttatttcaatgaatgcctcagaattttcagaggtaaagctgactataattcctgcaggatattaatactatatcatagtttgattgcagagcaaaaatttgatatatgctaaaatgtgcaaaaaatgaaaactacatgatgttgggttggaaaagtaacttttt

SEQ ID NO: 4425 - DNA, 2300 bp, Homo sapien
tgcagtgttgtgatcgcagctcactgcagcctctacttcctgggctcgggtgattctcccaccttagtctctcaggtagctgggactacaggcgtgtgccaccatgcccagctaattgttatttgtagagatggggttttgccatgttgcccaggctggtctcaaactcccgcgctcaagtgatcctcctgcctcggcctcccaaattgctgagattacaggtgtgagccatgccctgccatgaaaagactaactctagactgcaatggctttgaataattttctaaacgtttagagtttagattttattccgtatcacaatttggagccacggaagtgtttttttgtttgttttttgttttttaaagtgacaccattaaaaattcattaaatacagctggctattatctggctagacgtctaagcaaacttcttgaatgtttggaaaacagattacactttcactaagacacctgttggtttaccacgtacttcttatttgaatatgattagcatcagaaagtccctatgctcaaaaatacctcttttatcaaattagattaacaaactgcatcccgtaagatgcagtaacttttcttaagatccaatggctagaatataggaatttgggttggattgggaagtgggggataacggtggcaaaaaattgaagattaaaaaacgaaatacaggccgggtgtggtggctcacgcctgtaatcccagcactttgagtggctgagacgggcggatcacgtgaggttaggagtttgagaccagcctggccaacatgatgaaatcctgtctctactaaaaatacaaaaattaggagggtgtggtggcaggcgcctgtaatcccaactactcaggaggctgaggcaggagaatcgcttgagcccaggaggcggaggttgcagtgagccgagattgtgccactgcactccagcctgggcgacagaaggagactccgtctcaaaaataacgaattacatgagatttataaaaagttggtaaatataaattctgtaacgtaaacttgggtatatatgtgtatacacgaacaaactgtgaatgagactgattttgtaccgtttggcccagaattattcacgctcattgaaattagtgctcttttaaaagattcacattgggttgcttatacatttactccaaagaaattgccattttccccttacctgcatctggctggcataatcaactgaacaatattctctttcttcccctttttcacttacaagtggggcagaaaggggaggagagcagtcctcattctttcagcaaacgtactgtgcacttacaacgcgcgaaggcgctgtgctcagagaaacaaaacctaaccggttgtggccctcgagggtgtgtgggtggggagagctgcagccacaggaaacggtaacacggcgcgtaaagggctctaattgaacttaaggaccaatggggccaccaagcaggaagtgactgacttgcccgcgtgtgtctgaaccgccttcacagggaggcaacttttgagtaattgcggggctggagggtgggggcactggagggaaccgcggggaggcgccggcttcggacgcggagttgtgggtgtgggagagaggcgacccagaagccgaggcccgaggcgggagggggctgcgccctggcaagaggctttccggagtatcttccatctgtcaatacaggctacaggactcagtggccctaattcgagaaccaaacgtcccccgccggtcagtcttttcccccagggcagtcccaagggcggcgagcccgcgcgcacgagagccgagcggtaggaagagccgagagctagcggccggggcctcggcgggccaggggcgcggggaggccgccggagaaaggactaagacaccggtggaccgagcagttactcccggcatgctcctcctccccgggcagatttcaaaccctctgcagccccacctccgcgccttcgcccccggccagccccagcaacaggcggcggcccgcttctcattggccaggcccgcgctgtcgtgttttgattggccgcggagcctcccggccctgcttctgcagttgctgccgactccattttgtcggtagaggcagaaggagaaggtcgggttgtagaagctggggtggccggcagctcgctcatcggtgttcgtgggctttgtcggtccgtgcctcgtctctccctggaaagggagggaggcttcgacgtcgagagggagccgctgccgcgttagttccgagcttgaagtcagtaagtagcggctgcgctaagggcgcggc

SEQ ID NO: 4426 - DNA, 2300 bp, Homo sapien
tacctgcatctggctggcataatcaactgaacaatattctctttcttcccctttttcacttacaagtggggcagaaaggggaggagagcagtcctcattctttcagcaaacgtactgtgcacttacaacgcgcgaaggcgctgtgctcagagaaacaaaacctaaccggttgtggccctcgagggtgtgtgggtggggagagctgcagccacaggaaacggtaacacggcgcgtaaagggctctaattgaacttaaggaccaatggggccaccaagcaggaagtgactgacttgcccgcgtgtgtctgaaccgccttcacagggaggcaacttttgagtaattgcggggctggagggtgggggcactggagggaaccgcggggaggcgccggcttcggacgcggagttgtgggtgtgggagagaggcgacccagaagccgaggcccgaggcgggagggggctgcgccctggcaagaggctttccggagtatcttccatctgtcaatacaggctacaggactcagtggccctaattcgagaaccaaacgtcccccgccggtcagtcttttcccccagggcagtcccaagggcggcgagcccgcgcgcacgagagccgagcggtaggaagagccgagagctagcggccggggcctcggcgggccaggggcgcggggaggccgccggagaaaggactaagacaccggtggaccgagcagttactcccggcatgctcctcctccccgggcagatttcaaaccctctgcagccccacctccgcgccttcgcccccggccagccccagcaacaggcggcggcccgcttctcattggccaggcccgcgctgtcgtgttttgattggccgcggagcctcccggccctgcttctgcagttgctgccgactccattttgtcggtagaggcagaaggagaaggtcgggttgtagaagctggggtggccggcagctcgctcatcggtgttcgtgggctttgtcggtccgtgcctcgtctctccctggaaagggagggaggcttcgacgtcgagagggagccgctgccgcgttagttccgagcttgaagtcagtaagtagcggctgcgctaagggcgcggccatgttggtggccgcgctccccattgttggaggaaggaggcgagcggaggcgagatccgggtaacccgggcgggcgcgggcggtcacgggcggtcgcagcgccgcgacccctgcggctccggagagatggggccactgggaagccaagcccttgtggcgtcggaggaggcgttttccgggttcgagttgggaattactcacagtccggaaatggcaatttatttagggttgtttatctgtttggaaagctctcttacccctttgaaaggagggggcttaactatttggtaacttattttcttggaacatcaaattaaaaccaaaccttgaaagttaagctgttccctctagggagacatttttatatgtttaagatgggcttagactgttagggcttgtgagaacttattttaagacggggaggaggcgagagtgttcataaccaaaggaaacactgcgtgatgtctacatgttccaagagactgaaaatggatgtgacatgtgtggaaagattggaaaattctggtgggagtttaaaaacacggtctctttagaaaatccgcctgaagccaattttttgatatgactcaacatttaacacttccttgattttatacgcgagagaatctgaaggtctttcccaggaaaaagataaagataaaacttattgcgggacttggagacacttacaaaaattccccaggagtgattggatctcaagggtgaagagtttttttaaatggtcgtggttataaggtcaaagaaagccatcttacgagaaattttctaccttttagttcaggaagtagccttctttacagtcaacgattttcgtagtaaatctaaatgatcactttctcaacgtgtttttgaaataatgaagtaatctttacttttctagctaggacttctctcaaacttgtgtgctgaggagactcagatgttggcctcagctcctaggctgaactcagcagatcggcccatgaaaacttctgtattgagacaaaggaagggatctgtcagaaagcaacacttgttatcttgggcttggcagcaaggaagaggacaggtagtggagatcctgcaatctgaaaagcagactgaaaggtaatcatcataatgggcaaacattttatgatggaaccatcctaaaccaattgtttttattttaaaatagattatgtagatttgt

SEQ ID NO: 4427 - DNA, 2300 bp, Homo sapien
cgcacgagagccgagcggtaggaagagccgagagctagcggccggggcctcggcgggccaggggcgcggggaggccgccggagaaaggactaagacaccggtggaccgagcagttactcccggcatgctcctcctccccgggcagatttcaaaccctctgcagccccacctccgcgccttcgcccccggccagccccagcaacaggcggcggcccgcttctcattggccaggcccgcgctgtcgtgttttgattggccgcggagcctcccggccctgcttctgcagttgctgccgactccattttgtcggtagaggcagaaggagaaggtcgggttgtagaagctggggtggccggcagctcgctcatcggtgttcgtgggctttgtcggtccgtgcctcgtctctccctggaaagggagggaggcttcgacgtcgagagggagccgctgccgcgttagttccgagcttgaagtcagtaagtagcggctgcgctaagggcgcggccatgttggtggccgcgctccccattgttggaggaaggaggcgagcggaggcgagatccgggtaacccgggcgggcgcgggcggtcacgggcggtcgcagcgccgcgacccctgcggctccggagagatggggccactgggaagccaagcccttgtggcgtcggaggaggcgttttccgggttcgagttgggaattactcacagtccggaaatggcaatttatttagggttgtttatctgtttggaaagctctcttacccctttgaaaggagggggcttaactatttggtaacttattttcttggaacatcaaattaaaaccaaaccttgaaagttaagctgttccctctagggagacatttttatatgtttaagatgggcttagactgttagggcttgtgagaacttattttaagacggggaggaggcgagagtgttcataaccaaaggaaacactgcgtgatgtctacatgttccaagagactgaaaatggatgtgacatgtgtggaaagattggaaaattctggtgggagtttaaaaacacggtctctttagaaaatccgcctgaagccaattttttgatatgactcaacatttaacacttccttgattttatacgcgagagaatctgaaggtctttcccaggaaaaagataaagataaaacttattgcgggacttggagacacttacaaaaattccccaggagtgattggatctcaagggtgaagagtttttttaaatggtcgtggttataaggtcaaagaaagccatcttacgagaaattttctaccttttagttcaggaagtagccttctttacagtcaacgattttcgtagtaaatctaaatgatcactttctcaacgtgtttttgaaataatgaagtaatctttacttttctagctaggacttctctcaaacttgtgtgctgaggagactcagatgttggcctcagctcctaggctgaactcagcagatcggcccatgaaaacttctgtattgagacaaaggaagggatctgtcagaaagcaacacttgttatcttgggcttggcagcaaggaagaggacaggtagtggagatcctgcaatctgaaaagcagactgaaaggtaatcatcataatgggcaaacattttatgatggaaccatcctaaaccaattgtttttattttaaaatagattatgtagatttgtgggtaagctcatttttcttagggaaggtataacaataaaggttgtgcatatattgaagtctgaacggcttgttttgagtttaaagcagctgaatagcctgttattgagtcttgtccaaaatatctggagttataagttggagccatagaagcttcttaaagattttgaacttttcttaatggaattttactcaatatttgtttccattcacttgtaggtgacaaagaagctgaagatgggtggtggagagaggtataacattccagcccctcaatctagaaatgttagtaagaaccaacaacagcttaacagacagaagaccaaggaacagaattcccagatgaagattgttcataagaaaaaagaaagaggacatggttataactcatcagcagctgcctggcaggccatgcaaaatggggggaagaacaaaaattttccaaataatcaaagttggaattctagcttatcaggtcccaggttactttttaaatctcaagctaatcagaactatgctggtgccaaatttagtgagccgccatcaccaagtgttcttcccaaaccaccaagccactgggtccctgtttcctttaatccttcaga

SEQ ID NO: 4428 - DNA, 2300 bp, Homo sapien
agtctaggtctaggtcaaaatctagatcaaggtcttggactagtcctaagtccagtggccactgatagtataaaccatggtcatttttaggcatgtatcattcatttactcatagtttggtttacttaaattatcaggaatacaatgttgcaatgatgcttaaaaaacacttgttagttttccctgtaccaggcaatggttataattaaaatgatatgctgttgagaagccactcttaagagtccagtttgtttaatgttatgggcagctaccaatttgtggtgtctctgtatatttttgtaaagattctcattttttatgcttgaagtatttggtgaaaagatgttggttgaccataatttgcaacattgtctcattaaaaataaactttcatattcatatttggtagaactgttaacctagaaatgtagcttgctaataagatagaatgatacaaaagtgaagtagtagccacagtacaacactgactgctcagacacatttaggttcagggtggacctttatgtcttgtcaagatgtctaggcccggctgggcgtggtggctcacacctgtaatcccagcactttgggaggctgaggcgggcggatcacgaggtcaggagttcgagaccagcctgaccaacacggtgaaaccccgtctctactaaaaatacaaaaattatccgggcatggtggcacatgcctgtaatctcagctactcaggaggctgaggcaagagaatcgcttgaacctgggaggtagaagttgcagtgagccaaaatcacgccactgcactccagcctgggcaacagagtgagactccgtctcaaaaaaaaaaaaaaaaaaaccggatgtctaggccaatgataattatttttgatgcagtgtggattagttcttttgttaaccccactgtcttggggaatgatgccagctgggaaattgagtttttgactgaaacatggagccttcactgctttttttctggttcctatgaagatttggaacatagaaaacacaaaaactcaccttaaaatttgagcaggtcgttgatggcaaaaataattttaaggaaaaaggaatattcttatgtagttattctaaagtttaaggagcgttgttgaccataatattgcttagttttcttactgctgttaagtaagtaaattgtttcaaagtaggttttgtgtgtgtgtgcctagtgtaaaagaactgaaattttgatgcttacagcacttggctcgtgcatttgtatcaaaatttgcctgcctctttatgagggaggcctgcttttcacacctcagtttatttaatacgaggcaagttgtaagacaacactcattctaggtgattctgtggtgccatgaaatttaaggtaatttggggaaaaggattagtcagttttaagcaagagtcacatcttttgagctttcgattatcagtgtagtacctgactaaaaatgaagtaatacccttaaaccatttataatttctagtatttctctgaaagatcgttttggggacaaaagtgacttgacatgtccaatttcatttcagaataaaaagctagcatctttaaaaatctcagattgcttgcttacagatacaagtaagaattatggacaaacgattccttttagaggattacttttttcaatttcggttttagtaatctaggctttgcctgtaaagaatacaacgatggattttaaatactgtttgtggaatgtgtttaaaggattgattctagaacctttgtatatttgatagtatttctaactttcatttctttactgtttgcagttaatgttcatgttctgctatgcaatcgtttatatgcacgtttctttaatttttttagattttcctggatgtatagtttaaacaacaaaaagtctatttaaaactgtagcagtagtttacagttctagcaaagaggaaagttgtggggttaaactttgtattttctttcttatagaggcttctaaaaaggtatttttatatgttctttttaacaaatattgtgtacaacctttaaaacatcaatgtttggatcaaaacaagacccagcttattttctgcttgctgtaaattaagcaaacatgctataataaaaacaaaatgaaggaaataatgattaactggaattattacagtattgaatatgattctaaaataacaatggaaacagtcctttatagatttaggaatattttaaatcattgttgcactaggcacaactaacttttactttggaaatgatagaacttgccagaaaggtacatcttttacacagtagt

SEQ ID NO: 4429 - DNA, 2300 bp, Homo sapien
ctgtaatttcagcactttggaaggccaaggcaggcagatcaattaggtcaggagtttgagaccagcctggccaacatggtgaaaacccatctctactgaaaacagaaaaattagccaggcatggtggcaggagcctgtagtcccagctactcgggaggctgacgtaggtgaatcgcttgaacccaggaggcggaggctgcagtaagccaagatccagccactgcattcacgcctggtcaacagagcaagactacatctcaaaaaataaaataaaataaaaataagtaaaaatcaaaaacaagaaaaaacctatcacattactgtttctttcatataacaaacctgcatttactttattttctcattgccatcgccctagaaatataagctgtatgtttttcattactgaatttcaagcttctagcacaatgtctgacacataacagggaatcaaacttttttttgttttgttttgtttttcacatcagcctcccaaaatgctgggattttggggccaccttgcctggcccaacattttaataaattaagcatgcaaatcttgggaaacaaaaatttagaatagctctgctacagagtgctacaaactatcatcacctgtatcgaatcacttaattgtcttagatgctgattgacacaaaaataatgcctttatgactttttattaaataaaagttcatttaatttaacagtacttgagtccctgctacctgcttggcactgtgccacacgctggaggcattccaactgaagtctctcatctccagaagttgactcttatcgagcaggaaatggctctcaaaagggcctccaaaatcaaaaccatactaaagattatttgctattttcatgctcattctcttacaaacgtggagttttccagagggtacatgatgtgtgataaagggtagtggagtgtgtcaaagttttctctatttttttttttttcttttttgagacggagtctcaccctgtcgcccaggctggaatgcagtggtgcaatctcggctcactgcaacctctgcctcccgagttcaagcgattcttctgccccagcctcccaagtagctgggattacaggcgcgcgccactacgcctggctaatttttgtatttttagtagagatggggtttcactgtgttggtcaggctggtctcaaactcttgacctcgtgatctgcccgcctcggcctcccaaagtacagggagggattacaggcgtgagccaccgagcccagccgaagtttcctctattttaagttctcattaactatttattaataggtataacccacacttttttttaaaaaagctctttggaatcttccgtaatacacaagaatataaaggcgttctgagaccaaaaagtttgagaactgctgcaatacaggtccgatgcatacccaggaagccgtcagcaacaaagaatacactacaaatgaccacagtcatgaacctacagtgtgaggtttggtcccacccaggttgggagccaaatgcgtgactaagtggagatggctagggtgtgggtgaggggcaaaggcaggctgaaaacactggagagacaggcccagctctgcgcaagggcacacacctccttcctttacacactcaatacaagctgtaaatccttctttcgcaggtcagggcataacctggaccaaacgggaaatttaaggcaaaataaaagcaggacattaacttggaccaaccgggaaatttaaggcagcctctctgaactaaatagtttaaaaatctgtccatttagtagtaaccgcaaagtttggcctagagactaaaacatctgcttcctgatttgggggtggagatgaagtggagtgtaaggtagaaaacggcgggaaatgaagacctaaagaaagaaagaacaggcttgggggagggtaagaggcaccgcaagaagccaacgaatgacaccgacgctgaggcgcgtgcgccagccctccgcatgcgcaggcggacgcctggtgttctcgcgggaaagaaccgttgcgcccgactttgcgcggaggtaggagggggaagtggaggcgggagtgaagtctcgcgagaagagtcggttgccgtagcagagccctctagctgtgtgtgtctgaggctcggccgcctgagccgcggacggtttgctgagcccgttagtgcgcccggccgagacacgccgccgccatgtcccgctacctgcgtccccccaacacgtctctgttcgtcaggaacgtggccgacgacaccaggtaggtacaaggcaggtactccgggcctaggcgg

SEQ ID NO: 4430 - DNA, 2300 bp, Homo sapien
cctgggcgacagagcgagactccatctcaaaaaaaaaaaaaaaaaagggacactttgagtgtgaggcggaaagcaattctggtgagtaaatatatgtccctcagttgcctgtattatttctcaaggcattatgaataataataattgctggcattcagggccagcttcttgagcgtgctacttgtgcactggaatgggccccatgctcagaaggaccctgcacttggcttagtactctgcgattgtcgttttgaatttcttaataaatattgaatgaagggccttgcattttcatgttgtactgggcccctgtgatcctgttaacattttagggcactttctatgcatcagactccattctaaatcttcaccctattaaacatgagtggctggagtagcaccagactgtgtaaatttcctccattacttaaggtaatttgcaggactctgttttcttgccactgaaagtatttaactgagaggggcaggggagacacttgctcagcaaggccttcctaggcaaacctgttttaaaaattaaaaacaaggccgggggcacagtggctcacacctgtaatttcagcactttggaaggccaaggcaggcagatcaattaggtcaggagtttgagaccagcctggccaacatggtgaaaacccatctctactgaaaacagaaaaattagccaggcatggtggcaggagcctgtagtcccagctactcgggaggctgacgtaggtgaatcgcttgaacccaggaggcggaggctgcagtaagccaagatccagccactgcattcacgcctggtcaacagagcaagactacatctcaaaaaataaaataaaataaaaataagtaaaaatcaaaaacaagaaaaaacctatcacattactgtttctttcatataacaaacctgcatttactttattttctcattgccatcgccctagaaatataagctgtatgtttttcattactgaatttcaagcttctagcacaatgtctgacacataacagggaatcaaacttttttttgttttgttttgtttttcacatcagcctcccaaaatgctgggattttggggccaccttgcctggcccaacattttaataaattaagcatgcaaatcttgggaaacaaaaatttagaatagctctgctacagagtgctacaaactatcatcacctgtatcgaatcacttaattgtcttagatgctgattgacacaaaaataatgcctttatgactttttattaaataaaagttcatttaatttaacagtacttgagtccctgctacctgcttggcactgtgccacacgctggaggcattccaactgaagtctctcatctccagaagttgactcttatcgagcaggaaatggctctcaaaagggcctccaaaatcaaaaccatactaaagattatttgctattttcatgctcattctcttacaaacgtggagttttccagagggtacatgatgtgtgataaagggtagtggagtgtgtcaaagttttctctatttttttttttttcttttttgagacggagtctcaccctgtcgcccaggctggaatgcagtggtgcaatctcggctcactgcaacctctgcctcccgagttcaagcgattcttctgccccagcctcccaagtagctgggattacaggcgcgcgccactacgcctggctaatttttgtatttttagtagagatggggtttcactgtgttggtcaggctggtctcaaactcttgacctcgtgatctgcccgcctcggcctcccaaagtacagggagggattacaggcgtgagccaccgagcccagccgaagtttcctctattttaagttctcattaactatttattaataggtataacccacacttttttttaaaaaagctctttggaatcttccgtaatacacaagaatataaaggcgttctgagaccaaaaagtttgagaactgctgcaatacaggtccgatgcatacccaggaagccgtcagcaacaaagaatacactacaaatgaccacagtcatgaacctacagtgtgaggtttggtcccacccaggttgggagccaaatgcgtgactaagtggagatggctagggtgtgggtgaggggcaaaggcaggctgaaaacactggagagacaggcccagctctgcgcaagggcacacacctccttcctttacacactcaatacaagctgtaaatccttctttcgcaggtcagggcataacctggaccaaacgggaaatttaaggcaaaataaaagcaggacattaacttggaccaac

SEQ ID NO: 4431 - DNA, 2300 bp, Homo sapien
tgtgtttgatgtcatgttttcaacgaaggctgaattactcctactgccattgctgttggttttcattgcagtagatgtttaggtttccatttcttcctccccttatcatttcctaacgtaccataggttgaccatacttcaaaagctgtactctcatggccactgcatcgaattttgagcatattttatggaaaactattgagctcactcttttcatgatcacagtttgctgtgtgtcatgagggcactaactcagagtgtccttttactcccttaccagtatgtcacctggccaattcactaggtcactttctctctgtctctgtctctgtctctctctctgtctctgtctctctctctctctctgtctttctctttcattgttttctacctggccctgttctatcccaacataaaggcaataatttgttacctcattaatggatctgtcctttttcttttcaaactcttccttacgttagccatgaaatctagctggggctgtgtggtttctgattccccctggcttattctttactttttcccacttttccaggctcagcagggagctgctggatgagaaagggcctgaagtcttgcaggactcactggatagaagttattcaactccttcaggttgtcttgaactgactgactcatgccagccctacagaagtgccttttacgtattggagcaacagcgtgttggcttggctgttgacatggatggtgagtacctttctatgaaggtgataaggatccactgagtcttctggttagggtcatattcctactgcaagtggcccttactgagctgagagatgtcattgccacagggaggtcctataggcacatgtaggttgaatgaaactctagttccacttggaagcccagacaagggatgggtcagtgagcaaggctctcttcctagtctcaggccatgcctgtggcgccctaatcctactctcatgacgttggacctgggcagatgtgacaaattcacacaactctgattttgtctcaattttgtagatcttgtagatttcatccttcactctaatttcagcgtctaaaatcctcgctaccgtgaacaatctgagtatttgatgagacagggctgaatagtgcagtttttctcctagcaaccatttgggggcatttgctttaaatcgattggaaaaatatggcataaccatttgcacaaacttgggacaaatgatattgggataacgatctaccagaatagggaattttacccacagtttctgggacaaaaaccaaggaatctctatggtgatcagccttcaggcctcctgaagactatctctcacagtgtcctattctcatgctgaggagcctgaagtccctgtgtgaggattagacagtggattgttatgtgtgtaggagaaccagcttaatatgtctgtccatgtctgaacttattgcagaaattgaaaagtaccaagaagtggaagaagaccaagacccatcatgccccaggtaactttgagcaattatggatgcttaattctgtgttgacacctggagatgccaggtccagggaaaacaagagtgtgttcaatttcatgttttcaacgaaggttgaattactcctcctgatattgctgttggttttcattgcagtagatgtttaggtttccatttcttcctccccttatcatttactaacttactataggttgaccatacctcaaaggctgtatggcaactgcatggaatcttgagcaagtttatggaaaattattgagcccactcttttcatgatcactgttcgctgtgtgtcccgagggcactaactcagagtgtcctttgaccccttcatcagtgtgtcacccggccaactcgctgagcttactttctcctctctctctctctctctccctccctctccctgtctttctctttcattcttttctacctggccctggtctatcccaacataaaggcaataattcattacctcattaatggatctgtcctttttctttttaaacagttccttatgttagccatgaaatctagctggggctgtgtggtttctgattccccctggcttattctttactttttcctacttttccaggctcagcagggagctgctggatgagaaagagcctgaagtcttgcaggactcactggatagatgttattcgactccttcaggttatcttgaactgcctgacttaggccagccctacagcagtgctgtttactcattggaggaacagtaccttggcttggctcttgacgtggacagtgagtaccttaccgtgaaggtg

SEQ ID NO: 4432 - DNA, 962 bp, Homo sapien
tgttggcttttctcttgacgtgggaggtgagtacctttctatgaaggtgataaggatccactgagtcttccatataaagatcatattcctgctccaagtggccattactgagctgagagatgtcattgccacagggaggacctataggcacatgtaggttgaatgaaactctagttctacctggaagcccagacaagggatgggtcagtgagcaagactctcttcctagtctcaggccatacctgtggcgccctgatcctatcctcatgacattggacctgggcagatgtgacaaattcagagaactatgattttgactcaagggtttgtagatttcctttttcactctaatttcagtgtctaaagtcctcacaaccatgaacaatctgagtatttgatgagacagggctaaatattgcagtttttctcctagcaaccatttgggggtatttgctttaagtcgattggaaaaatatggcataaccatttgcacaaacttgggacaaatgatattgggataacgatctaccagaatagggaattttacccacagtttctgggacaaaaaccaaggaatttctatcgtgatcagccttcaggcctcctgaagactacctctcacagtgtcctattctcatgctgaggagcctgaagtccctgtgtgaggattagacagtggattgttatgtgtgtaggagaaccagcttaatatgtctgtccatgtctgaacttattgcagaaattgaaaagtaccaagaaggggaagaagatcaaaacccaccatgccccaggtgactttcagcaattgtggatgcttaattctgtgttaacacctggaggcaacagattcagggaaaccagagtgtgtttgatgtcatgttttcaacgaaggctgaattactcctactgtcattgctgttggttttcattgcagtagatgtttaggtttccatttcttcctc

SEQ ID NO: 4433 - DNA, 1076 bp, Homo sapien
tcaggcttcttgaaagtatctctctcacattgtcctgttctcatgctgaggagcctgagatccctgtgtggggattagacagtggactgttatgggtgtaggtgaattggcttattttgtctgtccctgtctgaatgtattgcaggaactaaaaaggaccaagaagaggaagaagtccaaggcccaccatgccccaggtaactgagcaattgtgaacagctacttctgtgttgacatctggagactcctggttcagggaaaacagagcgggctgacattatcgattacatcttttccagcaagcctgaattattcttactaacattgctgttggttttcattgcagtagatatttaggtttccatttcttcctccccttatcatttactaacctactgtaggtggaccagacttcaaaaactgtattctcatggcgactgcatggaaacttgagcacattttatggaaaattattgagcacagtcttttcatgatccctgtatgctgtgtgtcctgagggcactaactcagagtgtcctgttactccctcatcagtgtgtcacctggacaattcactgagctcgttctctctctctgtgtgtgtgtgtgtgtctgtgtgtgtgtgtgtgtgtgtgtgtgtgtctatctgtctttctctttcattcttttccatttggccctgttctgtcccaacatgaaggcaataatttgttacctcattaatggatctatccttttagttttttaaccacttccctatgctacccatgaaacctagttggggctctgttgtgtctgatttcccctggcttattctttactttttcctccttttccaggctcagcagggagctgctggaggtagtagagcctgaagtcttgcaggactcactggatagatgttattcaactccttccagttgtcttgaacagcctgactcctgccagccctatggaagttccttttatgcattggaggaaaaacatgttggcttttctcttgacgtgggaggtgagtacctttctatgaaggtgataaggatccactgagtcttccatataaagatcatattcct

SEQ ID NO: 4434 - DNA, 2300 bp, Homo sapien
atggcaactgcatggaatcttgagcaagtttatggaaaattattgagcccactcttttcatgatcactgttcgctgtgtgtcccgagggcactaactcagagtgtcctttgaccccttcatcagtgtgtcacccggccaactcgctgagcttactttctcctctctctctctctctccctccctctccctgtctttctctttcattcttttctacctggccctggtctatcccaacataaaggcaataattcattacctcattaatggatctgtcctttttctttttaaacagttccttatgttagccatgaaatctagctggggctgtgtggtttctgattccccctggcttattctttactttttcctacttttccaggctcagcagggagctgctggatgagaaagagcctgaagtcttgcaggactcactggatagatgttattcgactccttcaggttatcttgaactgcctgacttaggccagccctacagcagtgctgtttactcattggaggaacagtaccttggcttggctcttgacgtggacagtgagtaccttactgtgaaggtgataagcctccacctggtcttccagataggggtgatattcctgttccaagtggcccttactgacccgagagatgtcattgccgcaggcaggacctatgggcgcatataggttgtaatgaaactgtagtctcagttggaagcctagacatgaaatgggtcagtgagcaaggctctattcctagtctccagccatgcctgtggcaagctgagcccgctctcagcacattggacccaggcagatgtaaaaaattcacagaagtatgatttggactgaagggtttgtagatttcctccttcattctaatttcagtgtctaaaattcttgcatccatgaacgagctgggcatttgatgagacagggctgaatactgcagttttcctcctagaaatcatctggggcattttctttgaactgatgggaacaataaggcataactgtttgcacaaacttgggataaatgattttgggataacgatctaccagaatggggatatttcacccttggttctgagatgcaaaccaaagaatatcatgaccagctttcaggcctcctgaagtatctctctcacattgtcctgttctcatgctgaggagcctgagatccctgtgtggggattagacagtggactgttatgggtgtaggtgaattggcttattttgtctgtccctgtctgaatgtattgcaggaactaaaaaggaccaagaagaggaagaagaccaaggcccaccatgccccaggtaactgagcaattgtgaacagctacttctgtgttgacatctggagactcctggttcagggaaaacagagcgggctgacattatcgattacatcttttccagcaagcctgaattattcctactaacattgctgttggttttcattgcagtagatatttaggtttccatttcttcctccccttatcatttactaacctactgtaggtggaccagacttcaaaaactgtattctcatggcgactgcatggaaacttgagcacattttatggaaaattattgagcacagtcttttcatgatccctgtatgctgtgtgtcctgagggcactaactcagagtgtcctgttactccctcatcagtgtgtcacctggacaattcactgagctcgttctctctctgtgtgtgtgtgtgtctgtgtgtgtgtctgtgtgtgtgtgtgtgtgtgtgtgtgtgtgtgtgtgtctatctgtctttctctttcattcttttctacttggccctgttctatcccaacataaaggcaataatttgttacctcattaatggatctgtcctttttgtttttaaacagttccttatgttagccatgaaatctagttggggctgtgttgtttctgattccccctggcttattctttactttttcctacttttccaggctcagcagggagctgctggaggagaaagagcctgaagtcttgcaggactcactggatagatgttattcaactccttccagttgtcttgaacagcctgacttctgccagccctatggaagttccttttatgcattggaggaaaaacatgttggcttttctcttgacgtgggaggtgagtacctttctatgaaggtgataaggctccactgagtcttccatataaagatcatattcctgttccaagtggccattactgagctgagagatgtcattgccacagggaggacctataggcacatgtaggttgaatgaaactctagttccactt

SEQ ID NO: 4435 - DNA, 370 bp, Homo sapien
ccccgggattattttttgagtttttcgtctttttccaggttcagcagggagctgttgtaggtatttagagccttaaattttgcagggttcattggatggatgttattcaactctttccagttgttttgaacagccctgactcctgccagccctatgggaagttccttttatgcattggaggaaaaacatgttggcttttctcttgacgtgggaggtgagtacctttctatgaaggtgataaggatccactgagtcttccatataaagatcatattcctgctccaagtggccattactgagctgagagatgtcattgccacagggaggacctataggcacatgtaggttgaatgaaactctagttctacct

SEQ ID NO: 4436 - DNA, 2109 bp, Homo sapien
tgggataacgatctaccagaatggggatatttcacccttggttctgagatgcaaaccaaagaatatcatgaccagctttcaggcctcctgaagtatctctctcacattgtcctgttctcatgctgaggagcctgagatccctgtgtggggattagacagtggactgttatgggtgtaggtgaattggcttattttgtctgtccctgtctgaatgtattgcaggaactaaaaaggaccaagaagaggaagaagaccaaggcccaccatgccccaggtaactgagcaattgtgaacagctacttctgtgttgacatctggagactcctggttcagggaaaacagagcgggctgacattatcgattacatcttttccagcaagcctgaattattcctactaacattgctgttggttttcattgcagtagatatttaggtttccatttcttcctccccttatcatttactaacctactgtaggtggaccagacttcaaaaactgtattctcatggcgactgcatggaaacttgagcacattttatggaaaattattgagcacagtcttttcatgatccctgtatgctgtgtgtcctgagggcactaactcagagtgtcctgttactccctcatcagtgtgtcacctggacaattcactgagctcgttctctctctctgtgtgtgtgtgtctgtgtgtgtgtctgtgtgtgtgtgtgtgtgtgtgtgtgtgtgtgtgtgtgtgtgtgtgtctatctgtctttctctttcattcttttctatttggccctgttctgtcccaacataaaggcaataatttgttacctcattaatggatctgtcctttttcttttttaaccagttccttatgctacccatgaaacctagttggggctgtgtggtttctgattccccctggcttattctttactttttcctacttttccaggctcagcagggagctgctggaggtagtagagcctgaagtcttgcaggactcactggatagatgttattcaactccttcaggttgtcttgaacagcctgacttaggccagccctatggaagttccttttatgcattggaggaaaaacatgttggcttttctcttgacgtggaaggtgagtacctttctatgaaggtgataaggatccaccgagtcttccagataaagatcatattcctgctccaagtggccattactgagctgagagatgtcattgccacagggaggacctataggcacatgtaggttgaatgaaactctagttctacctggaagcccaggcaagggatgggtcagtgagcaagactctcttcctagtctcaggccatacctgtggcgccctgatcctatcctcatgacattggacctgggcagatgtgacaaattcagagaactatgattttgactcaagggtttgtagatttcctttttcactctaatttcagtgtctaaagtcctcacaaccatgaacaatctgagtatttgatgagacagggctaaatattgcagtttttctcctagaaatcatttgagggtatttgctttaagttgattggaaaaatatggcataactgtttgcacaaacttgggacaaatgatattgggataacgatctactagaatagggacattttacccacagtttctgggagaaaaaccgaggaatttctatcatgaccagccttcaggcctcctgaaatatatctctcacggtgtcctattcttatgctgaggagcctgaggtccctgtgtgaggattagacagtggattgttatgtgtgtaggggaatcagcttaatgtgtctgtccatgtctgaatttattgcagaaattgaaaagaaggggaaggggaagaaaagaaggggaagaagatcaaagaaggaaagaagaaggggaagaaaagaaggggaagaagatcaaaacccaccatgccccaggtgactttcagcaattgtggatgcttaattctgtgttaacacctggaggcaacagattcagggaaaccagagtgtgtttgatgtcatgttttcaacgaaggctgaattactcctactgtcattgctgttggttttcattgcagtagatgtttaggtttccatttcttcctc

SEQ ID NO: 4437 - DNA, 1437 bp, Homo sapien
ctcaggcctgcctgtggcgctccaatcctactctcatgacgttggacctgggcagatgtgacaaattcacacaactctgattttgtctcaattttgtagatcttgtagacttcatccttcactctaatttcagcgtctaaaatcctcgctaccgtgaacaatctgagtatttgatgagacagggctgaatagtgcagtttttctcctagcaaccatttgggggcatttgctttaaatcgattggaaaaatatggcataaccatttgcacaaacttgggacaaatgatattgggataacgatctaccagaatagggaattttacccacagtttctgggacaaaaaccaaggaatctctatggtgatcagccttcaggcctcctgaagactacctctcacagtgtcctattctcatgctgaggagcctgaagtccctgtgtgaggattagacagtggattgttatgtgtgtaggagaaccagcttaatatgtctgtccatgtctgaacttattgcagaaattgaaaagtaccaagaagtggaagaagaccaagacccatcatgccccaggtaactttgagcaattatggatgcttaattctgtgttgacacctggagatgccaggtccagggaaaacaagagtgtgttcaatttcatgttttcaacgaaggttgaattactcctcctgatattgctgttggttttcattgcagtagatgtttaggtttccatttcttcctccccttatcatttactaacttactataggttgaccatacctcaaaggctgtatggcaactgcatggaatcttgagcaagtttatggaaaattattgagcccactcttttcatgatcactgttcgctgtgtgtcccgagggcactaactcagagtgtcctttgaccccttcatcagtgtgtcacccggccaactcgctgagcttactttctcctctctctctctctctctctctccctccctctccctgtctttctctttcattcttttctacctggccctggtctatcccaacataaaggcaataattcattacctcattaatggatctgtcctttttctttttaaacagttccttatgttagccatgaaatctagctggggctgtgtggtttctgattccccctggcttattctttactttttcctacttttccaggctcagcagggagctgctagatgagaaagagcctgaagtcttgcaggactcactggatagatgttattcgactccttcaggttatcttgaactgcctgacttaggccagccctacagcagtgctgtttactcattggaggaacagtaccttggcttggctcttgacgtggacagtgagtaccttactgtgaaggtgataagcctccacctggtcttccagataggggtgatattcctgttccaagtggcccttactgacccg

SEQ ID NO: 4438 - DNA, 1597 bp, Homo sapien
agatgtcattgccacagggaggacctataggcacatgtaggttgaatgaaactctagttccacttggaagcccagacaagggatgggtcagtgagcaaggctctcttcctagtctcaggccatacctgtggcgccctgatcctatcctcatgacattggacctgggcagatgtgacaaattcagagaactatgattttgactcaagggtttgtagatttcctttttcactctaatttcagtgtctaaagtcctcacaaccatgaacaatctgagtatttgatgagacagggctaaatattgcagtttttctcctagaaatcatttgagggtatttgctttaagttgattggaaaaatatggcataactgtttgcacaaacttgggacaaatgatattgggataacgatctactagaatagggacattttacccacagtttctgggagaaaaaccgaggaatttctatcatgaccagccttcaggcctcctgaaatatatctctcacggtgtcctattcttatgctgaggagcctgaggtccctgtgtgaggattagacagtggattgttatgtgtgtaggggaatcagcttaatgtgtctgtccatgtctgaatttattgcagaaattgaaaagaaggggaaggggaagaaaagaaggggaagaagatcaaagaaggaaagaagaaggggaagaaaagaaggggaagaagatcaaaacccaccatgccccaggtgactttcagcaattgtggatgcttaattctgtgttaacacctggaggcaacagattcagggaaaccagagtgtgtttgatgtcatgttttcaacgaaggctgaattactcctactgtcattgctgttggttttcattgcagtagatgtttaggtttccatttcttcctccccttatcatttactaacttactataggttgaccatacctcaaaggctgtatggcaactgcatggaatcttgagcaagtttatggaaaattattgagcccactcttttcatgatcactgttcgctgtgtgtcccgagggcactaactcagagtgtcctttgaccccttcatcagtgtgtcacccggccaactcgctgagctcactttctcctctctctctctctctctccctccctctccctgtctttctctttcattcttttctacctggccctggtctatgccaacataaaggcaataattcattacctcattaatggatctgtcctttttctttttaaacagttccttatgttagccatgaaatctagctggggctgtgtggtttctgattccccctggcttattctttactttttcctacttttccaggctcagcagggagctgctggatgagaaagagcctgaagtcttgcaggactcactggatagatgttattcgactccttcaggttatcttgaactgcctgacttaggccagccctacagcagtgctgtttactcattggaggaacagtaccttggcttggctcttgacgtggacagtgagtaccttactgtgaaggtgataagcctccacctggtcttccagataggggtgatattcctgttccaagtggcccttactgacccg

SEQ ID NO: 4439 - DNA, 2300 bp, Homo sapien
aataatgattttgtcttgtcagacaagtctgaattatgcctactacattgctttctggttctcattagagtacatgtttaggtttccatttcttcctacccttatcatttactaacctagtgaaagttgaccataactcaaaagctgtattctcatggtaactgcagggaaacttgagcacattttatgcaaaattattgaggacatgcttttcatgatcactgttcacagtgtgtcctgagagcacaaatacagagtgtcctttgactccctcatcagtgtgtcacctgaccaattcactgagctcgctctgtgtgtgtgtgtgtgtgtgtgtgtgtgtgtgtgtgtttgtgtgtgtgtgtgagtgtgtgtctctctctttcatccttttctacctggccctagtctatcccaacataaaggcaataatttcttacctcattaatggatctgtcctttttcttttcaaactcttccttacgttagccatgaaatctagctggggctgtgtggtttctgattccccctggcttattctttactttttcccacttttccaggctcagcagggagctgctggatgagaaagggcctgaagtcttgcaggactcactggatagatgttattcaactccttcaggttgtcttgaactgactgactcatgccagccctacagaagtgccttttacgtattggagcaacagcgtattggcttggctgttgacatggatggtgagtacctttctatgaaggtgataaggatccactgagtcttctggttagggtcatattcctactgcaagtggcccttactgagctgagagatgtcattgccacagggaggtcctataggcacatgtaggttgaatgaaactctagttccacttggaagcccagacaagggatgggtcagtgagcaaggctctcttcctagtctcaggccatgcctgtggtgccctaatcctactctcatgacgttcgacctgggcagatgtgacaaattcacacaactctgattttgtctcaattttgtagatcttgtagatttcatccttcactctaatttcagcgtctaaaatcctcgctaccatgaacaatctgagtatttgatgagacagggctgaatagtgcagtttttctcctagcaaccatttgggggcatttgctttaaatcgattggaaaaatatggcataaccatttgcacaaacttgggacaaatgatattgggataacgatctaccagaatagggaattttacccacagtttctgggacaaaaaccaaggaatctctatggtgatcagccttcaggcctcctgaagactatctctcacagtgtcctattctcatgctgaggagcctgaagtccctgtgtgaggattagacagtggattgttatgtgtgtaggagaaccagcttaatatgtctgtccatgtctgaacttattgcagaaattgaaaagtaccaagaagtggaagaagaccaagacccatcatgccccaggtaactttgagcaattatggatgcttaattctgtgttgacacctggagatgccaggtccagggaaaacaagagtgtgttcaatttcatgttttcaacgaaggttgaattactcctcctgacattgctgttggttttcattgcagtagatgtttaggtttccatttcttcctccccttatcatttactaacttactataggttgaccatacctcaaaggctgtatggcaactgcatggaatcttgagcaagtttatggaaaattattgagcccactcttttcatgatcactgttcgctgtgtgtcccgagggcactaactcagagtgtcctttgaccccttcatcagtgtgtcacccggccaactcgctgagctcactttctcctctctctctctctctctccctctccctgtctttctctttcattcttttctacctggccctggtctatcccaacataaaggcaataattcattacctcattaatggatctgtcctttttctttttaaacagttccttatgttagccatgaaatctagctggggctgtgtggtttctgattccccctggcttattctttactttttcctacttttccaggctcagcagggagctgctggatgagaaagagcctgaagtcttgcaggactcactggatagatgttattcgactccttcaggttatcttgaactgcctgacttaggccagccctacagcagtgctgtttactcattggaggaacagtaccttggcttggctcttgacgtggacagtgagtaccttaccgtgaaggtg

SEQ ID NO: 4440 - DNA, 2300 bp, Homo sapien
ctcccctttgtaaaatcatcagctgtaatcccagcactttgggagtccaaggcagtggatgacctgaggtgaggagattgaggccagcctggccgacatggtgaaacctcgtctatactaaaagtagaaaaattagacaggcatggtggtgggcgcctgtaatcccagccactcgggaggctgagacaggaatcgcttgaacccagcagtcagaggttgcactccagcctgagcaacagagcaagactctgtctcaaaaataaataaataaataaaccatcagatctcatgaggcttattcactgtcatgagaacagcatgggaaagacccatcccctgattcaattacctcccactgggtccctcccacaatatatgggaattaggggagctacaattcaagataagatttgactggggacacagccaaagcatgtcacaggttatgaaacaaattgattctagcaggccagacataagagagatgattccctggaccatcccaaggaagagtggttaacagatgcaagttgttttatgcatcaggaaaacaggagggctaaatatgctattattagcacaagagaatcaatcaaggcacaagccttgctggcttcgacctcagcagctcaaaaagctgagttaattgaactaactaggcccctgcagttgggaaagaatttaaaagttaacatttacactgattccaagtatgattttttagtgcttcatgcttatgctgcaatttggaatgggtggggactcctgacccccaagggcttttccatacaacatcgttcagattttgagcttgttagagtgctgctttgctgccaaaaagtgagtataattaattgcagaggacatcaaaagagagactgaccatgtaaaaggaaatgcccttgtagatgccacagccaaggcccctgcactgaaagggccaatgaagcttgtgggcgtgctggtcagcatacatagaactgggccagaataccctgaagaagaacgaaaatgggccagggattgcatttcagtccagggcccctcgggctgaatgatggtaataaattactaatgccaagtaccaatcacaggagtataactcagcactttcatgattcttttcaccctagaagggattctttgtttctgttaatgtctcatttgtttataggggtaaatcttttcaagacactaaaacaggtgactcagccctgtgagctttgtgcctgacatgactcaaatggccagcaattttctccttctccagttaaacctgtccaaaattgaggaacctatccaggtgagaactggccactctaatttacccggaagcctttctgcaggagattcaaatatttgctaatgcttactgacaccttcactggttagatcgaggcattccccaccccatctgaaaaatgtttaccagaagaaataactcctcagtttgggtaatccaaaagcctgcaaagtgacaatggcccatctttcacagcaggcgtatcccaaaacctgtcctcagctttaagaatccaatatgaccttcactctgctggagaccacagtcctctggaaaggtgaaagggctaaccctactctaaagaagactccagctaaatcagaggcctgactgtctctaacacccatagcttattgtgggttagaactgctccaaagtaaaacgtataattgagtcctgttgagttcacatgtggaaggcctttcctaaccacagatctcctaatagatgaaaagactcatcaattacaaaaatatgtcatcaatctaggacaggtgcaaaggcactccgtgcatatggaaacaagagtcttcccctcccacatgggaggaaaattcagtttcagctcagctagggatttagtcttactaaagacgcgggaggaagttctccagcgagcagctttccccaacgtggaaaggaccacgcaaggacacctgagctttccaacagatgttcagcgccaggggatccacaggtgggtgcacctgtgtggaagtaaagctgttgcttattctgggagccgaatccgaggcggagggaggtgggcgcggggctatttaaacgttggcggagggcgggctgggtcgctgcgcgtctgctcctccttctcacgtttctcctgccgtcctaatcccgccttggccatgagggagatcgtgctcacgcagatcgggcagtgcgggaatcagatcggcgccaaggttggcagccggggctctgagggcctagcccgggcctgccgggtggccggggaaggtgttggcagtggcggggg

SEQ ID NO: 4441 - DNA, 2300 bp, Homo sapien
gttacagttaacattttcttccacagtatttcctgataatatttaacaaaataaataatgagactaaaccctaactcatgtcaaatgagtttgagcaattattaccttacacacactatactgtcccaatagccaggtaatgaaatctgatctggacactcattctagaaaatagagcagtgctgtctgattgggggcgggaggagtattcccacgtcttggtcctgcagagacagctccccgacagctctgagaagccccagggctcagtggcacccgctttgaaactcaccaatgcaaaaaggagaatcaagaagtaaaaatctgtctgtattcaattgtataaacagtatagctttgtcatgtaagatactagcacagcaattagttactggtcttctgggcttcctccaaacctcaaacctttggtccccagacccacacacacacattcattcagctgaggggcaaatgagataaatcaaactgttttaatggcctcttggtatgcatttcaagagagttgacatcaacccaattttctgccagcagtgtatataagcgttcatttcgctaaccatcagtagcattatcactggaaaagaattctgtcctttgaagaaaagcaatgttacgttgtttgaatgtgtcattactagtgaattagaatagctgtcagtatttattaatagttttatttcttctattgtacattatccatggcttttgcgttttatgtggggagggatattcgtattcatcttagtggataaataccaccttacttggaaaatagagccaagggttaaattctaggcaaaaccaacaggaaaatcagggtaagttatctaacttacattaggttgaatgagagatggtatctgcgtataaaattttaaatgatccctacaaagtataactgggaaaaaaatgtggagttatgctgccacttctttcctaaaaggtaagcttccttttattgatacgatgttgtcttactcgagtgccttctctaaaatacacagaaccatgcagtcctctattttacagatgaagtaacagactgtttaaaaaggtgactcactgaaagctcttcattgttggaattcctggcccaacattcaaaccaggcatggcttgcttttcttctgacacgttttaacccctctactaaatttttagcgatatatatttactcttaaaatgaattacaattattctgtgatgttctttgagataatcaaaaactctctgggatgtatcagattgagggctgtgaatagcatgaaagattgtgtttatttgactagtgtatatcacagacctattcaagtaccacccatttctaaattctaacagtcttagaaaccagctgtagaagcagattgatatattttatcagaatccccaaattcctacaaccgtctcttcctaatgacttttcaggtggggacacgtgccaagacggccaatagatacctgaaacccggggtagtgctgaaccttacttacactacgttttctcctatacacacctgcctataataaagtttaatttagaagtcaggcacaatgagagattaacaacactaataataaaccagaacaattataacactatactgtagtaaaagttatgagaatgcggtctccctgaaaacaccttgctgtcctgtactcaccgaatttcagagcagaggactctgactgacaggtgttccccgactcccagtggcgaaaggtcctcagggaaaacaggtgaacgctatcaaagtatgcttatctccgaacctttcttaaaccagagtcttaagggatcgtctctgattaggtctagaattcctctccatagaagataacctacttctcgcgcaaatctgcagtgttcttgcagggctgctgatgggtggtcctgttcttttcgcggtcctgtttgcgcagagatgaaacggggaacttagcgtatccctaccgctctttttgatgacaggagtaaagggctgttcagactacctaaacaatgttgttaagagaagcactcgtacttctcagacttcgctgttccggaccccgcgagccaggggcaggcaccgggtccacccggggctgagctgcggcggcgcctgacaatgccccctcgcgccccggcctcggcgcccgctcccggctccagcgcgcctgcacgtacgtagccttcacgtgtgtgtggatacggagtgcatgtgtggagacagaggaatatgctccaacaaatttcggatagaggcgccgaagacaggacgtggggaaggtaggagccg

SEQ ID NO: 4442 - DNA, 2300 bp, Homo sapien
ttacttggaaaatagagccaagggttaaattctaggcaaaaccaacaggaaaatcagggtaagttatctaacttacattaggttgaatgagagatggtatctgcgtataaaattttaaatgatccctacaaagtataactgggaaaaaaatgtggagttatgctgccacttctttcctaaaaggtaagcttccttttattgatacgatgttgtcttactcgagtgccttctctaaaatacacagaaccatgcagtcctctattttacagatgaagtaacagactgtttaaaaaggtgactcactgaaagctcttcattgttggaattcctggcccaacattcaaaccaggcatggcttgcttttcttctgacacgttttaacccctctactaaatttttagcgatatatatttactcttaaaatgaattacaattattctgtgatgttctttgagataatcaaaaactctctgggatgtatcagattgagggctgtgaatagcatgaaagattgtgtttatttgactagtgtatatcacagacctattcaagtaccacccatttctaaattctaacagtcttagaaaccagctgtagaagcagattgatatattttatcagaatccccaaattcctacaaccgtctcttcctaatgacttttcaggtggggacacgtgccaagacggccaatagatacctgaaacccggggtagtgctgaaccttacttacactacgttttctcctatacacacctgcctataataaagtttaatttagaagtcaggcacaatgagagattaacaacactaataataaaccagaacaattataacactatactgtagtaaaagttatgagaatgcggtctccctgaaaacaccttgctgtcctgtactcaccgaatttcagagcagaggactctgactgacaggtgttccccgactcccagtggcgaaaggtcctcagggaaaacaggtgaacgctatcaaagtatgcttatctccgaacctttcttaaaccagagtcttaagggatcgtctctgattaggtctagaattcctctccatagaagataacctacttctcgcgcaaatctgcagtgttcttgcagggctgctgatgggtggtcctgttcttttcgcggtcctgtttgcgcagagatgaaacggggaacttagcgtatccctaccgctctttttgatgacaggagtaaagggctgttcagactacctaaacaatgttgttaagagaagcactcgtacttctcagacttcgctgttccggaccccgcgagccaggggcaggcaccgggtccacccggggctgagctgcggcggcgcctgacaatgccccctcgcgccccggcctcggcgcccgctcccggctccagcgcgcctgcacgtacgtagccttcacgtgtgtgtggatacggagtgcatgtgtggagacagaggaatatgctccaacaaatttcggatagaggcgccgaagacaggacgtggggaaggtaggagccgcgtgcacggctccggccccgggcgggaggcggccgcgagccgggccggccgcgcgcaagtccggcgccagccgctagagcccccagtgcgcggcccggccgcggggcgcctcgacccgacacaataaactccgagggcgggcgggccgaggggccggtggggccgagcggccgccccgcgcgcatcgccatgtgagcggctgccgcggcttcgcggggacccaactttcccgggcggcggcgcccaacttcccgccgcccgctccggccccgcaggcccgcggcgccaggggaagacgcgagtaagtgcgggcggcggtgccctcccggccctcaccccgcacgcggcgacccggccgcctagcctccctcgctcaggcgcgaccgcggcgttctctgaggtggagtattacaaacatggcgcccctcgagcccggagcccttcgcgcggagccggcggcggggtccgggcgggggggagccggggaggagggaggaggccggcagggaggaggaggaggcggcctgagcgtcccccccgccccccgcgcccgtcgccggctcaggcccgagaggcgccgggcggcgggaaggaggcggcaccggaggggagggccgggcgcggcggcggcggcggtggaggagccggagcataatggtggggaaagctcggcggcggggcggcggggcgggcgggggcgtccgtggagatggcgcggcccgcgcggtggagcctgcctggccgcggcctctggggcggcggcggcaccagtgggtgctga

SEQ ID NO: 4443 - DNA, 2300 bp, Homo sapien
tgcttactcccacttcccttcctttgtgctttggttgttatatattttatttctacgtgtgttataagcctaatgacatctatcaattatttttatctttgctttaaactgccaattatcttttaaagaaattaagaaagggaaaaattggcttttacattttcctacatatttaccattttgcagagttcctcatctctttctgctgaaattttacctcagcgagaagtagtgtctcccttgtctgaatttttatagcacatattgtggaccatttatatgtcatatatgaccttacagttagttccatgtatatgtcaaatttcctctgccagttttagattattttcttggcaagggtcgccgtttatacagttttaactacttcattgtgtctagcacagtgccttagataaagtggacacctgtatatatttttaactatgtaagaatgagtgaaactttgttcatttatctgagtatttatataatctcacaggattgagttgtattattacagttcaccattagatgtcactttctgacatatgttaaatccttaccaatgaattccttccattaaggcatattggattctgaaagttggtgctccaacacaagtgcacttaaacagataaatttttgtacatttaaaagtgattactgtctaaaatggaagtgttcctaagttataatttttatattttcattatgtataaatttatacagaactaactgattttcctaaagttttctttagaacttgaatactggtattgtttttgaattatttgctctgtggagcagcttggaactattagaagtaatagtgtgagaatattcaggaatacctttaaacatgttcaaaatgtattctgatggtggtgtaattctgaaagacatcttattttaggagcctgactgacccagttttctcaggttttgatagcaactatatagtttatttgtgtttgcctgagaaaggaggggaactgagtaggctgtgaagaaacacagaggtagagaaaaaggagattcctgtggctgtcttggccagtcatggaacacagcaaagtgcttccctccctcattctctaaacttaaaagataggaaagggcaggtcaaggagatttcagcaatctcagaaggcttaatgttcactgtatatttaagaacctagattttaaactcagcatgataacatgtatgatctagagagatgtttcagtgcgtccccaatgctaggattcatgacaaacgcttaccagattcctacaagcacgtctctccatgctgagttaagagaatcctctctgtgataccactgctctccggacatccagggtttaacctcttttctttccccatcttgccaggagacagcaggaaaattattgggaggtgggaggtgtggtggcagttttcttcaattcatctggaatactaaaatttgagtaaaataacaatgctgtttcctaatagtgtaataaatacccccaaaacttacacctaatccaagaatgttaccattcttcataatttgtgaccttctagtgttctgtccctcaacctttcacatctcattccaggagtaactttcttatatttaatgttcatggtttgatttaaaataatattgttttcatatatctatgtatgtatataaaatttgatttttaagccatgattataataaactaaagtgccaattagaatatttaaattccattttgtattgatcaaattacaaacaacgcgatgtcaacaaatgaagttttatcttggagtatttctgtgttttagaataaacttaaatgcattttctgaaagtatattggtatgaagtgaccacttatccttcctgggataacctttttaactttttggcttttagaatgtcattcttcatgatgtaatgaaatgaatgatactttatatgaagtaactggtgatgtggatggtagaaaaaaatagaaagtgggcaatactacatactaagtataatcaatagttgagaggtcctgataatgttactcacttatactgataattcattttgtaatctgtttttttcccttatgtttttgtttattactgcagctaaagaagtaaacaggtcatggcacgtttaacaaaaagacgacaggcggatacaaaagctatccagcatctttgggcagccattgagattatacggaaccagaagcagattgccaacattgaccgtattacaaagtaagtaaatttaaacacaaatatctctgtaaaatgtcgtagaagactttgggggaaaggccaa

SEQ ID NO: 4444 - DNA, 2300 bp, Homo sapien
tgcctggcctgaagccccaaacctacctccctttcaacaaggtgggtgggtgtaggaaaatgtcttttttccccccaatgtgtggtggttccccccttaggaagcagagactaggaatgtgcatctgaagcatgtggagaaatattcacacacagcaatgaggtcaaacaatatttcaagaatcaaatggtttgtggagatggaaggatgcaccacatatgcagacacatttttttaaatgtgccactttttttttttttttttttttaacaacaatcagccttggatctcagaagtcaaacaaaactcttttagcaaaaggcttactgctgactgcatatagcaaaggcagagaaagacgctgcccacaacataatgaaagatcatctacattttgcccagcatcaatcttagtcatgcatatctagcaccgagagccactgcggggtcacactggggcagttacagaacacatctttctcggagtgcagatgctccttcttggttggacaccgtgggccaattcaatttagaagtgcacaggtgagctctgagaaggtgtggccaggagctgccagggcagaaactggggcgcactcgtccacaggcggcaaacgacgcagctggaggacttcttgcttcagccggagctctggcatgaacccccggggaactgtgctcactgagcgagggagccccagaggctcacacagagcgggctgggtcttaagacgaggggacgatcaccgatgtgagttccggacactttgtccactccacattggccatcagagggggaatcaatgcaacccagtgcgaatgaccacagaatcgcattccttttcgtagcaaggaccaaaaaaagatgacattaacaaaaatgatgaaaaacattgtgcaatgaattcttgcagctaagaaaacagtgctatttgccaacctaaagcccctcagtatcatcagcacacgctggcataaacacattcactgttgtcccacagcaaagaaaaaaatagtgcacattgagctttgaattcttttgccatccttgagatggcaataatttcacttgctggtctctggttctagaagaaacttttagacagggctcctgcggtctgcgactgctggcaacagcagagtgtatgtgagtacggggggcacaccatgcaagtgacaagttctgcatcttaaactttaaaatctcctttgttcattagtgaatttatatttcatatatatatatttgttgtgatactatccacgcaagataatacaacacttttttatattagcaaacattacaagactttaatattcttgaatgtttttctcttttatagttctaaagagatcaaaataaattaaacgttttgtacataattacatattgaggaagttaacttattttatctttttagtttagtacaaagatatttgcaagataattgccgaaatacaccttatttataatttcttctcattctatactaacttcgaaggccgtataccagcctttgtttcttcagcacatttctgacaaagaaagctgctattatctaattggaaggtgctatttggaaggttttctcgtacctcaaactttcctaaaaggatgagatctagcaatggcttaaattagtaacagatccatgtcattaagatttcatgacacattaaaacagagaaaacaattctttgtcacactacataaattgtttaaaagaacccatctggagggcaggatatttttttaattgctatttcggcttaacaaaataccacatttacgaagaaagcacttattatccaataattaaaaaagaaagaaaagaaaagaaagttttgaaatgggcttttccaacaaactgaaggcagtaatccaaagtccttctgagcgaaattcagtggtaaattcacatttcacccccatgccaatcgtggctgctgtgagaagtcctcttcctcctcctcttcctcctccactctcaccacaaatggctgtattctggtgagtgttgccctgtgtctgcacgcttcagtggacacggagaacaatgtctacatctctagaaaagtccatggaagccaagagacgagactacatgttgtaggccacatagatggggtctagctggtctgccaaaaacccgtctcgcaggtgcatgcgctgcttctccccacgggagttgatggggatgacgccgatgtccaccacgaccaccactccgacgatcaggtagtgctcctccaggaccacgttggtcaccaagggaaccaggtccaaggcttcttgttcc

SEQ ID NO: 4445 - DNA, 2300 bp, Homo sapien
ctgggcggggcccggcacacggtccatctggagggcagcagggaggctttgggggtgcctgggcggggcccagcacatggtccatctggagggcagcagggagggttcaggggtgcctgggcggggcccagcacacggtccatctggagggcagcagggaggctttgggggtgcctgggcggggcccggtgaaaggaagtcactttacagccagactttgctttccttctttgtatgtaaaatgccaggtctgagtctcatgaagatgtctggcatccgaggagctcccctcggcactgctcaagggtgagagcctaggccagctagcagcgacggtcagcggcgtgggtgccgaccagaggcatgcagtggtgtgtgggaaagtgaactgcaccgccagctcctgttcctatgtactctcacttccatttcagatgctttccaaagcagctagcagcctagtcagggaaaaggttacgctttgagggccaggccacagacagaactgcatacatgtgttattgatgagctactgctcactccttcaggaagttatataattatgagttattttccaaagaattcttatggggagtcaggtgaatttgttttaatgcccagaagtgattatttagaaaactgtatgcccagaaacaagttacctaatctaaaactacatttctgatttttctaagtgttccagactgaactttgtccctggcagctggtggccttgggggcaggcgttgcctctggccctcagcctgcagggcctcctgagggctcctacgtggccaccactcttctgtgattttataactgtgcagccagtggttctgtcgaccagagggcctgatggaagagccacagggccaggcatgcatctacgagtgtgaaccgtcagggcgggcgtggctcctggccctggcgtgtgagctctcagccactggccgtcccatgcaggctgttgggacacccctggtctccccccaccagatgccagctgagccactgcccaacttgtgctgatcgaaaatgcctccaggcatgtcagacatccctgggggcacaggcacacacagcaacaggtcacggagcggctgctgacggcgataagggaaggcaccatgtcccacgcacttcacctaagcaacaatgaacgggcacctctacagtcaccaagtggaagatgatctgtttcaacgggggaagtctgcagtaaaaatgacgccttctttccttcctctctggcatcttagtgggtcctccttggcgggcagagattcctctaaagggcttctcatcctgctcaaccccatgcctgctttctggagtcctcacactctcaccaagaactccacttttcttctcagggggcgcttaggaggccacatagagaaggtaacctgacccctaacccctatttcaagcatcttgacaaaacatttccattcatgtaaagaaatgtgggcaggatgctgacattctacgacgggggcaaaatggtgcataaaataggaaggaaaagaaccgagtgcctgccttccagtgagatggtcagataaagcagctctggccatactcctgctatcacacctgccactgctgtcctgcaacagagtttcttttttttttttttttgagacgggatctcactctgtcacccaggctggaatgcagaggtgcaatctcagctcactgtaacctctgcctcccagtttcaagcaattctcctgactcagcctcccaaagagctgggatgacaagtgcccgccaccaaacctgggtaatttttagtggagacggggctttaccatgttgcccaggctggtctcgaactcctgacctcaggtgatccgcctacctcagcctcccaaatacctgggattacaggcgtgagccaccatgcctggccagagttttcaattgcaaagttcaagccaatgcctaactccaccacttcactcatgagacagttacactctgggcagataaacatcgtgtgcacctcttcttctagatggagacctgcatgcaaggccgcagaacaaaacaaaaaaaggaaaaaaagaaaaaacccagaagtgtacagtacctgtcgtgtctcagggctctcatgtccacgtagacagtggttgggtcaggtcctgaggttccctgcaagcaacaacagagtggttaactcaagtttacatggagggagattggggtctgtgcttctactagttaggaaacatttcttttgtaaaatcttaaagtgaaaaataaaactaaaaacacttagaccagcaacctctcaa

SEQ ID NO: 4446 - DNA, 2300 bp, Homo sapien
aagatcaattttctcacagaagctttctagccaaacaaacctcagaggaaaaaggaagtcaaagcagcatacaaaatggtctgatttttgcggttttaaaacacgtcacggctgggcaaggtggctcacgcctgtgatcccagcactttgggaggccgaggcgggcagatcacaaggtcaggagatcgagaacatcctggctaacacagtgaaaccccatctctactaaacatacaaaaaattagctaggggtggtggcgcatgcctgtagtcccagctactcaggaggctgaggcaggagaatcgcttgaaccaagagggcggaggttgcagtgagctgagatcgcaccactgcactccagcctgggcaacagagcaagactccatctcaaacaaaaaaacatgtcacaagttgatctgaagtagaatgtcaccagagctaaactgtaaagggaccagcacagagccttgtaataactggggaaatccaaatgcctggctccccatcattcattcatcactccagcaagaggtgagagaacttggaggtgggagtcctcccactgtaaaacgttccatcactattggaagttctgcctgggagaaggtttcgtaactgttttactatattcatacaggggaacgtagaattattataaaatgtaaaatgtaaataattctttttagcttgcttttaaggcaaatttttgtttaaaggagaaatgagactgaatttatacaacatccatccagactcctgcctccctggattaggagttagtcaaaccctgcctcctaaaattacccacccactcagatcagcaactagagcaagcctgccctgaactgctgctctgtgcaaagcactatttctaggtggagaattcagttcttcagcttagcaaatactaaataccgagagcttgtgatcagacactgtgttaagcgctggagatgaaccgaagagtaagacacagccctgccctcaggatccagtgggaattcacagacgagggcatggacaaccgtgtatggggtgtaagagaggctgctcccaacaccctggctgtgggtcacaaagccagcggggcctttgcgggacttcagcagagaaacaggaattgacaccacttaaagaaaagcagccaggaacgttctgatggtctactctacgtcagacgctgagactataagcgggccatgaaacggtatgactggaagcagctgcttctcttctggctatgacagtgggagggtcacagctaacttcagaccacagtaagtaaatcatcttgatctgaaaacatttcttttcaaaagcttttgaaaaattattttatttcatattgtagctactttggtattccacctcagttctactaagaggtggacagagcgtgagaactgtgcgaggtaaagccagctcacccgtcagacccacagatgggggcagacggcacacaaggctgcgaagtccccaagggtggggcgggggcggggcgggggggggtttgcacggcacctcggcaagggcggcatctgagctgagagggtcatgatgatttctaatagagcccaggttaaaacgctagaaagtgcagtgtgcagaaatttatcacagagcgttcggatttgagaaccagcaagagaaaaacattcgcagtgttctactgtcagctgagacagtgttcacataaaaacatacttggggcatttggacagaatcagtcagcctggttaaggatggaaatggtcatacgtgtcataccgtgaatgaaacacgtatgtatacctctttccacatctcagtctgactacacgagaggcgctgagagccagcacgtgacctgccacctccagcacgctccgcagttgcctccatggccaccgcccgcagccacccccctcacctttacgccagctagcatcccagttgtggacacgctgaagtcgagatatgcaagagtgtctgggttgcaaggtttgcagatctgggcaggccgcttctttggcaaatcatctggagaggaacatgactatcagcagatccagcctgagcaaggccgtgagcaaaccaccttctgcagctaaagcaccaacctgtgtccaggatgaggggccacgtcctgacgtccacagccgccgccgcctccctggaccgcagcaacttacagatcagctgtgtcgtcatcagacaggcagagcgactcacctggcatcagagagcgagaatggagccatgaacgtggacccagatgaaagcgtgctcacttcacacgggtctcctgcttactacatac

SEQ ID NO: 4447 - DNA, 2300 bp, Homo sapien
gggtgcgtgtggggtttccgggagaactatgcgcgatgtgtccgggtgagtgtggggtttccgggagaactatgcgcgatgtgtccgggtgagtgtggggtttccgggagaactatgcgcgatgtgtccgggtgagtgtggggtttccgggagaactatgcgcgatgtgtccgggtgcgtgtgacgtttccgggagaactacgcgcgatgtgtccgggtgcgtgtgacgtttccgggagaactacgcgcgatgtgtccgggtgcgtgtgacgtttccgggagaactacgcgcgatgtgtccgggtgcgtgtgacgtttccgggagaactacgcgtgatgtgtctgggtgcgtgtgacgtttccgggagaactacgcgcgatgtgtccgggtgcgtgtgacgtttccgggagaactacgcgcgatgtgtccgggtgcgtgtgacgtttccgggagaactatgcgtgatgtgtctgggtgtgtgtgacgtttccgggagaactatgcgcggtgtgtctgggttgggtgtgtgtgacgtttccgggagaactatacgcgatatgtctgggttgggtgagtgtggggttcccgggagaactatgcgcggtgtgtctgggttgggtgagtgtggggtttccaggagaactatgcgcgatgtgtctgggttgggtgagtgtggggtttccgggagaactatgcgcgatgtgtctgggtgcgtgtggggtttccgggagaactatgcgcgatgtgtctgggttgggtgtgtgtgacgtttccgggagaactatacgcgatatgtctgggttgggtgtgtgtgacgtttccgggagaactatacgcgatatgtctgggttgggtgagtgtggggtttccgggagaactatgcgcgatgtgtctgggtgtgtgtgacgtttccgggagaactatgcgcgatgtgtctgggttgggtgtgtgtgacgtttccaggagaactatacgcgatatgtctgggttgggtgagtgtggggttcccgggagaactatgcgcggtgtgtctgggttgggtgagtgtggggttcctgggagaactatgcgcggtgtgtctgggtgagtgtgacgtttccgggagaactatacgtgatgtgtctgggttgggtgtatgtagggttcccgggagaactatgcgcgatgtgtctgggttgggtgagtgtggggtttccgggagaactatgcgtggtgtgtctgggtgagtgtgacgtttccgggagaactatacgtgatgtgtctgggttgggtgtatgtagggttcccgggagaactatgcgcgatgtgtctgggttgggtgagtgtggggtttccgggagaactatgcgcggtgtgtctgggtgagtgtgacgtttccgggagaactatacgtgatgtgtctgggttgggtgtatgtagggttcccgggagaactatgcgcgatgtgtctgggttgggtgagtgtggggtttccgggagaactatgcgcggtgtgtctgggtgagtgtgacgtttccgggagaactatacgtgatgtgtctgggttgggtgtatgtagggttcccgggagaactatgcgcgatgtgtctgggttgggtgagtgtggggtttccgggagaactatgcgcagtgtgtctgggttgggggtgtggggggtttccgggagaactatgcgcggtgtgtctgggatgggtgtttgtggggtttccgggagaactgtgcgcgatgtgcctgggtgtgtgtgacgtttccgggagaactgtgcgcgatgtgtctgggtgtgtgtgtgtggggtttccaggagaacagatctaatggtgtgagcagtgagctcttttctgcacatgtcacaacgctgtggatgcactgggcccaggaagtgcagatgcagcagcttcaggccgcatgccctgcccccgtgcctccacaactagactcctagctctgtcctaccttagccagcaggagggctcggtaacctcatctgcccgttaaagctacatggttttagtgtatgtagtaagcaggagacccgtgtgaagtgagcacgctttcatctgggtccacgttcatggctccattctcgctctctgatgccaggtgagtcgctctgcctgtctgatgacgacacagctgatctgtaagttgctgcggtccagggaggcggcggcggctgtggacgtcaggacgtggcccctcatcctggacacaggttggtgctttagctgcagaaggtggtttgctcacggccttgctcaggctggatctgctgatagtcatgttcctctccagatgattt

SEQ ID NO: 4448 - DNA, 2300 bp, Homo sapien
atttttttgagagacagtctcactctgttgcccaggctggagtgcagtgatgcgatcttggctcaccgcaacctctgcctcccgggttcaggcagttcttcctgcctcagcctcttgagtagcgggattattagtgtatgccaccacgcttggctaattacaaaaatttttagtagagacagggttttgccatattggccaggctggtcttgaactccttacctcaagtgattggcccactttggcctcccaaagtgctgggattaaaggtgtgagccactgcacccggcccgatcctgacatcttttaaatctgccttcatgaaccaaaagccagtctatgtttgaaaatcagcttggaagagcctaggaggagagggatgtacttcagctaggtaaataactatgcatatgttaaaaatataggccacaatctacctcaaatgttaactcttctgctttgtattttatatccatttatggttattctttcagtattaagatttttaaagattcttttgacaattatggacaagttactattaaaactcagctgcatttgtaacactttaaagaaccaattggatgacatttttttccctgaggcattttggatagttatgtaattaacgtttataattcttaatagtgataacactaagtgttaaaattatggaacaatttgtttttctgaaaattactatctgcctgctcaccaggtgggagctgatgagaacgtggacgtaaaaattgtttttagcttgtataaaagaagttaaaaaaagcttgttttttgctactactgaagttgcttagctacagaaatgaggttattgcaggcacctagaattttacccccttcacttccacagtgggaataaatcctccaagcacaggaatccgacattctgatattgagactcctaggcataaagccccccatggaaggggggtggtgattacgtgaatgttggcgttgatacgggcatcctccaagccggacgcagggagcagggacgtgcagaaagaccaggtccctcaggagccatgaggaaatacggtgttggcagcagtggtgagggtcggtgtcaggggccaggaggaggtggcgaagggagcatgtgcctcaaggcagccctggaacccgcggtccttggagtgaggtctggtctgcagggggacacggacggccatgcggtgaggcccacagacagcctggacttggctgcctcagaaccctctggtgaacattgcgaacggccctgcagggttgcagtgtaaattcctcggacaaagaagacgcctggaactgttcccggcacgaagccagcaccctgtgaatggtggccgttgctgttgtgactgagtgccgtcgaactgggggcatttgttctgctcagttcacttaattgggccaggagtggggttgccatgccttcaacaagcttgacgtattgaacgagaactgagtcgataatgcactgtgtaaatacgctctcctggctagagtgagcaaagcccaaggaaggggggtggttcttcagtattagcaggtgtttgtggtggggccagctgtgcggctggcagggcgaatgcaccaggaagcctctgtccccccgaggtggccagcattcctgttacacatgctataggcagaaggtgggcactgctggggaacttgctcatgttcctgttctctgattggaaattcaaggtttctgagcatcctacatctgaatttgtacattgccaagactgtacacatttcagcactgttttttctgctttttggatctatacaacctggcatttggccgtggcttccaggacaggctggatggtgagtgaagtcctttcctcactgtcgatgtttgcagatgtctttttgtataaactttgtatttcttgagaggttcgattaggtttttacttaatgagacttttaaaattgccatgcacatgattctaccagttacaatcgtgagctaacgtgagtttttggttttactttgatgaatgtttaaacatgtgcaggctggacatggggtgggggtggaggtcatttatctacttttcatttccttcttggttatacttagtgactttcaggtaaggtgtggaaggcgtggtacagggtgaattgcaggctgcagtgtggcgcagtggaccgcggtgtggcacggtggacaagaagcatgggctgcggtgtgctgtggtggacgagagccacgggccgtggtgtggcgcggtggaggagaggcgcgggccgcagtgtgctgtggtggatgagaggtgcgggct

SEQ ID NO: 4449 - DNA, 2300 bp, Homo sapien
cccttagagttgagccgtttctgcccaggagtcctgcctttaatcctgtgtctccttgaggcccgttgagacactgcaagaagcgtcattaccaaattgccttttccttttacagcagttggatatatttgctgcaaaacaaaggaataaccccccttaaccctctaatatggtgattaaatgcatttaagtatagataaaattcagtcttgaatggcctggtgttttaatcatctttgggtcatgtaactagtgttgttggtgattaaaatctgacagctttgttctgccacaatcctcagttttgaatgatgatcttcctggttgtaccttgcagcggcgtttgtggcagtagagagcagagtggtggttcccagaggctgggaaaggacagaggtgaggcccctgcaggacgccggtgttcctggtttaggggatttgggctcagccaccttcctgtgtccatgtaaattatacccaggatcatttcactcgccccgcttcagttgagtgttggagcttcaggatgtgtgtgcccacatcacctgggccgtgatcctggagccaggtgagacggatttcccggttttatagaattactctgggattattaaaagcgcttgaggcattcaaatgcgatttactgaatgtaatactatgtggaatactcagggctgtgtgtgtttgggaacacccgtcttctgagcgaattcagtagggaatggagagaggcctcctgtcagcttggtcctctgtttccagcttgtgagggcgatgcccgctggtgtcccagggagagaaaaacagggtggcgtgggatggggaacgcttgctctgacgaagtcagtgggaaagtgtctacacaaacgtcggtgttctccgggctcatagaggtcaagcttgttttgtgttgagggaaaagtacccttgttccttaccatttgaatggtgtccaaggctctttctgctggagaggtgatgcccgtgagtgggggccaggtcgtgggccctgagattgagaggtgatgtgcgtgagtgggggccaggttgcgggccccgagattatctgagaggtgatgcgcgtgagtgggggtcaggtcgcgggccccgagattgagaggtgatgcgcgtgagtgggggtcaggtcgcgggccctgagattgagaggtgatgcgcatgagtgggggtcaggttgtgggccccgagattatctgagaggtgatgcgcgtgagtgggggtcaggtcgcgggccccgagattatctgagaggtgatacgcgtgagtgggggccaggttgtgggccccgagattatctgagaggtgatgcgcgtgagtgggggtcaggtcgcgggccccgagattgagaggtgatgcgcgtgagtgggggtcaggttgcgggccccgagattgagaggtgatgcgcgtgagtgggggtcaggtcgcgggccccgagattgagaggtgatgcgcgtgagtgggggtcaggtcgcgggccccgagactagagaggtggtgcccgtgagtgggggccaggtcgcgggccccgagattatctgagaggtgatgcgcgtgagtgggggccaggttgcgggccccgagattgagaggtgatgcgcgtgagtgggggtcaggttgtgggccccgagattgagaggtgatgcgcgtgagtgggtgtcaggtcgtgggctccgagatttggaatctgtcaactgatttcctaaaaacacagatgcttggtaaagatgttcctgattagctaaaacatttcaacaggacatgatggctggtggttgtttaaagagtatcacaattttcctgttactttttaaatgcctgttgaataggggagtattggtgtatatttttcttttcctgtctgcatagttgatgttttgtttttagttatgtgggggtgcagttagcaggatttagaagtagtctcagccctggggagacttcagggcagcctcagagtcagtgctgaagggatgcagggatttgggggccacctcctccataggacagacaccaagggacagaggtcagtgaggtcacaaagacggacccacccagcaccctggcccccgcgcctctctctttcacatttgtggctgctcaaagctgctctccttctgcgtcattacaggcgatctctaggcacgtgcttggttcttggagaagtggcgtctggctgtggtcagtgtgggccctcaggtcttccatgtttttggctcacatcagtattgggcagtggtgtgtttttgttttggagcgatcgggtggatttcggctttgataac

SEQ ID NO: 4450 - DNA, 2300 bp, Homo sapien
cctggtgtgtggggcaggcctgggccaggctccttggaggatgttacagagccactgcgtgtgcggggaccacccatctctgagccccacgcggattttcctccatagccgagcgaaatcctggtacggcgagcgaggcagtcagaggcaccttttgtggaaggaggacaaagctggagggaaggaggttttcctaaaaggcacaaggcactgatactgcgttaggagtaattcctaggagcgtggtagctggtgggtggaaaactgtagccaaagaataaatgggaatggcccttcttggtatttaactgattcgttcacgaatggtccaaacagttgtagtgaaaaaaacattttggacaccgatgttttcatcctgcctgacgatcggcgtgaccgtggggtgttccatccttcctgggcaacagtgagagggcctgacaatcggcgtgaccgtggggtgttccatccttcctgggcaacagtgagaggggctcaggcccttctggccccatgcaggcatttccccagggtgtgtcccccgtcctgaataggccggaatgcctctgggtgcagctgagcctcttgaaaagggaagagtcatgtgacatgctctcggtgaacaggaaaatgagggaggacaaggagaggggcctggaggtgaggaggatggtgaccaacaccagggatgggatggagggtaaccccggggacgggggacggagggtaactccggggacggggggacggagggtaacaccgaggatgggggatggagggtaacaccacttctccaggtgcctttgggggatgctgccgcccctcccaccccagagtgaagtcaacaggattctgtccccaggagccccagagcctggcagctgggattggcccagtatgaaccactgttcactggctctgcaccctgggacaggctccctggtgtttccgccccagtttcccatctggacagtgagaccctgactgtccccgtcacaggtgcacatggaggcctggactctagcatgtcatcggcactcgttagtgtcagccctcgttagcgtttcttttgtcgtggtccatggacgaagtggatcttgctttgtgtgttcacagacctcctgctcactttaccttctgggaacactttgtaaatagcttcgtatgtggggaggactcaagtgattaattgaatatttcatcaggtgcagttctctgtgtcccagcttgcaaaacgctcttttgacacaacatttggtgaaatttccagggactcctgtggtcagcctcatggtttcactctgtcactttctaatgcagtgttctttgggagtcttttaaattaggtgccctcatttaaaagtaagttttataatatgcagtttcaggttacttctttacctttgtgtcttaggcagtggctccccacctgtgagtagtcagaaaggttcacgcagttttccagggcggcctttgcatttactggaactattaagagctcgttcctgcttcagccgtgattgaagcgcagtgtgcgtgaggccgtgcatggcttagcatcttctgcaggctagaggtcactttctgtccttccccgagcctgctctgctgtgctgagtgttccctgtgggcgacggtcacgctgtctggcacaggccaccgaggccacagggcaggctccccgtaggggagcctgcagaaaggcagagcccggcctcttcgcggcctttcacagggagcagaaagcgtaagcctgttattagagctgtgctagcccagaaagcctccgaacagtgtttaatttaggaatcggctcctaccaactgcccatttttaggatgtatttgagtttttgtgattttttttctgcactgaagctactgtgctggctctgagtcactgtcatgggacttcacgttgccctgacgggaagcggcgggggaggagggctgcgcagaggcttgcggccgtgataatgaagggcttgttgcctcttgggacagtgagttcaagctgtttgtaattgtcagcgtaaacagtgacccgctgaggacacggctgtaattcagggtggcatggttgattgtcatcgttaatatcaggcacctgcgtctaaaatgacggtgcccatagtgcggctccaggagggctgggcagctcctgcccaacacacatgctcctgggccctggcagccaaggttgcgccgccggccaggcctgcagctgtgggtgcagcggggccttcagggcaccgagcgcctccctcgtttgctcgtggggcccacccctctgtccccagt

SEQ ID NO: 4451 - DNA, 2300 bp, Homo sapien
ccctctccttgtcctccctcattttcctgttcaccgagagcatgtcacatgactcttcccttttcaagaggctcagctgcacccagaggcattccggcctattcaggacgggggacacaccctggggaaatgcctgcatggggccagaagggcctgagcccctctcactgttgcccaggaaggatggaacaccccacggtcacgccgattgtcaggccctctcactgttgcccaggaaggatggaacaccccacggtcacgccgatcgtcaggcaggatgaaaacatcggtgtccaaaatgtttttttcactacaactgtttggaccattcgtgaacgaatcagttaaataccaagaagggccattcccatttattctttggctacagttttccacccaccagctaccacgctcctaggaattactcctaacgcagtatcagtgccttgtgccttttaggaaaacctccttccctccagctttgtcctccttccacaaaaggtgcctctgactgcctcgctcgccgtaccaggatttcgctcggctatggaggaaaatccgcgtggggctcagagatgggtggtccccgcacacgcagtggctctgtaacatcctccaaggagcctggcccaggcctgccccacacaccaggactctgccttgtggccctcaggcccccgaagctgctttccctccaggcgtcatgccccgggcaagaaggccggacaagggcccagggctgctgtgggtcgggaaaccctcccgacacctccctctccaaaaccccccatcagcatcccagcatctggacctgtgtcaccagccgctctgccgtacaagagaactggattttcagctgggttcgctgcttccctaaacaaagtagggttttgttactgaggaaaaaggaaaaagcgggcatcttcttggcaacctcgcgacatccagccgccggttctcaccacaccagagatgtccacccagggcagacagtgtcttcaaccgagcgccactgacccagaagtgcagtaattagtacactttcaccagagtcacccactccttcacctttacacccaagaataacatgtttgccaggcaaattagatgtccgggaggtgtaagggaaaccccaagcctgctttaagcctcagacttttgagatcgttgagggccgtgcacgcaagagcgaggctgcgcccaaaagctctgctcctgccagacgtcacaaacagaccgcacggctcagccacgtggacgcttacaggacttcacgagaggcaccaccgtggtacacgtgaagacgtgcacttcattcagcctcgaacagaccacgccctcattacggggttggtgacccacctcccaccatcagtcccccacctcacccagggtctgtgtctgcatctgtaacgactttgctgttttaccggggtactaaaatgcagcatcggaatgtttaaaggtctttaaatatcaacactctgggtccagttttcggcactttaatgcggacactcgatgcaggcctcactcaccactctgaggtagctcatacctttcctacctaaccaagcaagaaactgaggcacagaacgtggcaggaaaatatgcagcttctaagtagcagattaggattcaaaccagtgctcttcgtcacattgctgacctacctctcaggctgagataacgtccaaaattaaccaggtagaacagtgttccataaatcagccagaaatggtccttgtggatgggcctgtggttattccctgaagaacgagaccattggcccaaaaatccacctgtgtcacattcaaatgtttacatatccaattacttaaaaaataccccaatcaagcatgtttacagccatttacagccatatagattatctgctttggtgacaatcaacccaagacctctgttggcaacgggcatcatgccaggtccagagagggtgggacagagacacaaacaggaaacgctctgtccctgggagcctcgctctgatgggcctgcggggacatggcacagaccatgcggcacaggcggaaggcggggacacggcacagaccgtggggcacaggcggacggagggccaggagaaggggctgtgctgccagcaggcagtgctttgagctctaatggatgaacattgctaaccagcgaaggtggagagagggcacccgtctgagaagatgaagaggcagcaaagcacagctggcctcggggaaccggaagccacagggacatcaggctgtgtgctgctgtctgtcggccaccagctgggggactatcct

SEQ ID NO: 4452 - DNA, 2300 bp, Homo sapien
gacggtgggagagaacagagggaaactgagtccacgtcgacattggatggtgggagagaacagagggaaactgaatccacgtccacatttgatggcgggagagaacagagggaaactgagtccacatccacattggacggtgggagagaacagagggaaactgagtccacgtccacatttgacggtgggagagaacagagggaaactgagtccacgtccacattggacggtgggcgagaacagatggaaacagtccacgtccacattggacggtgggcgagaacagaaggaaactgagtccacgtccacattggacagtgggcaagaacagagggaaactgagtccacgtccacattggacagtgggcgagaacagagggaaacagtccaagtccacattggacggtgggcgagaacaaagggaaactgagtccacatccacattggatggtgggagagaacagagcaaaactgagtccacgtccacattggatggtgggagagaacagagcaaaactgagtccacgtccacactggatggtgggcgagaccagaaggaaactgagtccacgtccacatttcacagtgggagagaacagaggcaaactgagtccacgtccacatttgatggtgggagagaacagagggaaactgagcccacatccacattggatggtgggcgagaacagagggaaactgagtccacgtccacatttgagggtgggcaagaacagagggaaactgagtccacgtccacatttgagggtgggtgagaacagagggaaactgagtccacgtccacattggatggtgggagagaacatagggaaactgagtccacgtccacattggacggtaggagagaacagagcgaaactgagtccacgtccacagtggacagtgggcgagaacagagggaaactgagtccacgtccacatttgacggtgggagagaacagagggaaactgagtccacgtccacatttgacggtgggcgagaacagaggaaaactgagtccacgtcaacatttgagggtgggagagaacagagggaaactgagtccacgtccacattggatggtgggagagaacagaggcaaactgagtccacgtccacatttgatggtgggagacaacagagggaaactgagcccacatccacatttgagggtgggtgagaacagagggaaactgagtccacgtccacattggatggtgggagagaacatagggaaactgagtccacgtccacattggacggtgggagagaacagagcgaaacttagtccacgtccacagtggacggtgggcgagaacagagggaaactgagtccacgtccacatttgacggtgggagagaacagagggaaactgagtccacgtccacatttgatggtgggcgagaacagaggaaaactgagtccacgtcaacatttgagggtgggagagaacagagggaaactgagtccacgtccacattggatggtgggagagaacagggaaactgagtccacgtccacatttgagggtgggagggaacagagggaaactgagtccaggtccacatttgatggtggcttttaatgcactgcagggtgtgtccccttgaccttcacgaattttcaggtagtaagaaagcaatttttcttattggaaaggagaaaactaagtgactgtaaaataatataatttccttaaagcaaaacaacagagaaccaacttttccttttttcacattacccaataattctaagactcagggttttgtcacgttacagcaaatgccattcattgggggaagtcggaagtcagaacagtgtgtgctattcaaattctcgatgaataattaactcaaatgtgttcagagtgctataaaatgaaattaatttatttttagtttaacccaaaatccccaatcacttgccaaatgatcctctatgtatcctacataaaagacagggtctttctggcagaaaaccattgaagtttttatttgcagtaagagaagcatgccttattatcaaacaggtgcatggtccccttgtgggggggtgcccgtcacctgcgtccccgtgcgtcacggcgttgccgcacaccattaacacatcaaaacggaaaaggaaatgtaagcagtgtttgccgtccaaagttcacatcaacaattccttattaggaaggcaattctgagcctttcctcctgcatctgggagctgccagcaacccagttccaggagagaaaatagcttgacacctcctgcggcccatggagtcctcccgttgggacaaggaccccccaggag

SEQ ID NO: 4453 - DNA, 2300 bp, Homo sapien
cctaaatggacttgacaccatttattgcttggaatgcacagtgcatctttgctgtaatgaaatgaactcagggctttgctttggagactggggtttgaatcctggttctgctcccctttctgtctctaaggacttttatctgtgacgtgtaggggctgtgtgggatcttccccacggcccctgcattgctggtcggtctctttatcatgcaaaggggagagatgatggtggggccacatgcttgtgccacccgtatctgttgcattgaacgcagtctggagcgaaggacgaacccacggcgcacaccaggcggaggcacacggctcggcgcaggaagcacacgggtttggggttcctgtttcccagctcatcgtcgaatgtcattctcacaattccccactgaaaggaccgatccttacaggaaatgcacacacctctggcggttgccaccactgctagatccatgggaagggcaaaggtgggtgaggcatgggctctgtcctccaggcgcttacactcacaaagaatacagagaagataaaaaaggtcaaacgtgatgagggcgggaagtggccggtgcaggaagagaaaggagagagattgttctggacctggggtcagggatggctgtgggtggcaggggcagagaaggggcaggctctccggggtggaggccgggagcagaggtgctgcgggtcagccgcgttgtttgcaggagccggagtgtggaggccgcaaggctgccgtgcaggtgggtcccggctggtgggggctccggtcgaagcggggtgggggggtggtggggggtaggggtaggggggtgaggtgggggacctgtgttcctgcggcccactctgaaaggggagtgagtgcagctgggcctccgggagccagcgctggccaatgtcccgtggaggacggggaggcgaggaggtctttaggaagctctgggcctaagggaggggccgggctgggaagagggggtacaaggatgaaaaggaggccaggtcgtcggggctttgtgcaacagactggggaggatgtgtggagacagaggaaggtgatgatgaagacaacgggggcggttctgagaagcagaacttccagtgactaagagtcactggaagcagctggcttcatttagggtttgtggcgtttggggtgtctaggggcttccagggaagtttgctcagtggacggttggagatgcgagggcctccccagatggtcaggactagaggcacagacggggcttcagcctcgccgaggtggcactgaggctgggagctgatggccccacaaggagaaggacggtgggaaccctggggcctgcagcctgttccgggagggctggagccaggcttttcgggcccacctggcatttggagattaggtgacccaaccttgtcttcccatccccttttcacagatggggacactgaccctccaggcaaaggctcagagtcgctcaaggtcatctgctggtcgttgcattcgaaacttccagcctagcgctccgtctccgcctcttaaaatgttcattaacaaaaaaccagccctccaagacccggggcactgcgagttttcgcgcagacgtcaagctgcggctccaggacgtgattttcgcagggagccgggtggaccaggctctggggccgggcccgcaggctccgctggacgcgcagagcccaggacagacaagaccgccccgccccgccccgccccgcgggccccgagcccccaacccgcccccgagcgcgcccccgggagcgcgcgcttcgccgacgcggccgcgcgcccccccgcgcgctcccgctcctgcgcgtcctcgcgccccgcgcgcgcgcgccctgcccccgcggccccgtgacgcgcgcgcgcagagacgctcccgccgggccggggccgagagcagcagggccgggtccgggtccgcagcgcctgcggggaggggccgagcgcgcgcggggcgggccggggaccgtggggcgcgggggcgcgcgaggcggccgtggcggggccgcgctgaggaggcgccgaggggagggaggtccctgcgcgcccgccgcccgcctcccgcgcccgcgccgccgcctcctcctcggtgcggttccgccgggcgcgaggagccgccgagacctccgcctgcgaacaaagaggaggccgtgcggggcgcggcgcccgcggagcatggcggaccgcagcctggagggcatggcgctgcccctggaggtgcgggcgcgcctggccgagctggagctggagctgtcggaaggtaaccgggcccccgccccgggccg

SEQ ID NO: 4454 - DNA, 2300 bp, Homo sapien
ttagtagattggggtttcacagtgttggccaggctggtctcgaactcctggcctcaagtgatctgccctcctcggcctcccagagtgctggaattataggtgtgagccactgcaccctgccagttttctgttattttgtattttttattgttttgatggagtctcactctgttgcccaggctgtagtgcagtggcatgatcttggctcactgcaacctctgcctcccaggttgaagtgattctcctgcctcagcctcccaagtagctgggactacaggtgcccgccaccgttcctggctagtttttaaattttttagagagatgaggtttcaccatgttggccaggctggtctcgaacgccttacctcaggtgatccatccgcctcggcctcccaaagtgctgggatttataggtatgagccaccacatctgaccttttttttttttttaattgtgtatacataaggtatatagcatgatgttttgatatacatagtgaaatggttactggagtccagcccattaatatagccatcatttcatatagttttacccttcttttgtgttagtaagagcacctaaaatatactctcagcaagtttcgagtgtacaatacaatattacaactataggcctcatgttgtacatcagatctctagacttactcatccaaaatatctgtaacttggtaccctttgacattgatctcttcatttcctccctacctgctagccccctggtagtcaccattttgtgtgtgtgtgtgtgtgtgagtgaggtggagtttcactcttgttgcccagtctggagtgcaatggcactatctcagctcactgcaacccctgcttcccgggttcaagcgattcttgtgcctcagcctatagtagctgggattacaggcatgcaccaccacacccagctaattttgtatttttagtagagactggatttctccatgttggtcagacaggtctcgaactcctgacctcaggtgatctgcctgctttggcctcccaaactgctgggattataggcttgagccactgtgcccggcggtagtcaccattttattctctgtttctatgtatttgactttttaagatagtaactttcacatatgagtgagatcatgcagtatttgtgtttttgtgctggtgtgtttcacttggcataatatccttcaggttcacccatgttatagcatacgacggggtttccttctttttaaaggctgaataatacataattccatagcatagacagacagatacacacatcccaatttctatatccgtttgtccattgatggacaactatgtggtttctatgtcttgactattgtgaataatgctgcaatccacatgggagtgcagatattcttatgaggtggtgatttcattgcctttggataaatactcagaaaggataatatggtagttctattttcaaatttttgagcaacttccatactgttttcataatggccgcaccaatttacattcccaccaacagtgtgcaaaggttctgtttcttccacgccctgttatctcttgtctgactgataatagtcattctgacagttgtgaggtgaaatatcattgtggttttgttctgcatttccccaataattagtgatgccgagcaccttttcgtatttctattgccatttttctgttgtcttgggaaaaatgcctgttcatgcctttgatcattttttaaccaggttatttatttatttatttattttgctatcgagtggtgtgagttccttatatatcttggatattaagccttcaattttctgttttttaaaagacttgagtttccaggcacaaatgggtttatttgtgtcagcacatgagtttccaagttttagagtgtggccatcttcaccaaaatggtgtgaagaagaaacttacttatttaaaaaattaagtatcacttcttggtgagtaaggtatgcatatgggaagacttctttaaacttttttgaattcagagggataaacgtgtgtcctggaaaacttgaggattttaattttatttaaataatcatactgtgcccttcaaatgacctgtttaatgtctttgccattttacagcatcctgaggttagcattacacttctcccagtggagcccatgacttctgatcaggacgctaaggttgtggctgaaccgcagacgcagagagtccaggagggcaaggacagcgctcatctggtgggtgctgtcgaatggggtggtggggagtccattgctttttttgataaaggactctatattggagttagtaaggag

SEQ ID NO: 4455 - DNA, 2300 bp, Homo sapien
cagaggcgtcctggcagctggaacctgctaatgcagtcaggaactggcaatgtgcctcgtactgcaggcagcatttgcgacactcctcagaaaaggcctttagagtttggcttccccagagaagcccagaagtgtatgataaagaagcttgctcctagtggtgtagaatacatacttgcccccaagaagctatactctgccacaaaatcacaagaacaggcaaggatgttgattctcatcaacacgcacatggtgtaagatgcttggtaccttatcattgttatagctctgggcccatgatgagtcattatggttgtgcattcacagacatgcctttgtagctgaacaagttaaaagcaggtggctcatgcctgtaatctctgcactttgggaggccaaggtgggtggatcacttgaggtcagggtttgagaccagcctggctaatatggtaaaaccctgtctctactaaaaatacaaaatattagccgggagtggtggcaggtgcctgtaatcccagctacttgggaggctgaggcaggagaatggcttgaaccctggaggcggaggttgcagtgagctgagatggcgccactgcgctccagcctgcgcgacagagtgagattccgtctcaaaaaaaaaaaaaaaattaaagaaaggatgtttgcccatctgaagcaaagtattgactggacttatctaaataccggattacaagaaaaagaggaactggctatatcagagtgagagaaagtgggagaggttgaggaaacatacaagaacctaaaagaaagggcaataagtatgagcatagctttgctaatctcggaaatggtggccagaactgtcctgtggtttagcaaatgatcatagccagcaaatcctaattaccctagaagcttcctttagaagtgccacaaagatgtaggaggtatgcttatccgccttgtgacacaaaaatggaagcatagttaatagatgagaaaagcatgacccagaatgattttcaatattggaatgctgggaatttatgagaggtattttcgcgtaagaataataggacttgtttaaaaggattggagagtggggggcatcccagatgcgtgagaagcagtatagctaatggttagaagcaggtttgctggagccaggctgcctgggttcaaagcccacctctgctgcctgttagcttgtcagctgcacaaccacggggtgctttcgagccttgtgtgcctttgtttccccatgcacttcatgaggctgttgcagaaattaaacgagttaatatatagtcagcagctctgaacactgcttgactgagtcagccctacctaacgtttaatttaagggatgtggccctgggttcccaaagggagcggccactctattcacaaacataaaagcagtaaaggctccatcctcatcaaccttctcctcagttggaccccacaggactgtctctcgcaactgttccctgggctctcctaaggcactgcgcggaaccagctgcacctcttttgccttagatcaggctttcccttctccgcccgttttgggatttaacaagcacgagaaagcagggctgcagggaagccgcgagggcctcctcaccacggcccgggatcaagtcccacgcgcgaggccggggtaggggcgtcatctgctccacacccagaggctgggcacgccccgcacgcgcggcttcctcctcctttgcggggctcgccgcgacccaggacccccagactcccggatcccctagaccctctggactcctaagccccgcaactcccaaatcccaagaccccggaccctccaaccctggcccagggcgcgtggctgggggcctgaacccgctccagaaacccgcagggcagtctgtcggaaacccccgctttactcagcaggaatttagtctccgcgctccccctaaaacccgggcgtcctctcctctgtaccctcgctcctgaggccctcacacgccctccgtggctgacctccaagccgggcgggtgcgctgtgcgacgcggaaagcgccgtagagcacgcagaacacgattggctgagctcccggaagtgacgtacctcaaccgcccgacagtggaagtcccacctgcgcccgacggcggaagttccgggagtgccaagtacccgcgtgcatacggctgccggcatggcacattacaacttcaagaaaattacggtggtgccgtccgccaaggtaggcggccccgggagggccactgcaactttcgcgttctcctcagctgggtccccggggagggtccgggcctgtagccgt

SEQ ID NO: 4456 - DNA, 2300 bp, Homo sapien
ctcgacttacctctcttgaaaatgacttccaaagaggcaggtattttatctaatgcatttttgtaacacagtacccgatgcacaggacaggcactcactcaacatcttctagaatgaactgaataccacactttcccgatgtgattttttttttttacttccaatcaccaaacaattaccatcacccagtttttagataagtcatctgttctctaaaaatataaatctcactccacagaacagaagacggatggtgtataatatattctaaagttctccacataagtcaataacatgaacaaagttcatataatccaaagagcaaattccttcaacaaacctgagagatggttgaccaaaaatacaaataagacatgactcctgcactcgaaaatactacaatctggctgggcacagtagctcatgcctgtaatcctaacactttgggaggctgaggcaagtgaatcacttgagattaggagttcaagaccagtctggccaacatggtgaaactccacttctactgaaaatacaaaaattagccaggcctggtggcgcatgcctgtagtcccagctactcgggaggctgaggcaggaaaatcacttgaacctgggaggcggtggctgcagtcaggatcacaccactgcgctccaacctggccaacagagcgagactccatctcaaaaagaaagaaagaaaatactacaatcgatcaagagatgtgccagaacaactgtcaggaagaaataagaaatggtggagagaagtggggaaacaacttttgctatgaaggtaaaatacgagactcccacaaagctttccaaggcaagctcatcccgtccttgagacctgaagaaaaggaggcactgacgaggggaaaacagtcactctgcagggacttcagtaactccctctcgtgcaggagtccctgggaggctccagttgcccgtcaatgtctgtgtaattgcgacccaaatcgaatgttcactacataaaaacgtgacttcttaaaagtcctaatactagggccgggcgcagtggctcacgcctgtaattccagcactttgggaggccggggcgggaggatcacccgggatcaggagttcgaggccagcttggccaacgtggtgaaaccccgtctctactaaaaatacgaaaattagctgggtgtggtggtgcacgactgtaatccctgttactcgggaggctgaagcaggagaatcgcttgaacgcgggaggtggaggttgcagtgagccgagactgcgctccagcctgggaaacaagagcgaaaaactatgtctcaaaaaaaaaaaaaaaaaaaaaaagtcctaatactcaacacttgttgactcattcttgccacaccaaccaacgctgtaaaaatttagtctgggcctactatggtctgaaaaggaacaggtattcccaaatctaacagtgaaagagaatgacttaaaaattatgaaacgttaaatcacgagaacaacgaacccaggattcctgagaggggagggggctacgccaaacccagaatccgaaggctcatcacggaccacggaacgcttcctccctcacatgtcggggtccccctccactcgcccacatcgtcacccggggcccctccagggaacccaactctgggtgtacccccatctctgggggccctcagtctttgggtggaccacggtcttaggtggaccccggtctctgggggatccgatctctggtggaccccggattctgctgggggaggggaaatgatcccgagtacgcggccagacggtcaggcccaggagcgggggatgggcgagcggaaggcgaccgctctcccacggctacaggcccggaccctccccggggacccagctgaggagaacgcgaaagttgcagtggccctcccggggccgcctaccttggcggacggcaccaccgtaattttcttgaagttgtaatgtgccatgccggcagccgtatgcacgcgggtacttggcactcccggaacttccgccgtcgggcgcaggtgggacttccactgtcgggcggttgaggtacgtcacttccgggagctcagccaatcgtgttctgcgtgctctacggcgctttccgcgtcgcacagcgcacccgcccggcttggaggtcagccacggagggcgtgtgagggcctcaggagcgagggtacagaggagaggacgcccgggttttagggggagcgcggagactaaattcctgctgagtaaagcgggggtttccgacagactgccctgcgggtttctggagcgggttcaggcccccagccac

SEQ ID NO: 4457 - DNA, 2300 bp, Homo sapien
tcacactgccccatccacagctacattcacagccccattcacagccccattcacagctcattcacagccccatccacagccccatccttcatcctcatggtgcttcatgaggtcaatggtgtagatccagcctggactttgttcaccgtctgcccgctgccaacctggactcccgtggacacagctgagactggatgctgtgtgtacctgctccccaggaattcccagctctgcttgcagacgcctctgggctgccctcctcactccgatggcatccttttcttccagttctgctgggttgtataatgggtggctactacaggagtcggtaaaataccctggaaaaaatgcatgtgggaacatccctctttattcctgaaaagtgaatatattaaatacaaatgcagatgcttcatgtaaaaccatcatccgtcatcagcagaagacagcctggcggggggagtgggtttgtcatgggctctcagagcagcactcgcctccagcctccacggctgtgggcttggtgagggtcttccacatgaccacctggcggggctggccctgaccgctcctgcggcccttcctgcagatgtgcacacacatgtcccgtggcactatcccagtatgtcttaggagagggactggttcctactcagttttgtacccacagaggacctgagatgccatggggtggcgggaggaggtggtggggctgtgggctgggtggctgcaccagctgggctgaggaagctgggctgcactttgagggtggtgatcagtgagcatggtttcacaggaagactgctggaatacctttgaccaagtttccttactgagaggttctacttaatttacccaagtaacagcaatagcgctatgacgggaggtcacactctcctcagtaaatctctgttccctctcgttcctcagaccctcagtgcttccttcggtcactctgcaaggagtttggctgaagttgaatccactcttgcaagtacaagagctggtactcccacctgcccctatgtatcctggaggcggctaacacatgataggaaatcttagctccaggggctttatttgcaaactgttgactatgtactacagttgaccctcttaactttgcagctcctgaatttttctgaaacaaactttgcattcagctccatcaaggagcccgtgagtacaacttgaccagcaagtatggtggtgggtttgggaatgggcaggatgtacccactgcggctccgaggaagaactaagggaggagaaaacctcggccacagctggccgtgcttagccattcgctttaatggctcaggcaaggtctggttttgaaaatttgaggacagcctaggccaaaacactttaaatgaccacaattgacgtaaatgctgttcccctctaaaaaattttttggccgggcccggtggctcacgcctataatcccagcactttggaaggccaagacaggcatatcacgaggtcaggagatcgagaccatcctggctaacacggtgaaaccccgtctctactaaaaatacaaaacgttacccgggtgtggtggcgggcgcctgtagtcccagctacttgggaggctgaggcaggacaatggcgtgaacccaggaggcggggcttgcagtgagccgagatggcgccactgcactccagcctgggtgactgagccagactccatctccaaaaaaaaaaaaaaattttaagttgtaattttaagaagtacaagataattaaaactctaagacctgtaagataatttttattattattacctagttaattttatgctaaatgctattttaatcccctaaatccttaggttgataaattcctctgcatttaagtaacttgccgttgcaaagaaacaacaaaacaaaaaaacccagaaactcatatagtttcttacttttttaaaaaagaaaacccagcctactgaagagctatcagcataattagcatctgcctaagctgccgattttctgcaggatgagctgccagctcaccacagtgcggcactgagcaccagagagttcctgtcccagattcctccggtcaagtcacatgagatgctctcttcagtccggggcttggttgaacggactcaccaggaaacgtgactttcgtgtccgacctctgctgtatcaggattcgattcttggtgttaaacaagacaacgctgaaggctcggtgcagcagccctgcaaaggtaagtgccatttgtgtgagtgcatgcctggagtctgtacgattgtccttcgtgctttttgtcctcagtctgtttc

SEQ ID NO: 4458 - DNA, 2300 bp, Homo sapien
tctgtgggtttaagtcatcttgtgtgtctgggatatttttctttattattatggctctcttgttcaaggataccccttttagcacatgctgtatttgttttaccctctctttcatacctacaatacttggcctactcctttttaactctttccacttccatttctttttacctgcttttcccagtcttggcctccatgtccttctctatatttcactgatatctagagccctttctgttgcttctaatttgccttaatcagatgtaatcatctattcctagagtttattcttaacctcctacctgcagcattataggtcatcaactgtcattcttaaagttgtcataacctctcttaagaaaattctccgcatatagcctaatcaaaatgtcttccttcctttcctttataatgttttttgtgtgctttatgtgtcagaaccttgtacccagatcaacctagcaaagggtttccctccttttttatcccctagaacattttacagagaatgacaattccttccttgaaattttgataacatttgcctctaaagctttcagtgcttagtttggtggtgacgatcccaacatgttaaactgcacagattctgggggctcagctgcatctgcagccacattgccttgggcaggtaatttacctctctgtgcttcagttccttatcgatgctgtgataataaaaaataacgcttatctcagaaagctgtcgtgaggatcaaatgaattaatatacattaaactcttaaaatagaaactggcacaaaggaaggacacaatgtgtgtctggctgtcttactattattattattactattagagttgttggattataataggtacggtattgtatattagtttcttcctcaaagcctaattcatagacttatttattattttttagatctttaaaagagtatcattctcccattcttactcttctgactgcaaaagaaacaagtttcaaacagaccatttattcctgagtctcagaactgatttccagggaaaacatttcaggcatagccttttgattttctacgtaactaaaaattacatgcataaaggtgaacttatggaaagacaaaagagcaaaacacattaatctttttatagaatattacccatcactgctgctgtgttatttttgttctgtattatccgtgccaaagtcagcggagtcatgcgtccatcgtgcttctctcctcatattccctgagagaaccgacagatatggcaaacatttttttgatattttaagagaccctacttgcaaaactatttggcctagagctttagttggtagatgatatttggaatatgataggcaagaaattatacagttttttagctcttccaaacacattggtttccaaggtcttgcatttatttatcgattttcagctatcctaagaatttattcagtaattttagtcacaatgtttattatttttctcttccatttgccacctttattttttctttttaaaatctgggatgatatatacagcaagtgaattaaaaagatgccatcgaacggcgccgtggctcacacctgtaatcccagcactttgggaggccgaggcgggcggatcacctgaggtcaggagatggagaccagcctggccaacatggtgaaacctcgtctctactaaaaatacaaaaaaattagctgggcgtgatggcgggcgcctgtaatctcagctactcgggatgctgaggcaggagaatcgcccgaacccgggaggcagaggttgcagtcagccgagatcacgccactgcactctggcctgggcaacagagctagacatcaccttaaaaaaaaaaaaaaaaagaaagccatagagtagaaaataacttaccctaggtttaaaaactaaaagcattttttaaagtgagattgtgtcaaaacaattttctattatccctcaattgagagggagaaagatagagagaaagagatggagagatagagagagaccggggtgtgttttcttgttaagaatacaaaaatatcagattgccttagctgatatctttctacatccccagggtataaaagggccctggttcaacttgcacattgagttccacatctgatacccaggagtctccagcttccaagagaggttagtgcatatgttttaccttgtgggaattctttcttttatgatctaaatttgtacatattcagtaattgttttctctgcatttctattgtatctcatgtccatgcattaagtcaaacagccttttgcaaagaggaggagcagattgctgaaaat

SEQ ID NO: 4459 - DNA, 2300 bp, Homo sapien
ataattttatggaaccactgtagtatatgcagtctgtagtgtaccgaaacaccatcatgtgacacatgtatgtacacagtggatatacacaggtgatctgcaaatattatgccattttatatctgaaacttcagcatcctcaaattttggtagctgtgggaggtcctggaactaactcccatatataccaaaggatgactgtatataaaactagcctatagaagttggaaatctttctaaaattgaggctaactctgaagttgacttccttttcacattattttccctcttgatttgttttaatcattaaccttatttcagattttttgtattagatatcaatatctccatcatcactgactcctgacacacgcattcacacacacacacacacacacacacacacccagaccctatgtgggtctagaactttgtattaagtagctgtttaaacactttgtgtacattctgcagtatgcttgaactctgttgaaagtatttcagtggtccccgtgtggtggctcactcctgtaatctcaacactttgggaggccaaagcaggcagatctcctgaggttaggagttcgagatcagcatggccagcatggcaagacttcgtctctactaaaaatacaaaaattagcctggcgtggtggtgcacgcctgtagtcccagctacttgggaggtcaaagcaggagaatcacttgaacccaggaggtgggggttgtagtgagctgagattgcaccattgcattccagcctgggcaacaaaacgagactccctctcagaaacaaaaaagtatttcagtaaaatctatgtatttgaaatagagtcacatagaaagtagagcacatgggatcttcaaaatatattgggtagaaaaatcagaaaacaaaaattattattcattcagaaataaaggagaagaaaaaagggaataaaaaacttcaaggtcagactatgtaaaggtgccctgaaggatacaaagattagaaagcttagacgctgctggatacagatatgtaaaagtgtgagtcagaatactgaaagtaccctaataagtgctttacgttgtaatcacatgggagggataaatgggggttcagaaaattaatgtttgatgcactaaggtaggaatgggccaactatggcctataggccaaatctggcctgctgcctgttgttacgtcctgtgagctgagtgtttttctcatatttaaacggatggagaagaatcaaaatattttgtgacacatgaaaattaaatgtaattcagtgtccataaatattggcatgcacccacactcagtttacatactgcccagttcacctattgcctgtgactattttagtgttacagaggcagagttcatactctctggcccttcacagaaaaaacttgccaagcactgccttaaagcatctattgaatataacgaattaagtcttctcctgtttatctagaatgatatcagctaagtactgtcctgggggaaattgacaaaactcatacaaataatttttctgataacccaggagcttgggttgagaaaaactggattaagtcttactgtgacattggtagaaaggttattgaatgtctggcacgagttgtgccttgaaaaaatggatttcaaccaagattggcctgtggcaatcttgagcaactatgcagagacaggcagtgggaaaaacaattcaggatggcaatgggagcacattctagagattacagaagctggtgtagaaaagcaggatgaaaagttaggttggggccaaaaaccagagaagaaaagtacactggaaaaaggattgagtatcaagtgctgcagaggatctcagaggtcaagaatttagagcggaacgttgagcttggccttcaggagcatgactgtgataaaaggccagctgtgaaacctgtaggagaaatgatgacccagatagtgctgagcagccggctggcagcgttcttggggtccctgtggggatgcagagtggtacaactgcagatggggaagcagcatcattattaacctgtgtttatatgacattcagaaaaatatatgatggcctttctttctcttttcctttaatattagtgttctagaacagatcagacattttgtaatgatgcctgaaataaacactaaccacctcgacaagcaacaggttcaactcctggcagagatgtgtatccttattgatgaaaatgacaataaaattggagctgagaccaagaagaattgtcacctgaacgagaacattgagaaaggtgctgctttgaaacagtctttcttg

SEQ ID NO: 4460 - DNA, 2300 bp, Homo sapien
acaccacacagcccagctgctccactgtctacaccacacagcccagctgctccactgtctacaccacacagcccagctgctccactgtctacaccacacagcccagctgctccactgtctacaccacacagcccagctgctccactgtctacaccacacagcccagctgctccactgtctacaccacacagcccagctgctccactgtctacaccacacagcccagctgctccactgtctacaccacacagcccagctgctccactgtctacaccacacagcccagctgctccactgtctacaccacacagcccagctgctccactgtctacaccacacagcccagctgctccactgtctacaccacacagcccagctgctccactgtctacaccacacagcccagctgctccactgtctacaccacacagcccagctgctccactgtctacaccacacagcccagctgctccactgtctacaccacacagcccagctgctccactgtctacaccacacagcccagctgctccactgtctactgtctacaccacacagcccagctgctccactgtctacaccacacagcccagctgctccactgtctggtcctttgtctacaccacacagcccagctgctccactgtctacaccacacagcccagctgctccaccgtctgtctacaccacacagcccagctgctccactgtctaggtctgcgtcagcgcactctgcttccacaatgatgaaagtacctaacaatgaacttctccaaagtatccctgttaagtgatgcgggccgaacgttaaattatcatctgtagatgatctcttatagtatctaaaacatgtaaatcctacataaatagttgtgctgtattgtttacagaataagtctgtatatgttcagtacagatgaaatttttttccaaatattttataatgtgcagttggttaaatccatggatatggaccccaaggatacagtaggccaactgtatattaggtgatcactaagataggtttcgttactacataattactagactttttgacatgactttttttccggggggatggggctgggtcttgctatgtctgtcgcccaagctggagtgcagtggcgcgatctcggctcactgcagccttcgactccgcctcccaaagtgctgggattaaaggcgtgcaccaccgcccagctgtaatgacaattgctctttcaggattttcagaattcagattttaaagctaagctgcataatcacaagataaaatgaatacgtctatttatgcgtttaaagaataccatgtagtagacgcgggaacacatcatccaacccaagaaaaaggtctagttccatctatgcgatgctccccatctcttctcctgctccattcccaggagaagcgccttgagtgtgttgctgtcaccctcttgcacggacgcaggtgtatgcacccgcgtcacacgcgtggactcggcacggggaggccggtgtcgtcacgctcgtgtttctgacgatgctgtctacgcttgtttctgaattctctaaggggagactcgcaactcttagtctcctgcgactcggtttccagttccacgagttcctaaacctcaggtgactgtgcgcagacgacgatcttttccgctgacaaagaatggcaacgtctctgacgccccgactcacgcctccgccttccacggggcgcgggcgcccaccacagcccgggaaggcccggcctccctccagttcgggagaccaacgccgccacccccagctgtccaggcctccgcgccgagacctcacgggtggctcagacctcgggcctcctccccgccccgtcccgcagctccccgatgccgccctgcccctgtctcccgaactccgccgcccgtccacagtacctgatcagcctccggccacagacaaccgccggtcccggatggcgcccgctttgagcacagtctgcggcgcgcaccgcccactggccccgcccccgggccgcgcagccaatcgctcgcgccagcgccagtccacgccacatcgcccggccaattggcgcccgtacgcgcttgacgacacaatctcgccaagcttcgcctggtggtgccacctccctggcctgtgacaacggcagacgcgcgaagcaccgggaacctgagccgtgaccgcgggctctggcgcctttaagggggtcaacacgccccacccccagttccgcagaggcagcgtcccgcgactgggcggtgcccgagaccacagacgccgccagccaatcacgctttcgatcctgccgt

SEQ ID NO: 4461 - DNA, 2300 bp, Homo sapien
attaacaatgtgattgatattgaataatgaaatgttttagcatttggaagatctgtttaattcagtaaatcagtattttccaaatgaccaatgcatgacatttcaacatcacgcacaggaaaataggcattcgaggtacagtcaaaaataatgagttttaatgtaacaagtacaaaatgtccattgaagtggtttcaaattccaaatagtaattggaaaatccaccactcgtgttttggggtagtagtatcgaaaaagaataaccaagataatttgaaaaggctattaaaaaatacttctcaattttcaaactgcatacagcaggtgctcattcatttctttgtaacattgatgagaaaaagactcccagccaggggcactgtctttgtggtgtttacgtgttctcgccacacctgcataggttttctctgggtgctgcagttcttgccacatcccagaggtgtgcacgtgaggtgaactggtgtgtcttcactgtcccagtctgagtgtgggtgtgtgagtggccctgtgatggaatggcgtcctgtccagggctggttccctctttgtgccctgagctactgaaacaggcttcagctacacatgacccagaactggaataattaagtaataattatctttttattcatctttcttaaatgtatgtatagctcacatttatttcaatgtttaatattagaatactttggcctttagaagcttagtgattttttttttccttggccagaagtatgctttaggaacttaatccttattttttagcctctggtaaaattggttttgctatacgttgtttcacttaaaagtcctgattcccaagaacgcactgacagcagtgaggacttgctgcgcatgcgggaggccagattttcttatctgtgtgaagccagacatgaaagagatctgtcaacacataaaacaaaatcaaagtctgttttttgtctggaaaagatttttaataaaaatataacttatgttagtgtcgtgtgttttttaagtgaatattttaatatgtttaatttctatgttagtaaatagcagtagtaaacaacagtgagcaaaagcttttaggtgtcctcagtacattttaagagagtgcaagcgtcctgtgaccaagaagtttgagaactggtgcccaccaggttcatctcacaagttcagtattttaaattccacacaaaaggtagaggaaatagctgaattcgcttcagctgcgcatacatttcacgattatttaaaagtttagagggctaggcgcggtggctcacacccggaatctcagcacttcggtaagctgagccaggtggatcacttgaggtcaggagttccagaccagcctgaccaacatgcggaaacccgtctctactaaaaatacgaaataagccgggcgtggtggcgcatgcctgtaattccagctacttgggaggctgagacgggacaattgcctgaacccgggcggcggaggttgctgtgagcggagactgcaccattgcactcaagcctgggcaacaagaatgaaactgtctcaaaaaaaaaaaatttagaacgtagtcatgtacctcgaaagcgaacactcccaacatagcgtggaacaccccacacccccggcgactttgctccgccttggtcccggtcgcagacaccgcagaaaggccatcgttctagacatacgagaactccccgtgcagccaaacgctgtagtcccagcggcggaactcggggggggggaggggggggagtgcccaaccagccagtcagcagtgacgtcccgcctttcctccgtttccattggtccagccatgcggaggtcgctcccatgggacgccgagcttccggctgcagggcttggcgcccgggcgctttcggattgggagggcttcctccatggaacgcgagcctcgagacgtctgacgttaggcaccgttcgcagcgcctcgggctcgcacggcaggatcgaaagcgtgattggctggcggcgtctgtggtctcgggcaccgcccagtcgcgggacgctgcctctgcggaactgggggtggggcgtgttgacccccttaaaggcgccagagcccgcggtcacggctcaggttcccggtgcttcgcgcgtctgccgttgtcacaggccagggaggtggcaccaccaggcgaagcttggcgagattgtgtcgtcaagcgcgtacgggcgccaattggccgggcgatgtggcgtggactggcgctggcgcgagcgattggctgcgcggcccgggggcggggccagtgggcggtgcgcgccgcagact

SEQ ID NO: 4462 - DNA, 2300 bp, Homo sapien
atacacacatatatataacttgagaatttaggaagcgacatgtcaaacagcttataacactatagtgtactatccaagtgtttgagacacagttaaaataatcagtaatgaggacaatgacagaatacctagtaaatcttaattccctatcaaaccatgcgcaaaaatgagtcttagtaaattcagcattgttgccctatgtcagggacaaagtacatgtattttgcatagatggacatgtgacaaaatagaaattggttttctgagacaggattctccacagcttctgcaggagggagaatgtaactggataccaggattgcaatcataaccttttataatttcggctagttttgtgtcttttaaaaaaattacattggatagttatttcaggatacagtgtgttatgggttaaattgtgtccccctttcaaattcatgtgttaaagacctcacttccagtattttataatgtgaccttatttggaaacagggttgttgtggatatgattagttaacatgaggtcatattaaagtagcgtctactgtactccaatatgactgatgtcctcataaaaagaacgctaagtgtgcagacagacacggacatggaaaacgtcatgtgaagactggcgggggcatgctgccacaagccaaggaatgcctagacgctgagatgcattaacaggctcccatcacagctctcagaaggaatcaaccctgccaataccttgatttgggacttccagtcagacctctgacaataaatttgtttaagctgcctagtttgcagtattttgttcctgcagccctagcacatcaacagtgaaaagaatatggattctgatgccagcctttagtctttgccctgctgcacgattatttttgacttttgacgagtaatttccacattctcatgcttaaaattcaatttagaataacttttactttattggattcctttggggattaaattagttacaaaagatgtaaagcgactgatcctcaaaatgatttctttcccttgttttgtgacatgtcatgctctcagttattttcagtgacttttatggaatcctaaatatatcaacttaaaaaattacattagcgatattcttggtgttacctgactgtggtgcggtccagaaaaataaaaccacctgttagaatgcgggttaattagatgggacactgcgatttacaaagctttctatttgctgccatgcccagtacaatgtctttgcatactaggtactaaataaaattatgttacttaaatgtcacaacctctaaaagtttaaaaaatgacttctctaaaaactcaaatatttttttccttggcgttcctcttacagaattgtttttagtgataaagttttattaatatacttaatgcagaaataacttcacttcttttttttttttggtaatctggatcccctaaatagaatgctaaatttgtttcttgtgcaacaaacaagttaccacttctgactcttcatcttgagcttccttatttttttttggagacggaggctcgctctgtcccaggctggagtgcagaggcgcgatctcggctcactgcaacctccgcctcccgggttcaagcgattctcctgcctcagccttccgagtagcaggggttacaggcgcgcgccgccacgcccggctagtttttgtatttttagtaaagacagggtttcaccatgttggccaggctggtctcgacctcctaatctcgtgatacgtcggcctcggcctcccaaagtgttgggattacaggcgtgagccaccgcgcctggccttgagcttcctttttaaaggaaggagcaggaatgttaacctacacagaaaaaaaaaatgctttcacgctcttgatttactctaggtgggcttcaaatgcgcggttagcgctttctgtagagcgttgagacggctgtttacgtaaagaccatcatgcgacgtttccaacctagattctaagaaaaaagcggcccaagtcccacctttcgcagggaacagctgattctgtttttccttcccagccaatggtgatcaaaagcttcaggacgctggtgagtcactgcggaggagccgaacactgaccgcgccgtccccgccaggctcccgcgcggccggcaccgcggccctgagcgcaggcggccccgggtctcaggcctcaggcggaccgcgccccgggctcgcagccctcccgccccggctgccgggctacggggcagatggactcggagcgccccgccggtgagtagctacgacccccgaggccacctcccgcgaacc

SEQ ID NO: 4463 - DNA, 2300 bp, Homo sapien
cttccagtattttataatgtgaccttatttggaaacagggttgttgtggatatgattagttaacatgaggtcatattaaagtagcgtctactgtactccaatatgactgatgtcctcataaaaagaacgctaagtgtgcagacagacacggacatggaaaacgtcatgtgaagactggcgggggcatgctgccacaagccaaggaatgcctagacgctgagatgcattaacaggctcccatcacagctctcagaaggaatcaaccctgccaataccttgatttgggacttccagtcagacctctgacaataaatttgtttaagctgcctagtttgcagtattttgttcctgcagccctagcacatcaacagtgaaaagaatatggattctgatgccagcctttagtctttgccctgctgcacgattatttttgacttttgacgagtaatttccacattctcatgcttaaaattcaatttagaataacttttactttattggattcctttggggattaaattagttacaaaagatgtaaagcgactgatcctcaaaatgatttctttcccttgttttgtgacatgtcatgctctcagttattttcagtgacttttatggaatcctaaatatatcaacttaaaaaattacattagcgatattcttggtgttacctgactgtggtgcggtccagaaaaataaaaccacctgttagaatgcgggttaattagatgggacactgcgatttacaaagctttctatttgctgccatgcccagtacaatgtctttgcatactaggtactaaataaaattatgttacttaaatgtcacaacctctaaaagtttaaaaaatgacttctctaaaaactcaaatatttttttccttggcgttcctcttacagaattgtttttagtgataaagttttattaatatacttaatgcagaaataacttcacttcttttttttttttggtaatctggatcccctaaatagaatgctaaatttgtttcttgtgcaacaaacaagttaccacttctgactcttcatcttgagcttccttatttttttttggagacggaggctcgctctgtcccaggctggagtgcagaggcgcgatctcggctcactgcaacctccgcctcccgggttcaagcgattctcctgcctcagccttccgagtagcaggggttacaggcgcgcgccgccacgcccggctagtttttgtatttttagtaaagacagggtttcaccatgttggccaggctggtctcgacctcctaatctcgtgatacgtcggcctcggcctcccaaagtgttgggattacaggcgtgagccaccgcgcctggccttgagcttcctttttaaaggaaggagcaggaatgttaacctacacagaaaaaaaaaatgctttcacgctcttgatttactctaggtgggcttcaaatgcgcggttagcgctttctgtagagcgttgagacggctgtttacgtaaagaccatcatgcgacgtttccaacctagattctaagaaaaaagcggcccaagtcccacctttcgcagggaacagctgattctgtttttccttcccagccaatggtgatcaaaagcttcaggacgctggtgagtcactgcggaggagccgaacactgaccgcgccgtccccgccaggctcccgcgcggccggcaccgcggccctgagcgcaggcggccccgggtctcaggcctcaggcggaccgcgccccgggctcgcagccctcccgccccggctgccgggctacggggcagatggactcggagcgccccgccggtgagtagctacgacccccgaggccacctcccgcgaaccgctcggcggcaggagtacgtgaccaagggtgggggcgttggcccagcagccgaaggggtcttcagcgcgcccagacccctcggggctgcggggcggaagccggggcgtgacttccggcgccgccgggtgtggggcggaggtgtggggcggcttccggagaacccagcggcgcgggactggggcgggacttccggcgacaccggaagtgcattagcgccaggttggggttgtggggtcgcgtcagtgcggagacagcggtgtcctgcgcgtcttcgggtcagtacggggggccgcgtcgtagggactcactggcggtgcgcgacctgggctggctccgggggtggcgggcgcagctgctgtgacaggtgagtgccgccatcttcctacctgtcaggcgccgagtcgttccccggatgccccgaagaggagtcgggacactgcagggctcaagggg

SEQ ID NO: 4464 - DNA, 2300 bp, Homo sapien
gttagacgaattcctagtgggctgagacaccaaattcaacttctgagcaatatcgaggaagagaatggtctctacaggcaacctcagaaatctgtcatcagtattaacctgcttaaaatgttttgtcattgacgaaatgaaggcatggaatacatacaccatcaattctgtggatgacaatcaattaggaaataccattaatcagataaatagccatcaagattttcaaaagatctcagtagttaaaagaacaactttaaaccaaggatgaaattcaacagatgtaaaatcttttccctgaaaagaataagacaggataaatatgaaaactctatcttagtttcaccttggggaaagggacttagggattttagttcagggcaaatgcccaaagtgaacagcctaacatagctacccaaaaagaggaggagggaaacacactcactcaagatctcctgtatacagcactttgcaaaaatggctggcatatattacataacgtaaccttcccagtaagaaaatgaggctgatatgaacaccatgttagaggacagggagtcgggacttaggaaggccttgcccaaggtcacactgctgttgagacgtggccagtgcacacgagtccctactctgtctcctgtgagcagtattaatagaaaggcagcgtctaaacccaggggataacagatcactccatttgttccacattggtgagttcatatttacataccgtgtttaactcctgggacatatcaaaagctattttgaaagactcgaatttgatcaggaaagtaaccagaacagtgtgtgtgtctgctggggttgggggaagttcagaagacgaagaaagttcctggagatataactatcttgagctttctcattcagaggtaaataattcctgcaatacttttatgaccgtaactcacaggccaacatactgaatttaagagaaaaacacttgaacttcaataaatgaaacttccaagcaattaacacttttctataatggtatccgcttcaagggacgaatgttttagcgtttaagttaaatgacaaaatctctaaaaacctggcagaccttaagctattttcactcacaacctggaaaaatgtatttattcaacttggtttagtaaatgagtacattattattgttgctcttgtgttattccggtgaacagctgtcttaaaatgtttccctccagcggtggctgctttcagggggaagggaaggaaaaggaagtcttcaaaaggggaacaatatcatggcgctgtgttaatcacttcagcatccgtcactccacactcaccacccttcttgaagccgaccatccccactctttggagagaagaaaggccattctcctctctgaagggcctcccaagtgcttccctggagacgcacttccccgggatgcccaggccgaagcaaagggggcggggagagaccccgggccgaacccttctgcccccaacccctccagcgccccgactcttcctggactccgacatcttctgcaccgccccgggcccccatccctcccgcaccctggtccctctggcaccgccacggactactcctgcgccccgacttctcttgcaccctgaacccttctgcaccacggcccttcctgcaccgccacgggtcctccagggacccgacccctcctgcaccaccacggaccctctgcattccaagcccacctgcaccccatccgccactatgccccgactgcccctgcacccccttgagccctgcagtgtcccgactcctcttcggggcatccggggaacgactcggcgcctgacaggtaggaagatggcggcactcacctgtcacagcagctgcgcccgccacccccggagccagcccaggtcgcgcaccgccagtgagtccctacgacgcggccccccgtactgacccgaagacgcgcaggacaccgctgtctccgcactgacgcgaccccacaaccccaacctggcgctaatgcacttccggtgtcgccggaagtcccgccccagtcccgcgccgctgggttctccggaagccgccccacacctccgccccacacccggcggcgccggaagtcacgccccggcttccgccccgcagccccgaggggtctgggcgcgctgaagaccccttcggctgctgggccaacgcccccacccttggtcacgtactcctgccgccgagcggttcgcgggaggtggcctcgggggtcgtagctactcaccggcggggcgctccgagtccatctgccccgtagcccggcagccggggcgggagggctgcg

SEQ ID NO: 4465 - DNA, 2300 bp, Homo sapien
cctcgggggagtagactgtgcctggggaattccgttgggttaagggagagcaattttttttttaaattttaaacctcttttttgccatttgatacttaagatgttaatgaaatttgataaagaaattacttctttaataaaggctgtggtccctaccttaaaacatcttaatttgtcatattccaaattatatagttaatgttaactatagtaaggaagcttgtaattagaagtcatcattatcttcttcactgtttttcttttgtttcaactcgctgtatcagaaacactgttttttcttgctgtttttagcttattgcaggagtgaccaggacactacctcctagaagtaatgcccacagaaagcgcaagttgttcgactgctcgccaaacaaaacagaagcgcaaatcccatagcctttctatacgaagaactaacagctcggagcaggagaggacgggactgccaagagacatgttagaaggacaagtaagctacgattgattagggccttattgattgattgatttttgagacagagtttcgctcgtttccccggctggagtgcgatggtgcgatctccgctcacaacctccacctcctgggtggaagtgattctcctgcctcagcctactgagtagctgggattagaggcatgtgccaccatgcccggctgattttgtatttttagtagagacagggtttcaccatgttggtcaggctcatctcgaactcctaacctcaggtgatccacctgtctcgccctcccaaagtgttaggattacaggcgtgagccaccggccccgggatcaaggccttattttaaagatggtgattgtgtctgtgacgttataaaagtagccaaatatataaaggtctccaaagtaaaaaaaaaagggttgggttactaagaagaaagatcacccctcccaaattcccccaaaataaactcattaaaacttctatcaaatacaacagcatacacagatgggttagcatatgtatactaagtaataacaaatcaaagtgggtatgagagttgggattagttttattctttgtacaggcttgcggacagtacaattctgggttttctgtctctaacagtctcaagaaaagaagagtatcatatccttttaatgatctctttctgttctctgaagagtttttggaatcagatcttttagtgactttgcttaggtttatccttgtctctgccgccatgagtatgtcattcttggattaaaatgaactaattatttttgataaagataagttttgcttatactttttctagttcatttatagctgatgaaattctgtcagaatttttaaagagtgttgtgaagtctagacgcagtatatttatattaaaataagctctagatatatctaatatatggttatatatgtatataactatatgtaaacttacaaccattccttcacaattagaacaaattcatcagccataatgctgtaggaagataaagcttaaacctgagaaattggcttctgtgaatattggattttgttaggaccatgtgggtaactttatgccaggacttcgaggccgggacctctacactgaatacagcagtgtgaacccagaatccgacatgactgttgccacgaagaggatctttacctcaaattagatgattatgcattgaataaataaaccagtacctggttctaatttctataaaaagtgattacattttaacttagtgttcaaaaaaattacaaaaatagctttggtattcttagtgtattactttgctaggactcccataacataatgccacagactgggtagcttaacagactgggcagcttaaacaacagacatttattttctcatggtccttccaggcagctggaagtcctagatcaaggtgtgagcagggctagttcctcctgaggcctctgtctgtggctcgccgacaccatcttctccctgtgtcctcacagagttgtccctctctgcgtgtcttgtcctagtctcttcttacaaggacccctgtcatactggagggccttcctttatgacctcattttactctcaccacctctttcagggccctgcttccaaacacagtcgcatgctgaggtcctgggcctgtggaccccgttcaacacagcacttaggagacagcagagctatgcggcaggactcctgtggtgggggcagtgtctgtatctgtatctgctgtctgatgtgggaaccaccagtcacgtggctgctgagcacttgaaatgtagccagtgtcccgggacatgagattttaatttttaa

SEQ ID NO: 4466 - DNA, 2300 bp, Homo sapien
ctctctgccagcttccagcttttcttccgcagctccctcacctctcacagccctcagggaattgagagtcagggccctgctctgaattaggctgcagctaaagggaatgttgtggctggtttaatcagtccccaccactcaaacttcctgtgtatcggcgttcttgtcatttgtgtgttcactggaatagtgctcttactttccttcgagaacttttcctttgcattcagaagttggctgtttggtgcaagatgcccagctttcagcctgtctcagcttttgacttgccttcctcactaagcttaatcatttctagcttttgatttaaagggagcaatgtgcaactcttccttgcattggaatacttagaggccattgtagggttatgaattggcctaattttagtattgttttgtctcggagtagagaggcctgagcagagggagagatgagagaaaggctggttggtggagcagtcataactcccacaacatttattgagtaagtttgtggtcttatgtgggtgtggtttgtgcctctccccaaaatgacaatggtagcatcagagatcacaggtcactattaacagacataataataatgcaaaaatccaaggtcaaggtgctggcaaaaagaaattaaaaaaaaaaaaagaaaaagtttgaaatattgcaagaattaccagcgtgtgtcacagagacgtgaagtgaacacatgctgttgggaaaatcgtggcaattaggtgttcaacgcagggttgccacaaaccctcaatttgtaaaaaatccagtacctacaaagcacagtaaagtgaagggtaataaaacggggtatgcctgcatccacacatagacgtgtacatacacgcatagtcatttctgttctctagaggggatttaattttcccttggccagcagatagagtggacggcaagccttgattgacttaagggttggtggccggtgggtttcaggctttaggggttctgctgttcctctcgctttcccttgttctaagggagttgtccttcaagggtgtgtcttcacaggccctgagctttagtttcatctgccagtcctctccgtgttagctcttagaggctgctttctgcttggtgtccgccctcatgcccagtttaggtgctgtcagtgcctgggggaggcgagcagctggcccgctccttcctggctgcctcttctgagggatccagcctcagttcctgtcacggccgctcacgtctggactgcaccctcgctccggctggtctctgtgccttgagggagtgcgtcagctagtggggcttccagtgcttccctctggggcctctgggcctgggggcctcagggcttccatgatgacttcaagccttgtgtttattttttgctgtttatctgcagcttttataattaattccactagggggtctgagtggatccacagaggctgccttgtcccagcaggaagaagtctcttcctgttcttgtgcctggcttgtgttttttattggctttccgttcttcacgcaggttaattcagccttcccgtgctcacccacaattcaaccttcccatgctcacccacaattcagccttcccgtgctcacccgcagttcggccttcccgtgctcacccgcagttcggccttcccgtgctcacccgcaattcaaccttcctgtgttcactcactcaccgtcaccatctgctcttctggcctccagtattcggtgtcgtctcttcgctcatcgtctctttagttctttctttgtgggtctgttcctgtttcttccaggatgccttctgcatttagagaggtgtcagagaggggagaagacgcctgtgtttctggcacgttgtcgtgttgcgtgtgtctctcctcttcctcctggggacttgtgtttgtgtttttccactaggggatttttctttttttgagacggagtctcactatgtcacccaggctgaagtgcagtggtgcaatcttcatttgctgcaacctccgcctcccacgttgaaacgattctcctgcttcagcctcccgagtagctgggattataggtgcccgccaccacgcctggctaaattttgtatttttttaaaatttatttttaattaatttattttttgagatggagttttgctgtgtcaccaggctggagtgcagtggtaggatctcggctcactgcaacttccgcatccctggttcaaaggattctcctgcttcggcctcccgagtagctgggagtacaggcacatgccaccacgcccagctaagttttgtatttttagtagacgtggggttt

SEQ ID NO: 4467 - DNA, 2300 bp, Homo sapien
gttgacagctgactccttctttttcacctgccacagcccctgtatagggaccaatcataattttttcactgaaacatgtgcaggcaatcatggggagaggaaatggccatttgggggtggggggagacttggagaaaaccaggcagagctcttgggttttgaagcataggggagcttcctaggcttttgagagggggaccagtgcgttgcagttatttctgaggaagaaccatcttcaccggctcatccaggatggagggtggaggaggagctgtcacggccaagggactgaggagatgctcgtgatgccacctcaggattctgcagaacctggcctcgaactgaactctggagagaaagaatcaatgatgactgcaaaattttgagagtggagaaccgaggaagaaggaattgaaaagtaaaaaagggaaaaaaaagatgattgagttcagttttccaaatgtcagatttccaatctatgagggacgtggctaacgtttcctccaacagtcatcgaaagcagggtcgcctttggctggcgcggcgtgagggccgcaccagggcaacagagagtggcccgctcaatgccacgtgacctgcacagccacagggttccatttccttcacgttttttttcctttctttccttccttccttatctccctccctccctccctccctccctttctctcttttcctccccttcctttccttttccttccttcctctcctcccctctcttcttttctttcttggagtctcactctattgcccaggctggagtgcaatgacacaatctccgctcattgcaacctccacctcctggggtcaagcgattctcctacctcagcctcctgagtagctgggatcacaggtgcatgccaccatgcccggctaatttttgtatttttaatagagatggggtttcaccatgctggccaggctggtctggagctccggacctcgtgatccgcctgcctcagcctcctaaagtgctgtgattacaggtgtgagccaccgcgcccagcctccttcactttttttcaaaagcgagagcaccctcatgtacactgggagctcacttgagcaccttggtgcttcaccagtgaaggagggcttgggagccgctttgaccgtcattaaaatagcatttcaatgataatacatcaaaaatgtagtaatatgaaaactgaaaaactccagtgatgtttcaaagcaatgcagtttaaaaaaaccaattcaatccattaaccaaaataaacttgggggaaacaacgcattttctatgctggcaagcagatggccaagactgcgtctgtctggggtgaaaatgcaggttgcatcctgtaggaagccagcatagggacgggctgctcacctcccagggcggcaaggcagccgctgactccagcaggccttgaaacctcccctgcagacgtaagagcatcgtctcaggcagcgcggccgccaaggtctcactgtatcattccaaagcgggcgaatttcgaaacatccagctgctggcagcaatagcagaacccaccatgaggctccaggcattcggatgccgccagcgaggccagcaagcccacctctccctgagctgcagttcggctttcttcctccacaagcagggacgtggcttcaggaacccgctggaggagacaaggggcctccgtggtctcagccctcgctttgcgcatgggctctggcctcggcacctgggcatctccatcctcccgagggcagtcggaggctgaatgtcttcaacaggagcacaggcaggagagagagagctcagatgtgctcgaggccggggtccacccctgttctcctgtgagagggaggctgtgaaaatccaggagacaacatcaaagcgttgttttccaacacactggcctgcgcgccctacgctttatgcagatgagggatggcgcaagcacaggcctgcgcgcagggctttaggcagatgagggatgacgcaggcacaggcctgagcgtcgcacgctttgcgtagatgagggatggcgccggcgcaggcctgagcgtcgcacgctttgcgtagatgagggatgacgcaggcacaggcctgagcgtcgcacgctttgcgtagatgagggatggcgccggcgcaggcctgcgcgccacgcgctttaggtggatgagggatggcgcaggtgcaggcctgcgcgcctcacgctttatgtacatgagggatgaggcagcacaggaattggcacaacctgaagtcagctctgcagctttccaaggtatgaatgcccggggagccagcgcagacc

SEQ ID NO: 4468 - DNA, 2300 bp, Homo sapien
aagccatgcccaccccagccccagagaaaccaataagaatcctctattattttcactattcatttaggtttttatactccacctcctttcaaaaaagatttaagatgtacgacattaccgaacacctaaaatagaaccagagaaacgaaagccattcccacaaagtgaaggaacagtttccaaaacccctgcgaggcagagttaagacctgtgacgtggggagcctggaaacacccggcccacgcgtgctgcagatgtggggagcctggaaacacccggcccacgcgtgctgcagatgtggggagcctggaaacacccggcccacgcgtgctgcagatgtggggagtctggaaacacccggcccacgcgtgctgcagatgtggggagcccggaaacacctggcccatgcctgttcagtccgtcatggcgtttggtttatggtggccgatactaagagccactgaggtctgggttgtgtaagggttagctaccaccctataacctccctaccaggtaataaggagaccaagtctttgatcaaattctgattttttaactaaattttcattagaaagcaagcacaaaataaaatcaaaacaacctttaccttcagcttgagaggctaccagctctctattctttcagattctccaatcaacaccttgcaggacaagaccccaaaaaagttcagctgtcaaaaaatgtaagaggcaggattctgtgaccctcagagcaggcttccaacaccagagaccttcagctcacagtggagatgggacatgggggctttagcccacagcatcatccctgagagccaaggcgctgtattcatacggggtcaggctcttttccaagtatctttacgtaatccatgtacctcgagctgctgtcatctcacctccgagaactcatttctaacattcatcatgctagatagccagtctctcatttctccaacttaaaaaatccatctctgaaattcatgacagtgatggcagacggcaaagcatggtggtgtccacctctggggtgtgggcttcccggaaagaatcccagctgaccaccccagaaagtgcaagaataacattgtgctgtacatagtcaagtgctataaattacagttatcataatgagaaggcagaaatgaaactgagttgtagctatttgttacaagataataagaagtagagatattagtatggaaaaagaaacttttcctgggatttaaaatcaggccaaatttatcactcgagttcttttagaaaagaaaacaggtactggagtagacaacttcttccagataaagtttcaaaagatacgagaacattttttcaaataaaggactcacattaatcttttataaaaatcacaaaaataaatgaaatcttaattcagtgcaaaagctaagctcaaacgaccagtttctattaagttctggtaacttgacatcactaggatgaagcttagagaacttagagtcgagaggtgatgggtggctcagacattcgcagcagtcagaagtgagcgctcccctgaatgcgtgggagcacggccagctcctggctgaagtctcccacccaggcctcaaatcaccttcatctgagatgttggctagagaagcatataatgctttgtcccagtgggctccaaatcacgctgtttctgcagcgagggggcctgtgttgtaagcagatttcactgtcacagggaagacgcagggtctgattcacgggactcggaaagcgctcggccacccagtggccagcatcatgaagccacagctggggggttgggattcgttttgtctcaggcattgaccttccagaaacaactcagactttactgaaatatcaacatccacatctggagaaagccacacattaattccatgctacccattagtacaagtgtatggattcgtgtattaagtccacaggagactccatggaaggagagattaaagctcttcagagaaggccgatagcgacagaagagtttccaatgcagccagagtgaggttgaggtgccggagcctttccgtggagggatctgtcagaggggatgtgggctgcagaggggaccccacgtaaggaaaggagggtcccaggccctgggtagtgaaaggagaaggtagtcgaggcagtcaagggtgaccctacacgcaggaggcacgccacaccagatcacgccacacgcaggctgctcccaactggcagggcctgacccagccaggaagggccaggtcctaggattccacagtgccaggagtgcccgaaggggccaggtcccaggattcccac

SEQ ID NO: 4469 - DNA, 2300 bp, Homo sapien
gaaacatcccaacactatctctctatggaaggtttattaaaaaaaaaaaagacaagaaggtagaagaaaaaaaaaaaaaggactgctattcttccaggctgccttgggaagtttttcttttgccagcagaacacagaggggagcagacccttccctagaagctcaaagcgtaagcacatggtcctgtcccctgcagaggacaaataaagggaacagaatgtgttttccgtgaaaggaacaaggaactgacctttgcttgttggtcggttcctccgttccctggacacaattaggtgattgtaactaagttggaaatgttccctgtgatctaactagaaacatttttgatctgtgtgacttggagaacacgaaacaaactgcagttggccttcaaatcctccttcagatgaaaacagcagcattcatagcctgggtgctccaaaagtgctcttatttgcctggtttgatcttcacatcacctcgtgaagtagagaagtcacctgtcacagagcggtaagtggaggatgacctcgggccacagaactcaaactgcctggaactccagccacctggttcctggtcagtgggagaggcccctggggtgcattttccacctccggggtcatggacaggcttggatattgaagattgctcctgggtttacaccactttctatgttaaacagtagcctgcggggctgttgtagttagaactgaatgatttacagtgtgatttacgtcatcacaggtgagctgagatgttatttacagcagacactgtcctccctgtgcacatatggacacatgggaccacaccctggtgagaagaagcccccatgcaaggctggacgaccccgcagcccacccgccagcgcctccctcgctgccccaccagctccttccttctgtccccggagtgtggagcagtgcacgtgctgggttcacacccacgtcctcacagctgccttcccggtggtgtttgggcctcgtcatgcctggcagccaggagcgttgggaggaaaccccgtcagacggcagctggccaagggctagcagcaacttgcccacaacgtcctccgcaaagagaaaggagaggggcacaggccggagccagggcatcctgacaaggaaccaggaggtcctgtgtagacctcaggctcccaaggctttcctctgagttcagactttgcagcttggcacctcagtggttggccctgatggtcatggagaccagaaggatgggagcaggaggaggaggggaggccgcctggcgatgggagcgggaggaggaggggaggccgcctggtgacgggagtgggaggaggaggggaggctgcccagtgcacgcagatcagggtagtgactgcctctcccagtgcccggtcatccctggccttggtggctggctcctcctgcccaggcggcccctgcctagtaggacagccacagcggccaacgggccagattgtccctcccggctctcggggtggcagctgccaccgtgaatcacttgaaggaaaaaggaagagctgacatgaacgggattcgcttgggtgtcccacatcacctgtctgtggccagcagaagctcaccaggtgactttcgaagtggttggcaaatgggccatgtgctcagtctgtccacagagctcaggctcgtggatgaagctgggagcagcagaggatctggggtctgtggctgtgcaactctgtagtcagtgggtcttccccgaatttaaatgaagcctgcttccaggaaggtgttatgagctgtgctaccacgtgacgtggggacagcttcctcccgggagtctgctatggcgggaacccactcgcaccagctcagcccaccaggtctttgctctcagaccaatgctgacacctgggcctctccaccaatagccagtggcttcccagggacctgagcaggcacttggctggcctatatgcaatgccctggccaagacgccaagttcttctctgcaggcaccgccatctcacgtgatgcatgacgggcccccgagaactcaggggccccgctcgcctccaagcaccacaggacagcaggccaggaaggcaggaagggctggagaggcagagctgatctgcgaggaggcatgaatgagagggagacacccggccagctgggcttggggaacgcgtcaggtagaggccatgcaggtgccgcgggaggtgggagattcaggaggcaccaatgggacaagggatcttgggttataaaccaagcgtctcaacaccactgctgtgagtgggagcctggactccctgccgactcactgtt

SEQ ID NO: 4470 - DNA, 2300 bp, Homo sapien
atttggatttgttgtagcttctggatgccagaggttcacaggaattttggcctcacagggcggcctgcagagtgagaagcgtgggacccctgtgcaagcacgtgtacgtgtttgtccacagcactggggtatctgtgtgcaatttcttgggaggacgcgtttctcctcggagctcagctgctgatgctcatgttttctgagttcagactcctgcgtgcaatttctcaggaggacgcatttctccttggagctcagctggcctgatgctcacgttttctgagttcagacgacacaggctctgtccctcaatcgccacaggtctgttggcacctttcactgctggagattccctgaatcccctccaggagacattttgtgctgtgaactggggaaggaggtagcgccacgtgttcgggggaaggaggtagcgccacgtgttctggggaaggaggtagcgccacgtgttctggggaaggaggtagcgccacgtgttctggggaaggaggtagcgccacgtgttctggggaaggaggtagcgccacgtgttctggggaaggaggtagcgccacgtgttctggggaaggaggtagcgccacgtgttctggggaaggaggtagggccatgtgttctgggtggactgggtcaccaggtatgtgctgctgtgttatcttgaggaacagggtgggacaggcctgagtaggtgcccctgcagctgcagacaccctctgtccttgggactcgagttccgtcttcaatcagccgatgcccacttcaggaggaatgagccaggagttaatgcattttcacatttccagccacaggagttaaaattaaacacaagccaggctttcatttctaggcctgagcacatgtgtcttcaccttgtctggctctatccacaactaccgctagcaatgcaatccagctgagttaaagtttagccctaacaccttcaaccctttcgaaacccacttctccacggccaggaaggtgctcgacaggaacaccatgagcaagcaactggaccagctcccagaaggctctgcatgtctttgtacggcacctgggaaactggtggaaaattataaaatcagtgcaccatgagagatcattcacacatgagcagaaggctcctgagaaaccaagtggctcccccaggccaaaataaataaaacaaagaaaggaagagcctggagtgacctgatgtcccaatgctggagtgtcctcaggagacatcccaggacagggagttacctccttgagggtgactcaggctgcggggaaatggaaagagagtgaaagcgcacgaggccatggcccttccatgtcggtgaggaagagatggccctcctggagcctgggcacctggtgcgggagggctgggccccagcgtgggaagagggcctggctgctggccgcactggagaaggaaacttctggttcctcagagcaagcagcccgctcctgactgcacttcctctcaccataagggatctgttccatggaaagagtcattaacggcaaacctaatagtgagactgacatgagcatccatgagcatccgtttctctgcacattagactccagggatctgggccgtggttcccgctccacgggcatgatcagctgcagatattagtcacagcgatgtcagaaactactgcctgtgtgagtattcaggaaacatcccaacactatctctctatggaaggtttattaaaaaaaaaaaagacaagaaggtagaagaaaaaaaaaaaaaggactgctattcttccaggctgccttgggaagtttttcttttgccagcagaacacagaggggagcagacccttccctagaagctcaaagcgtaagcacatggtcctgtcccctgcagaggacaaataaagggaacagaatgtgttttccgtgaaaggaacaaggaactgacctttgcttgttggtcggttcctccgttccctggacacaattaggtgattgtaactaagttggaaatgttccctgtgatctaactagaaacatttttgatctgtgtgacttggagaacacgaaacaaactgcagttggccttcaaatcctccttcagatgaaaacagcagcattcatagcctgggtgctccaaaagtgctcttatttgcctggtttgatcttcacatcacctcgtgaagtagagaagtcacctgtcacagagcggtaagtggaggatgacctcgggccacagaactcaaactgcctggaactccagccacctggttcctggtcagtgggagaggcccctggggtgcattttccacctccgg

SEQ ID NO: 4471 - DNA, 2300 bp, Homo sapien
acacctgtggttccagcacggtgggaggccaagttcagtggatggcttgagcccaggagttcgagaccagcctgggcaacataggaagactctgcctctatgaaaaaatacaaaataattaggctgcggtgagctatggctgcaccacttgcaccaccatactccagcctgggtgacagagtgagaccctgtctaaaaaaaacacacacacacacaaagaccaggtgcagtggctcacacttgtaatcccagcacttaaggaggctgaggtgggaggatcgcttgagcccaggagttcaagaccaacctgggcaatatggcaaaaccatgtctctattgaaaaaaaaacaaaacaaacaaacagaaaacacttcccattgttccctgaaggaaaagctcagttacaaaaaatctcctttcccaggatttgttgccattctctgacttatcggtgaacatcaaggaaaagattgactctgaagagccaccatccaagatccagggagacacactgtggaatctgtggaatgaaggtcctcggtgacaggcgctgtgtgtcctcccaccatccgagatccaggcagacacgctgtggaatgaagggtcctcagtgacaggcgctgtgtgtcctcccaccatccgagatccaggcagacacgctgtggaatgaaggtcctcagtgacaggcgctgtgtgtcctcccaccatccgagatccaggcagacacgctgtggaatgaaggtcctcggtgacaggcgctgtgtgtcctccgaccatccgacatccaggcagacatgctgtggaatgaaggtcctcagtgacaggtgctctgtggcttacgaccatccgagatccaggcagacactctgtggaatgaaggtcctcggtgacaggcgctctgtggcctccatctcatcctacccttcagagcgcccgacctcacccctctggtagaagctcgcacatccagtggccagcccttcccttgctttctgggagaagcaccgtgacttgtagaaatgaccacaatatttttttaaatgaagttatgcaaatctgatagactgaagtaaatgtttcataaaatcaatgactgtttaaattgtaggactaaattgtttgtatataaatattaccttttatattccatttgagttttatgtagatgagcacattactttaatgacctgcatttgcagagggagagagggagagcggctccccgaaacccccaccagccagatggctgccttttcttgcatgagattaaaagatgtttctcattcatggagatgcttctgaggcaaattaatatcgctggctaaattgcttgtgtttttggaataaaatttaaagagaactttttaaagcaattggtatcacgggttctcggagaagattactctccaggtagattcggtaattaatggaaagaatcctgtgttaattgactgcttcgggaagggaaatgtaatgactccttattaatcatgaaaagagacgctgcatgcggggatggcagtaattgctctaacagtggagaaatgttaattaatgaaaagaacaatgatgtaagaaattagctacgtaacgcttgctgctgaaggaggtaggattttaagcacattatttagagtggaaaccatagaatgttgcttcaaaaaacacacacatggaacctcttgccacccaaatttaaggggaaaaaatgtcagtgctcttggcatttttgcttgaggaagcaaaaacattcacccagagctatatttatttcaaacaaaatggccttgttgttcatctccaatctgggcttctgaaaccaaaatcatgcccagaccaaaacaaggtcatttgttaatgtaatttcaacacaataggtcattttgactgctaaggacaaagggagtactaagtatttttccctaaactaaaataaacaaattccatttatagtatttcccagctaatataaagaaaaattcagattcacttttgggacagagtatctttttaaaaaaatctaattctaagtcccacagagaacataacagtttccactctaacgactcattttcagaaaagagagcagcatttgttagcacacatgggcctgtggagcccagtcccaggcaacagtgtccccagagccccagtgatggctgggttgggtctggggcactcccagggagctccccaaggtccgcacgatgggaagactgacaggtcctcaggaccaggccgcagacggacagagaggaccaggctccctgggctcctgggtggggctccgctgactgctg

SEQ ID NO: 4472 - DNA, 2300 bp, Homo sapien
ggactcaggtggagaaaactgccctggtagtaagtttgacctcaaaactctgctcctatggtgcctaaggagcatttcagcaaccttaaggatagcagaggcactctgagcgctgtctcaggccaccatgaagtagatgggaatccctcaggcgggcggtcacccgtgacagcctggagcacacagaagcctcgcttcccagctctcaaaacgcagtgtttccaaggtttcctaacccagggaaaccgctgttgtgagaccctgaaaagaccgaggaggagggagacgggggccgtgggccacgctgctctgatgctatctgtgtccccaggcctggatgctcggcaggcgcaggtcgtggccctgtcctcggggaccaagtgcatcagcggcgagcacctcagtgaccaggggctggtggtgaatgactgccacgcggaggtcgtggcccggcgggcgttcctgcacttcctctacacgcagctggagctgcacctgaggtgagcggctggggacgggctccagggaaggcggacgccgcggctgggggctgccagggagcagatggggccccatgcctggctcagaacacgcttccctctatcctggcacagggtgagccagaaagcatccctttttattcagactagagacatccctggcacaccaataaagccgccgtgtgcgctgggaagatgctaaaattccaggcttcctccttactccacgtttccctccagaaaacacctttgcagccctcgtccttccgggcaaggccaccctctcctggcctcggttccccatgccccccacattcctgcactgcccccttttccgccgttgccctcagagaacgtgagtgcagtgcccaaggggtggcttggagacgcgctgtcttcttgcctcctgtgccaagtacatgtgaagaggccgctgaggccttgagaactgtgccccagtattgggattcccagggttccctggcctgctctggccatcaggcattggtggctgtcatggggcagcctcctgtccctgagacactttagagaggagcaaaacccaggtggtttgcagcacgtggcctccgcgacacacccccaggctgggccattcagtcccaagggctcactgtgggctcctctcctgaaacgctccctcctgtgtctgctgtctactctttcacatcccttgaagccatctgcgttcctcaaatctacgagtaatgggaccttggggggctttggcaagggtcatctccatgcccattagctgtgcaaaagccacacaaaaggagaaaggcccacgtgtagccctaagcagacgctgctgaaaacaacaccttaacacactcagctcattctttttttttgagatggagtcttgctctgtcgcccaggctggagtgcaatggcattatcttggcccactgcaacctctgcctcccgggttgaagcaattctcccacctcaacctcctgagtagctgggtctacaggcgttcaccaccacgcctggctaatttttgtatttttagtagagacggggtttcatcacgttgtcaaactcctaacctcaagtggtcaccctatctcggcctcccaaagtgctgagattacaggcatgagccactgtgctcagcccacactcagctcattcttatctgagcctctgagcagggagccacaggttgaacccatccctcagttccctgaggcctgcggggtgcagcaggagttggatatgggggaacagaaatatctcagaatgtagggaaggatttctcctaaatgtccacctgctcaactgggactatcaccaagatccctcactcttgtttgtgtcagagaaggcaactggaccaatatttaccaggagctggttacatgcttggtgctgtgccaccagctgggggggtccacagacaggtgcacccgacgcctgccctgcatggggaaccagcacaggggagggggggtccagggcagccacgtggctgacaggccctgtgccggggcccaggcttgggatacatttgccaagggtcctgggggaggcagccggggcagtgggggatggtggctgtgggcagagtgcaggcacagaggcaggaagactgctggatgccgcaaggacttcctgtggagaaaatgtctgttctgttgcctgtgtgatctcagggccccacagaacacaatccatcacccatggggcagaacgtgtgaaaacagcaagaccggcagaaggtagatggccaggaagcaggggagtaaacaccaggacacagggagtaaacaccgg

SEQ ID NO: 4473 - DNA, 2300 bp, Homo sapien
ctcgatgctgtaatgtttaatgtgagcagacaaccaagcggcgtgcatggtagttgggcagaggcctcagagtcaaggccctgttggtgtcagtcctggttctgtggggccatgtgtgtgtttgagggacttgcctcagccttctccatggcatggggaagctgaggaagggggtctatcacagggtggttttaatgataaaatgggacatccaggcagagggttaaaaattcatgaaaagctggatttgactctcactgtcttcactgtaactgcccatctttgagagtgagcaggaggttgggacaccccaagatgtgggcactgccagccaaccacacattcctgcacagctgcagcatagttctgactaaattccagacaaaacctggctgaaagaaaatgtagcaataccatgatcaatgagcctggggtgcacacatcagaaagaagagtgagagggtgaaagtggctcaggaaaaagttatcacaaaagagccccattccgcctgaaggaaatcgccactgcggggcactttgttctctggtggatgctggttatcgctgctgtggggcagttggttctctggtggatgctggttatcactgctttggggcacgtggttctctggctgatgctgattatcaccactgagggacactttgttctctggtggatgctggttatcgccgctgtggggcacgtggttccctggtggatgctggttatccccgctgtggggcatgtggttctctagctgatgctgattatcgccgttgcagggcacgttgttctctggtggatgctggttattgccgctgtggggcgcgtggttctctggtggatgctggttattgccactgtggggcacgtggttctctggtggatgcttgttattgccgctgtggggcatgtggttctctggtggatgctggttattgccactgtggggcacgtggttctctggtggatgccggttattgccgctgtggggtgcgtcgttctctggtggatgctggttattgccgctgtggggcatgtggttctctggctgatgctgattatcgccgttgcagggcacgttgttctctggtggatgctggttattgccactgtggggcacgtggttctctggtggatgctggttattgccgctgtggggcatgtggttctctggtggatgctggttattgccactgtggggcacgtggttctctggtggatgctggttattgccgctgtggggcacatggttctctggtggatgctggttatcactgctttggggcatgtggttctctgcctgatgatgattatcaccactgtaggacactttgttctgtggtggatgccagttatcgccgctgtggggcacgtggttctctggtggatgctggttattgccgatgtggggcacagggttctctggtggatgctggttatcactgctttggggcatgtggttctctgcctgatgctgattatcaccactgcgggacactttgttctctggtggatgctggttattgccgctgtggggcgcgtggttctctggtggatgctggttattgccactgtggggtgtgtggttctctggtggatgctggttattgccgctgtggggcgcgtggttctctggtggatgctggttatcgccgctgtggggcacgtggttctctggtggatgctggttattgccgctgtggggcgcgtggttctctggtggatgccggttattgccactgtggggcacgtggttctctggtggatgccggttattgccgctgtggggtgtgtggttctctggtggatgccggttattgccgctgtggggcacgtggttctctggtggatgccggttattgccgctgtggggcgtgtggttctctggtggatgccggttattgccgctgtggggcacgtggttctctggtggatgccggttattgccgctgtggggcgtgtggttctctggtggatgccggttattgccgctgtggggcacgtggttctctggtggatgccggttattgccactgtggggcgtgtggttctctggtggatgccggttattgccgctgtggggcgcgtggttctctggtggatgccggttattgccgctgtggggtgtgtggttctctggtggatgccggttattgccgctgtggggtgtgtggttctctggtggatgctggttattgccgctgtggggcgcgtggttctctggtggatgccggttattgccgctgtggggtgtgtggttctctggtggatgctggttattgccactgtggggcgc

SEQ ID NO: 4474 - DNA, 2300 bp, Homo sapien
ttctaaaacctccacagcaacagccctaatgaaaaatgtagtatctcccacttctcctttctattgcctttttgtttggttttcacaggaatctatttctgagtgtttgctgtaggcagacactttcctcatctccacctttgattacgagaacagcacagcccggtggctgcccggggggaggtggtaggcagggtcagagtgcacacgcgcgtgtgttcatgtgtgctgtgtacaggtgctgtgagggtccaggaactgctggctatcacagtgagcggtgacacaaaggcctgtaattctatgttgagaataatatttccagcctagaactagcagtctggctggaatgaaatacacagaaaatagtcaggatagtccaatctatgtctgagcctccagatttaaagatagtttatatccacaaatacatactgctatgtctttttacctttccattttcacagctagctgccaatttaagtaagcatccttgctttagttaagggctttagtaataaaataataataataacttcacgaacaggaagagattctataaatcctgagtttcatgccaggaaaccaccccagaaaacactttttgtactaatagctgtaaaaaaaggtcaggtacctgacttaaataattgctttcctttttgtatgtttgggggaggaggaatttctggttctacttgtaacacgtgcatatgaggttacacaaagatttctttcctggaaaactggaaataagcataatcaaaactgtaaaatgatcaaatactggtgcaattattttcttcaggaatctcacgatttcatctgcgggagtggatctgaaatctaaaatctgaaaacatttatttcactttatgattctttttattccacattcttctctaattttttccttgactgaaacattggtatctctgtttctcatggtctctcttcgcctcagccgtgcagttctgtgggtatctagggggccttttcagttcaaagtacatcagcagcccgacgctggtggtccacgttttcctgtcggctctgtgggttgcatctgtgtcctgttacctcggaggggttgtatgtgcgtcctgagaggaagacagcctgggaagacagggtggcttgcagaagacgcccaccatttgcacagagctagccgaggcagctggcctgaacatgtgtgcatgcgtgtgcgtgcatgtatgggtgtgtatgtgtatgctcatgtgcttgtgtgtttatgtgtgtgtatgtgcgtatgtgagcatgtacgtgtgtgcgcatgtgtatgttcatgtgcttgtgtgtgtgcgcgtgtctgcgtgcgtttatgtgcgtgtatgtgcatgtgtgtgagcgtgtatgctcatgtgcacgtgtgtctgtgtgtgagcacgtatgggtgtgtgtgcgtgtgtgcttatgtgcgtgtgtgcatgcatatatgtgcatgtgcatgtatgcacgtgtttgtgtatgtgtgtatgcgtgcatgtgcatctgtgttgaggggctgttgctcaggaagcgagggacagggcatgtcctaggtagagacagctttctggggaaagccttgttctaaggcagcagggcggtcttgcacttgcgcggctgctcctgggatttggaaaggacacaggtgggaagttggagagatggcctggggcaggtggggtaggtggggcaggtggggcagatggggcaggtggtgcagatggggcagtcattaacgagcatgcctggaaccccatccctagtcttgtagaggaggcaaggagctgtccaactgtctcttaagagtggcacagtcagtgctatggtttggaggtttgtcccctccagatctcatgttgaaacgtgatccccagtgttggaggtggggcctggtgggggatgctggggtcaggggtggatccctcacgattatcttggtgctgtcctcctggttatgaatgagttcttgctctgtgtgttgcagtgagagctgattggtaggaagagcctggcccctcccaccgcctctcccaccacgtgatctctgcacaggccgctcccctccccatcggccacgagtgaagcttcctggggcctcaccagatgcagatgctggtgccacgcttcctgtacagcctgcagagccatggctgcacaaacctttcttcctcataaatcacccagcctcgggtgttcctttctagcaacacacacggactgagccggatgacatgaagcagctgttcccgcctcctcctggcacctccctgactcacgcacttggtgcg

SEQ ID NO: 4475 - DNA, 2300 bp, Homo sapien
aaatttcgatcgtaactttcaaattagggtctaaatgaagtgttcaaagacagttttcagttttgtttccccactccaccaacatcagaagaacatttaacagacacgttactttccggccaccatacctgcccttggagtgaaacaagggttcatgtatacgagtctcccagacagcacggttgctccgtgtgatgatggagctattggggccattaataaatgctgaccaccttgtgggggctgtgtgtgtgtgtgaagctcttctgaagcaccttccttcggtgactccaccccctgatgggttttctgcagatacagaaatagggcaactctggattagtgcagcacattgtgtgaagctcagaagtttcacaggcagagtcctagagctgtgtttctcgatatagtttaagcactcaaatatctcgggtattgcagagaggaagtgagagagctatgtgccttctcaaccctcgctgggaattatcagcagagctgagctgtgctgtcatgggaacagggttgttgaagccagccctgaagagggatgttggtttgattgtggtcctcagtctgagttggactagaaggttcaacattctaaaaggaaaacgcagaagccctgtctttctgaggcttgtctgcaacatacgctcattccttccaaattatttgctggaaaaaatttaataaataatcatagagtaattaacatgttccagttcctgtctatactggttgatactgattcaacgagtatgaatgaacttatgaggtgggtgacgttgttatccccagtttacagatgaggaaactgaggcacggtttaacttacccgaggtcatagcagtagagttaagatttgaaatcaaatgtcttactctctctcatcaatgaaaactgagctacgatctatcagctcagcacataacaacacaggatcatcctaattatttccaatgtcccccagagtgattcttttttcttatgataaaaattatctggaaatttctaggcacataagcagctgaaaaggttgcatgtgaggcaatgaatagcagaaatatttgtgtgccatttttatatcaacatgttaatgtgtgctaatgaattttagagtggatttttttaaaaacatgactattgtaattaaaagcttatgtgatttaaatacaagatgcaatgatgattaccagattctattcctctttatattttacataagacttccagggttccataagtataatcttgaaacataggacattcctggaaaaaaaaattgcttaaaactatttcagtgtgcaatccacctctttgtaaatgttactttcttccatccaaatattacatttggcaacaaaactctccgctgagagctttctcttccttttgtgtcattgttccctaaataaagcaacacatgaaattcctgacggcaaaaatcagactcagatcccaaaacctctgtctttatgcaagatttatcttttgcattggaaacggccaaggaatatgaagaggggaaagaagaggcaaacagacaagcatgcaggctctgaggaataaatgcccctcaggacgctgtctcctggggaattgcaaacctcagtccgtttctgaggaagtgcggtctctgcatttctgaaagaggtatttcccccccttgacacaaggagcatggtaatgaattgactagttaaaaactgttggttggaaaaacccgtccctgtgtctttctgagcagggcgagctgagctgtccgcgaggctgcggcaggaggcctcgtcctcccgggcagggtccctcctggaggctcccccggtctctcccagacgcacccgcgccgcgtccttgttccccgggagcagcctccctccagccgccggtcctgggagcttcaccgtccaaacgggagctgagtttgcaagcggccaggcggcggtgcggctggtgctgctgctgatgtcagagccagaaagcagttgtgattggatctaattagacgctgctgcagcaaatagacaagctccctgcgtgattggcttcaaagtggctggtgccaaacaactagcagaggcgcaaaagtagcctccctgcgctgggagcccagagcaggaggcagagcccgcgggaagctcggagcactcaggacgccgcgcgcccttccccgccctccctgaccagggagcagctcgctccaggcgcccagccgaggcccccagcccagtgggagcaagtcatagagaacaattcgagagacagagagacggagcgcgctttcctgctcagtcctg

SEQ ID NO: 4476 - DNA, 2300 bp, Homo sapien
gtccatgcatctgtatttgcttataagttcaactaaaattgacagtttgcagagcaaactaacacacagtaggtactcaagacagaattactaaactgattatttaattccatttttatccactgtattcttgccctgctcaacaatgtgcttagtttattataatgcgggggaaattatttgaatacaaaacaactcaacgttgttataaaacccttgctttggatttcagaatttattttgttctcagtctctgcatctctcctctgcacgtcatagagtgaactctgattccatcagaacatacatcattttcccagttcaggagggttataaacaatccttctattactaaccactgaaagtatcggtgctgtgttttcagatgttagcccaggtgttattgctgccatgctgtgtggcagtggcgtcctttgaagtaagtacatccttcctttttttcagcagttattttctatcctgatcccattaaatttgcacgtataatttgttagactatactggaaaggaaaatcaactactatcttcaatagaactcatttctaccatcaatgatctctgtatctcagaatattccagggacctagagagaggctaatgcctaccagcagagaatgccatagacgtatataaaacttaaagagatcacttaattcttaacagataaaagcaagcattttggttgttgattttggtatcaatataattttctctacacagcaaatagacgatcagcttcagtgatcacctccagccttcacaatgtgacccaacaaaaagcaggatcataggagcacttgccgtgtgggccgggtgcgggggcttacgcctgtaatcccagcactttggaaggccgaggtgggtggatcacttgaggtcaggagttcaagaccagcctggccaacgtggagaaaccccgtctctacaaaaaatgcaacaattatctgtgcgtggtggccggtgcctgtaatcccaacaccttgggaggctgaagcaggagaatcgcttgaaactgggaggcacagattgcagtgagacgagatcctgccacgagtgtactccagcctgggccacggagcgagacctgagaaagaaagaaagagggaaagaaagaaaagaagaaagagaaagaaggaaagaaagaaagaaagaaagaaagaaagaaagaaagaaagaaagaaagaaagaaagaaagaaagagaaagagagaaacagagaaaagagagaaggaaaaagaaagaagaatgagaaagagagagggagagaaagaaagaaagaaagaaagaaagaaagaaagagaaagaaagaaagaaagaaagaaagaaagaaagaaagaaagaaagaaagaaaagaaaagaaaagaaagaagaaagaaagacagagaaagaaagaaaaagactcgctgcatagaacctgcctcccaatggagatgcagagaaagaaggaacattcgctgggtggaggcaccttaagagaggtttcgtgaattctttcttgaggtagagaagcgctgtggggagaaagcatgcactcaccagtgcgccgagcagaacctcacctgaatatgtaaaacagtgaagaaggagagttttgaacagggctattgaagcgtgagttaggtggatctgagagactgatgactggaccttactggaaatgccgctggaagcagggtcaggacggagcccgcaggaaacgcgcctgtgtggatgggctgagtcacgattttcccgcctggcatatatgctcttatatttgctcactggtttagagtgagtctatttgtaacaacaacaacaacaaaaataaaacacttcaaataaacaggactcctttatttatgaaggacagctctttatttacgaaggacagctttactcagaacatcttgaatgataaaatccacaggcagtatgatttcgtttggtagttaatgctattttcttttacaacaaaatagcttgccggactttctgaacagcatggtgtaagaggtaagaggcattttgtctctgcctctcgtcataatgatcacggggcacatggctgtaggaagggccatgccctgaagacacaggcaaagtgcctgtaaataaaccctgagtgggcaacatgaatggccgcagaccagacaaaatgagaatccagttaaacaagtgcatgaaatatgccccttagtccactcagcctgcaacacaaaagcacagaacaggcagcttctaaaccacagacattgacttccgttctggaggccggaagtccaagatggagggtcccgc

SEQ ID NO: 4477 - DNA, 2300 bp, Homo sapien
ccccctcatcttgcagctggtaaaccactgccccccattggaattttgcaaggaggtatggtcaaggtcaacatttcctcactggtgttcacttggagggaaggaggaagtccatgaggtatcatctcactccagtcaaaagagctactatcaagaaatcaggccaggtgaggtgacttgcacctgtaatcccagcactttgggaggacgaagtgggcagatcacttgaggtcaggagttcgagaccagcctggccaacatggtgaaacccatctgtaccaaaaatgtaaaaaaaaaaaaaaaaagccaggtgtggtggcatgtgcctgtaatcctagctactcgggtggctgaggcaggagaatcacttgaacccaggaggcggaggttgcagtgagccaagattgtgccactgcactccagccttggtgacagagtgagactccgtctcaaaaaatagaaatcaaaagagaacaagtgttggcaaggatatggataaaagggaacccttacacactgctggtgggaatgtgagttattacacccattatggaaaacagtaaggaggttcccaaaaataaaaaaaatagaactatcattcgatccagcaatctaactactatgtacctacccaaaggaaaaaaaatccgtgtgtcaaagagccttcacacccccttgttttttgcagtactattcacaacagccaaagtgcggaatggatttcagcgtctatcagtggatgcatggataaataacatgtggtacgtatacaccatggaatgtgattatttggctataagaagaatgaaatcctattgtttgcagccatagtttctggggtgaaactagagaaccttaagtgaaataagcgaggaacagaaagaccaatattgcatgcttttgctcatatgtggagtctaaaaagttgatctcgtacaagtagaaagtagaataatggtttcaggggatgaggaggattgaggagaggagagaatagggagaaattggtcaaaggggacaaagttcccattagatcgaaagaggaggaacaagtcctggtgttctagtgcacagcagggtgactggttaacaatagcgtattttatatttcaaaataactggaaaagaggtttttgaatgttgtcatcacaaagaaatgataaaggtttaagaagataggctgatttgatccttaaacagcttacacatgtgtcaggacattaacttgtaacccataaatgtgtatgattattatgtaacccattataaataaataaaaagtaaaatacaatttaaaaattttttaaaatccagaaaaatcaactgtttttacaaaacataaaaagaatggaaggcaaaggctgagggtatttatgggagacatgtgaatacagcggggaagattttagaagctgttttcccgtggacaccttgagttgagtccacaccctgatgggaatgagacatcccaggcctcggaggtgctggacacgatccgtgcaggttgtgagaaaccccccacccccaacacacacacacagctcctgctgctgtctcctgtagccttctctccccgaatcggttctgtggaggaagccacgtgtggccggctgtgcctgtaagctgtttggacaacaatttctgggctgttccatccctggtcactgcttgacctaacagccgactcaatccttttggttaaacagcaagttaagcctctttgtttgggccagagccatgcgtgctcggacgtctgctgggagatctctgaaacagcacagctcttgcctgtagctgtacaatctcctctcttccccgttcctttcaggattatgtgtgtactagcagcgttttcacagtgaaaactgcacagaccctctcccagggctccccgcgagcccactgatccacaccggagcccagggccagccatttctgtatggcttttgactggctgcaggctctgcagacccatgcttgttggtgtgagtgctgctgagtccggcccagatcctacagaaatgactgtgagaatgatgaataacgtggcatgttcagacagaatcaatccacaggacgttaaaaacaccctgtctgccatttggacaggaaagttccaggcttcagctcccagaaaccaccttccttcatgtggagggacgcagcctcataaggtcagaatgagggcctggaaagtcagggtgtccggccaggcctctgggggtctgaggttattttggggggtgacaaatgaggacacacatagagcatgtaatgtctctgggaatttaaaatatata

SEQ ID NO: 4478 - DNA, 2300 bp, Homo sapien
cgaggtcaggagatcgagaccatcatggctaacacggtgaaaccccctctctactaaaaacacacacacacgaaaattagccgggcttggtggcgggcgcctgtagtcccagctactcgggaggctgaggcaggagaatggcgtgaacctgggaggcggagcttgcagtgagccgagatcgcgccactgcactacagcctgggcgagagcgagactccatctcaaaaaaaaaaaaaaaaaaaaagaatatttatatttatttgccatttgtggtttataaagaactgtgccagctatttgagacatacagaaaatcattgagtatccttaattgaatttacttcctaattagaaaagttcttgtaatacaaataacaataatacaaagtaaaacagaacaaaacaaaataaaactgataagacagcaatacagacagaaagccaggaaaaatagggccgcgtagtcagtgtgaccctctgttgatccagaaaatgacatgattcacaattccatgacggagtcctcctcttccatggacgtaggctccaagcacaacgccttgagccgtggtaatgtagccgcccagtgggttcaccttgccggttgcctggactcagccaatttatcaagacagggaaattgcaatagagaaagagtagttcatgcacagccagctgtgtgggaaactggagttttattatgactcagatcagattccctgatctggattcggggatcagagttgtaaaggataatttggtgggcggggaaggccagtgagttgagagtgctgattggtttggtcagagatgaaatcatagggatccgaagctgttttctcgtgcagagtcagttcctgggtgggggccacaacggatgagccagtttgcaggtctgggtggtgccagctgatccatcaagtgcagggtctgtaaaatacctcaagcacggatcttaggagcgctttagggagggtcagaatcttgtagcctccagctacatgacgcctaaaccataattactaatcttgcggctaatttgtaggtcctacaaaagcggtctagtccccaggcaagaaggaggtttgctttgggaaagggctattattgtctttgttttaaactataaactaagttcctcccaaagttagttcagcctatacccaggaaggaacgaggacagcttggaggtaagaagcaagacggagtaagctaagttagagctctttcactgtttctgtcataattttgcaatggtggtctccttaaggggcacacacacactgccttcctacgagggactgggacattggggtttctctgactggggctgatgcttcttttggaaaccttagacgaattctgtgggaggagaaaaaaaaaatgtctttttatttcctcagttagaaaaatggccaccaaagacacgcttgcctgggagcagcacaattaggccccaggctttctgatgcgtgttaaataaagccagtgaattgatcagaggctgttttgcacgtggcattggtgtctgctgagtgagcagcagaccactcaccaccaaagagtctctgtggggaccacggtcccactgtcgataagtaataagcacatgtatgcatgcaaaatatctcttcctaggaattgtggatggcttacaatcaacacacctgtctagtcaactcactcctggccttatatgtatgcacaagaatgaaatgaggtgagcttcattcaataccactcgccttgtgcacagagcctgtgatgggtcacgattgggcgggcagtcacgtgattcctggcttctaactccatgtagcaggtggtccacctggaaggtgtggatgggagtcttcttcgtgtggacggactctacagactgcatgcccagtccttccggaggggacgcacagcacgccgggcacgcccagtccttccagaggagacgcacagcacgccgggcacgcccagtccttccggaggggacgcacagcacgccgggcacgcccagtccttccggaggagacgcacagcacgccgggcacgcccagtccttccggaggggacgcacagcacgccgggcacgcccagtccttccagaggagacgcacagcatgccgggaatgagcaggcccctgttcttcggtatttcctttttctagctaatttaaccagaaattgtgccaaatcctgaaagctttttaaaattattattattaaataagaatctctgattccctgagccacgacacaggaaacaaacaaacaaaaccatggctacttccagaaggtagaactgt

SEQ ID NO: 4479 - DNA, 2300 bp, Homo sapien
ttatttaactcgtcatgtttgaactgttaggttgtatttatcgttttctgtattacagacgacttgatgacaaatgaccaatcctctaatgttcaatataaaaatatcaattgcataaggagataaggggcatttggctaaaataaaattcagtgtgccccaccctctccacatgtaatttgctctaaaaaggcatgaatgactaaattagcccttctattctccagcgcagctcctgagcccagcggtgggtgcaggtgcttagagcctggctctgctcttctgccgccagaaggcgaagggcacccaacccaggattctcctctccttttttattaatagaagagtgctcaggctcagtgcatgagagcagcgctctctgactttgcacttatcagagtaacctagggggcttgtttaaaaatacacattccctggctgagctcccagaaattggacttcagtggtttagcgggagtgtgcataggccaggtgattctgaggaccaacaggggttaggaattgccccgttaattctggccaagggagagatcagaccatccagcattgtccgcagcagagtttttccccctcttttgcaatgaatatttgatgctcagagggatgagccccaggatgaggcacacatccaagaaaaatccatgcctctccatcttttccccaggattgccctaaggcgagccgctctttgtgattccttcactttccccggttcatagaacaggcctcttcttagtctgttttgttgtctcttatctgttcaacaaacacccactgcgcaggaccatcctccggtgagccgtcgagtggggccgtttgggagcccttcttcgtgggtgagcactgaaggaacccgggtcccataagcccgtgcttctatgggggctgccccctctcccatcgcagggtaactggcaccaggctgttaagctgtggatgggcaaccgcacagtgcattggatgtgagtatttcagtacgtggagctggccagtggagccggccgaggtcaggcagagcgtacagcagcgcgcgtgtccgtggggagggagggtcctcccgcctccccgcctccccgccaggccagtcctgttgcgcctcctcctgccccactctgactttccagcgcccaggccggggcgccgccagggcgtctctgagggtcgcgccccgataccttcctccaccccacggcttcttccccccaagggcggggctgggggcccaggagcaccacagcccccatgggcccgggaaatggcagcttcgtcatggcccagcccgccacgctcaccttttcccaccacctggaggatccactctccgtccgtccttcccgacctcaggctgcagaggaaacctgggggcgggggtcgaggaagccgagccccgaggctcccagcgccgccccaggaggaatcttgcgggccactagaagctgtgcgcgcggccgggctcggcccccacaacggcccgagcggccgggcctgccgcgagcctccgcgtccaggtggggtctccgcgcccccattccacccctccccgccatcggcgctccccgcaactgcggggtttccacccgccccggcgctcgcgcccactcacggtctccctcgcccccccgggagatgctcccggcgttctatcccgccccgccctggcgcgccccgcaaacgatgtgaccccggccccctgcggtctcccctcctccggacgctgcccctgccccacctgtggcgctcccgtcatctctagagcccccaaccagagtcctccagcccacccgcgaggctcgcgcacctgcgatgcggccccactagcagggacccgcccacctgtggcgctacccctgcctctgccgcctcccgcaccgctagcgcggcccccacctacgacgacccccgcgtagatgctcctgcccacacccgccccagccccggcccctgcccctagccgcgcccgcgccccctcccccgcagcccctcccatacgctcgggccccgcccgtcaccgcccattggcgctggggccgggcgggggcgcgggcggggcggcggttccgagtcaggcgcgcgcgggcagggtccccattgcctgctgcgcacccggacgtgcggctcccctcggcctcctcgccatggacgcggacgactcccgggcccccaagggctccttgcggaagttcctggagcacctctccggggccggcaaggccatcggcgtgctgaccagcggcggggatgctcaaggtgcgcgcccccctcccggcggcgagggaggg

SEQ ID NO: 4480 - DNA, 2300 bp, Homo sapien
cgcctccccgccaggccagtcctgttgcgcctcctcctgccccactctgactttccagcgcccaggccggggcgccgccagggcgtctctgagggtcgcgccccgataccttcctccaccccacggcttcttccccccaagggcggggctgggggcccaggagcaccacagcccccatgggcccgggaaatggcagcttcgtcatggcccagcccgccacgctcaccttttcccaccacctggaggatccactctccgtccgtccttcccgacctcaggctgcagaggaaacctgggggcgggggtcgaggaagccgagccccgaggctcccagcgccgccccaggaggaatcttgcgggccactagaagctgtgcgcgcggccgggctcggcccccacaacggcccgagcggccgggcctgccgcgagcctccgcgtccaggtggggtctccgcgcccccattccacccctccccgccatcggcgctccccgcaactgcggggtttccacccgccccggcgctcgcgcccactcacggtctccctcgcccccccgggagatgctcccggcgttctatcccgccccgccctggcgcgccccgcaaacgatgtgaccccggccccctgcggtctcccctcctccggacgctgcccctgccccacctgtggcgctcccgtcatctctagagcccccaaccagagtcctccagcccacccgcgaggctcgcgcacctgcgatgcggccccactagcagggacccgcccacctgtggcgctacccctgcctctgccgcctcccgcaccgctagcgcggcccccacctacgacgacccccgcgtagatgctcctgcccacacccgccccagccccggcccctgcccctagccgcgcccgcgccccctcccccgcagcccctcccatacgctcgggccccgcccgtcaccgcccattggcgctggggccgggcgggggcgcgggcggggcggcggttccgagtcaggcgcgcgcgggcagggtccccattgcctgctgcgcacccggacgtgcggctcccctcggcctcctcgccatggacgcggacgactcccgggcccccaagggctccttgcggaagttcctggagcacctctccggggccggcaaggccatcggcgtgctgaccagcggcggggatgctcaaggtgcgcgcccccctcccggcggcgagggagggacggacggacggagctggggagaaccgggcgaaggcgatggggtgaccggagagaagaggggggaagcgatgggggggacccggggaaaggtggcgaagcgatggggagaaccggggagaagagcggggaagcgatggggagaaccgggaagaagcccgcgcccggaagcggcaggggtacctgcggggcggcatgagccggcgaggcagccccggggtccttgcccggtggggcgggggaggaagggacatggcggtaggaacctccatccggaagatcagtgagttttccaccttcggttttgttttaaatggaacctggcagagggagtcgcctgaagcgccctcgggggtcgttctgcctctgagctgtaggacggggccgggcgtcccctccgaagcgtgggtacagcgcgatcacttcctaagtgcccccccgccccccaactccgccgcacgccaccccctagaatgtcgaggaagaaacggctgggtccccgcgcgcctcctgtcgcctcgtgccctgcgcggcgtgggcggggtcctggctgctgcaatgcgggacgcggcgggggtgcgcggggttcccgcctggcgtctccagggcggtccggcagcccctcgcgtttccgctgggagatttttaaaaagggtttcctgcgctcgcatgtgctgtcgccttccggctcgtgacaaaaacgaaaaccaaaatgggtcccaggccctccccgccagcctccgcagacgggaaggatcaggaagcggggactccgggatgtcagcggcgccgcggcgcgggctccgggcttccctgccctgcaatgtggaagctgctctctaggaggggcccgaggctgggcccacggacgcgggcgcgccgggaggatatttaacattgaagagcggaaggtggcggagactcggcgcgccccaggccccgggtgcacgtgggggcgccggtgcccggatgatggagtgtcccgatccgtgcaatccctggcgggtagatcggcgcttcccaggcgaacgcaacctgggagccttagcgatcgcgcaggctggagacgcggcgcgccccgagctgggt

SEQ ID NO: 4481 - DNA, 2300 bp, Homo sapien
ccagggaagcatattgtttaacagcaactcgatgagaggcggcattgaggcaaagcagctgtccccaggtttgtgaacatcctcgtaggggatggagaaggctgcccgttggaagcagccaggcctcacggttcccgcttgtccacctcatcccgtctggcacagcacagtgagtgcacagaccgggacagtggccacaagtccgggcccaagcttgcccctggcccttcagtggttccgattccctttatgcagaactgcccagcccaggtctgtcctgagtgcgaggcagatgctcacccacgatccagcttcccacagatgcatgagaaatcagtgtgaagatggcctagtgtcttagattcttaattccgtaattgtaacgtatcctgttcaaagccgtgtcattctctgaagctgttgccaggaagtactgagatgtttgtttaccgattgcaaatgtggatcctttcttttatttttctaatccactgctcttgtctaagtgccaggtgacagagtccattgtgtgtaactgctgccagctttgtctggcttctctttccttaactatgcagaatccggttgccttgagttcggagaaaataaagaatcggccagggcagtggctcacacctataatcccagcactttggaaggccaaggcagaaggaccacttgagcccaggaatttaagacccgcctgggcaacatagagtgtgggtctacaaaaaaaattaagaaatcagccaggcatagttctagcttctcaggagactgaggcagaaggatcgcctgagcccaggagttcaaggctgcagtgggctatgatggtgccactgcactccagcctggtcaacagtgagaccctgtctcagaaaaatgataataaagaaatgataccaataacaaagagtttagaatggttgatttctctacccatggccattctgcctcacccctagtggggcaccccccgaacgcgccatggttacggcgatgagacgtgctgtttgctccccgcgcaggccagatcgataaggaggccgtgcagaagtacgcctacctcaacgtggtgggcatggtgggctccatcgacaatgatttctgcggcaccgacatgaccatcggcacggactccgccctgcacaggatcatcgaggtcgtcgacgccatcatgaccacggcccagaggtaaagcgctcagaggaaccggcgggaggccagtggggcccgacgtgtgcccagctcagacgttaccacgggctctagaacattctgcagattgggtgtcctggtgctggtctcgtaacttgacttttaggagctattgccagaacattgttctctggtctacttttcatttttaattttaaaacattccttgtttttaacctgatgatagaaaacagtttattagaatttggaaggaagaaacaaagtaattatcctctaaatgtcctacccaaacatctccagaaggagtggcaagcaggaaactgttgtgtggattttccacactactcattagaaacgcagccagcgatgtcctgccctgtgtaacctacggattcacgaagtgtcgtgggggccacagcgtttgatccgaggtgctctaggctcagcaggttatcactaaagactgtggggcgcaccgtacaatttctgaagcaatttgcatgaaaaccatgtggaatggtaaatagaataagtgtctcccctttaaggacgaggtgctcgagactgggagagtgcccgaatccagtccccagcatggcgcctcccagtcctctgtgtgcgtgtcctgttcccagtgacgcctcactggacattctcagtgcgtgggcgtgaaccccacagttggtggaaaatcaccgagttggaaggctgctcggagcagttggatttttccattccctgggaagacccacagtctctgggcattaagcacttagtgagtctggcactcacttgtttccgtgggagagatccagccgtggctgtcgacagcagctgccgactgtgcccaatagagaaggtatctgggaaagagcccagcacggggccggggagtgtgagtgtgtcctggcacaggcaggcagaaggtgtccaacgtgcaactggagagcgcagaggtggctcaagtccccttcctcgcaggagtctggaaggctactgcatagcgtttgccttagtagaaaatggaccatttttgaagcctaggtccctgcaggcctcctggctaactcggctgtcaaagccccttttctctgctttctgagctgtttccaggactgagt

SEQ ID NO: 4482 - DNA, 2300 bp, Homo sapien
aagaggtgagtgtgtgtagctgctcactttctctcggtttctgcctggaagcaggggaggctagcgtcatgggcaggcttggtttagaacattgaattattaactttttatccttgatatttaaaacattttcataatgactcagaagttggacggcaggggaaacacgcagctcccgctcctgggagcccattccgcttacgtcacctcttgccgagcccgtagaggttccgggactccccagcagacagagggggtcagctcgagtggccacgcgtgttctttggattagaatgttccggctcttaaacatgagctgctctgagaatgaggactgaccacttggcagccgacccgggcttctgtttgccacagtgggaaaaggcggcgtcttgctattccctgtgccctcccataacccagagcatcagctgagcacattcttacaaagccactgtgtcctcgtggccctgcctgggaacaggctttggcaggctttggcaggcttcgtgccctgggacttgctcaggccagtgcctgcctgtctggagaggactctgataccatgggctgtgcccctgctgtagacggggctgcaggctgccggggctggggatgggctgtggctccagcagccacggggcagaagacgtccccacctggctttgcaagtcggcttctttattgtgctttgttatggtcagttaaggagcaaagcatatctctggatatgaaaacagtgatggacacctgggaaagacatctgccaatatttataagtggtcatccataaagtccaggcaaagattttatttcccgcttaactgtaattaaattataggacaatggaccgagaaggaaccaaggaatttacgtagcccagccccactgtccttacagaggaataagctgagttccagagacagtcagtggcctctccagatcaccgggccggtgtgcccatgggctggggcgaggggaacgccttgattgggctggcttgtgctgttcaaatcacagctgaacaaattaaagctggttcaaggaagatgtttacattttttgtaaaatataagtaatagtttaaatgcaagctactgaaacgttacttttttatttttcttttttaaagcaacgaacatattacttgtattcattttctaggtgcgagccaagatcttgtctggtaacaacagtattatttttaaaaccaattttcagctgcctgttatatacactaaacgttctgctaggaaacaaaatttagaaataacttttcccatttagatctgaagaaagagcgaaaaaccttttccagtgcccagtacctccttccagatctgggctgctgtgtccgcatcacagttccgcatcctaacgagatgtttccttgcagcttgtcgtcacgcagctgggctatgacacacgtgtgaccatcctcgggcacgtgcagagaggagggaccccttcggcattcgacaggatcttggtgagttgggaagggttgggcatcttcacaaggtctctaggaggaagcgtttctggagaggcacaggcaccagccggccacagaggctggcaaggtgctccccgagagatgcccgcggcccggccctcatcttaacgatccttgagacctttggtgtagaccagtctctaggcctgcagccattcagatgcggggagagctccctaatgtgggaaggcagtgcttggtgttggcacgacgtggaccccagagggcacaatcccagggcagaaaggctgtgtttctagtgagtttctggaaactgactcagggcagcaggaatcccaagtacaaaccctcagttcttaacactcctgctctccatgtgccctgacctcctctctgttcccgtcttgccagttctaaaggagtggaaatcgctttgctctaaagagttgggctggaagcgggaggggctgtgagcacctgactgaggtcattggacgtcatggaaagataggaggtgacagggacagggcaggacgggaggctgcccctgacccacatggacctggtttccaggccagccgcatgggagtggaggcagtcatcgccttgctagaggccaccccggacaccccagcttgcgtcgtgtcactgaacgggaaccacgccgtgcgcctgccgctgatggagtgcgtgcagatggtgagtgggcagcccatggccaagggcagggcggagacggctgggacagaagctgcttgtcaggccagcctgggcaccttgggtgtctcgtcggtgcacgatgcattacacggcctttctgaga

SEQ ID NO: 4483 - DNA, 2300 bp, Homo sapien
taaaaggctcagagcactgaacgacatgcggtacgtgtattttgagcctgtgtctcatgtctctgcttgtctagagacgaccgtggtaggtgtcacttgccctgaccttgaaaccacccttgtgtggctttgtttttaaagctgagggaccactactgtgcacctgctgtttgtcaggcgtcttcctgagggtctgacatgcttgaataaccttagagatagctggaagtaggagtatttttctcatcttacagatgaggaaattgaagttcagagcgagaaagaacttgaccaagatcctgacgttgcccagggctgcctggcgtgcatcagtcccagccccgtgtcccagggcctccatccgggcccctctgctcccccgcccgctgtgacctcgctcccatcccacatcccccagtgagctggtgtgttctgttttgtttttccccaccataatcaaattgagaattccttagaaccatgcctgagagatttcatttcctctggctttgttctcttggagttaaatcttcacagtgttgtgtccacaaacagcaggtgacaccttctctttttcctcagaagcctcctgagctaagcagtcccagggctctgacctcacagccgggccgtgtggggctggctgccaaccagcattaggacacacttggcggccggtcgtctagaccattaaccctggggctgctggctgcccgggtcagactggagggggctggtgggaaggaccgagccagtctctacctaccccatccatgatgcaccaggtcctgacacattctttcttcttttcatcattgttttaaaagactcaggatgtgcagaaggcgatggacgagaggagatttcaagatgcggttcgactccgagggaggtgaggtgctttggagaaagctctgccctgtcaggaacacacacccctcaggcccagccactgcaaacgtgcttaggggttgtgcttattccatgtcactgtgaaaaatcagaaagtcaggcagtactcacagcaccgctcttgcagtagcaggccctggtgactggttagagagaaatcattttctaaatttgccattggtcctttttggtaaggtgatggttgtttaggagctaatgagattaaggcacaaggtgacttgtggccctttaacaacaaaccaaaacaaaaaaaggagtctccttctgttgcctaggctaaagtgcagtggtgccatctcagctccctgcaatctctgcctcccatgttcaagcaattctcatgtctcagcctcccaagtagctgcgactaccagctcgtaccagtgcatgtcaccacatccagctaatttttgtatttttagtacagacggggtttcaacatgttggccaggctggtctcaaattcctgacctcaaatgattcacccgcctcagcctcccaaagtgctgggattacaggcttgagccaccgcacgcatgtcttgcaagagaaagttatgaagtgtagaagcgtgcccttttctcttagtccatttccaccagacacggacagcaccgcgggtcgcggctaagggctctgccatgcacatggaaccctggggcctcctccttctgcccagatagtcgggcagacacattgagtgctggcagataagccaccttttctccacatgagccctgagttgtgtccggtattctcgactccggtccaacgacacccttttcctttaggagctttgcgggcaacctgaacacctacaagcgacttgccatcaagctgccggatgatcagatcccaaaggtaggtggccggcctcccgcgatgccccgacctctcctgcgggcctcccctcatggcctctgcctcagtgaatgaggccacctgttttcaggcctggcacggcatgagccactgccaaagtgtgcagcaaatggagctcacgtgtgcccgtgacccagcactcacctgccttctgttttgcagaccaattgcaacgtagctgtcatcaacgtgggggcacccgcggctgggatgaacgcagccgtacgctcagctgtgcgcgtgggcattgccgacggccacaggatgctcgccatctatgatggctttgacggcttcgccaagggccaggtgagtcacccaggatgccgtaggcaggcagacaccctggctgtgagcacagtggacgtggcggcgggggggtgccctccatggccctcataccttttcatgcctcagtccgggatcctgtgatattgtgactgaagcattgcttctggagtaaaatctcaccctaaggtaggttt

SEQ ID NO: 4484 - DNA, 2300 bp, Homo sapien
ggtggaggctgtgccatggggtgcgggggaccctgctcacagctcaccttgtggtcacccagcactgaccccgttcacagctcgccttgtggtcacccagcactgacccacccgccccaccctcctatccaccgtgctgtgaactcacctgccacgggtctacacccactgtccgaagccctcggcccacacgggctccaggccttgggatgctttgcgttgcaccagggctgcagagcccagatcgctcactgtccgactctcccagggaggtgtgggcgccgccctgtgtcccaccagtagcatttctgcagcagatgtggggatattcacagtaagacggacacgtccaagaccataaatagttggttttgccaccacgtggatgtcaaaaacaccttgctgtgtggggccacttggaggtgggaacagtgggcgtgtggacctgtcctgctgtgactttggttaacaccctgaggtggagtctgaaaaaccccggtgtacacgggctcaagaaccgctcccctttctgataccggagcgcatttcccagtggaaccccagagcagcaactcaggttcttgctcgcctgtgcggctttgtgtgcggcttgccgagggcagaaacggcagcttccgcccggagagcagagatgtggcgtggggctgagtgtggcccaccggtaatccagctgcatgcccccttccctgcctgcacctgggcgccgcctctgcacgatgaaggcgggcatttggtgtggtccttacagccgtgtgccccatcccactgatccttgcctgcctgcagaaagctacaggattggctttgcctttaagtgtcctgactgccctggcctcccttacctaccatgacacgccgagagctgagctgtcccactcgtgactaactcgccgttgcctgcaacctgctccgttgcctgcctcacaccaccccgctgtgctgcctgcaggcaccccctttcatgaggacctgggctgtgcccaggcggccccctgtgttgctggggcctgtgctgctctcgcacggcctccagagcctccctcggccccttgacccgcatgaaccggcttcccctggtgactcagtcccctcccgtcccttcctggacctcagcacaggccctggggctggcaggtgagcacccggcacccccgctaaccgcttggccctgctgcttcaggcttacaagagtgcgtgcgacatggccgaggcacgaggccgccaccaggagctttgcatccccctgtgtgtggtgccggccacgattagcaacaatgtcccaggcacagaaataagcctgggctccgacactggcctgaatgctgttgttgaggtaagagaaccccgtttcctctcattgcttttccgtcatttattttagcaacttgtttcttctgtgctaaggatgagccggatttattcttcttcttttctcccctttgttagcttggctttatgtcacactggccagaacagggtaaaatttttttagcttctctgccttagggagagcctgtctttattgattaaaagtgagatgatatatccagtccttgggatcgtgtttctatcccacctagactaggggagccgcaggtaccattgctctggaggctgcctctcctgcccacgctgagtagtgaggctgcagggccagctgtgggagcctgcaggaaggggtgtaaatgcccggtaagtacgagctccaggacagagccgtacccactgggggccgctgcctggaaaacagccttcctggtgagacaagaggctctttagagagccgaaatcacgccctcctgggcaggcggtttcaccaacatgtgccttgggaggggtggattctgccagtcgtgggtgtggtgctgacacccacatggtggcccctccggtccctgatactctgacctacctctatggtcataagctggacatgaagacctatggtagttccacaggcctttgctgcagagacggtcctcactcagctgcagacaggacggtggccaccgtgacatgtggggtcacgtccgtgacttggccacctggtgcgagggacccacagcaaagcagaactgctggccggggtaggcctgcatcgcgtgcggggacagcagccactggcctttaccttacatcttgacgtccaagccagctccggagtttgcagtgaaaactcccagtcctgctggagactccttagttcagcttagcacagaacctcggaagacagcagttctattccgggtacttccttcagagctgagttacagtgcagg

SEQ ID NO: 4485 - DNA, 2300 bp, Homo sapien
gggcgtgtcctggccatctctctcctaggcttctccctgtgttccccagtgctgtggtggtcttgcagaggctggccctggctcattcccaggacttccttgggccccgcacttgacccctgttgggtgaatgccattagggtccggccatcgctggcttcactctcctttagcaccttgtagatgtccatgcacacttccaccctcgcgccccacacgcgacgcagccctaccctggccagcagctgtgctttgctgcgggttccatgctgtagcagggacaggacccccaccccctgtcccgtctggccaccgacttcagcagaggctcggctgccgtgagggataccagtcatgggaaaactggcctccctgcagattcacagagcaaggtggttctcacagagaagtcagtggcttttttctacgttaatgctgtagcaaacgccaccttttctttcaccaccaatttatatttcttaacacccatggagcaaagtgtggtgatgtttgaactgtagcctggggctctcgctcccatgggactcctcggggaatttctcagcagcaggatcgcctctgcgtccttgcagggggtggcgtctgctgggggcacatcccatcgtgcagggggaacggctgaggtcacaggctttgcctgacaagtgccactcacagctgctgtccacgtgccagccctgggacacagccctctgccatccttccacccactcggaggccagggaggcacctccgtgccacactgcaggcaggcagggccgcgcttgggatctgccgccttcttgtcagtgctgctttgactaattgcctgaggcacggccggagtgacttgctatttttagaagctaattcaggcttcagatgccatctaggtaatgaggagagagttcaggaaagctgtatctaagctccagcaaaggcggcctcttccgtaccagctgtcgctgcgtttacactgagacgagcacacagtcgggggcgtggctcaggtgtcagggctgcgctgttccacagccccctggggcagcctggcgggaccagaactcagacacgcctgggcacaaatcagcctcttgggagagctgctttgcccgcagaattcttttgccattaagcggttgatgtcattctttgaatgagtgacagtaattccccacctcagggtgggctgcgggggagattcagttggaaaagtaacccatgaggttttgtgcctctgggggtcctgaggccccacccgtgcctgggattctctaagacaaaggagaagtcttaaagccttacagcgtcttaagtcttagatcacatttagagagacccggtacaggtggaacagtgcaaccctcagaattctgcactggcccttcaagaaggcagttgtgggctctttggacccttgacggggatctgtcctctgtcctcctaagcacaaagatgggaattcttcccattgcctgtttctctccccatctcggcttctacacaatgcaaagtggcccgctaactagagtccgtgttcagttttgaatacatcaaccaattattttgggaagaaaagaatctgccaaagaaactggaaatacagtttggaatcatttaatcaagcctgcatttattaatcaaagtgcacttttagatttcatccgaagtgctcaagtgaacatttcccaatgggtgttaaacttgggtgcacagactctcacgtggctcctagtctcaagtccacacccccacttcatgctcttactcttggctgagtcccatggaggcccattagggaatcctgcaggatcagccgttgaccaggacggacggacggctggctggggaataccatgcttatgtcattcagagacaagcatttcttgagcgcctgctgtgggggctcggccgggtgctgctgatggtgcactggtgtaagcccagcccacagttcctgtcctcatggaatttgcagcctagtgaggaagatcctcccaagtcaaataaccacaaggtaactgcagggagagacaccgggataatttctgtgaagagaggacatggggtggctccgagagcccctgacagagggaactttgtggtcctagaaaccaggtggtgttttcctgaggaaatgacattttcctctggatcagagctgaggaaggtgcctctgtgtgtcccgtggccgctgtgacactgaccacacacctggggctggaaaataatactctctcccacagctctggagcgcaggagccatgggctgaggccagaatgtttgctccaggagcgtc

SEQ ID NO: 4486 - DNA, 2300 bp, Homo sapien
cggctgaggtcacaggctttgcctgacaagtgccactcacagctgctgtccacgtgccagccctgggacacagccctctgccatccttccacccactcggaggccagggaggcacctccgtgccacactgcaggcaggcagggccgcgcttgggatctgccgccttcttgtcagtgctgctttgactaattgcctgaggcacggccggagtgacttgctatttttagaagctaattcaggcttcagatgccatctaggtaatgaggagagagttcaggaaagctgtatctaagctccagcaaaggcggcctcttccgtaccagctgtcgctgcgtttacactgagacgagcacacagtcgggggcgtggctcaggtgtcagggctgcgctgttccacagccccctggggcagcctggcgggaccagaactcagacacgcctgggcacaaatcagcctcttgggagagctgctttgcccgcagaattcttttgccattaagcggttgatgtcattctttgaatgagtgacagtaattccccacctcagggtgggctgcgggggagattcagttggaaaagtaacccatgaggttttgtgcctctgggggtcctgaggccccacccgtgcctgggattctctaagacaaaggagaagtcttaaagccttacagcgtcttaagtcttagatcacatttagagagacccggtacaggtggaacagtgcaaccctcagaattctgcactggcccttcaagaaggcagttgtgggctctttggacccttgacggggatctgtcctctgtcctcctaagcacaaagatgggaattcttcccattgcctgtttctctccccatctcggcttctacacaatgcaaagtggcccgctaactagagtccgtgttcagttttgaatacatcaaccaattattttgggaagaaaagaatctgccaaagaaactggaaatacagtttggaatcatttaatcaagcctgcatttattaatcaaagtgcacttttagatttcatccgaagtgctcaagtgaacatttcccaatgggtgttaaacttgggtgcacagactctcacgtggctcctagtctcaagtccacacccccacttcatgctcttactcttggctgagtcccatggaggcccattagggaatcctgcaggatcagccgttgaccaggacggacggacggctggctggggaataccatgcttatgtcattcagagacaagcatttcttgagcgcctgctgtgggggctcggccgggtgctgctgatggtgcactggtgtaagcccagcccacagttcctgtcctcatggaatttgcagcctagtgaggaagatcctcccaagtcaaataaccacaaggtaactgcagggagagacaccgggataatttctgtgaagagaggacatggggtggctccgagagcccctgacagagggaactttgtggtcctagaaaccaggtggtgttttcctgaggaaatgacattttcctctggatcagagctgaggaaggtgcctctgtgtgtcccgtggccgctgtgacactgaccacacacctggggctggaaaataatactctctcccacagctctggagcgcaggagccatgggctgaggccagaatgtttgctccaggagcgtccctcgtggcccgttcaggtgcccagagttgcgggccttgcacgccttgtacgccttgttccctggcgcctcctccttccatgtgggtgtgcagcatcccgctccagggccttcagcctctgcgcccctcatctgctgatgcaggtgatggcatttaaggcccacctgggtactcctaggattcacctttatcaccgcatgagggagcattcccaggttccagggattagggataggactgggattcctttgggggctgctctcccgcccaccactgtgccggaatgtgatgcacacagcggccagcatatccaaaggccccaggaggacctggggtggctggaacaggacctggtgccgggagcaggcggggccggggattcccgacaaaggcttgatgtgtacttgaagtgagcaaagggttttgaataaaccaagaactggatcagatttatgttttttatagatggggtcctttctgtgtgaacggattggagggtcccggggtgggagctgaggcccaggaagagggcgttgcagccggactgatgtatgggtgggaaggcggccgatgcatttctttgccatttttctccccgccgagcttgggtcctcatggagggcggatggcagacat

SEQ ID NO: 4487 - DNA, 2300 bp, Homo sapien
ctagaagcatggcttccagcacagcaagggggagaactcatcagagtggcaatggctacctacgtatctacctacatgcctgcctacctacctaatctagctatgcatccacgggacagggtctcactgtcgcccaggctggtgtgcagtggcgcaatctgctcactgcagtttcaacctccccaggctcaagggatcctcccgccttagcctcctgtagctaggaccacaggcacttgccactgcggccggctggctccttcttaaaaactgttggaatacatgttctcttaggcagcaaagccatagaaaatcaagaatattgctttacagtaacggtgttatgtttatgaaagctaacagaactgcatccacatcaggcacctccaactgaaatgagctaagaacgctctcaggctgtatcagccccctcacctggggcctgtgtttcaggacccccacggcagggctgcaacctcagacagccactatggatactatgtttttttcctatacctatgataaagtttatagattaggtgcagcaagatattaacaaaatacaacaattatactgtaataaaagttacgctgatgggctactattaagtaaaacaagggttctgtgaacagaagctcttggatacccacagcgtatctgatacctagacggctactgggtgaccaacaggcaggtaccgtagacagcgtcagctttcatcccactgcttagaagaatggtgtacaatttaaaacttaggaagtgtttatgtctggaattttccatttaatattttcagaccgagggggactgtgggtaataaaccatggaaggcaaacccacggatggaggcactaccgtgttctgccaaaatatgctggctgaagccagggtttactgaaggcagaatgcttcctgtttcggctgctggccctaatcctcgcgccagaaaggacattgctgggtgtggctaagtgcccaaggagtgaaaagaagcacacagaacaacttttgtctaaaattcactgcagtagaagaaaatgacactgataatcatgagtagaagactaaaacgacgtgtgcatcccaatgtgtgaactagagcaaaactcacctgtaagagtaaagggtgaaaatcccattgtggctgagttttgcgcctccaccataagcaccgcctttttctcgaatttctgtatgcaagaatttggcagtcatcaaacgtgcaaggattttaagactgaaatgattaaaaaatgcaagttaataccgtggctgataaaaaagcatagacaatgaagtaattgttggattaagtgaaaatgaaaatcgagttgtaaaataatgctgcataaattatggtcccatattttggtcttgttttttaagagatggggtctcgctctgtcgccaggctggagtgcattagtgcaatcacagctcactgcagctttgaactcctgggctcaagggatcctcccacaacagcctcctgagtagctgggcctacaggtgtgtgccaccacgcctgactatttttacagtttttgtagaggcagggtctagctttgttgcccaggctggtctcaaacacctggcttcaagtgatcctcctgccttcaaagtgctgagcttacaggcatgagattttcttttcaattaaccaaaactaaaaagcacaaggaagcacaattttcaaacagttggcttagattacagggttgaagggagaggtggtggggagggaatcttaacacttccagcaccacactgcttaacttgttccaatgcacatgtggcatttttaaaatctcgtgaagtagaaagaggttatttctattataaaggcaaatgagcaaatgaacatttatttaaatgtctcacatcagaatatggaaagaaaggaaactgaagtgagttttataagaatcccttaagaaaacacacactctctgataaagcacatttctaggaacagggccaatttcctctgccttccactgtgaacggtaacatcacattcaagctgattctagaacacatccacctccgacagaaggcggggcagacaatgatgggagggtctgcagcacagacacaggctccttgaagacgcccgtggtgagatcagccccaggtcgccgcttccacagacaggccttttcctaaagtggatgaagggagtcaaataggccaggtgggaaatcaaggaaggagtgggcgtgttcccaggggctgtggtgggagaagtcacgaccatctcgtgtgggtcctccaggagaaacccagcgccactcgg

SEQ ID NO: 4488 - DNA, 2300 bp, Homo sapien
cttgttttttaagagatggggtctcgctctgtcgccaggctggagtgcattagtgcaatcacagctcactgcagctttgaactcctgggctcaagggatcctcccacaacagcctcctgagtagctgggcctacaggtgtgtgccaccacgcctgactatttttacagtttttgtagaggcagggtctagctttgttgcccaggctggtctcaaacacctggcttcaagtgatcctcctgccttcaaagtgctgagcttacaggcatgagattttcttttcaattaaccaaaactaaaaagcacaaggaagcacaattttcaaacagttggcttagattacagggttgaagggagaggtggtggggagggaatcttaacacttccagcaccacactgcttaacttgttccaatgcacatgtggcatttttaaaatctcgtgaagtagaaagaggttatttctattataaaggcaaatgagcaaatgaacatttatttaaatgtctcacatcagaatatggaaagaaaggaaactgaagtgagttttataagaatcccttaagaaaacacacactctctgataaagcacatttctaggaacagggccaatttcctctgccttccactgtgaacggtaacatcacattcaagctgattctagaacacatccacctccgacagaaggcggggcagacaatgatgggagggtctgcagcacagacacaggctccttgaagacgcccgtggtgagatcagccccaggtcgccgcttccacagacaggccttttcctaaagtggatgaagggagtcaaataggccaggtgggaaatcaaggaaggagtgggcgtgttcccaggggctgtggtgggagaagtcacgaccatctcgtgtgggtcctccaggagaaacccagcgccactcgggtggctggggcgccgtcagccgggactagcgaggctggagtcagaccctgggggacggagtctccaccagcaccggcagggatggcgttccatccgtccacacattatccttcctgagaaatttctattacttgtatattaaaaacatgctcacttttgaaagattataaaatacaaaacacaaggaaaaaaagatctggaatcccactgcccagggggaacctccacatttttagtgttttctgtctacattttcctgttggatagtggaaacagacaccactcttctgccggcatagcagacagatctgttcatcttctacaaatatggaaataaatgaacaaaacagctgaccacatacttctacagccagctctttctgggcccccactgcagccccacgtttcttcccgcctgcctcctacacacctccccatctgtgaccctctgtgacacacgtgcacctcggaggcccggctccttctccaatcaggacaggctgcccaggcctaagcctgccttccccctctctaccaggctcactccttggtttagtccctcatgggggtagctgcctgggacaaggacacaggaagtgaatttccgggatataacatgtttgcacatatctgtgtcatacacacccaactgacgggtccccaaaggtgcacgtctgtgagtctgtcctggtctggccagtttccccagatgggatgaacacagccaaggggcagccagagttcggaagaaggggctggagggccagtctgtaggctgcaaactccctcgccccacgccactttgggaacaggcctgaccctgactcttggctgtggcttcggctgctcaacccagggcctccttccctgagcttctgacttggtggggagacaggggagacaaactccttagagggactgtgaggcggcctccagccctgccatctgcagggctctgcaggaccacctggtttctccccactgccctgtccctctgtggccccaggtcaggcaccccccacccacccagagtctggctcacgaggttctcctgcagcccccatggctctccgggtcacctcccactctttcccttgtagcttcgtgtcttgatctgcctttgctgtcattcacgcatctgtcctcatgaaggcttaacctaccatgtttatcagaaatctcagcctaaattcattcgatttttacctagagatgaggtgagtacatggggcatgttgaaagcagtctgtgtttaaggtcataggtatctgtattgttcataggactcctcaataatagaaattgtttacaaaaatgactggctctaaaactgggtctctgttcacaaagactgctggttaaagaggagcactcgta

SEQ ID NO: 4489 - DNA, 2300 bp, Homo sapien
gaaggatcacttgagcccaggaggcagaggctgcagtgagctgagatggtgccactgtactccagcctgggtgacagagccagaccctgtctcaaaacaaaaagaagataagtataaagatcactaaatttcagtccatcaagaaatggtttgaaaactctaaaaacaagttgaatctatttaatgtaaactttggaggggtgcaggagaagctgcttgagcaaaccaccacttcctagcagaattccttaataattgaaaatgagaattaggaaaagggctacccactaagcaggttattagtgcgtctaaatatggtcagcctggaaataggagatactttgcaaaccacagtgctcctgtactccccacacttggcgtggacggctaattctggatgttaagataataacataggagacaagttgcatcaaaccttttaattatggccctgaatattcctttttcttgtttcttttttaggtctagaattacggagtcaacaaagcaaacctcaagatgcctcttgtctgccagcgttgaaagtttccgatattgaacccaccatacctgtcacagagttggacgtggtcctgacaggtcactgtgaacgctacgcttttcccgggtctcgggttccttgggggaattaaatgtcactcctcacagaagcagtagagtcatgtcttggaggttttccctgaaacacttgagcagccctgtgcgttcatagtctcgctctacacgattcttctgccttgttcttaactctcggtggtgatagactccttcactcagtaagagcccgtgtgtgtgtgtgttcctgagaggggtttgatagggcgctctgatttcctgcttctagaatcaaatgaggatttgggttacgctgtgactgtgtgaagcgcagttttaaaaatcgaggcgtcctcagagccctttttcctaatgtttaccctgccatcagcatagaggaagcagagggacgagagcccccagaaagctgagtgctgagttgaaaggaagttggagaccaggtttatccccctgccgtgtcctggcatttcgttccttggcacgttttgttccgtgacacgtttcattccatggcaccttttgttccgtggtactttttgtcacgtggtctgtcactgcttttgagttctcagggtgccccctttctctctggctcctggctagtagcaggagaggcacctttggggtaacctcacctgcgacagtgttgatgctgagcttaccagcgggtgtggccggacgtgactgagctgagggcagcatggctctcacttgcaccttgaggacggggatgggatttcaccctgggcatccctgtgtcctgtgaagcgtctccagcccaccttttgtcttctgacagcgcttgtcatgtttgtatctcatttattttcatgtgtgtgtgtgtgtgggcgcatgtgagtggaactcgaggctgacatctctctgatctgttaaccctggcagtttttgtccgtgaatctcattaagtgtttgctaagagtgagaataaatcagtcatccttccgcaccttggtccctccgctggtctagggtgctctgctaggtagggacatatgaagctgaatgtccagccctccccttgaggtcaggatgggtgggtgggggacaccaggagccttgtttggggccctggggcagccttctgttgtggggccagagggtggcagggcctgttggggaagatgagcagcgctgaggacgggtgcgatgtgggcccaggggtctcgggggcacctggtcagagttccctctggttgacggggagaggttgggtaactggaactcgcagttatgagaccagaagttcgtggttccatccttccgttcccattccttggagagcacgggttgctttactattgaagacagttccagtttttagtcatgaaaatatgattgggaaatttatataaactctagtataagtcttaaacctccattcttgaaaaaacaataaatagcattgtttttaaatattacaagtggttagaattttactggcagcaataaaaattaaatcccttttgtttttctagctggagatatccctgttcagtactgcgcccagcccaccaatggcatggtgtatttccgggccttctccagcctgaacacactccccgaggagctgaggccctatgtgcccctcttctgcagcgtcctcaccaagtacgagtcgcaacatacccttgtgtgtcttattaatgtctgctttgtgtgcatatctgtattctaatgcatca

SEQ ID NO: 4490 - DNA, 2300 bp, Homo sapien
aatcaattactttattagagtttgcgaagttttctagttctgtaacttcttcatttgtttgctggacttcttcaaagaagagctccacatcagctgggctatcgggttatcttgaaatatggttctgtggaaaaggcagggccggctgctctccctgggaagtccagtttgaggaggaggggtggtgcaggaactacttttaatggtgacagaagaggctgtcttgtttttttttttttttttttttaaagacagggtctggttctgtcccccaggctggagtacagtggcatgatcttgtcttactgcagcctcagcctcctgggccacctcagcctcctgagtagctgggactacaggcgcacgccaccatgcccagctagtgcttatatttttttgtagagacagagtctcgccatgttgcccaggctggtcttgaacttctgagttcagtctgcccaccttgacctcccaaagtgctgggattacaggtgtgagccactgcgcccaacatggagaagagagttctttcttttcttcttttttttttttttccccagtcttgttttgttttttagtaccactctgacctcacagaaatatttctgtatatgtatatatttgagattatgtgatcagatggaatttattcatttttatgcccacatttgccccagctgtgggcccgttttggtctaacttctttggtttctacgcccccacccccacctccctaatgcacgcacagccgggccctccctgctccagaggttcaactgtctgtttccccagggagctctgatttctgtggctaatggggaagggtctttggagagcagcatctgaacactaggggtggtgattgctcctggattctctcaaccccgagtgtgtaaaatttgtttctaaattctagagtgagaaatttctgaaggttctgtaagatactagtttcccaaaccttaaccatagctcaggctatatagtaaagaaaaagataaattctgtcattgtaacctttttcctctggttgaataaatgtgttatctttataaacgtgtataaccttgaatttgttgccaaaaattgagttttgtgaaattgtcagttggattactatattactgtacctagggttataaagtgttttaacaaatacctcatttggtttttgtcacatctagatgaagtttaaaatgtaagatcgatttttggctaggtgtggtggctcatgcctgcaaatccaagcacttacggaggccaagatgggaggattgcttgaggccaggagtttgagaccagcatgggtaacatagaacccacctctaaaacttaaaaattagccggtcaggcacggtggctcacgcctgtaattccagcactttgggaggctgagacgggtggatcacctgaggtcaggagttcgagaccagcctaaccaacatggtgaaaccctatctctactaaaaatacaaaaattagctgggcatggtggtgggcacctgtaatcccagcaacttgggaggctgaggcaggagaatcttttaaacctgggagtcggaggttgcagtgagctgagattgtgccattgcactccagcctggggggacggggcgagactccatctcaaaaaaaaaaaccccccaccaaaaccaagtgtggtggtgtagtcctggtagtcccggctactgaggaggctgaggctggaggattgcttgaggctgcagtgagctgtgacggtgccactgcactccagcagatgcctgaagccaggaatagcaccatgccctgtgaatgaacgttgaatttataaattaggcacagcgagaggttaacaacaataactaataataaaatagaacaattataacaatatactgtaataagttacatgaattttggtctctcgaagtaccgtgatatttttggaccttggttgagtaagggtgactgaaaccgaaaggcgagaccttgggtaaggggcactcctgtgctgtgtttcagtgaaacagacagcacttgatctcacatcttttaaactaaaacagactaattatattcccttaaaattttaggttcttcacgtacggtaattttccattagaacagcatctgaaacaaattcacgaggaagcactgagcaaattccagaaaattgaaccaagcaccgtggtgccagctcagacaccctgggacaagcctgtgagtgccccaccgtgtttgtgtccttcctggtaaatatgttgacatgaggacttggactgggtattgatgatgggatttcagatgctgtcatgttt

SEQ ID NO: 4491 - DNA, 2300 bp, Homo sapien
cagtaagacaagatcatgccactgtactccagcctgggggacagaaccagaccctgtctttaaaaaaaaaaaaaaaaaaaaacaagacagcctcttctgtcaccattaaaagtagttcctgcaccacccctcctcctcaaactggacttcccagggagagcagccggccctgccttttccacagaaccatatttcaagataacccgatagcccagctgatgtggagctcttctttgaagaagtccagcaaacaaatgaagaagttacagaactagaaaacttcgcaaactctaataaagtaattgattcaggcaataatcctcaatgaatatgaaaaccattaataggttgatgaggaactcattatcacaggacaccagaaactcaagcccaccagatggtctgtggctgaagggaaaaagcagatcttcccaaggcagtggctgactctcagcatggaccccgctggtgtgagatccccagtggaggcgagcagacctcacatgatggtaggatgtggccgtctatggagagctccccatgagggactctgcttacaaaggcacagcctgactcaaactaagtctttggatctaagttccagtgctcaggaaacacaggaacatggcacccaacaccaggcgggaacagccaggccacctggaaagtgagtgcgccagaaagaaactgggcctgcacactcctctgccgtcccctagagggtgcccaggagaaacccgggccgaccaggtgtgacctgtgggaccccgtgcaacaaacactttggggccaactagaaaatctgaatatggaataagaaataggcagttttaagaaagtatgttttattctattaaaactgaaaatggcattagctcatgtaagaaaaaatcctcacgttttagggtcacaaattcaaacatttacgggcaaatgatcatgacgtctataatttacttccaaaaacttcagcaagggaaaggatatctattacatgataagtgtttaggggctcattattctagtatctctacttttctgtatgcttcaagttttcataattatttttacataaaataatcttgcaaatatgtttttacattagcattcatatgtaaatacaattagtgttttatataagatatatgactatattattattataatgaccttgtattagtgacataagaacaagcaatgtatcagaaagtgaggatgtaattaaggttcagtaactgcatccactattggaagagcacttctccgtgccaaggagagggcttcaagcttcacaccccgtgtcaaggtgggcaccatccatgcacccccactttccacgcaaccaagctagatgtgaggcaacaggctgcggggccaggaccctcctctgggggactctaaacgctgtgtttgtaaccaccatgctgagcctcctgagggctatcattgtaaatgtccaaaatcaatgtccaagtaagataggcaaacttaggccaagaatcttacctagacttagatatttcttaagcattgctaaatgtgagagaagccatgccataaactgttaagaacacaaacaagtcaacttttcacaatccaccatcaaacttttccaacaaaatattacctagcattgcttgggtgatagtgagtggcatgaaactgcttaagctgctcccatgtaagctccgggatgcacagtgggtcacccccggagaccactgagtacgtgtggtcaggaagaagtctgttctgaaggtgctgggagaatatcctctcattgtctgtcttgaaacgtaaaataaataaatcataagtatacatgtaaaataatacacacgttacattacttacaatatagccaattgatcacattctggtgcatacacctgtaatactttgcaaataaagctgttctaatggtttaaaaaaaaaaaaaaaacacccacgcaggcattgtttaacacggtattcaatcattcatcacccacgcacaggacccaaggattgagaagaacaatggattttttgatgtgtggtgcaacaaacgcatagctgagggctgtaaatcgggatggatcagtcggtctgcccaccagccgtgagggaagtggggagaagctgtcaccccaacttgagttcaagaagactccttggaagaaaagaccaccaaattgagaatgaaaaggtaagaaatagttcaccagccgagaggagctacgggaatcagagagcaggccacccatgagcctcagggacaccaggacagacaggttgtccaagtcacaaagggacatgaa

SEQ ID NO: 4492 - DNA, 2300 bp, Homo sapien
ttttctcttggagatatcgctacaatgccagagttactactaatgttgatgtttgacttttagtaagactgacgatagtggatagggtgacgatgaacagtgcattctgtgggggagtgacattgaagagcgggttaaatccatgctgttacagaatgaggtcatctttgtagatgtatgaaagtctctggagaaacttgagagagtttagatattcgctgaagaaagccctggtgcccgtcgagtgcagatcctgagacgggatgggaaagccggcacttggggttatgagctgggacagctgctgaggccagggaccagagcatggggccactgccccatcccaagaatagctacagcttactgtcctaggacaaagggggaatgagtcttgagagtcaataattttagtagaaatctgttatattttacaatttcacttttcatttgtacccagctagtgattatactctgtatccattttccacacaaaatcccaaggactttcagaatctcctctcggtgtatttggatgccacctttttcccatgtttacgcgagctggatttctggtatgtcatgaatgattaactagttgatacagactttagtatttgagtcactatcagcttataatgatttgtcctcaggcaggaaggatggcggctggaacatgagaatccgagcgacccccagacgcccttggtctttaaaggagtcgtctttaatgagatgaagggagcgtttgtaagttttcttccttttttatgttgtgttcagcttacctttcccatgtacaatatcatgatatagacacatctggaagattttatttaatattctcattataggtgatacattcttgaattagctggggtcagtgctgtgagcagaagtcggggtagcagggccaggctgctgttcttcccagcaggtctcagaccatgtctggggacccctggtatgtgatctgcagcaagtctgtgagataaaagctattttcataccactaccaagacagtgtcttttcattcattcttgcccaagtacacggtgtactttctagaggctgcatggcaaggtgtgtgacacacagcgagctgcatacagagcaaatgggggagtccagcttcacctctgagccagacgctacagagatttgcaaaaaaggcaacacagcaccactctaatcagttttttactttgttatgagaagtatttttcaaaaatatttatatcaacatgtaatgatggcttaccttaatgaataagtattttttaaatgtctcagctttaatttagaatatagaaaaattatataaacacacacaggcacctacacaggcaaaaacgcccacataatcaaaagctgtttgggtcctcattaaaacgcatttatgcctagtgttccattattggcaccctaagcttgtgggagttatttatgtcctacagctcaaggtcatcgccaaggtctgattttttacaaaaaaattgcaacctcaggcataaatgggttaatttttcagagtgtaaaggattcttgagaccattttggattaagagctgctgtcctgggcccatgtcttcatgtccctttgtgacttggacaacctgtctgtcctggtgtccctgaggctcatgggtggcctgctctctgattcccgtagctcctctcggctggtgaactatttcttaccttttcattctcaatttggtggtcttttcttccaaggagtcttcttgaactcaagttggggtgacagcttctccccacttccctcacggctggtgggcagaccgactgatccatcccgatttacagccctcagctatgcgtttgttgcaccacacatcaaaaaatccattgttcttctcaatccttgggtcctgtgcgtgggtgatgaatgattgaataccgtgttaaacaatgcctgcgtgggtgttttttttttttttttaaaccattagaacagctttatttgcaaagtattacaggtgtatgcaccagaatgtgatcaattggctatattgtaagtaatgtaacgtgtgtattattttacatgtatacttatgatttatttattttacgtttcaagacagacaatgagaggatattctcccagcaccttcagaacagacttcttcctgaccacacgtactcagtggtctccgggggtgacccactgtgcatcccggagcttacatgggagcagcttaagcagtttcatgccactcactatcacccaagcaatgctaggtaatattttgttggaaaagtttgatggtggattgtgaaa

SEQ ID NO: 4493 - DNA, 2300 bp, Homo sapien
atgtataaaagcaagttgtggccaggcgcggtggctcacgcctgtaatcccaatactttgggaggcggaggcgggcaaatcacgaggtcaggagttcgagaccagcctgaccaatatggtgaaaccccgtctctactaaaaatacaaaaaaaaaaaaaattagctgggcatagtggtgggtgcctgtaatcccagctactcgggaagctgaagcaggagactcgcttgagcccgggaggctgaggttgcactgagccaagattgcgccactgcaatccagccagggcgacagagtgagacacggtattaaaaaaaaaaaaaaaaaaaagttgtgccacgaccatgttggccacatgtcatctggacctcctggggctgtgtcatgggcatgcccttaaccttggcaaaattaactttctaaattgattgagacctagatcggatattttgtgtgcacacacccaaattctccctagaagacgggtgatgcgcagagcgtgtttgtgtctgtcgctcctattattgcctgtgttctggttcctttgggctcttcaataaggaggtacgtgtttacctgcagcccagaactggctgccctatggagagtttagggtagacacgttgggactttttcccacagtattaccttccacattgcttccaaagttttagcttgttcaagccgactgcagccatctacttaccatttaatttttaattttttttttcagagcccattaggagacagagggagatttgagcctgtttgtattcgtgatacaaggggaaaaaaagagggagaaggtgaagggaggaaggaagagaggctctgagaaacccggaaggtcagacttggtgcggacttcctccaagggctaccccaccctctccaagcgtggctaatcccagggccccttctggcccacagtgcagaaccacccactcctacgggggcctccttcagcctctctgggggttcccagaagggcccttgggcacttgggcaatgtcagggggctcaggtgcatcttcctagacacgaaacgaagaggaaagcggaggcagcagcgggggccacaggctcccatgcagcagctcggagctgtgctgtgcttcgctggcggccatccgtgatacgtgtgacaccgtggggccctggccctgggacctgccatgcagccttgagatctcatccaagaagcccccagaccccaaggttcaggcctggcggggcagcagaacgcctttggagctcagctcagccctacaaacaggaccaacgcccacaccaaggccagagagggctaccaagtttcacctggcccagcttccggcagcccccaaccaggccactaccctcacctgaacaccgcggtccatcaccaagccccacccacttctgccagccctgcccccacaaggacccacctctcgcatgcaagccccgcccccaaggcccagctcacctgcagccccgccccaccaggctccaccccatcgcctgcaagccccatccccaaggcccagctcacttgcatccccgcccactaggctccaccctgtcacctgcaagccccgcccccaaggctcagctcacttgcaatcccctctcccactggtctccactcctcacctgcaaagagccacccctcgctaagcccctcccatcacttgcacagccccacccaacacagcacgccattccaggagcccctcttttcaccagcgcagccccgcccttcaccaggccccacttcatctgcatacacacgcctctcgccacgccccacttctcgcctgcccacttccccctcctatcatctgtccacatcctgctgctggccgaaccccgcccctttcggcaagacggccccgcccctttctacccgtaccacgcccctcgccttgcccgcctccttcggcacgtcggccccgcccctcccgcccatctccgtccgcaccgccctcccgcccgtcccagagcagtggaggcctacccttttcacctacagcctatcgcagaggacgtcgctgttcgcgttgaccaataggagtggtagctgtcacggcaagccccgccccgcgccctgcgtcgggttaagagggggttcctcgccagccaggtgctcgtcatgcgcaatgtggcgctgcggcgggcggcagggcctgtgtgtgctgaggcggctgagcggcgggtgagacgctgcgacgggaggcgctcggcgcgctggtacccgggaggggagggtccagggcaggccggaggcgtaggggtcctcgtccctgcgcccggggctggc

SEQ ID NO: 4494 - DNA, 2300 bp, Homo sapien
aacatagttgacttttgattattttatttttgattattttatggtggcttgacctggtcttcaatatcttccctttatatgtcttatattttaaaatataataataatctcatttgcatttaattaattttttctaattttttttgaataagtttacggctgggatttcatggcaaaaggcttagcatattttgatcttttttttgtttgtttgtttttgagacagggtctcactgttgccctgcctggagtgcagtggtgtgaacagagcaggctgtagctttgactttctggactcaggtgatcctctcacctcagcctctcaagtagctgggactagaggtgcgtgccaccttgcctggctaatttttttaattgttattttttcgtagagacagggtttcaccatgttgcccagcctggttcaaactcctgggatcaaataatcccctgcctcggtctcccaaagtgctggaatcacaggcacgagctactgcaccagggctattttaagtggaaatgagatccaagttaattccaagtttatttccaaggtcaaggattgaaggatgatacgtggtaaattcacgtgagagttggatatggcctttggaaggagctctcacatgccccaggaataactggacatggagtagggacagagtggtgtcagtgacaggagtgagccccagggagagaatcctttttgttttaaaccacagaagacacttcagtaagagaaggtagaaacaagaagcaagtgggggattgacgtgcttggatcccacaaacgagtttaaaagtattagaagcaggctagacacggtggctcaccctgtaatcccagcactttgggaggccaaggcgggtggattacctgaggtcaggagttcgaggacagcctggccaacacggagaaaccccatgtctactaataaaacaaataaaataaaataaactgggtgtggtggcgcgcatctgtaattccagctactcagaggctgaggcatgagaatcgcttgagcccaagcggtggaggttgcagtgagccgggattgtgccattgcactccagcctgggtgacagagtgaaacttggtctcaaaaaaaagtattagaagcagatgcaaaattcagaatatgaagccaggagcctggaaagcaagaacgagagagttgatatgaagtggtgagagtcagaagctgctcaggaggactgctgtatttcccggcagcctctgcgtgggcagcagcggggtaggcggccgagtctcccaggccacggacctgtatttcccggcagcctctgcgtgggcagcagcggggtaggcggccgagtctcccaggccacggacctgtatttcccggcagcctctgcgtgggcagcagcggggtaggcggccgagtctcccgggccagggacctgtatttcccggcaacctctgcgtgggcagcagcggggtaggcggccgagtctcccgggccacggacctgtatttcccggcaacctctgcgtgggcagcagcgggataggcggccgagtctcccgggccacggacctgtatttcccggcagcctctgtgtgggcagcagcggcataggcggccgagtctcccgggccacggacctgtatttccaggcagcctctgcagtgggcagcagcggggtaggtggccgagtctcccgggccacggacctgtatttccctgcagcctctgtgtgggcagcagcgggataggcggccgagtctcccgggccacggacctgtatttccaggcagcctctgcagtgggcagcagcggggtaggtggccgagtctcccgggccacggacctgtatttcccggcagcctctgtgtgggcagcagcgggataggcggccgagtctcccgggccacggacctgtatttcccggcagcctctgtgtgggcagcagcgggataggcggcccagtctcccgggccacggacctgtatttccctgcagcctctgtgtgggcagcagcgggataggcggccgagtctcccgggccacggacctgtatttcccggcagcctctgcagtgggcagcagcgggataggcggccgagtttcccaggccccggacgggacagattggatcgcacctgtcacagccacgctctggaatagcgagggcccagcgtccccaggcccagggtgaggagaatccctgccacactgtgtctggaattggtgggttcttggtctcactgacttcaagaatgaagccgcggaccctcacggtgagtgttacagttcttaaaggtggcgcgtccagagt

SEQ ID NO: 4495 - DNA, 2300 bp, Homo sapien
acaccgtaatagggatttgtgcctgttttgtaaatttctgtgtaccaatacctggccattcatagggtgtgagtaatgtgtgttcaatggtcaatgagcgcagcaggatgccataggatctattctatttgaaatttagtgttcatatgtaccctgttttcaaatcttttttttttctgaaaatgacaatggccattgtactgtatctgcattatgactaatcaggttccctcttgtaaaaataaactatataatcttcatagtgccgggcaaagcatgttaagagacaaggatgaatttaagttctataggaatgtggatttattaaaaaacattaagacaataattaattgtcccaaagataaaatgggacaccctcaccaggacgcccacacgccttgcaaagacagccgtcctgtcctccctggcccagacagagccttcccccttcatctcgggctccccctgatccagcgtgcctggccctcagcgggggacttgctccacactcctgcttacttaggaactagcggggccaaggtcacaagcgctaattactgagagaaccctgcccccaacacaacggctgcccagatgctctcggctgccagtcactgggccccggtcaatgggcgcttgggcaaatctgtggatggttcaaaacaaagccatttgcattcctggaaacagagttaaggtgcaggtccccaagaagggctggtcctggctctcagttgctggggtaaatgtgatgaacacgagccaagaacactgtcaattcactctgcataaccttcaccgcccacataccgcaggtacaagacaaacctcctttctccactccagactcactaaggtccccacctagtcttacagccacatgcttctgccggaccctctaaaacttaacatacaaaaccctctaatttttttttacatagtccattctttcaaaatgtttaatgttcattaaactattttgaaacaaaaactataatacagttacaattcagttttccattttggattttaaaatgctctggttcgagtctcgacatttttcttaaaaatgaacattacggtatattttaggagataatttatatggaaaaaaacacacacactaaatgtcggcttgcacctaaattgtttacacgttcatgggaaaacctagctgttaaccttggtgagggctaagatcgccctctacaagataaacacgtttctcccaattccaaggggagcctgcgtgctcccctcccccactctggtggcccggaggacagaggggaccctaggactggagggggacggagacgggctcagggatggagggggacagagagggacccggaggtggaggaggacagagaggggtaccccaaggttagagaacagaggatgactagggggatgtagggaaacagagcggcgcagaagaggacagttggggacggggcggccccgggcatagaaggggacagttggcgaccgggaagcccccggcgtagaaggggacagttggggacggggcggcctcgggcatagaaggggacgggggggaaccgggcggccccgggaccggacggccgcccgcagggtgagctgccggaaccggggctcgcgcggcgacagggcccggcttggtgaccgggacgggcgtggggtggcgggaccgggcagcggggaagagagaccgggactggggacaggcgacgcggcccgccccggctctcccagccccggctcccttagctccggccgcgggcgcagtgcagggctcggccgcgcacctcacagcgcggactcctccggcgcgcggccgcccgcgccttatataccctgctaaaaatagcctgcgaggccactttccaatcagaacgagcagagttcgaattgagccaatggtgcgggccgtgatggagagtctcggtcacgccaggcggggccgctgtgtgtcgccgcctgcgattggccggagctgacatcatcggcgcgcagcccccgggccgggagccacgggattgggccgcgcacggggcgggcgcggggcgagtcacgtggggggagggggagtggggggagccaggcgggggcggagggggaggctggcagcggagctttgaatagggaagttttgcaggggttacgtttgcagtcagtccggtgtttgcaaatattgtgtgggctccgcgcgctgcgggctgcgggagggtccggccgggcgtctctgcgagcctggagtttgcatgaaactttcacctgcgctccggggagactttcggctccggctcccaccg

SEQ ID NO: 4496 - DNA, 2300 bp, Homo sapien
tgaacgtggttttggaaatgaaccacctccatgctcaagcttgaaagttttcaatacgtgcatatgaactgagaacagggagcctaggagaggctgaggatgaggaagaatgggcggtgtcttctgtgatcgagtttccttagcggggcatttgttcctgggggcagaatttaggcaccagatcagacttctctacagaatcagctaagctggctgagctgatcttgagtaaagtagtaaagtaaatgatgaatttgttgatgagaatcagcaaatctagtcctaccacttcattcctactaatccttggctgggctgggaggactttgtgtggtagggaaacccattgccatggttctaatcctcacatcctgggtgcgcatggtgcatgtggctgccttgcctggaacatgtgttcatagactgttccacatccttggaaagttaagggggctttacctagagtcttgtgccatctggatgtctacctctgacttgcttctctttaatgaaattcatgacatgtgaagtagtgaccgccgattgatgccaaacagcaatttgagcctcattactgacaatgtttgtaaaagcacaaagtgaaccattgtggaaaattaagggaaatggtacttattacgtaataataagaaacttacacattatttttatttggtggagatactttggatggatttgtatgagctaaaatcacatttttcccttggccggtcttaatcacactccaagtctttgcactttctcatgttctcacagaagcatcatagtcatcactggagcaggcagggattgctatccccattttacagatgatgagactgagatgtgaagctctttatgagcatcataacaactaacacttactgagtgcttataacatgggaggcattattcagaatgcttatgggtatcaactaatgaatgtaatcccaaggtcaaactacgaggtaggttctagtattatttccattttgtagatgagaaattgaggcacagagagtctgagcaacttgcctgtggtcacacagctaataactggaacctagttattctgtcttcggagcttccattttaaccactttgctatgctgtctttgtcattacagttctataactaatactcacttgcacttgtctgtttatacatctgcccttcctttacagaatttgagcttcttgaaggagatcatttgtttcattcacattttaaaattttggtgttgacatagtatcccggcaaaaggctggttttcaatctgtgctcacttgaatatataagaataattaatctgctgctggtttcctacgaataaacattcatgctacaacttgaaatcagccttttgacttttaatcttttgaaatgtgatttcaaggtttatgttttctgtctaaaataggtcaaattgttttttgaacaatgtattccttgtctcagttccaactgtgagtatgggtcagttttctggaatggtcaagaatagtttgaccacacacaaatgttcacaagcaaatggaaatttgtttctaactttccctttgccaaatcacatgcgacactgtcagtccagaccctccttttacttcctgctctcgttttcctccccagctcccagcctatctgcgcgagcttctgtgtcctaaataacttgggagttaccagtcttctttaaggatctggtgttctaaaaggtttctaaagaattttatgaggtttttattacttaattgacaagaatttattagctagagtggcaagtaaataaggacgtcttaaaaacaaaaagttgttttacttcccatttcactttctctctctctagctgttttccttcactaatatttccaaaacacacaacaacagttggcatcgctcgcatataaacagctcttccatgtcactgagaaaacgagcaagatccagggaggaaaaatggatacaggatataaatagaaaatcctcaaaacaggaatttcaaaatgtcaacaaacaggcaaaactttctttcaacagcgctattatgactggtatgtttcacttgctttttttttttttttctttttctccagcaaattgctcaaatgtcggtgtgctctcatgaacagaaacgatggcacggtgggtcctggtctcaagacttcctctcaatgattcagaggtcttgggggttttttgtctgaatatcaggcaaagaggaaggacggctacaatggaggagtctcctaccacgcttgtggtcgtcactgtagtgctcagttgaatggtgtgtccattgggg

SEQ ID NO: 4497 - DNA, 2300 bp, Homo sapien
atgtctattctaagttcaatgggacaccaatggagtctttgaagcaagcattcaacatcagatttgtgttgagaaaagactacgatgattgcagagtagagaatgggttggaaaacggtgctgcttgcagagagactctggagagactgcttagaaagattttttttttaaagattttagcaagaaatgtttgtaggctgaatgataatttattgatagagagcaagagaaataaatgcattggagaaaaattatacaatgaaatcattgggacttggtttagcagaaggtaagtttgacaaaagaatgagattgaaatacaaggctgcaactaattatgaagaaacctattactctaagtacttaaaaggagaatttgaacagaaatttctttattaaatcattatttttcttattatgagactgatgattaatgaaaatatttggtgcttaagacagaggcactgggttaaggatgtcttagtttgagtcgtagattctccatttacacaccttgtgacaagtgatgtaacctctctaaaaacttccagaatttttatttgttttgtttttgtttgtaaaatggggctaccaaccccatgtgattgctgagaattaaataatgaaaaatagtgcttaatatgacatgtgacacaagtcaaagaactaaataaatattcattattactgataggattttatcattatcattattaattggggacaatattctgacaagagttcattttaaaactacaaatagaggcaagaatcacagtttctattgattcaactgctattactggggtggggaattccctctctttaaacatgaactttcaatgtaaaaggagatcagtgctaatgtttgggaagatctgtttatttttgacattccctagggagctttaggaactctgggcatctcagccatgtatttgtttacctttggtttacccagggaacaaaaaatcatgaagaaatgctggaccaattgtcatggattaatcgttcattagttacataattattagagaaataatcataacacagtagatttatttctagaataaataaaagaacatgcattttatattaattgatagacaatatcatagataacacacattaatattcacttcaggttttatcctgttatttcattaatctagaaaacaaacttttttttgctggcttaaagtatcagctcagtttttctactaatttaaaattgtacaatatcagtacacgtattataattggttgccacagggtacagatcactatttgtatgtgcaaagtggaaactatagcaaatactaaatgctaatatatgtgctaagtcttaattcatcattttattttggaacaaagggaatcaagggaaatgtatttgccaataaactttaatatatgtctccctggagcaatgattataagattaaattgcagagaaatacaatagtatgtacactaagcgattcaaaatatgtcattccctactaatttggtcaaagccaggaatttagaaaaaggaaagattagtttctgttgaatttcattttatgccttatgttagaaatttgtaaaactgtctcttgctggctctcagattgtgaaataacaatgaatgcagctccaggcaagctgcctttcaggcagacctgtcaggagagagacagacagttcagggtaattcattcttgccaccgagtctcaagtgacttgtgaaggaatctggcatttctaaaatataaatagcattaactcacagcaagaaagagaaagtgttcttcatgcttactgagaggcaaaagatcagcagtgagcaacggaaagccatcatggggtttaatgacaggatttttagaaaaggggaatttcatagtaactaactgtaaaggacacacctcaccaagtcgacggatttcctgagggtaattgattcccagtgttttacaagtccatgttcttcaggatgatcttagtgtgcacaaaaatcatatgcaaatgaattttggatcaagatacaaaaataaaataaaccagtgaaaataaaatgaagggaactaggaaagcgcaaaacagactcaaagccttaatgtttttgctcattaattcagcatgtaactcacattccaatggaagcagaagaggttgagcccacaatcaaactgtcactgaattctaaaccaaaactgaagtatggacttcttctcattagggtcacgttgccaggactatacaatgaaatgcctggccgtgagagtccagcaattttctttgctctcagagttcct

SEQ ID NO: 4498 - DNA, 2300 bp, Homo sapien
gcctccctgtttttgcaagggataggttttacaaccaataattaaacgattaggacattccatctcttgtcaccatgaggtgggaccctgctgttctagattttccataacactgagtcatcgacaaaattcaagattcagaatcttctctacgaatcttgacgtattaaagcatttacttgtaaactaatggcaaatgcttatattaaatttaaataaaatattagagcagttaatcgcgtctttttttccattctactcacctgagacatggggcagcttgagaagtttctggaaatgaggttaggttaggcacagattctcagaaatgatctatgcaaaagactttggaattatagtgtcatttttttcaatcctatcaaatttactactgaatatattaaagtgtggaaagttgagagatatcaaatgtcactgaataaaaatgagatcagatttataatttggaagattgtgtcatcatttggtgtctgaatttttttgttgttgtaatttctgccctctcccatctagactacttaacattcttttgcccattataagttatcatagcccataaatttgacaacttcattaaaatccaaacgaggacactaatatttggcccatttcttctggctgacattttttgttctagaaattatctctctttacctgtgaatacccagtttactctctactattccctaaagttagctttcactcaaatacacatttacaattataaagttactttatttccatttagattgctcctggtctccacagagatagcaaagatttcaaatgcaacaggctatttagcagaaacagccattttcttttatataaattgttatcttagttcagttattttgtctttaaaaatacattgcttcaaaaaaatgcaaactgaactatgcttaattcaattctttccattggcatgtaaattttaatttacaatatagcaccaggtccttttagtggctttgtttaaattgttagagagactaagactattttaataaacaatttcagaaatacaaaaatctagggaataatacgctccagtttatgaccgtacaaaaatatgtatattcacctatcctgctaatgggcattctgtttatttccattgtttattataatttaaaaattactacatctctttattgaccattacaaattcttcttctgtcaattgcttattcttatccttcaatgtttttttttttccttttttggtcttttctttttgatttattaggcaattttaaatagtttgattactacttctttctgtgttatatgcactgtcaatctgttcttcccttcaatggctggtttgttgtttttacctcagaacattcggtcaagtgtttcagaggttaaactctatttgtatatttattgcctttatgacttgtactttttctttatggcctgatttcgataattcttttctccttcacagacctaaagagctttttctatattttcttctacaatgttgaagttttattttttacatttaatttcacattgagtaaaatttattttttatctgttgtgaactagagatctgccttttccatgtggatatccaacttcccaggaatattgaaagagaagcaaatctttttttttttctttttctcttttagtatacaaaaggatgtaacaagatccctaggacaaatctgatgttaactgaattaagtggattagtattaaattaactggcccgataattacaggaaggcattataagtccctagggagcccaaggagggtgaagcctcatgcccctttgggtagtaatacagggactaactatactccttgctcccacaggacagaacattctctaggtttttcattcccgactcagtagcactcaaagcttttcttaaggtaaattaaagttatggagaaaggcatcactctgtagccactgttttccaagagtaacattccaaggcagtatctagggagccagcaaagattctgtcctgtctaccattttcccatgaatgacatcataatagaacctcccggtcttattgccttttcttattggtaacaaaagatgacaaactaggtaatttatattaaaaagtttatttagctcatagttctagaggctggaagtccacagtgccggcatctgtgagggccttcttgctgcctcacctcatggcagagggcatcacatgctcagagtgggagcaagggagccagggagagctcacaggcacaagaataacgctgctgtgataataaacccactcctggga

SEQ ID NO: 4499 - DNA, 2300 bp, Homo sapien
gtgtcaaggctctgggaagattatctgctcagaagaactttctaaggatttgtacctttgtattccagaagcagctgcccaattttgtctattcgttggctcttagaatatttcgtctattctttggctatcagagaatactaagcaaggaaacaagcaaaaaataaaccaacaggaattttgctgtcttattatgtcctagtttcttaactgtttctgtctacttccctccccaccatatttcttttcatatgtaagtttttaaatatttgatgatggtgatggcgctactgaagtgaaagatttatgtatcacttttatagtccaaagcaatgcaattttcttgtgataagttaaaatattaaagttaaccatatttaattttagccatcaatctttccctactcctgttttcaggattttttcttttttgcaagaaaaaatgaaatttactagtaaacattgttaaaaaatttttaggcaaattaaattaatagagtttaattgagcaaagaacaaattgctgattggggcagcctcccgaggcagggtaggttcaaagactccagcacagccacgtgatggaagaagatttatgaacagaaaaaggacttacagaaaatggacgagaggtgcagaaacacctagattgcttacagctctgcgtttgccttatttaaacatggtttgaacagccggccgcctgtgattggctgaaactccatgattggcacaagagtaggtaggtcacagtctgtttacacgtccagtgaggttacagttcattacctacagagaaacgtttagactgaacttaaaatatgtaaggaggcagctctaggctaaacttgatttagcaatataatctactaattctttttgtaataaaattatttaattttcaggtgataagatgaagtatcagtcattgagatgtttcatacccagtagaatctggggtggatatttgcttttgtgaatggccttcacattaggaagtgcatttaggaaaatcgggtattgcattttcatggttatttgagctcaaagattttattcctttattggccagatcatttggtacaaagatcaactagaaagaaagtttcatgtattgagtttttgggaagggctgttttaaatactgttaagacgactgatttatctttctttacttagtagggggaggtaggaggggcataccagaattcagaagtgcgaccaccataaccacttcacttttcaatttatttttcagttctaggatatataagcagacaaggagggtctctaggaaccataggagtttaatccacgtgagccatcagcctgatttacagcttcctgccctgcagcctgttcttccctaaaccctgggtggactatagtaacctagttggttgaaaccagctcctgacagaccctggcaacttagagatgaaccctggtgaatcttcctcatgactgtaacgtctccatcctggaggaactgtagttccgttatcataacatgtaacccatgtgttgccatgatgacactgtgtctgcaccgctgggacccctcatctacatgcgataatgcaccctctcccctctccatcaccccataaaaccctcctgccactttccctcagggagacactgctttggagaatacacccagtgctccccttacttgagccaagtaataaaactcctattgatcaaaatctgcattctcgtggagagtcgtttgttgcttgacaggtgaatgaacgctgtttgtttttttcggataacaaatatgaggtattaaacaaacaaacaaaaaaccccagacttgaagctttcccataataacaacaaagagtttgagtaagaattccacagcttgccttcatctgtggcagacttgcatgaatcattttcaaataaagataataactcagttggtcttgtagtccaaacaaaatgtgctacttcaggaacattcacttcctatgtggactttgctgctgagtcagtgtgagaccttgaacaagtctctgtttgtttcgtaccattcagatttcctcgtctgtaaacattaagtatctacattcactaaaagtagttctgaatgaatgttatttaatggtgccaatgatgttggaggatacctgtggtaagtggtttaatttatttttgcaagttggtataatatccatactatattgaccttaaaatagatggacaatgtggatatgtggatgtttttgttattgagaagggggttgactgagagtaaaggacagtttgatttgtttttctacattagtcct

SEQ ID NO: 4500 - DNA, 2300 bp, Homo sapien
tgatcttgggtttagtgattttttttatttttattttttatattgattactgtgttccaggatattctaatttactaatttttattttaatttttttctgtctagtctctgattttttaattttaatttttatttcaattgttttggggcgacaagtagtgtttggttgcatggaaaagttatttagtggtgatttctgatattctggtgcacccatcaccagagtagtgtacattgtgcccaatgtgtagtcttttatctctcactcccctcccagccttccccctgagtccccgaagtccattatataattcttatgtctttgcaatgacttttaaaatacaacatcaaagggatgagccatgaaagaaataattgataagctcacttcgttaaaataaaaatttttttattttgctaaagacaatgtcaaggaaatgaaaagacaagttacagacagactgggagaaaatatttacaaagacacatctaataaaggactcttatccaaaatacacaaagaactcttaaaatccaacaataagaaaatgaatgacccaaataaaaaatgggcaaaagacctgaaaacacaccttatcaaagatatacagatagcaaagaagcagagtaaaagatgctcaacgtcatagacttatggaatttctgttaaaacaatgaaatagcatgatacacgattgcagtgcagtagagcttcccccaggaatactgttcccagacttgtgcagggctggttccctcactctttgcctttctgtttgcagcataaatgccacttcattgaggtgttgaggattccctcactctgtcccttccgcctctcaccacaagcacctgctttattttactatagcacctgctctttttttttctcatgcatttgcttttatgctctgtccattcattcctacagatggtgagctcctgagggcaaggcccatgcaggtcattttcagcactgcaccctggcctaacttgccccgtgcacaggtgagtgctccaggcacagtttctgaatgaataaatgagagtatcgaagatcccccttcccacctgtgaggagctcacattgaggagatggatgctcacaggagatgcaagttgggtgggaggcagggggacacccagagtgaccctgggagtttctctggctgcagccgccccattgagcagaatgggcagcgcctcccctgatggccagcactgaagacccaggcaaggaacctagaaacaaagccctcatctgggtgtgggtgtcctcaaggcagtaggactcccagggctgaggggggcaatgaagggggagctgtaagctccaggagagataagaggggcgtcggaaggctcccttgacccctctttccctccactggccctgggggagcccagtccactcataaggggggtgtccagtccaccccatccacttccaaacgggggcccgaggctgcaagcaaggacgctcccctctacatgcagggctcggcctcccctgcaccacccaggacccccgctgtcctgcaagccccagccgctctgggccaggacccagggagtggaaggcattttccaagggcacagtggctccctgacggggaaccaaggccaggcacgcttctcccagactgggggcctcggggcacctgagaatggccatccttggtacaagagagcggggacccactcccgcgcaccctgtgccccaggggacgcaggactctgcaccctgaccctagagcttgccctaggatggcccggccatggcgaggccctggaacggtgaagactctctgcccatcaacctagcacctctgccctaccctcagtcgcatatgcacccggtgcgagggagaaggcaaccaggaggtcacacctaaggtgggggcgtgagcggcaatgccagccgattgtaaaaccttccctgctcctgcgtggctctgcaagccaatcgaaaattccgtcgtctatgccgccagccaatcaggatgtccagagcgcggtgcttccagccatttgggactccagctggctctgcgcctccagccaatcggggtgcccgtccttaatacaaccagccagtcagtgcccggcgcgcgacaccagcagccagtcaggaagccctgcgttcatgcttccagccattgtcggagtgtcagccgtcacaaggcacttccagccagtcgcaacggcgggtcgccagcgccgcagtagctcgcgcggtgcctgtcggtagtcgcgtgcggggcggcggggcggcggggcggccggcggcggccatggga

SEQ ID NO: 4501 - DNA, 2300 bp, Homo sapien
ctaaacttggaaaaacaaagaacatttgaggaagaacaaaaataggaatcattttaaaaaatcattttaaaagaaaatttttaaagaaatagcttttaaaataaaataagctattttcttttaaaatattttaaaataaattattttatttttaaaataaaaaattattttaaaagaaaaacttttttcacttaaaaaaactcataattaattcttcttttggttgctttgctggttcttaggcatcactttctccttcacatctttcttatatttttttattctcctggcccaccagcctggactctttaagtcatccataatttttctgtttatattagcaccccctacacctcactcagtaattataatgccttttgggtatatttgtttcatttctatctaccgttgagtcaactgagtccgtaaagataaactatccccaggttaaagagccaaggcatggcaaaagcaatacttcatgagagtcttctttgcagtcctcaatggtacacaccatgtttcttttgtgttgggaaacaatcctacaacttttataacattcttcaccaggaaccactgagatgtgcccttgtaggtctggagtgtttgatccagaaacatgcatggagccaaagagaagagaattttccaagtactacataactctttgatggcaccgtcttaccaacctggcttctcagagaccgtggccaccttagaccacacagctacctctaagcctgcctctctttccccaagttcctttgccacacaactttctctagatactcttattggtggtgaacagggaggacttgggtactaaaaattacagcacaactttaaagtttgctgtgaagtttctggcacatggtaatcatgtcaatagtgttttatttcctctaatatactgtgaaaatggctacaactgtacaacaagagagagtaacagccacagacttacccacccctgaattctgagcaattgcttgcacacttccatctctcttgacggactgccactccaagcgtggttttggacaagcagcatcaaaattgcttgggagcttattataaatgtgaattttacagcctcatccaagatctactcaatcagaaccttcagggatagagcctccaaatctgcatttttaacaagatcctgaagtgtttatatcactactaaaacgtgaaaagcctttacttaatccacaaagtggtgagtaagggctaacttctcaccaagggctaacttggtgagaagtgtcttaaaatgagaaaagtgaggcccacctgaatttcccaaactcacatagtgactaattctgatcaggaaccacctgctactcctccatccccaatgccattatggttaccttcctagcaacagaggtgccaaaccccagaataggcatgaactttccatcattcagttttacagaaaggagtctgttaaaactcatcttcttttacttttcctgcaaagcagagggtttttttccctttattaagggaaatctgtagagaaaagaaaatacaatgactatttttataacaacctttttttcttttgagatgaagtctcaccctgtcgcgtgacctctatattgatcttgtatcttgtatctatattgatcttgtatcccacaacttgtctgaacttgtttatcagctctaatagtattctagtagattccttaagattttcttttttcttttttatgagaatagaaatggggcctcactatgttgacaaggctggtctcaaacacttggtctcaagcagtcctcctacctcagcctccctaaatattgagatcacaggtgtgagccaatgcgactagcccataagattttctacaggcatgattatgtaatctgcaggtagaaatagttttatttcttttttataatggcttggctggtgtccctctaaaattcatgtttacccagaacttcagaatatgaccttttatggaaataaagtttttacagatataattagttaatatgagatcataatgaattaaggtgggttctaaagtcaatgactaaagtctttagaataagaagagagaatacaaatacacacagaaaagaaagccatgtaaccatgaaggcagagattgaagtgattcaactataagccaaggcatgccaactgctactgggagccaccaaaagctagtcaaaggcaagggaaccatcttcccgagagctttcatggggagcatggccctataaacaactggatttttgactcaagtctccagaactggaagagaatacaatcctct

SEQ ID NO: 4502 - DNA, 2300 bp, Homo sapien
aggaatcattagagcaggaaaggaagaaagggtaggaacacccgcagaagttcagaggcatgccaggtttgctaggaatccagctgattacatattatggtctattcctgtgcatattttaaaactgatgggcaaattgaaaataaaaattcagagcttaaatggttaacccgtaactacagagttaatgagagtcttctgtaactatttatcctttatttcctttcctgcctgctttgtatctgctgttattaagctactggtgttgagataaaacttactatttgtattaatgtcaattcaaggtcacttagtgatttgtctggtacaataagcctttagttagacttatcaagcaaaaaatagacaagatgcaaattattaaaataaaaaatgaaagaggagacattgcaatctctttaaagataactcagatgaaatgacaaattcctagaacaatataaaatactaacactgaaaaaatggataatataaacagttctataacaagtaaagtgatgtaaatactaatatatatttttataaattcacaaagaaaagcccagatacagttggcatcatggatgagttctaccaaacatttaaaaattaacactaactttctcaaactcttccaaaaatagaggaggaaagaacacttttaaggactcacttttagagaccagtattaccagataccaaagccagacagacatcacaagaaaaaaaattacagaacaaaatcccttatgaatacagctataaaaatataaataaaatgccagcaaattgaacccagtagcacataaaagcattatataccatgaccaagtgaagcttattccaggaatgcaatattgtttgaacatacaaaaatcaatcaatataatacattgtattaatagaatgaagaacaaaactacatgatcatctcaacaaattcagaaaaagcattttaaaaactccaacatcctttcatgattttaaaaaaacactcaaaaaactaggaataaaagagattttattttataaagagcaactattaaaaaaaaacccaaacttcatacttattggtaaaagactgaacgctttcctgctaagataaggaacaacataagaatgtctattcttgccactgctattaagcattgtactggaggttctagctaggaaaattaggcaagggaagaaaagcatccagattggaaaatattttagatttagagctgccataacctattactcacaaattggatggtttagaacaacaaaagaggattgtattctcttccagttctggagacttgagtcaaaaatccagttgtttatagggccatgctccccatgaaagctctcgggaagatggttcccttgcctttgactagcttttggtggctcccagtagcagttggcatgccttggcttatagttgaatcacttcaatctctgccttcatggttacatggctttcttttctgtgtgtatttgtattctctcttcttattctaaagactttagtcattgactttagaacccaccttaattcattatgatctcatattaactaattatatctgtaaaaactttatttccataaaaggtcatattctgaagttctgggtaaacatgaattttagagggacaccagccaagccattataaaaaagaaataaaactatttctacctgcagattacataatcatgcctgtagaaaatcttatgggctagtcgcattggctcacacctgtgatctcaatatttagggaggctgaggtaggaggactgcttgagaccaagtgtttgagaccagccttgtcaacatagtgaggccccatttctattctcataaaaaagaaaaaagaaaatcttaaggaatctactagaatactattagagctgataaacaagttcagacaagttgtgggatacaagatcaatatagatacaagatacaagatcaatatagaggtcacgcgacagggtgagacttcatctcaaaagaaaaaaaggttgttataaaaatagtcattgtattttcttttctctacagatttcccttaataaagggaaaaaaaccctctgctttgcaggaaaagtaaaagaagatgagttttaacagactcctttctgtaaaactgaatgatggaaagttcatgcctattctggggtttggcacctctgttgctaggaaggtaaccataatggcattggggatggaggagtagcaggtggttcctgatcagaattagtcactatgtgagtttgggaaattcaggtgggcctcacttttctcatttta

SEQ ID NO: 4503 - DNA, 2300 bp, Homo sapien
accggttcacatttctttattcttgtttcgtgtccttagactcaggaacttcaaatgcgctatccctatgtgtattgattatatcttcatcctgctcaaagttgctattgaaacaccctctggtgagttcttcattcaggtactttttttgctccaattttttccttttttataatttctatattactactgtatcgtgattttcttattgttttcagattttctgtagttcttagtccatatttttcattagcaattttagcatatttaagcagctgtttaaatgcttctctactaattttaatgcctgtgattcttcaggaaagatttctactaatttattttctttctcataatgaactgtgatttcttgtttccttgtatgccttgtcattttattttatttttttgagccagagtcctgctctgtcgccaggctggagtacagtggtgccatctcggctcactgcaacctctgcctcctgggttcaagcgattcccctgctttagcctcccgagcagctgggactacaggcgtccgccaccacgtccgactatttgttgttgttgttgttgttgttgttcttgttgttgttgttcttattttagtagagacaggatttcaccatgttgaccaggatggtctccatctcctgccctcgtgatctggccgcctcggcctcccaaagtgctgggattaccactgctccaggcctgtatgccttgttattttatctaattgggcatttgaaaaaataaacatcttttttactgtatatagatttgttctatgtcatgacagtcattaacttatatgtgtggcaggttctcagtcaaggcatcagccctacataaaacctcaagtccttcttagtttgtttctgaacatgcacctacgtggactgtgtttgcccttttatgtatccccaaataaccaatggcttttgaattgcttactattatgaaatttcgcatcccagtttctcctcaatggcttagatggactattgcatgtctcttcccctggccttttgcctataacatctgtatgtgtatagtcaccctgaatctctactgagccactccagaaataaataagtttatttcagtcaattttaggtattttctgatgtttccatgagttatatgggaatcttagaatccaccatcttgttgaaattactctgtgaaaaatttcaatatctttataatattacatttatgtcaatgataacaatttacctatttttcaatttctgtttgttttatgaaaaagcaaatagaagcaatcagggcactgcaagttgtgactactccaagatgtgaatcatggatcatgcaaattacaatcatgttttaacctgacctccaaagggagaataaagtaaaaattatcccatgcgaggattattcaccagtttatatgtcattagttaccagtttttctttatgaataatgtttagcaatattataaagtatatctaatagttatcatattttggcttgttactttttggtagcaattcataaaaatggctggaaaagacaaataaggcactgtttgcatgttacaaattatatccaaagtccaaaagctgttaataagaaatcttccaataaaaccacatcatattttcttttttatttacacccacatcaggattacaactttatcaggactgcaccttgatcaggaagggatgtttctcttacaaggctaataagaaaggaacaataaatttgctgatgaaaaaagtaatgcattaaaaaattttaactttaatttttaattgagggcaatattttaaagaaatgctcattagtcattcctttaaattgtgtgtgtgagagagagaaaaatgaaaattagtcatttcaaatgctgcaagatgcagaaggaactcatcatcatgacacaaacaaaaaagagctgtgccgctagaggtttctgtattcttatgtaaagtcacaatttgttctacaaatctctttgagtaatttatgtctcatatatagagatctggaatagcaaaaatacttcagaggaaattaatgagtgtatcatgaccacataataatttacttatgaattttcttaggtaagaaacggttgaactggatgcaatttttatcacagcttgtgtaagactgcctctgtccctcctctcacatgccattggttaaccagcagacagtgtgctcaggggcgttgccagctcattgctcttatagcctgtgagggaggaagaaagaaacatttgccagccaggctagtgacagaaatggattcgaaatatca

SEQ ID NO: 4504 - DNA, 2300 bp, Homo sapien
caccaagtaaaaataataaactactattcctctaagtgagggtaaaggtgaacttcttccttcaattagcaatgtactgtgaacgtaattactgtaatgaccaccatcagagtagacaaagattgttgttctttttctcattgtcgcactaattactacagactcacggattcttgtgttatgatttttaatttattttactcattttttaatgctcacatctactcagcatatatatattatatatatatatatataaaatatatatgaaagaagaatgtgatcaaagactcatgagggcaagtgtaaaagacaaaagcacttgtttcatagggaacccactggtgacatttgagatatcaacatacaaatccatcatacaaaaaggaaaagtaatgaaagactgtgaaaattatcagtatttatgtgtgtatgtatattttctagttcatctatatagatatatatcatagatggcatatatgatatatatattatatgtcagatcaattagaaaacatacatatacatgtatgcatttttggtattaattaggaaactagttcttttgtctttcagacctgccctcatgagtctttgaccaaattcttgatttctggcacgatttgatgcccaaggctcaaagaatcttacctcatcccagctctgaaattggccgtgtctcgttctagtggtcggagttattgagaaaccaggatagggttcatggagttgcttgtgctcagaaatagcatttctattttcttaggagagaggggcataaaatttatttttatgaaaaagatcatttttgacaataatattctcagttcaaatttaatgctctacattattcagcttcttttactttggtgattttaatattagtgtaacttttggattatctgatgcttttccatcttgctcgtctgcaggtggaatgtcatccttacttcaaccagagaaaactgctggatttctgcaagtcaaaagacattgttctggttgcctatagtgctctgggatcccaccgagaagaaccatggtaataagagatacaggaagtttacctaaaacaccggtttgataaaaaaaatttaatcagatcatgctgtttcctggagttcactcacagctgacttggggtgagggaagaatttgcatttctgacgagatcccaggtgatgttgaggctgctgttcgggggcctcgcttgagaagctccggtgcagagtggacgccttagtctgtttagggagccgcctaacaaactgtatccccagcctcagggcctcagcctttctgcctttccttccagggtggacccgaactccccggtgctcttggaggacccagtcctttgtgccttggcaaaaaagcacaagcgaaccccagccctgattgccctgcgctaccagctacagcgtggggttgtggtcctggccaagagctacaatgagcagcgcatcagacagaacgtgcaggtgaggagcggggctgtgggcctcaggtctcctgcacagtgtccttcacacgtgtgcttcttgtaaggctctcaggacagccttgggccagctccatttccctgtatttcctatgcatgaactctttgtgtacgtcataagggtttcttctactctagcacaggagaggcaacagaggtggagagaaataggatgggatcaaaactacagatttgggttagcgttaagtcagtgatatccatatccctctgctggggccatgtccttttctttattttttataatgaagcattgattagatgttctttagtctccaactcatggcggatttttcttcttgtatgtttatgtagtataaattccttatatttattctcttagaattttatctttgcgaagtgcttgtttaactctgcctttttttttttggcgaggtggttgtgtgtctttatttttatgtgtaggagaccatatttataccaataccttaggatataagacaaacccacttaatatagaggcttaatgcaaaagcatttattgagctcaaggttccatggttagaaaattagcctgggctcagcctaaactcagtccattccttctgttcctggctgggctctcatgtgtgttcagggcagtgaggcagctctgcttcaggatgtccctggggcatctgtgtgagcgcccccctctcccatgcagttctttatcctccagccatccagcccagggttcacctcagcacagggcatgaccccaaggcagtgagtggacatgtgcaaagccttttcaggtctaggctcagagctgcca

SEQ ID NO: 4505 - DNA, 2300 bp, Homo sapien
ttcaggtatattttttagctccaatttgtttccttttctttttataatttctgtattaatactatattgtgattttcttattttttcagattttctgtagttcttaatccatatttttcattagcaattttagcatatttaagacagctgtttaaatgcttctctactaattctaatgcctgtgattcttcaggaatgatttctactgatttatttcttcctcataatggactgtgatttcttgtttctttgtatgccttgtcattttatttttttgagctggagtcttgctctgtcaccagaatggagtgcagtggtgccatctcggctcactgcaacctctgcctcctgggttcaagcgattcctctgctttagcctaccgagtagctgggactacaggtgctcaccaccacgtccatctatttttttttggattttagtagagacggggtttcaccatgttggccaggatggtttccatctcctaacctcgtgatctgctcaccttggcctcccaaagtgctgggattacaggtgtgaaccaccgtgcctggcctgtatgccttgttattttatttaactgggcatttgaaaaaataaacatcttttttactgtatatagatttgttctatgtcatgacagtcattaacttatatgtgcggcaggttctcagtcaaggcatcagccctacgtaaaactcaagtccttcttagtttgtttctgaacatgtacctatgtggactgtgtttgcccttttatatttccccaaataaccaatggcttttgaattgcttactattatgaaattttgcatcccagtttctcctcaatagcttagatggactattgcatgtctcttcccctggccttttgcctataacatctgtatgtgtatagtcaccctgaatctctactgagccactccagaaataaataagtttatttcagtcaattttaggtattttctgatgtttccatgagttatatgggaatcttagaatccaccatcttgttgaaattactctgtgaaaaatttcaatatctttataatattacatttatgtcaatgataacaatttacctatttttcaatttctgtttgttttatgagaaagcaaatagaagcaatcagggcactgcaagttgtgactactccaagatgtgaatcatggatcatgcaaattacaatcttgttttaacctgacctccaaagggagaataaagtaaaaattatcccatgtgaggattattcaccagtttatatgtcattagttaccagtttttctttatgaataatgtttagcaatattataaagtatatctaatagttatcaggtttttggcttgttactttttggtagtaacttataaaactgactggaaaagaccaataaggcactgtttgcatgttacaaattatatccaaagaccaaaagctgttaataagaaatcttccaataaaaccacatcatattttcttttttatttacacccacatcaggattacaactttatcaggactgcaccttgatcaggaagggatgtttctcttacaaggctaataagaaaggaacaataaatttgctgatgaaaaaaagtcatgcatttaaaaattttaactttaatttttaattgagggcaatattttaaagaaatgctcattagtcattcctttaaattgtgtgtgtgagagagagaaaaatgaaaattagtcatttcaaatgctgcaagatgcagaaggaactcatcatcatggcacacacaaaaaagagctgtgccgctagaggtttctatattcttatgtaaagtcacaatttgttctacaaatctctttgagtaatttatgtctcatatatagagatctggaatagcaaaaatacttcagaggaaattaatgagtgtatcatgaccacataataatttacttatgaattttcttaggtaagaaacggttgaactggatgcaatttttatcacagcttgtgtaagactgcctctgtccctcctctcacatgccattggttaaccagcagacagtgtgctcaggggcgttgccagctcattgctcttatagcctgtgagggaggaagaaacatttgctaaccaggccagtgacagaaatggattcgaaataccagtgtgtgaagctgaatgatggtcacttcatgcctgtcctgggatttggcacctatgcgcctgcagaggtaacaataatatttttagtgttgagagttcaaaggagctagagtaagtggaagctgaccaggttgtcaggcttgtgttcctatgttactctgc

SEQ ID NO: 4506 - DNA, 2300 bp, Homo sapien
ctatgaataaatttaaatgacttgcttattccaaaatgaaattcctatgttatttagaaaacatgttgaggaaaatattggactggagagaaaaacaactcacaaagagtcctgtactcttccggtgacctacttcgcatttggaagtttggttactttttatgccaatcaaaacatcctgccatgtaactatggagcatgttcagtaaaatcaaatgttttacccacacagaaaataaaaatgaactttaatgtttttgccttggtcttcaaaaatgcacccaaaggagaaacactgcatttcccaaacaggacaaagtgatttggtgccaatctcttaagaatgaagaatgaagtgtttagctagtttgagagtcaagaaaaactgagaaatgcagaactcaagtttccacttgaaaatcattgtaacaagtgacaggaggaaagaaaatcctgtagtcttggcatgacccatcatttttaagggatttttctataccatctctgtttattgattgtataaccctggatgccaagaaggtataaaatcccatgtccaggcatcaatacaggccctctgctctcaatgagagaaaaatacctaggacttgtggggatacaaggaatcctttgtccaagtgattagtctttggtctttaacactcagcctagtacattttgggttgggagaggggaaaaatggggaatattaacctcatcactaaactaacactaatattctttagtggaaaaaaggttatcctgtcgaaccagcaaaatggctagaggtttctgcagacattctagttcatccaaaagttttaattaattttaataatcttagtgaggtgctaaaagagggaccctaatgggatgtgagactcccaaactcaaagagattctagtttcatgaaaagcaaattctgtgacttcacaaactagatatttcattaaggtcacaatgtagccaagcaattctgggcatgactgtttaaaacaggaatgtgaaaccagagcaaaggcagccctcctttggctgggcgatggcatagcagaccaggaactttcccccacatggtgctctatacaggacaggggtgaatcagctcagctacaccatgtgccttagagactctgaacatgagacatgtggaaaaagaccctaaaaaacaattacaggcagaatgcaggaaaaacagccagatcaccaggcgtggtggctcataccaataattccagcattttgggaggctgagccaggaggatctcttcagctcagaccaacctggaacacaccacaagaacttgtctctgctaaaaggaaaaattttaaaaattagctgggtgtagtggcacctgtctgtagtctcagctacttgggaggctgaagtagaaggattgcttgaacccaggaggtcaacgctgcagggcactgtgattgcaccattgcacttaaatcttggcaaaattttttacagtggcaacacaggttatgggatggagagaagaacaagcctggctagcaaacgaggtttcattatttagatgaaatctcccaggaagcagccctcagagagaacagctgggaaatgtttttctttagacctttaaaggtatcagattctcagttaatctttcttctatccaagagagattctcagagaaagcccagctgtaacaatgcaaattttctctacagatgcaagtctttcccactaaagacagctttttggctcttctcgtatttcctgcccttctgaatagctgtcttgaaatgtgtcaaagaaatttattttagtgcaaaatgtattggttcccttgaagctcaactctgactccaagtaagacaagaggggatttataaccatagagcacggtgaggtcagaggagaaaaaattgctaagaggaagcaccagaggttagggtggcaacagcaaggcagaaattctggaataccaaacgatatggtttggttctgtgtccccaccgaaatatcatgtcaaattgtaattcccggtgttgaaggaggggcctagtgggaggagattgaatcatgagggctgactttccttttactcttctcataatagaattctcatgagatctggttgtttgaaagtgtgtagcacctccaccttctctctctctctccctctccctctcctgccagccaagtgaagacatgcttacttccccttcaccttccttcatgatggtaagtttcccgaggcctcccgtgccatgccttctgtacagcctgcagaactgtgagtcaattaaacctcttttctttgtaaat

SEQ ID NO: 4507 - DNA, 2300 bp, Homo sapien
ttatctgaactccagttctttaagttactcacatatttagattaatgtctgttgccaatttgagaactttttgatgattgttttcaccacataatctctccacccccataggctcctgcttctccttctcagaatccaatgctgtgtatactacttggcttgatggtgtcctacaagccctttagggtctgttcacatctctttactctttttttttttttttgccttagactcaaggatgtaaaatatcttatccctaaacatgtagattatatcttcattctgctcaaattgctgttgaaatcctctagtgagattttcacttcagttatatcgttcagctccaaaatttgtttggtttattttgtataatttctacatcattgttgatacactcatttttccgtatatgcttttcccaatttcctgtagttctatttccatatttttaattggaaattttagcatatttaagataattgttttaaaacctttctctactaatttcagtgctcatggttcttcaaaaataatttctgtcaactcgttttctttcttataagggactgtgttttcctgtttctttatataccttattattttatttgagcatttcaaaatatagacatttttctaactctatatagatttgttctgtgtcatgacgattatcaactaatatgcttggtatgttcttagtcttagcataagcccaacataaaaccctaaggccttgtcagcaattttctgaacttgtatctgcctggactgtgtgtgcccattagtagttcccccaaatacctactggcttttgaatagcttactatttcaaaaattcacaccccagcttcccctcaatgggttagacggactattgcacgtctcttcccctaatctcttgcccttggcatcatactacatttctactcagcacccccataaataaataagtttattttagtcaatttcagatcacttcttgacgcgtccatgagacaagtaggggccttttgatccaccatattgctgaaatcactctgtaaaagctttcaatgattttatattatattgtatcaatgtataataattaacttatttctcaacttactttttggttattatttgaggaaaagtaaatagaacgaaatcagggcattgcaagttctgacaactccaagatgttgataatgtattgtgcaaactacattcatcatgttctaatctgccctccaaaggaaggaacaagtgaaaactatcccacatgagaattattcatccatttatatgtaattaatttccagtttttccttacaaataatgtttaacaagatgacagattatataaaatggttatcagttttttggctagttacttcttgatagtctgtaataaacctggttgaagaacaaatactattaaggcactgcttgcatatattaaatgatgtccaaactccaaaaactgttaataattaacactccaataaaaactacaccagaatttctttttatttgcaccctcatcaggattacagctttatcaggactgcatcttcttcagaaatgaatatttctcttacaacgcaaagaaagaaaaatcaaaataaattttctgattgaaaatgtaaaaaggcaaatatttttacagttttaactttaattttttattgaggaccaactatttgaaaaattctcattagtcattcctttaaattatgtgtatgtgagagaaagacgtaagatggttaattatttcaaatgatgcagtataaagaaggggcattatcacggcagaaacgaaaaaagatatttgtagctggaggtttttatagtctaacatatggttgctatttgttctacaaatccttttgaataatttaatatagagatttagaatagaaaataatactttagatagaaattaatgagtttattataaccatatattataataatttacttaggaattctctttgataagaaacaaatgaactgaatgcaattttctccacagaccatataagactgcctatgtacctcctcctacatgccattggttaaccatcagtcagtttgcaggggtggggggaggggtttcctgcccattgtttttgtaatctctgaggagaagcagcagcaaacatttgctagtcagacaagtgacagggaatggattccaaacaccagtgtgtaaagctaaatgatggccacttcatgcctgtattgggatttggcacctatgcacctccagaggtaagaataattccttttagttttcggatttcaaaagaataaaccta

SEQ ID NO: 4508 - DNA, 2300 bp, Homo sapien
gataatgcttaaggcaagtttaagggagcatgaagccctgctttggatttactaagaataaaattggcacactctctttcactaacaaatttcctagactgctaaattagggaagtgacagagaaatgtctcttacttgggtaaaccatttagtgcaaaatacaggttaatattgcaaacatgttagacaaatttttaatctagtgaatgatgagcttcaggctattaccattaatagacatgctttttttgtgacttgacacagaacttaaccccatctctgtagggttctacagttttaccagtgtaatataaatagtatacttgccagatttataactgatacaatgttgtgataattataaactacagggaatcagaatcaggcagaattcggaccttgagcagccagagctatgggttcaaaataagataaatgacaacgtcatgtttcaggattgcctctaagataccaatggcacaaatacatgttggagaaagcaccgcataataaaaacaccaaagaaaataccacttaagcatcttatctagcagaagctccttattagtggagagtgtaatttcaatgatgtgattttttttgacctgcttcatagaagctaagagaataagaggcacacagagaaggctggtcaacctcacccagggaggttatagaagaagtcatcttctctttttatagtatttcataatgtgataattaaatctattacttaaaatttgaaaaaaataaaaaaaaagatgaagaggtgtttttagcaataactggttaccctgctgattatttcaaagtctgttatgttatgttattttattttatttttttgagaaggagtcttgctctgtcacccaggctggagtgcagtggtgcaatcttggctcactgcaagctccgcctcccgggttcatgccattctcctgcctcagcctcttgagtagctgcgattacaggtgcccaccaccacgcccggctaattttttgtatttttagtggagacagggtttcaccgtgttagccaggatggtctcgacctcctgacctcatgatccgcccacctcagcctcccaaagtgctgggattacaggcatgaggcactgcaccctgcccaaagtcagttatttcgaaccatttaaggtattaaccttggtccagacctgttgtcctcacctacagaggatgaaagtgtccaaagtgaattatgcagaaggccatttaggctgagcctcttggcatctgaattggaagccatttttaattttcatttttctcatggttgctgtgtgtgtgtttatgtttgcaaaagcaatttaggccctggaattccaagctgttctgttaagacccaggctgctttgctatctcctatctttgttcaaaacaaacaaacaaaaaacaacaataaaaagaaggagtcataaaggatgttagactgtaggaggtgcttttaggataagtaaaagataagaaacccgctggagaccaggagggagttaagcaggctgttctaaaaagagacaatggctggaacaaaggcaagagcatagaaatgtatccatgatctcagacaagttttttctgcaaaacattcaaggaaacaagtcagagaaaatggagtgtggcttgacacaggagggaaatatactgggaataggggtgggtgttcttaagaaatttcattacatgcatggctggcactaggcctcaagcgttattcaaggaattctaataagctgttttaaagggattaacaatcaaatataagtgagaaagttaacttcagttctgtagtagaattagtgttttgaaatgaccaccctaataataactttgcctcttgtaaaggaagtctagtgtacttatcaaggacaaattggtgtggttcatttttcaactaaggaatcaagtgtgaacaacacggaggagaaaatcaaagtcctctggcattcacagcatttctgagtgagttttctgtaaaatactcccacagagacataagaatcagagaaaaggcactggactgattccagtttcattttgaaatcattggcagctgtcatctccatcccgcccatcctgcatttggtgcaaataaagaacgcaggagccttgtctcctactgggctgtcagtgaggaaaaggaggaaagacaggttagctggggatgatgacggatctgaagcaaagccattcagtgaggctgaatgatggacccttcatgccagtgctgggatttggcacttatgctcctgatcatgtaagtggaccccaggaggctgaa

SEQ ID NO: 4509 - DNA, 2300 bp, Homo sapien
taatgtgtctatataacaaacctacacatgtgcctatttaatctaaaataatttttaagactttaataagaaataaaaatccgaaagtctttccttactaatatcaatgcctgtaattcttcacagtttgtcagtttattttcttcctcataatgaacgctgttttcctgtttctttgtagctttgttattgtttttatcgcacatttgaaaaacagccacatttcataatctatatatattctgtgtcatgacaatgatcagctaatatgcttggcatattcttagtctcgacatcagccctacatgaaaacttaaggtcttctcagttcttttctgaacgtgcatctgcctagactctgtgtgccctatttgatttctccaaatacccaatggttttgaataccttatcatgtcaaaaattcacagctcagcttctcctaagtgccatagatggcctattgtatgtctcttccccctaatctcttgccagtggcatctgtgcatctatagtcaccctgcatctctactgagccactctataaataaatgagtttattttagttcatttcagattgttttttgataattccatgggagatttgagagctttctaatctaccatcctgctgatgacactctgtgtgaaaatttttaaatggctctattatattccattgcttcaatgtatagtaatttacctaattattttcttttattgttccttttaggaagaagtgaatagaagaaaagagggtgttgcaaatcaaaagcacatagagatatcatcttacaccagtcagaatggctattcttaaaatgtcagacaacaacagatattggtatggattcttcacagatgttaatcatcttcgttttttgttttttgtttttttttttttttttgagacagtcttgctctgtcgcccaggctggagtgcagtgacccaatcttggctcactgcaacctctgcctcctgagtttaagcaattgtcttgcctcagcctcctgagtaactgggattacaggtatccactaccactccagactaatttttgtatttttcgtagagacaagatttcacttgattggtctcaaactcctgacctcaagtaaacctaccgccttggccttccaaagtgctggggttacaggcgtgagccactgcccccggcctaatcatcgtgttctagtctgccctccaatgggagaaacaagtaaaattatgccatgtgaggattattcaccaatttattttaattacttttttctttataacatttaataagatcacaaattatataaaatagttatcagctttttgggaagttacttttgctggtttcttataaaactgatggaagatacaaacactattaaagaactgtttgcatgttgcaaatgatgtccaaagtccaaacattgttaataattaatactccaataaacatcatgtcagaatttctgttttcttttccctttgaacctttgcaggattgccacatcatcaggaccacaccttcatcaggaatgaatattcctactacaattaaagaagaaacaaaattaatttgttggtgaaaaacgtaaaaagagaaattttctttggttttgtttaatttctttattgagggtcaccactaaaaaaaaatgctcactggtcattcttttgaatactgtctgagagaaagatgtaagatggttgattatttcaaatgacagaagataaagatgggatatcatcatggcatgaacaaaaacaagatttgtagctggaggtattttatagtctaacatgatcaccaatcattctataaacctgttggatgagtttatcagacagacagagagagagattgattgattctgaatagaaaatttcactttagaaaaaaatattttgactatataataatgtatgtaaaaattctctttgataagaaacgagtgaactggattcaattttcctcacagcctgtgtaatacaccatcacttgcttcctcctacatgccattgattagccccagggagcagtgcagcactgcctgcccatgttttacataacccctgaatataaatgccagatgttgctgaaggaaacaggatctgcttagtgaaagaagtggcaagcaatggatcccaaatatcagcgtgtagagctaaatgatggtcacttcatgcccgtattgggatttggcacctatgcacctccagaggtaataatcacattttcagcattgagcatttaaaagagcaaagctagaataagtgaacgatgacctgggttgttcagctttgt

SEQ ID NO: 4510 - DNA, 2300 bp, Homo sapien
gttacttagagctggtgttgggaggagagattgcctgcagatgggcacagagaatttttttggggtgatgaaagtgtttcaaaatgagattgtggttatagggccaaaaagggaaatcttacctctttatcctttgaaatttcactgaaaatgaatgaacaaaaaaaaaattatgaggagcgaaaaggcatataagtttatttttatgtgtatagaatggaagaattgcagaagaatcatgacctaataacccaggtgaggtccaggtgcttatatacctcacttcatgggagaaggggaggtgaggaaataggcggtatgggagtcaatgattttcaggagagatgaatggacctgggaggcaaagatcatcctgtagtctatttactttggatgttgggagcacagaacaaataacaatttgggacaaagttggtttaggctgtaaatgttggtgtttaattttcagtctcttcctctgttacataagttctaatcctctttggttaatgaaatttcagggagagattgaaagcaattgtgttcctctttgtgagtccagtttctaggtaaagaaacttcagaaaagagcctaatcttgcacttcttgggagacaaagggaggaaaggtgggaggaggggaggggtatggtgggggagaccctgagcctgctgtctcagttcagcctgtcaaagctccctaccttggggtatcattttccactttgtagtatgattttctgagccttaacacagggatgattgcagaactctagacatttgctaaaactcatagaactgtatgttaaaaattggtgagtttcatgatatataaattacacttcaataaaggcgctggcacacagcagtaagtattgttgttgttactgttctgataacctcagcatttgtctaacttcctgcggcatgaaaaacaggaatggagacaattttaggcaggaggagctgcacagcagagttcatttggtctgggggatggtgggtaggggtgccctggggctgagagcaggaggatctgctgtctttagtgggttctgagtactccctactgctctcttacatgctgggtgtctcctcttttcctacagttcacacacgtagaacacccaaggctaggaaaggagaaaacttggggtgctgatggcagcaagcttttcagtattaaagggagctgtgttctctgaagttggagtgtcttcaactgtggcttatccccccttcagcaagcacaggtcccatggcatagattctgaggaagaccttggtgaagaatgcgcactcctagctcagaccaaactctgcaaccttagcaaagctggatatttgatctgttgcattcttctgatcatgtgttacaacctacaaatggtagagccattggcactcaaacacctgatgtttttccctggtgtaatccatgccccagagacaggaaattctcccttggtcttccaggccacagtttgggaaggtgtttatccctgggaccaggggcttcaaaattcagcaataattactgatatgatttggatatttgtgcactccaaatcctatgcagaaatgtaatccccagtgctggaggcagggcctggtgggacgtgattggatcatggactggatcactcatgaatggttcagcaccacccccatgtgattagttctcgctttgagttcatgggcacctggctgtgtaaagtgtggcacctgccccctcactctcttgttcccactcttgtggtgtgagacacaggctccccccttaccttccgctgtcactgtaagctccctgtggccctccccagaagcagatgccagcaccatgcttcatgtccagactgcagaccatgagccaattgaaccccttttctttattaattacccagtctcaggtattctttcatcatgatgcaattgccctattaccatcactcccatatcctagtttcaaggaaggctgttgttttagtcccagcccaagcgaacatgtgaaaatatagcctcacaaagtgaatatggaactcttattcttatatgcctgacttaaaaaaatagtgtaaagtgaggaggagccaagatggccgaataggaacagctccggtctacagctcccagcgtgagcgacgcagaagacgggtgatttctgcatttccatctgaggtaccgggttcatctcactagggagtgccagacagtgggcgcaggccagtgtgtgtgcgcaccgtgcgcgagccgaagcagggcgaggcattgcctcacctgggaagcgcaaggggtcaggg

SEQ ID NO: 4511 - DNA, 2300 bp, Homo sapien
taaactcaggtggaaatctacccctcaacctgcataaattccattactgcatcattatctgaaatggaaagcagaacaaaaacctcacaaaaactagaacaaatgaatgaatgaaggaactaatgaaggaatgaactaatgaatgaatgaatgaatgaactaatgaatgaatgaatgaagtaatgaatttgaattgaaacacagattcagtttcatgttgcctccaatctcaagaggatcctagcccaggcagctctgaaagaaggaagagagggaggtccaatttcctatctccataaagagacttaaaatggggagtacagagtcttgaagtccttccccacaacagctttccatttgttcctccaaatgctcatgggctttaaagagttttggtaatttcagaagacctcttacctcttcacctgcaggaattcacgagagtggagcagccgtctgggaggagggctagggacagccagccggtcttgcagggccccttgtcatcagctcagcccagtgaaaggagcactgagcccagcgtcaggcctggttctcacctgactctgtcaccctgggcctgtggggtcccagcaggtcactttttacagcctcagcttcctcatctgtgaataaggggtcaacagaccgtagtctcccacatctccccattacatatggaataaactcccaactccgcaggcctttggagcaccttagtgcagagcagcctctgcacccaccaacacctccctcccatcgtcctccttctctcccgttcctctcagccctggctcagtccatgctgatccatcctttctgtctgaaacccctcctgctctcctctcctgtcttgagtagacaggactgctctcttctgtagcattttttacctacctttctttctttctttcttttgagatggagtctcactctgttgcccaggctggagtgcaatggcgccatctcagctcactgcaacccccacctcccaggttcaagtgattctcttgccttggcctcctgagtagttggaattacaggcactcgccaccatgcccggctaattttttttgtattcttagtagagccggggtttcaccatgttggccaggctagtcttgaactcctgacctcgtgatctgcccgcctcggcctcccacagtgctgggattactggcataagccaccgcacccagccttccctacctttctaaaccatgaggccctgtatggttaggggccacaacttacttatctctgaactcgtgggtgtcttggcaatacctggtacacagtaagtcctcaataaatataggatgcataaacgagtaaaatccaagccatttcccactaaaacctccagacctctggtgtatgatgacctgctgtcatagcccaaaggaatggttgagtttcaggtatccagagaaaaatgcaggtgtagagctttcccctcaaacgtattaacaaatagatggtgctcagtcattttcgcggcaggctgcagagaaatcttaaactttcgtgttgtttcactgagggtacggcagaagagcccaaggaatgtgaaaggagaaacttgcataattagactttatgtggggagtaggcaccgagtgtgtgacaagcacaaggggctacgtgtgcggccagatgacgctgcacggtcagaacccacaaaacaacacggcaacaggtggattttaaaccccttctctgctttcaaagcaggtccaggctctacatttacagaaggagagttagggcaaggggaatgtgggggaaactgaaattagttagaactaagatcagcaataaaattcttcaaagacactgcttctcactttaccaggatttttgttttgttttgttttgagtttttatttcttctttttcttttttgttctttgcttttatcaatgaagcaagttgctaggatgcaaaaggagttggggggtagaagggcggggtgggaagcagaggtgggaggggtcgaggttggagcacctgtcgtctgcatgacgtggacggctggttctggttgtattttaaatgaaatctcatcccagcgtagacaccacgtctggaattacgatccaccctgtgatctgtcacttttatatacacacaggggaggggaccgtttccatagagagggaatatcacagcccacttaggaacaataccggagaagcaggagccgagaccccggagcagccacaagttcatggggacgtgcacggggccgccctcctggccctgaagctgcgccggcctccctgagcgtttcgctgcgg

SEQ ID NO: 4512 - DNA, 2300 bp, Homo sapien
gagatttttctagtttctttctaattcctacgtaaatctaagttaatcatagctccatgtcagactgacaatttttaaaagttaatgaaagatactgagtacatcagtggactagaaatgagatactcacattatctgatttttccctcatcttgtttcaaactgaaaatatctgggaccagtgggagaaaatttgatacagcaacaaaataaatatcattctgattttataaaatggaactggcttaatttttcttttcattatatggaactaccaggatgctaaacatttggggagttattgacagagacagataggattgactttatgaagatcaaaatgagagaaagtataatttataataagttcaggagaaaattgctgaagaacactatggtttcttcattttctcaaagttgtaaggaagaattggtagaaaccaagattcttgagtaacagaaattttgttttgattactgaataataaaattgttactatgctaacaaaacatgtcattaattcaaaagaagatcaggaagaaaagagaacttagaaaatggagacaaacagaaagcacaaaataaaatagtactctatatctaaacccaactatattagttattatattaaatgtaatgagctgaattctccaattcaaatacaaaaatagaaaaaaaattcagttatatcatgcatacaaagaacacatccaaaatatgagaatatggaaaggttttaagtttctaagaatgtaaaacgatgggaaaatacatcattcaaatgtgaaccaaaaaactgtattaaagtagtaatattaatatttgatcataaaaactttaaggtaggccaaggcgggcagatcacgaggtcaggagatcaagaccagcctggccaacatggtgaaaccctgtctctatcaaaaatacaaaaaaattagctaggaatagtggcacacacctgtaatcccagctacttgagaggctgaggcagaagaatcgcttgaacctgggaggtggaggttgcagtgagttgagatcgcaccattgcactccaacctggacgacagagcaagactgcatctcaaaaaaaaaaaaaaaaaaactttaaggtaaaaataattaatgtatataaggagggtaatttaaaaataaaaaattgttaaagtttttgaaaatataataatttaaaatttatgtgctcttcataacatggcctcaaaatgtataaaggaaaaattgacagaaaaagaaataatgggtaaattcacaattataatgaaaacttttaatacatcttttgaaataattgatacgtaaaatttggactacacaataaatccatttgatttaatagattgattgattgaatgatcggtctatctaaaatattgcatccaacaaatgtagaatgcacattcttttcaacactcatggaatattttcaaaaattgaccatatagtagaatataaaggaagctttagcaaatatataaggagagaactcagttaagatgtgtgatctgatcttagtgcaattaataaaaaataataacataagtatatattatgtataataatataaaagttcaaaagacaataataataaaaacagaaaattcccatatgtttggatgtggtagtggttgagaggcatgcataggacacagatgtaaaaaggacactgtcttggtttgctgtatgtattcagggattgtttaaatttatttaagaagatattcacatagtactcatgcaatagaaaaagctactttgctgttgcagaaaattttactcatactccttccttttctctgccaatgctaaataaattcttaacccaaaagggtgatttttaaaagacacatgttcttttcaacatagttataagttggacgcagatttggataagctctcagtagttcatctgcagctgtgtacaaactttatcccgggttgttcaggcccaacacagctactctgagaccagataactaaaaaaactaaaaagaagctatactgctttaagtgaagaaagctccagccctcaggtggagtcatttccgggccctgtgataaagctcagctgggaggctcctcagtcattactacagggcaggaagggcacgttctcatcagcatggtaagtgactacacgcctatgcattgttgtaggaaattttactaatcatatttggcccttttcccacagcaaacaattcttaataaaattgtaatgcaagagaagacatttgtaaagaaacatttgtttctttcaatgtccaagtagatgagttgggag

SEQ ID NO: 4513 - DNA, 2300 bp, Homo sapien
catcctctgaagctctgtcttggtggagaccaactccccaaatattaagaacatttctgtattcttacactctaactgctacaaagcagtactttcttctttaatttttggggagggatggggaaggtagaacagaagtggttcttgaccaaggtcaacttatgttcagagctggttccttccggtgggttcatggtctcgctgacttcaagaatgaagccatggaccttcatggtgagtgttacagctcttaaaggtggcacagacctaaagagtgagcagcagcaagatttattgtaaagagtgaaagaactaaagcttccacagtgtggaaggggaccccagtgggttgccctgctggctggggtggccaggttttattcccttatatgtgccctcccatgttccatttttgtcctatcagagtgcccttttttcaatcctccctgtgattggctacttttagggtcctgctgattggtgctttttacagagcactgattggtgcattttacaatcctcttgctagctacagagcactgattggtgtgttttacaatcctcttgccagacagaaaagttctccaagtccccactctacccaggaagtctagctggcttcacatctcaatgttactccctaatttcttactctttttaaaacaaaaacatttttccctcatgttataaaggtactgcaaattcaatatgtccttatttttaaaaaaattaaatgcaaaaaataaaaataaaaattttgaatacctaaagtctacctagagacattttaatacattgactttttaatacatttaatacattttaatacattatcttttttctttgtataatctcttgtaattcataactttgaatatactgaatatacctctatacttcatgtttttatttcaaattaccagtatactattacatacttcacacttcatttttgttggctgaaaatattcttctcagtggatgagctataaatcattgtttatttaggttgttttaaatgtttctattataaacaatgtcattaatagcttcatgtttatataattttattttttaggataaatttccataagtggaaatatactggcaaaagagaagtgtttttttgtttttttttttttggagacggagtctcgctctgtcactgggctggagtgcagtggcacggtcttggctcaattcaagctccgactctctggttcaactaattctcctgcctcagcctcctgagtagctgggattacaggcatgcgccactctgcccagctaagttttgtattttagtagcgacagggtttcaccatgttggccaggatggtcttgatctcctgatctcgtgatccgcctgcctcagcctcccaaagtgctgggattacaggcgtgagccacagcgcccggtcaggagaagctatttttaaagactttgacacatataaagcaatatttaaaatcaaagaaagtgtaatttgtttaacaattttttttttacttgaagcggtcttttattttatattatgtcttttgctgacttttacaagcaaaggatgaagtcacttcattctgttttgctagggagagactgtgtcatgcttattggaagacataagggctcataattagattttgctggttccctagagacagtcccgggaacacacttgcataacctttggtaattggaaatatatctcatattggccacgtgcacaataattcagtgtgaatatggccaataaacatgccttgtttacaggtcattagtttggacctctcttctcctcaaatgctaagaaagatctggtgaattaaaatgcttccagtccatttgccttggcctgtagtgaaagtcctaatgaacaatgaaggaggtaccgggccttagggactcagggatgcgctcaggagttaagggcaaattttcctaggttctttcctaggcaagtagatcccgggagcggtggaggggcgggactccacgtctcctaggaaccgctgcgcgctcactgattggctgatcgctgctcagccgccattttcaaatccccggatgacggcggtggcggctgcagtccgctgacaggcgctttctgcctggcagaggctggcgggcatcgtgcccgtccctgccggtctcccgggcacccggccaccgccccaccccctcctccgtgccatggagcccgagctggcggctcagaagcagcctcgaccgcggaggcgaagccgccgggcctctgggctcagcacggagggagcgacggggccttcggccgacacct

SEQ ID NO: 4514 - DNA, 2300 bp, Homo sapien
ttgtaatcactaaatccgtggcttttttcataccctccttaacctctttgctgtaattaacatttttttcttcccttggcttttgctttgtttctttccttctaactattccttttgcagaattttccttcccttggctttcctccaaagttagatccttggaccatgttctttttgtccaaattttctctcccagtcatctcattcactcccatagcttcgatttttatctctgtatctgactctccagtctaaatctagcctccagcctctttcaggtttttgtccaacatttccaactaccagcagaatattttcatttgcatgttcttccaccgcctcacactcagtatatctaaaatgtaacttagaattttctttcaaagcttgttccttcttatttcttgatttgcactaacagttacccctcctatttaaagaattgtaggcgtctgtgacttcttgcttatatccttttccttcttccctactggtcctactttaggcaaagttcttgttgcccgactgtgatttttgcatgatgttttcagtcatctttcaaccatcttaaacaccagtcacatatatcttattacaacatagctctcattatctctctcacctattgagtacatccatctgttccatctttacgcacagcccgtgatctcagtgtgggctcactcccttgtcctccttgaaattttctcttgttcaaatctatgaaaaatattacattcaaggccgcacagacataacatcttaaacctcttcctggcattgttcccagccgtgtcttagcttagaaaactacctgaagtggtttctcttccagaactcctgtagcacttattagctacacaccttagttttgaatttgcaaaagctatcttctgttatctcttcatgtggcctacctttacacaatggtctctttagcagatatgaagcctatttttttttattacccaagtatctagaatagtgacttttatataatagatttatctgattctataaatcctcagactagaaatatttttccaacatactaccatcatattatagtagtttatagtgtaaaattttaccattccaaatagaataacgaattttgtgtttaaaaggaaatctgcttcacagcaggcctgccaagccaacaaaagtagtgttgttccatagaggaaaagacttaggctagaaatttggagactgtcactggtcactgtcattattgtcacttcacctctgttagcctcatttcttcacctgtaaaatgcaagactttttaagcagtcttttgaccctgttcgagctatatcaagatcagttaattcagtctagagaaggaccctgttatattatacacttatatataatatatacacaattacatactatgtatacaatatagagaacagaaatcacctttgttataaaatatctagtacacagataatcaagtttttaaaaagatccagaaaaaatatctacctctaagaaatactgaattttgaaatctgaagtagcccagtttacccgtaacctcatgggagattttcttctggaagagaggtaacagaagtgcacctgctgtatttaccctgctagtcttaagaaaaagtgggaactatttaaagacttagataatctattttataattgtgaatatgcttgcacttctgtaaaataaaagcaggtttcctggaaaattaggcttttcttcattatatatgttgattcagccctatcgaataagaatttctatttccttatttgagttgtcaagttgtccatactgaacttattcccatgcaatagggttttatgggaaaagtctgcctgtctgtgactaagcaccagagtagataacgtaacaatttgttttacttcgggaatgcattttaaatcaggaagagaagtttctgtcctacttgaacccagcttcactctcctcctgggcgaaagctgagaggcctaggtgtgcccagctctcagttaactgaagtcacgtggtggtggaccccgcccccagggcccggttggctgtggccccgcccccgagccctggggtcggtgcttgctgcctgcggctctcagaagcctctgctccaccgcggcgagaggcatgggcacgtggctgccgagggtggccgagctctgggaagaaaagcccgtgtgcctctgcatagcgtcgctacagcgctgactcggtgtggattgattggaaaggtttgagggagtacttgggaagcatggtggcacatgatgagactggaggtctcctacctattaaaagg

SEQ ID NO: 4515 - DNA, 2300 bp, Homo sapien
atttaatacctggggaaaatgacatgaaataattattaagcctttggattttaatcacaggtcccatcaacaagatcagaaggaaaggaaatttcaactatagatttaaatcttcaggtattctttaaggaaataaaacaaggagctgggctgaatccagctattcagagtcccgccctccctgggcccctcaccaggcaggatgcttctctgttctcatctcctggccagaaccacgttctccaccccaaaccggttgtcaatttcattgagaaattggttgctcaatatttattgaggcctctgtattattccaccactgaggtgagctagaaaatcttcaagctatctttataaaatgagttagacaactgggacactgctctctgcatctctctgtctatgctgggtccccctgaactccggtggggtgacccccttccttccctctccctgctgaccatgaccttcccttttgtacctggtccacggagctccctctctgcagacctcagcctctccctctgctgtggtgcttccgagccctttgcacctccctctggcccctcacatgcagctcagggagcagctgccacactagggctggctggggcatcttccctcctctcactgctctgcctggtttgccccttgtgtggtcctgggggactgagctgtgggtcatggagtgcgtggttgggcaccccagcctccggcttcccttggagaatgtgtgcagcaccaaggggctgggaggtgtttgtctggctgcactttagggaaggagagggcacttggtctatttgatgggctgaacaggagggaggtggaatgtataaactttcccaggggaataaaggagtttgttccctgtgtacgggcaggggctggggagaagaatgggaatctatggagatcagaggggacttgcttgggaaaggcattttggggactccaaggcaaatgtcccctcacaactgtagatcacatcagtggaaggacttggggatggtcccccgaaagcttagctgttgctctaaaagttggtcaaggcaagtggccctgggggtttccttccagagaacagatcagattgaggaccccagtaggctcccagatgggtctctgtgcttagggctgatgcttagtaaaaccacaaggagggccaagtttgatggcagccacctgttctgcatcctcctgcacctctgcctgcacctttggggtatgctgggcactgaggtcccccgtgtctcgctgcagcaaaactccagctgtaactgtttgacgccctgtgaatggaacgcctgccactgagctcccagggtgtctgcacagggaaccttggacttggcgatggaattgaattgtaggaatccctgagctagaagggagtattctggggagacaaaaagtctttccctctcctctgaaactgcacgtcacatgttcacttgataaacaccatctcagcaccagctatggctctgaaggcagccctggtcccttgcttccttgaagttataggcagtgagccccatcctctgtctctagaccctggcctgggaatctcatgatacccacagttgtgccctggcagaatcaacactaccacccacttcccttccaccagccccagcctcagggcaagagctaggcagtagcactggagagaggggtacggaaacaccaaacactggggcctgctgtgcccttgagggagccctcttcaagccacctccccctccagtctcagtctttgtgaagttgcagaagctgtcttgaaccccttggcttggtcaggatctccgagaatcagctgcaggggaaactatcccttgggcagaatgttcctggagggaggtggttgctatcaaggccaggcggggttggcaggctagccatccgataccccgaccccatggcagttcccacctggcacctgacagctctcccaactcccattcctgcatttcctgtctgcagctgatctggccctccctgggaggaggctctcaccccagggcatttggagggtggggagcctccctcctccctttgttccgattgcagaaaaggagggggttcccatgccaaggcagaactgtctgggacagacgctgcccggatccctgcggctgcctgcactctggaccacgagctctgagagcagcaggttgagggccggtgggcagcagctcggaggctccgcgaggtgcaggagacgcaggcatggccggtgagctgactcctgaggaggaggcccagtacaaaaaggctttctccgcggttgacacgga

SEQ ID NO: 4516 - DNA, 2300 bp, Homo sapien
cagttacctgttggcttctcatcctggtcgttggtcaagtgggcaggaggtatgaccgtattcctgtccttgtccatcagggcactgtctcaggccaggtttccccctgatgccatccggggctctccagaagactgtgtcagccacatgtccgaatcccttggtgctcctgtctcctgtgactgtccctgtattccttcatgaagaagtctctccagcccctaggcagggaaagtagaagaaaaatgcttcatagcatcttttccactagatggtcactctggcagtcaaatagggggtgtggttattggctattaattattctgcttttctatacataataatagctatgctcaccatagtctcatatctctgagagatataaagctgacaatattaccaggccctccacattacctaacctcagagaaagagaaagaatattgggagttcagtaagatatggaatattttttatcagggatggtttttgaatcttcagtcatttcccctaataatagaaatgatatatggcaaatataaaacatttttaaatgagcaaagatactacatttataagaaaattaaaagcacttataatcctattatccaaagtatccactattaagagtttggtacatgattatctaggcgtttcttctgtgaatgtatataaataaacatatataaatgtttaatacatgaaatcatatcacatatacagttttctatctgctttttaaaaattttccatggaaacctttccattgttatatcctcatcctcattttaaaggctgtgtattatttcatggtgtggaggaaatttcaggtatttgttactaacctgctatttttgggtattcgggtgatctagagcggagatatttaaatatttttaaagtgcgtttgggatatgaattctaacactcaggcatcaggcaccagtgtacaatcaagagcccttctcagaaggtgacagaaggtccccatgtcccagaattagcccccaaaaaaccccaaaataaaaaagggaccttgatccccagctgaacttttcatggggtgaccttgagcaagctgtgtgtgcagcctttgctgggtctccccaccacaaaagagatctccagaatattcgaggaagggcggggctcccaggagcaaagcacacactctttcttgcgcagccccctgtggacagagctgtaacctgggcccagggcatgctcccagcctgcaaatggagatgctgcctcatttttctctctaaatctaaactttattatcagcccctctcctaccccagggagtcctggccagcccatctccccactcccctagagctgttggggtgtgaggtctcaggcaaggccgaatattctggggtgagaaaggaggggagggtgggatctggtcaccaaagtgtcacccacacacgtggcttccaagatgcccatcacctcgttccctccacgccacccctgggccccagggctctttgccaaggctgcctgtggccaccacatccctgagccctgctgctctggggtccacaaacttctcttctaaggaaaagattccatggggatggagggattcttcaaccttcctgcttcctcctgcccaaaccctcaggacacaggctttgtgggagccctcaggtaggaaggaaggtgtcttgcaggtggcttcaattttccccctaccacagaccccctccagaccagaaggacacacttgcctctacttgaatagagaagggaaggaaaatcagagagaaaaaaaatgaatatccgagcccttctcctgccatagtctctcctcggcaagtccaggtcctcaaaaggacactttctttccctttccggtctctaccccacccccacacacccagcaaaaaatagagtgggctccatgtttctcccccagtgtggatttcttggattcccacaggtgaagcgcctgctcctgcctctctgggggtcatgtctccaggccccctgggagtgggagccgagtctgtgctgtgaacaccccactatccccctaagcgggtctcctctgggagaggccgctccacagccccagctccatgctgcccggagctcctggggcaatgtggaccagagaatgatagtgggacttcctggctgagcccttcaaggtctcctttgtctctcctccttgtcccctccctcacaggcctgcagccccactgatcatcttccagcccttggccctgccatggccactccggcctagacagctgcttctcagcaggaggtctgtccttgaccaggct

SEQ ID NO: 4517 - DNA, 2300 bp, Homo sapien
cacggtgccgttgccgtcccggtcgatctcactcatcatgtcccgcagctcggcctccgtggggttctggcccagggaccgcatgaccgtgcccagctcgcgggtggtgatgcagccgtccccatccttgtcaaacagggagaaggcctccttgaattctgtgacctgctcctcagtcagctggtcggccatgccaggggtgggggcgtgggtggcagaagaggccactgtggggtctccctcccagtgccgcagcccggctgctgtcccagctctggggtggcaggtggagatccgggcggccggcgggctgtctcgccctggcttgagacgctggagcttaagaagcagcagagtcctcccccatcattggcagacgcccctgccctgcggttgcccgggcctgtcctgtttagacaggagtccagggcctgcgaatcgagctgacgccagcacctctgtgcctgcttgcacctggacccagcagagccacgggggccccgaatcacacctgcagtcagggcgtggtgggtgagctttggagcaatccacgctggactccttcctcctgaatttccctttctctcctccctccccgtctcccacctgccgcctgtctcccactcaataaactccagtgccctttcttcccttgagtggagggctttttgcaggatgaaaggcagatgaaagaaacgtccttgcctttggtttctaaagcctcatatagaacaggagggtttttggaggaggaaggttttcccttcaggtagaagcagcgagttttcttatcttcagaatggacatgaatagggaggggtttcctccaacccattcactcatccaccctttcacagatatttgagtgcctactaggtgcagtgtcactctggaagctgggaacacagtgggaccggcaagccacccccagtcctcgtgaggttaactagcaagacagctagtttgcaggtcaactgatcgaggaatgcaaacaaggtgactagggattattgataaatgctgatggacatacaaggtggtgatggacaggaccccgaggtcacctttcagcctggtcaaggacagacctcctgctgagaagcagctgtctaggccggagtggccatggcagggccaagggctggaagatgatcagtggggctgcaggcctgtgagggaggggacaaggaggagagacaaaggagaccttgaagggctcagccaggaagtcccactatcattctctggtccacattgccccaggagctccgggcagcatggagctggggctgtggagcggcctctcccagaggagacccgcttagggggatagtggggtgttcacagcacagactcggctcccactcccagggggcctggagacatgacccccagagaggcaggagcaggcgcttcacctgtgggaatccaagaaatccacactgggggagaaacatggagcccactctattttttgctgggtgtgtgggggtggggtagagaccggaaagggaaagaaagtgtccttttgaggacctggacttgccgaggagagactatggcaggagaagggctcggatattcattttttttctctctgattttccttcccttctctattcaagtagaggcaagtgtgtccttctggtctggagggggtctgtggtagggggaaaattgaagccacctgcaagacaccttccttcctacctgagggctcccacaaagcctgtgtcctgagggtttgggcaggaggaagcaggaaggttgaagaatccctccatccccatggaatcttttccttagaagagaagtttgtggaccccagagcagcagggctcagggatgtggtggccacaggcagccttggcaaagagccctggggcccaggggtggcgtggagggaacgaggtgatgggcatcttggaagccacgtgtgtgggtgacactttggtgaccagatcccaccctcccctcctttctcaccccagaatattcggccttgcctgagacctcacaccccaacagctctaggggagtggggagatgggctggccaggactccctggggtaggagaggggctgataataaagtttagatttagagagaaaaatgaggcagcatctccatttgcaggctgggagcatgccctgggcccaggttacagctctgtccacagggggctgcgcaagaaagagtgtgtgctttgctcctgggagccccgcccttcctcgaatattctggagatctcttttgtggtggggagacccagcaaaggctgcacacacagcttgctcaa

SEQ ID NO: 4518 - DNA, 2300 bp, Homo sapien
gtttgatcgaccactatatttttgagatctattcgtgttaaaacgtgtagttctaatccatcttaacttttatcgagtgtaggtatgacatgtaagatgtatatgatattctacatcttactcccaactggtggggttttcactattacaggtatcgctgcagtaaacaacctcatacatgtctccttgtgatattgcctgagagtttctttagggtattatttatataaagtagaattactggggacaaggggtatgcacatttttcattgcattaatatcagccaatagctctccaaaacagacctatcatcaatgtattccccactagcagcctgtgcatttccatttgcccacatggcccacccatccacactgtgaaactcagacctttcaatgactgtctcaatggcgacattcaatggtaatcactttgttgaattaaatattaatttgaatttccctgatcacttctcagcatcctttcctgggagtggacatttcaagatccctcttttataaagccctgttcttattctttgcccagtttttttctattgggttgtttatcttttcttttttgtagaaatggggtctctttaggctgcccaagcttgtctcaaactcctaagctcaatcctccagcctcagcctcccaaagtgctgggatgacaggcataagccacagcacctggcccattttaatgatctatcataagatctttatatattttgcttgccaattacttgttatatatgttgcaaacatctgctccaaatctgtccactgcacactgcatttgaaaatgtaaactgagaagtcttatgactgcaggactcctgaaatagatggtatgatcttaaggcgggaatagttcacacagctgcaagatctacaaacatcaacaaaaccacacaacagtcaatgtaactttcatatttggggaccactttaggcttttcaaggcatcttttttttttcttttttgtggggacagagtctcactctgtctcccaggctggagtgcagtggcacgatcttggctcactgcaacctccgtttccaagttcaagcgattctcctgcttcggcctgctgactagctgggattacaaccatacaccaccacagctggcttatttttgtattttcagtagagacagggtttcaacatcttggccaggctagtctcaaactcctggcccaagtgatctgcccaccttggctccccaaagtgctaggattatagacataagccaccccacccagccaaggcatctttcaatcatttaatttcagcctcataaaaacctgaggcggccgggcgcagtggctcacacctgtaaacccagcactttgggaggccgaggcaggaggatcacgaggtcaggagatcgagaccatccttgctaacatggtgaagcctcgtctgtactaaaaataccaaaaaaaaaaattagccgggtgtggtggcgggtgcctgtagtcctagctactcaggaggctgaggcaggagaatggcgtgaacccaggagacggagcttgcagtgagccgagatcgtgccactgcactacagcctgggcgacagagcgagactccacctcaaaaaaaaaaaaaaaaaacacaaaacctgacgctggggacccaatctcgtccacctgaggtgacgggcttggctcagtggttggtcatcaagaccccttcaatgctccaagtctgatccattatctcggttttgcagctttccggaacaactcagagtagagaagcagataaacctgtgtgcagtcacagccctgcataagggcaggggaggacccaaaatcccagtcacctggtcccgtggacagcgtctgtctcccccaagaaaagtccacataaggggggtgctgaagttggcatcaggagacctggggaagagatgggaaagtgtggctccctggcaagcacagcgctgccaaacgacctgggacacagcaagacgagagccacccctctccatccacacaggatgcgcccatcttggtgtttctgccccataagaaaagagtcgtgtgaacacagggatgcactttattccgccacttttattgagcaacagccgtggggacctgattctgcgctaagtgctctactgtgagacatcacaggttgtcattgctagaggcaagaatctcttacaaagatgaaagggcagaacccagtgctttttttaatggttgttattccatgcagaaacactgactgatccagaactggtaactaaggcggtgatcaaacaggaatgcttttcttctca

SEQ ID NO: 4519 - DNA, 2300 bp, Homo sapien
ggggacagagtgagactccgtctcaaaaaacaacaacaacaaaaaaccacatgtggtagttagtttaaaaatcacagaccttaggctaggtaatcagcaaatatttgctaaatgagtaatagaaactttgtcaatatcatagaggttcttacaatagattcaaaaggtaattggaaccaacatgcaataaaaagagattaacacaaaaatagataagtggattactatttaatgaatatttttggaaaaactctatttcagtttagaaaagaatgaactgagctcctatattttcattctacacattgcagtgaattccagatgggactcaaagacttagcaacaacaacagaacagaacagaataatttatattttctggctcttgctggggaaatacattctaaatattgaagaaaaaggaaatactttcagggaatgcatttctgaatatatatgtaaactttgcaaagctttttctgtaatgaaatcttttaatattttggtcaagcaacagaatggaggaaaaacaaataataagcaaatacttgcttattaatatgtttaggaaacacttggataacacacatacacatatgaatatatacacacacacatatatatatatgttctacatgatcatactaaaatttagatgacacttcgtccaggaagaaatattgaagaaaatgcaatcatacaaacacgacattgccacaggggaaaacataacatccatggtaaatataacgatacaaaaatctgttacatttagtaaaaagtgcagaaaaccggcaagaaaaatgcaggagcctgattttggtagaaagtggcaaaaaggctctaaatgcccagtgcaaatggcttgaaattccattcccaggcctggggctccacatttccaggggctctgctttccaaaagatatggttcaatgtcccctaggtatagtgccttcggtctggactgcagatggagacctgggtcatcccagaagctttgtagtgtgagagatcaaactggctgctctgccaggcctcacctatttccagactggatgattcctgatacttttacttttgagcccaaactaacttctgcatggaggttcagtacaggtcaggtgagtgacgaatctcctgacagggctacagtgaactttcacaaggttaaaccttctaaacttgggaagctgctttgcaaaaataaataaataaaataaaaatcccttactcaattgttgactgggtattattccggaaacaggaaacaggtttttcatttctgccaggttgtgccccagcttccatttgctaagcagcttaggggaacattggattaaaaaccacccgtaaagaaaaggcattaagaaattgatttgaacgatttgaaattattatcttgaaagatcaaagaaacagtgattatgaacaccggctctggtgggaagcggttcttgaaagttaaagcatgggggaactcgagtactctggagcatcatcagcatctgtacaatgcaagtgaactctggaagctagacgcatgctttgcacgtggacacagacacatgcttgcacaggacacatttgcaatacatacatgtttatacatggacacatgttttgcacacgcttgcacaggacacgcttgcacaggacacatgcacaggatgcatgttttgtacaggacacatgttttgcacatggaaacacatatccatgctttgcaaagggacacagggaagcatgcttacaatggatacaagtttacacacggacgcatgttttgcacaggacatatgcacaggatgcatgttttgcacacggacacacacgtttacataggacaagtgcacaggacacgttttgcaccggacgtattctgtgcacgggacgcacggtttgcagatgcaagcacacacactcctcggcgcgacgggcgaagcggggtgggcagcgacagcggagtccggacccagggacagcgcctccgggaacctcgccaaggcggcgggaactacaactcccggctcggtcgcctcgggacgacgcgcggcccagcgcagactggccccgcccagcggccccgcgcggcccggcccaggtcccggcgcccagagtcgccgcgcggccgccggtgagccgcatggagccccgggcggcggacggctgcttcctgggcgacgtgggtacgtgcgggcgccgcggaggtcagagcgaggcagcggcgccggctcctgaggccggccgcgtatccgatggcctgcgccggggaggtggtggcgcgccccgcgctggctcc

SEQ ID NO: 4520 - DNA, 2300 bp, Homo sapien
ataaatcatggagttgtacattccggttttgtgcactattaaaatgttgttgtacttcactctctacttccacagtcagccttcttctgttcttgaataggtttcatttcacttctcaagtcctttgcacttgctttcccttctgcctggaaagctcttcctccacgtattccaagctttggttctatcagttttgatctttagggtttgacctcagatgtgcccatttcagtaagatcttgtagctccactacttctgcccttggcctccagcccccagtcccatccactagcatttccagtgagttttcacagcatgtattgttatctgagattctattttcttgtcgtggtgatttacctgtgtttgtcactcacctctggaataaattccattataggcagggtccttatctagcttgttcatgattgtaaaaccagtgtctattacagcacctggttacagtaaacagtaaacacaatgactgaatctcttggtattaccagcacagtgcttgactcatgatacatgttcattagcacttaatctctctcattggtacagtcatatgtcacttaatgtttcagttaacaacagaccacatatccaacagtgatcttatatgattataatagagctgaagagttctattgcctagtgatgtcgtagccatcttaatttcgtacagcaacacattactcatatgtttgtggtgatgctggtgtaaatgaatctactgcactgccagtcatataaaagtacagcacacatggccaggcgcagtggctccaccgtaatcccagccccccagtgggacaaaatggaggtgaagacaatgatgttgatgatcctgaccctgtgtaggcccaggttaatgtgtgtttgtgtcttagtttttaacaaaaaagtttaaaaagtaaattaaaaaaatttttaaatagaaaaaaacttacagattaaggatataaagaaaatatttgtgtacaatgtgtttgttttaagctaagtgttattacaaaagagtcttaaaaagttttttaaaagttttaaaaagttaaaaagttacagtaagctaaggttaattatgaaaaaatttaaaaaaataaattcagtgtagcttaggtgtacagtgtttataaagtctacaagagtgtacagtaatgtcccagaccttcacattctcattgctcactcacagactcacccagagcaactcccagtactgcaaggtccattcgtgagaatgccttacacaggtgtaccattatttttcatactgtatttttattgtaccttttctatgtctagatatgcttatacaaatacttaccattgtgttataattgtccacagtattcagtacaataacatatagcatgggtttgtagccaggagtaatgggctatggcttatggtgtaagtatgtagtaggttatgcttctaggtttctgtgatgttcactcaaggaccaaattgcctaatgaggcatctctctcataaggtgtccctacagttaaatgatgtttgcatgactatttatcatgggcaagggtaaacctgaatttattgatggtcaccttagctctctgtgcatgtgttataaatttctagagatgctttcctagggggtaacagccacacctactatatggattaaaacaagggcaaaatttccaaaatgtcgcattcgggccagacaaataaactgttcttgcagcagcacctggggaatgaaacgctgagaagggagaaggcgcccgaaggcgaccacgtgggccacagccacagcactgtaggtcagccgagagagcgtctcccgcctcttcccaagggcatcttccgcctcctgtcaagggtcggcaacgcgagacaccacgcgctcgttgggatcggccgcctaatcaggagcgagctgtggccttacgcctgcgcagaggggagacgcgagcgccgcgtggacgctgacctcggtccgcgcctgcgccttggtttcttcccggcgattggttcccatctctgagggagacgcctcacttcagttttcactttctttttttgcccccccctccccttttcttttcctttggccgcgaggttttgcttccggttgctagcgccggtcagagagaaagtcggcatgttctcgcaggctgccgggcgtcccggggttgcctcttgcccgtgaccctgacgggagacagagcgcgggcggccgcggcgtccctgtcagcgcccgcggcgaggaccccggggctggggcggacggcgtgcccctgaggggggtccccgcgggagcgcg

SEQ ID NO: 4521 - DNA, 2300 bp, Homo sapien
ggagctttagaaaggcaattataactaaaggaggccttagagagtataaatttaacaaaatccatcagttagtatgtcttcagcttccaataaaagtttaaacaataaggaacatttattatttcatgtataaagcccaaagatgaggcagcccccaggttagtttatttcatcagttcagggatctagtttctttctgttctgttccgttctatgttggctgccatcttggttgcaaggagatccaggcaacacatcttcagacaagatcctaggctagaagatggagtccttttctaagaaaggtttcccagaactctctctgtagacttccatttatatctcactggccagaactgagtcacatgtttattcctaaaacaaacactattcaaagggagtggaattaccataatgatcttagagtaattaagattctcattctctttctctctctctctctctctgtctccccccccaaccccacacacacacatactcactctccctcactcattttcacacacacacacacacacacacacacacacacacacacacacacacacttcttctgaaccatgggataacctgatacctgaacaaaattgtggttttatggaagggaagtaaaagggacatgattgttgggaagtcaatccaatgtgtctttaaccactgtctcaaaacacattagtggtagcacctagtgagttcaataggtagaccagaaccctggtctccctattcctaattttcccctacataaacaacctccttcatgaattattatcaacatagctacttttcctaaaaaattttgaatgtatccacacaattctacctccagttctttttggggggaaaatgtgctgtaaaactatacatgctgtttttgtgaagcatatgaaaatccttattccacagactcatgataaaaactgaaaacttgaccacctttgtaatctttttcttcgttcttattcttctctcccttcttcccttaatcagtcatattaaactatttgcagttcctttaatgtatcatgtttaaaccgctgttcatttgctcatactatttctgctatctagaaaatgtacactagtttccttttttggcttcctcattggaatatcttccagatttcaagtatctgtgcctccatgaaatctttcttgacatagctccatctccataaaattggttgtatcactgtacatccactatatcatgttttagatactcctacacatttatagtactaatttctttgcagatttttcttccttgtctattctgagctaacttgcttgctttctctttctttcctttctttctctttctttctttctttttctttctttctctccttttctctctctttctctatctcttccttcctccctccctccctccctcccttcctcccttccttccttccttccttcctttccttcctttcttccttccttcctttccttcctttctttcctttcctctctttctctctttctgacatggtctggctctgttacccaggctggagttcaggggtgcaatctcagctcactgcaacttcttccccccagactcaagccatcgtcccacctcagcctccaaagtagctgggactacaggtgcactccaccatgcctggctaatttttgtattttttatagaggtggggtctcactttgttgccctggctggtctcaagctcctgagttcaaacaatctgcctgccttagcttcccggcgtgctgggattacaggcatgagccacctcgcccagcctaatctgaacttttttaatgtagagcctgtttccctgtaatagagactgtttgccatttgtcttgataaatccaagatttagcatgatattggatgcataatagtcaccactaatagttttgtttaatgaatatatatacaactaatttgggggaggagagagatttttgtaaattgtgttctgcttgattccgttattttcaactagtggaataaagatgtggttctgtgatctcttcattttgaaagattttttttcagtaaggcaaaagcgattaagcataatatatttctgtgtacaaaattttctttagaagttaaagacttttggaggaaaaacatttcagattatgtgttatagcttatagaacaaattaagtccttagctgagaatacttgtcaaaggaggtaaataaatattacataattattcctaatacaaattactcagcgaacatttgtttctatagtaaatatgctataaatagaattgttcactttatga

SEQ ID NO: 4522 - DNA, 2300 bp, Homo sapien
tgatttgtattgcaaatgtctgtaggtattgtgcagccacattccaagttaacatttttgaatgactacatttaaatctctgaatttttttcttaagcacctatgttaatcattttacttcttatacttaaaatatcaacgtttaagaaggcagatgaaacatagccacattgacctcagtttgcaaattactgatttaaattagaatcaaatgataattttgaagtcagacagtccttttgttaatgaaacatgattttctgtcctttttattcactgaacttttttttaatgtagttcctttggcattgtcttatgtatgtcttaaatagaaattatgggtggtgtttttttaattgggaacctgtaacacgttaataactgggtgatttatgtgagactataatatgttaaactaccatttttctttattttaatacagtatcttttatattaggccttactggtaagtaatattttgtgtaagggataagtagatggaggccataatattaacaaagaatgaaattagcatcagatcacaaaattaattttatgtttccagtatacctgtgggactaacaagacaattatctgctttgggtccttttcatccacctgtcccctttgagtttgctgttttaaataaaaactgggcagtcgttgatcagtttaaccctttccccatgtatgtgcatgcccttgtcgttctaattgatgacatcataggctggagctgtcttctctttaaatgtgttactcattggccttggctggcaggttgttaattcattttggacctgctactatgataaagaggaacatagttggcttttctggtcatctgtctacctgcagcagggaatcattgcctagcagagttgtgaagtttatccttcataataacagcatttaggaaggaataatgaatacgttgaaaataccaagggaaaccactggcaaatgtaaatgttctgattaagggcatatggatagatttgattatctgtaaaagggaacattgtcagtagatttgctctttcttggataatgtaaaaggtcaatgtttttggtaatgaaagtaaaattttaaaaggtaatggaattaattgatgattctgaatactcttaggacttttctaattttttatttctatcacatcatgtaattaaagatcaatatagttaaaatcatttgaacttaggtagtttctctaataaatcgcttgttcagggaaatggttcctgagaaagtatgttagcaaactcatacacacttgaaacttctacattcctgtccttattagattgtaagctcccaagggcaggactctcatcttttttgggtttttttgtttgtacattttttgagctgagctgtatgtcttctgtgtagatcagttcatatgtttttgaaggataatttctttctaaattaatgtacacattccttaagacttgtccctctggtttaacacattataatctgagggttgaaagagaccttaatccaatagaaaattttaatatgcaatatgtataacataagttttatctgagggttggaagagaccttaatctaatagaaaattttaatatgcaatatatgttacataagtttttctcagacatgttgaattaaccatcatagtaatatggcagagagttaattctatgacaagcaaacatctctcttttttttttcttttatactgaagtcaaaggagaaactgcttcaaagcttcaatcagaaatttcaagaggttgtcaagaagatgggattagcataaatagtgttcaaccagaaaataccacagcggctcacaatgatcttcctgaaaactccatcgtcaactatgactcccaggccctaaatatgttagccgatctagcattaagctctgctacttcttccacaccagtatctgaggctagaaatcttcactgttcctctgaattgccacaaaatgatgttttgctctctaaagaaaattctttgcgaggtacatctgaccatgaatatcatagaggagttaaaactcaaaaaggtgaattactacctaacccatcttctgataggaagagtaattctggatcagacttaacagttagccaagatgaagaaagcttggttccttgtagtcaggcccctgctaaagcccagtcagcacttactgaggaaatgctagaatcttcagatgcaagccaaagctcttctgtttctgtggaacattcatatgccctgctccttacagaacattcaaagaaacatctacaggagagagagatactaagccctc

SEQ ID NO: 4523 - DNA, 2300 bp, Homo sapien
gcacgcagtttgtgagcatggtgttcccagcattgcagaggggtgtgatcagttgtataatcagttcattttattatatgctcgacaaggccatgcttgaggctttaaataaaacaaaaaacaaataccaccctgtttatgaggttatgagaactgtcctgagatgatagctctgctaatgtttaacctaaatcctgcttgctactgtttaaatcagtgcctttagttcagtttatgattgcaaactgcattgataaagttttcaattgccatgtacaataggtattcaaatgagaaagaatctccagtttcatgcaaagaagatagctaagggatgaggggcctttgttgactagaatcaatgtattctgagtacagggggtagtaattaatttactctgttgcctcatgggaaagtttcagatgatggtgtacttatggtctaattgaaaacggatgttaaaaatgttatttgctttttaaaaattatcttttaggctgggcacagtggctcacacctgtaatcccagcactttgggaggccgaggtgggtggatcacttgaggtcaggagtttgagaccagcctggccaacgtggctaaacctcatctctactaaaaatacaaaaattagccgggcatggtggcatgtacctgtaatcccagctactcgggaggctgaggcagagagtcacttaaacccgggaggcagaggttgcagtgagccaagatcactccactgcactgcagcctgttcgataaagcaagacgctgtcttgaaaaaaaaaaaattaatctcatttattaaaaacaaaattgaatgctttttctctagtgctacacttctggattaagcggtgctaagtagcaaacaggctgcatttaaagtcttttaaattgtcagtggtctagttatttttcttccaaaaagcttggagctctcttctgtgtgtggttttaaagaaaacaaatcccactggggggtattttaagtctgcctttaaaagagggacttgcttgatttgtaccctgtgatattcttttagctagaaaattcagaagaacattcacaaactaaaattaatttttatcttttctgttcttcacatgtacatataatcgtataaaaaacattttatatgactgatttttttttttttttactttggccgtttcaggtaactggggaagaagctaaacaagaatcattggagacttctaatcttgtgctttcgggtattggaagtacacaaactaatggaccttctgttcctagtgaagaagaaattgttcagccactggatagcacaagagtggcttcttacagtggcactgttactcaagccacattcaccaggacttacgatgggcctggcagtcagccagtgatatgtcagagctctgtgtacggcacccttgaaaacaaagtggatattcttgatgcagcagtgcaaacaaaaacaggtactttacaggaccttatccaacatggcagccccataaacaatgaatgtcacccttccttggaaagaaaggatgataatatggggtgtgcagtgattaacccggaaccaattactctcacctttgaaaaaaatgcacatgtaccaatacagacagaaggtgtaaatactgctgatgaacgtacaacctttaagaaggagttgattaagcaagtatcacctgctgcaagccttagacatcctgtatccacctcggaaaatgcacgaacacaaggcctgagggacattccctctctagtagttgcaggacagaagggcactaagtacctttgtgcctcgtcagtaggtggagagacacttgataaagcagtgtgttcattacagaaggagacgccccttccagtctctctaccatctgataaaacaatggtcatggaggcactatcattagctaaaagttctagtcatctatcacccagtgaagaagtgagatgcactcaggatttcctttcacagactcagagtctcctcggcctatcttcagaagggcttctagaactgacacaggttgaagtggactcatcatcagcctctaccaccttgggaaggcagtgttcacttaactgcatttcgtcaggatgccacacatcaggtgactctttagaactaaggaagaatcacaagaatggtccaaacactgaaaatatgaatttggaagcgtttgattcagtatttatcaaacaaacaagcctgtctgtgagtagagaggtcagcctagagttatcagaggaagattctgacattgacttagctctaacaatatcaccacctacaagtc

SEQ ID NO: 4524 - DNA, 2300 bp, Homo sapien
caggagtttgagaccagcctggccaacgtggctaaacctcatctctactaaaaatacaaaaattagccgggcatggtggcatgtacctgtaatcccagctactcgggaggctgaggcagagagtcacttaaacccgggaggcagaggttgcagtgagccaagatcactccactgcactgcagcctgttcgataaagcaagacgctgtcttgaaaaaaaaaaaattaatctcatttattaaaaacaaaattgaatgctttttctctagtgctacacttctggattaagcggtgctaagtagcaaacaggctgcatttaaagtcttttaaattgtcagtggtctagttatttttcttccaaaaagcttggagctctcttctgtgtgtggttttaaagaaaacaaatcccactggggggtattttaagtctgcctttaaaagagggacttgcttgatttgtaccctgtgatattcttttagctagaaaattcagaagaacattcacaaactaaaattaatttttatcttttctgttcttcacatgtacatataatcgtataaaaaacattttatatgactgatttttttttttttttactttggccgtttcaggtaactggggaagaagctaaacaagaatcattggagacttctaatcttgtgctttcgggtattggaagtacacaaactaatggaccttctgttcctagtgaagaagaaattgttcagccactggatagcacaagagtggcttcttacagtggcactgttactcaagccacattcaccaggacttacgatgggcctggcagtcagccagtgatatgtcagagctctgtgtacggcacccttgaaaacaaagtggatattcttgatgcagcagtgcaaacaaaaacaggtactttacaggaccttatccaacatggcagccccataaacaatgaatgtcacccttccttggaaagaaaggatgataatatggggtgtgcagtgattaacccggaaccaattactctcacctttgaaaaaaatgcacatgtaccaatacagacagaaggtgtaaatactgctgatgaacgtacaacctttaagaaggagttgattaagcaagtatcacctgctgcaagccttagacatcctgtatccacctcggaaaatgcacgaacacaaggcctgagggacattccctctctagtagttgcaggacagaagggcactaagtacctttgtgcctcgtcagtaggtggagagacacttgataaagcagtgtgttcattacagaaggagacgccccttccagtctctctaccatctgataaaacaatggtcatggaggcactatcattagctaaaagttctagtcatctatcacccagtgaagaagtgagatgcactcaggatttcctttcacagactcagagtctcctcggcctatcttcagaagggcttctagaactgacacaggttgaagtggactcatcatcagcctctaccaccttgggaaggcagtgttcacttaactgcatttcgtcaggatgccacacatcaggtgactctttagaactaaggaagaatcacaagaatggtccaaacactgaaaatatgaatttggaagcgtttgattcagtatttatcaaacaaacaagcctgtctgtgagtagagaggtcagcctagagttatcagaggaagattctgacattgacttagctctaacaatatcaccacctacaagtcccagagaagaaatgccagctggtgaaatagagcaatttgaggaggccccattctcaaatttagaacttcaggatgtagctgaggaaataggtgaaccggaagaggtggctctcacagaaagcagagaagtgagttctgctgacaatgtgtcagtatatccctcagtgtcagaagaaccagtagaaaataaggagagaaagggggataatttacaaccagttactttaatactttctaaagaaaattgcacccttgagattgcagaggaaattaatgtgacctctgattttccctttgattctgtaattgaagaagtatcaccagcgtctagtcctgaacctccagtaccagttaaagagacacgaccatatcaggctgtgactccatgcattttaaaacttcatggtacacagtgtgagaagagcaaccaaatctcccaatgtgagtcagaagacttaggcataacagaaaaagaaaatgtttttgttggtcctacccatccagtggggcaagataactttacccaggtacaacaaatgcaggtctctgccgaaatgcctctaatat

SEQ ID NO: 4525 - DNA, 2300 bp, Homo sapien
gtgaagaagaaattgttcagccactggatagcacaagagtggcttcttacagtggcactgttactcaagccacattcaccaggacttacgatgggcctggcagtcagccagtgatatgtcagagctctgtgtacggcacccttgaaaacaaagtggatattcttgatgcagcagtgcaaacaaaaacaggtactttacaggaccttatccaacatggcagccccataaacaatgaatgtcacccttccttggaaagaaaggatgataatatggggtgtgcagtgattaacccggaaccaattactctcacctttgaaaaaaatgcacatgtaccaatacagacagaaggtgtaaatactgctgatgaacgtacaacctttaagaaggagttgattaagcaagtatcacctgctgcaagccttagacatcctgtatccacctcggaaaatgcacgaacacaaggcctgagggacattccctctctagtagttgcaggacagaagggcactaagtacctttgtgcctcgtcagtaggtggagagacacttgataaagcagtgtgttcattacagaaggagacgccccttccagtctctctaccatctgataaaacaatggtcatggaggcactatcattagctaaaagttctagtcatctatcacccagtgaagaagtgagatgcactcaggatttcctttcacagactcagagtctcctcggcctatcttcagaagggcttctagaactgacacaggttgaagtggactcatcatcagcctctaccaccttgggaaggcagtgttcacttaactgcatttcgtcaggatgccacacatcaggtgactctttagaactaaggaagaatcacaagaatggtccaaacactgaaaatatgaatttggaagcgtttgattcagtatttatcaaacaaacaagcctgtctgtgagtagagaggtcagcctagagttatcagaggaagattctgacattgacttagctctaacaatatcaccacctacaagtcccagagaagaaatgccagctggtgaaatagagcaatttgaggaggccccattctcaaatttagaacttcaggatgtagctgaggaaataggtgaaccggaagaggtggctctcacagaaagcagagaagtgagttctgctgacaatgtgtcagtatatccctcagtgtcagaagaaccagtagaaaataaggagagaaagggggataatttacaaccagttactttaatactttctaaagaaaattgcacccttgagattgcagaggaaattaatgtgacctctgattttccctttgattctgtaattgaagaagtatcaccagcgtctagtcctgaacctccagtaccagttaaagagacacgaccatatcaggctgtgactccatgcattttaaaacttcatggtacacagtgtgagaagagcaaccaaatctcccaatgtgagtcagaagacttaggcataacagaaaaagaaaatgtttttgttggtcctacccatccagtggggcaagataactttacccaggtacaacaaatgcaggtctctgccgaaatgcctctaatattaactgatcatccaggaagaacaggtagaccaacccttcctggtaaagtaactgaggaaattgtctcaagtgagcatgatgagggtttatctttctcaggaaaggtgcagtgctatggtagggagttaaaccagcctgcctcagctgccaaatgcacaggtgacttcagtccttctcctgaaaaactggtaaaatcaggaaatccattgcagccagttagtatagagaatagaaatttggacttaaaacatcttgtcttggagtccagtgaacctccatttggtcctagaaatgttattgaaaataagtctttgtctgacacattggtttccacaactgcaccaagtggtatagtgaatgtgtcagtaaaacagcagactagccctaaaagcagtcagaaccatctctttcccggtgatttgaaaacagatgaaggcatttatctgcaggtgaagtccttgacagctgcctcggttgatggagcttattctacacagggatgcatgtgctcagtggtccccacgctttgttcttcctcagacaatgctacattaacccattatgtaagaccaataaatgcagagccagtgtttcaagcacaggaaataccagcaggcagaatggccagtttgcttaagaatggtgagcctgaagctgagttacataaagaaaccacaggtccaggcactgctggccctcagtccaac

SEQ ID NO: 4526 - DNA, 2300 bp, Homo sapien
ctttgtgcctcgtcagtaggtggagagacacttgataaagcagtgtgttcattacagaaggagacgccccttccagtctctctaccatctgataaaacaatggtcatggaggcactatcattagctaaaagttctagtcatctatcacccagtgaagaagtgagatgcactcaggatttcctttcacagactcagagtctcctcggcctatcttcagaagggcttctagaactgacacaggttgaagtggactcatcatcagcctctaccaccttgggaaggcagtgttcacttaactgcatttcgtcaggatgccacacatcaggtgactctttagaactaaggaagaatcacaagaatggtccaaacactgaaaatatgaatttggaagcgtttgattcagtatttatcaaacaaacaagcctgtctgtgagtagagaggtcagcctagagttatcagaggaagattctgacattgacttagctctaacaatatcaccacctacaagtcccagagaagaaatgccagctggtgaaatagagcaatttgaggaggccccattctcaaatttagaacttcaggatgtagctgaggaaataggtgaaccggaagaggtggctctcacagaaagcagagaagtgagttctgctgacaatgtgtcagtatatccctcagtgtcagaagaaccagtagaaaataaggagagaaagggggataatttacaaccagttactttaatactttctaaagaaaattgcacccttgagattgcagaggaaattaatgtgacctctgattttccctttgattctgtaattgaagaagtatcaccagcgtctagtcctgaacctccagtaccagttaaagagacacgaccatatcaggctgtgactccatgcattttaaaacttcatggtacacagtgtgagaagagcaaccaaatctcccaatgtgagtcagaagacttaggcataacagaaaaagaaaatgtttttgttggtcctacccatccagtggggcaagataactttacccaggtacaacaaatgcaggtctctgccgaaatgcctctaatattaactgatcatccaggaagaacaggtagaccaacccttcctggtaaagtaactgaggaaattgtctcaagtgagcatgatgagggtttatctttctcaggaaaggtgcagtgctatggtagggagttaaaccagcctgcctcagctgccaaatgcacaggtgacttcagtccttctcctgaaaaactggtaaaatcaggaaatccattgcagccagttagtatagagaatagaaatttggacttaaaacatcttgtcttggagtccagtgaacctccatttggtcctagaaatgttattgaaaataagtctttgtctgacacattggtttccacaactgcaccaagtggtatagtgaatgtgtcagtaaaacagcagactagccctaaaagcagtcagaaccatctctttcccggtgatttgaaaacagatgaaggcatttatctgcaggtgaagtccttgacagctgcctcggttgatggagcttattctacacagggatgcatgtgctcagtggtccccacgctttgttcttcctcagacaatgctacattaacccattatgtaagaccaataaatgcagagccagtgtttcaagcacaggaaataccagcaggcagaatggccagtttgcttaagaatggtgagcctgaagctgagttacataaagaaaccacaggtccaggcactgctggccctcagtccaacaccacatcttctctaaaaggtgaacgcaaagccatccacacgctgcaagatgtgtcaacatgtgaaacaaaggagctattgaatgtcggggtttcctccctttgtgctggtccctaccaaaatacagcagacaccaaggaaaacctcagtaaagagcctttggcctcctttgtttcagaatcctttgatacttctgtttgtggaatagccacagagcacgtagaaattgagaacagtggggaggggctcagggctgaggctggttctgaaaccctaggcagagatggagaggtcggtgtgaattccgacatgcactatgaactctctggagattctgatctagacctgcttggtgattgtagaaatcccagactggatttggaggattcttatactttaagaggtagttacaccaggaaaaaagatgttcccacagatggctatgagtcgtcgttgaacttccacaacaacaaccaagaggactggggctgctctagctgggttccaggcatgga

SEQ ID NO: 4527 - DNA, 2300 bp, Homo sapien
aaagagacacgaccatatcaggctgtgactccatgcattttaaaacttcatggtacacagtgtgagaagagcaaccaaatctcccaatgtgagtcagaagacttaggcataacagaaaaagaaaatgtttttgttggtcctacccatccagtggggcaagataactttacccaggtacaacaaatgcaggtctctgccgaaatgcctctaatattaactgatcatccaggaagaacaggtagaccaacccttcctggtaaagtaactgaggaaattgtctcaagtgagcatgatgagggtttatctttctcaggaaaggtgcagtgctatggtagggagttaaaccagcctgcctcagctgccaaatgcacaggtgacttcagtccttctcctgaaaaactggtaaaatcaggaaatccattgcagccagttagtatagagaatagaaatttggacttaaaacatcttgtcttggagtccagtgaacctccatttggtcctagaaatgttattgaaaataagtctttgtctgacacattggtttccacaactgcaccaagtggtatagtgaatgtgtcagtaaaacagcagactagccctaaaagcagtcagaaccatctctttcccggtgatttgaaaacagatgaaggcatttatctgcaggtgaagtccttgacagctgcctcggttgatggagcttattctacacagggatgcatgtgctcagtggtccccacgctttgttcttcctcagacaatgctacattaacccattatgtaagaccaataaatgcagagccagtgtttcaagcacaggaaataccagcaggcagaatggccagtttgcttaagaatggtgagcctgaagctgagttacataaagaaaccacaggtccaggcactgctggccctcagtccaacaccacatcttctctaaaaggtgaacgcaaagccatccacacgctgcaagatgtgtcaacatgtgaaacaaaggagctattgaatgtcggggtttcctccctttgtgctggtccctaccaaaatacagcagacaccaaggaaaacctcagtaaagagcctttggcctcctttgtttcagaatcctttgatacttctgtttgtggaatagccacagagcacgtagaaattgagaacagtggggaggggctcagggctgaggctggttctgaaaccctaggcagagatggagaggtcggtgtgaattccgacatgcactatgaactctctggagattctgatctagacctgcttggtgattgtagaaatcccagactggatttggaggattcttatactttaagaggtagttacaccaggaaaaaagatgttcccacagatggctatgagtcgtcgttgaacttccacaacaacaaccaagaggactggggctgctctagctgggttccaggcatggagacgagcctccctcccgggcactggactgctgcggtaaagaaagaagagaagtgtgtgccgccttacgtccaaatccgagatctccacgggatcctcaggacttacgccaacttctctataacaaaagaactcaaagataccatgagaacttcacacggcctgaggaggcacccgagtttcagtgcaaactgtggcctgcccagctcctggacaagcacttggcaggtggcagacgacctcacccagaacactttagacctggagtatctgcgttttgcacataaactaaaacagaccataaagaatggggattctcagcattctgcctcctctgccaatgtctttccaaaggagtcaccaacccagatctccattggtgctttcccttcgacaaaaatctctgaggccccatttctgcatcctgcacctaggagcagaagcccccttctggtaacagttgtggagtcagatcccagaccacaggggcagcccaggagaggctacacagccagcagtctggacagctcttcctcttggagagagagatgtagtcataatagagatcttagaaattctcaaagaaatcacactgtttcattccacctcaacaaactgaaatacaacagtactgtgaaggaatctcggaatgatatttcacttattctcaatgagtatgctgaattcaacaaggtgatgaagaatagcaaccaattcattttccaagacaaagagctaaatgatgtttctggagaagccactgctcaagagatgtatctgcctttcccaggacggtcagcctcctatgaagacataatcatagacgtgtgcaccaatttgcacgtcaaactaagaagtgttgtgaa

SEQ ID NO: 4528 - DNA, 2300 bp, Homo sapien
ccacataagtgacagtgatggtgtgtactcaaccatgggtcttagtctgtttttttcttgttttacaaataattatcactgggcttggcatgagccaaaagtaccttaaacttgtcatcttcttttgctacatttattgttttgtagttcaactgaaggaaattatcaaaatcctggaaaaactaaatggaaatggaagatggaagtggttgcttcactacagggaaaataaaaagctaaaagaagatgaaaggtaaggacttgctgtgtgtatggttcctcctgccctgctggggtagcagagaaacgcctcatgttccatgggctctagcctagtgctgcagtggaatggccttcatcagtaaagagcatgagggctgctggctctgtattcaatgaaggaagctatgtgctgtgaccgtagccaacagtatgaggcatgtacttatctagactaacagaagtaagggagtcaaacttagcagtcatgaaatgtccatattctatttaagccctactactacaaactttaaaaaatatatggaacttgtaccattaatgcttttttggatacttataagttgccaccactttaaggagaatggaaaaattaagaccataatctatccttaattcagttgtaccctaaaagaagaggcttataaatacgcaaacttcactaagtctaaagctgtaatttataaaagaaaaaaatacatgtttgattccttggctgaagagagctggggctgagagattcctccacattctcacaagcaggaccaattggaaaagcagacctgacaagcccttgtgaaataaggatttcaggcactgttaggtgcatccattttcattcagacttcatccccaggagctagatagcaaatcctcacttttataatgcagaactgaagcagagtagataacaaacatgaccaaggtcaaacaagtagtaagttatgaagctgggtttcaatcccagaaagacgaaacgactgttagctgtatgtgacctttgaggaacagaatctcagaaagcttttctcttgaagtggagctagcaaaggagagaaggagcacagaggtttccttggcaggaaaggagggtgcaaaggcttcagcaggtcaagggtatgaccattcacagcggacttcagtaaccagcacttgaggggaaaaacgtcaacttcggtaagtagagaagcacatttaaggttctgatgtaccacagcacacctataaaataagcataaatcaatctagcacttctagggctttgggtagagaaagtcatgtcacttaacgacggggatacagcctgagaaacgtcataagacgattttgtctatgtgcagacatagagtgtacttacacaaactgatatggtagagcctactcctagattgcaaacctgtacatgtgactgtactgaatactgtaggcagatttaatgcaatggtggtatctgtgtgtctaaacacaaaaaaggttcagtaaattacagtagtataattttatgggaccaccattgtatatgtggtccgtcattgactgaaacatcattatgtggtacatgcccgtactcactgctgttggcgctgcagtatgctcttcatattataccactctggcattatgtaacaggcgttatgtattattgagaactcattagaaaactcttcatatcctttgaccttttgtggaatttacccaaaattctaggtggttatcagtcattgcaaaaccaacctcagttccatctctaggagggagatatgcagactacagttaaatattttaaagtttatacaaaataatgcccacccaaaacttacacaatagaagcatgtaaaaagtttctattcatagaaagagggatggcataaaagttggtatcatgtaactatgttcagtatgatgtcataaaaaatttatacaggaaaaagtgaaaggaaattaattcatgatgttaagagtgattatcactagggttatgggaatgggtgtgatttgggttttctccaacaagcatgagaatgtaagtgatgaaaactagagagacgggagtcgagcagagacagaaatgctaaaaatttaaacatactgagttaacacattttcctagtagtgatagaattttcagggaagcaagaaaccaagaaaattctggctgctacctaattttaatgaagttggcgattatctgcccacaaggtatgagaagtatagatgtgcattgctctacaaatatacaacgcaataaggcccactcgaaattcatgaaaggcttgccaagc

SEQ ID NO: 4529 - DNA, 2300 bp, Homo sapien
cctgtgccacattggaagaggaagaattgtcttgggtcacacataaaatatgctaacagtaatgatagctggaaaaagggtctgtgcataatttcgtgatgtctgccaccacaaataagcaaaaatgtccttgcattcaaggggctggacgtggctgaattttagtactaacaacaatcctttgaggttaggtagagccaggatttgaaccctgatctgcccaattctaaaacttatacttctgaatactgtgcaacacagttttcctagtatttgaacaggatttacagttcatatatctgttcaaggagaaaatagtagggataattggcaaagctagtttcagtagttaccgacagtttaataattaccttgacttttatattcattagattatgaagataacagattatattcaagggaaaattacattaatatactgtttaaaacattatagacactgaatattagtctttttccctccattttttttttttgtgataaagtacccataaaatttaccatcttttttttttttttttttttttttgagacagtctcactttgttgcccaggctggagtgcagtggcgtgatcttggctcactgcaacctctgcctcctaggttcaagcaattctcctgcctcaacctcctgagtagctgggattacaggtgcccaccaccacacccagctaatttttgtatttttagtagagatggggtttcaccaggttggccaggctggtctcaaactcctgacctcaggtgatctgcctgcctcggcctcccaaagtgctgggattacaggcgtcagccactgcgcccggccagaatttaccatcttaaccattgttaagtgtacagttcagtggtattaaatatattcacatcattatacaaccaccacaaccaccattcatctccataacacttttcctcttctttttttttgagatggagtctcactctgtcgcccaagctggagtgcagtggcatgatcttggctcactgcaatctctgcctcccgtattcaagtgattctcctgcctcagcctccccaggtagctgggattatagatgcataccaccacgcccggctagtttttgtatttttagtagagacagggtttccccatgttggccaggctggtcttgaactcctaacctcaaatgatccacccaccttggcctcccaaagtgctgggattttataggtgtgagccactgtgcccacactcacttttcctcttctaaaggaaactaccaattaagtaataactcctcgttctctgcttccagccactggcaagcaccattctactttctttctctatgattttaactactatattttatataaacggaataatatagtatttgccttcttgtgactagtttatttcacttagcatgatgtccatggttcatctgtgttgtagcatgtgtcagaatttcctttttaaggctgaataatattccaatgtatggaaagatagaccatagtttgcttatccattcatcgatacctggattgcttccatgtttttgtgaatgtattgtgaataatgctactctgaaaatgggtgtacaaatgtctcatcaagaccatgcgtttagttcttttgggtgtgtacccagaagtggaattgctagatcatatggtaattctgtttttaatgtttgagaaactgccataccattttccatagtggctggaccattttacattcctgtcagtagtggacaagaagttccagtttctccatatccttgacacttaattttgttttgatagtagcaatcttaacggttgtgaggtagtagctcactgaagttatgattagtgatgttgaacatctttgcatgtgcttattggccacttacatatcttctttggaaaaatgtctattcaagtccttcgattttttttttttttttcttttgagacggagttttgctcattgcccagcctggagtgcaatggcgtgatctcggcttaccataacctccatctcccagattcaagcgattctcctgcctcagcctcccgagtagctgggactacaggcatgcgccaccgtgcccagctaattttgtatttttagtagagacgaggtatctccatgttggtcaggctggtctccaactcctgacctctggtgatccgcctgtcttggcctcccgaagtgctgggattacagacgtgagccaccgcgcccagccctttgatcatttttgaatcagggttttttttgttgttgttttaggagttcttgatgtattgtggatattaatccct

SEQ ID NO: 4530 - DNA, 2300 bp, Homo sapien
aagcgcgatgcagccgcagggactgtggcccctctctgcgttcaagagccagcagcggggcgcagagggagcaacaacctcaccacttcctcctccagcactgctccacgggcctgccacctgcgctgctgctgctgccacgcacggtgccatgacgtcacacgcgcaagtggcctctgcttattcttaaacgttactcctctggagtaagcaagctcctttgaacatggcaattttaaacttcagacacattttttcttctgtccttcctctataatctctgctaacctctttgagcctttcagctgtttatttctggtggattccttcgcttttccctcctgtgtgagcacttctggaggtagttaaggatttgaagatattttatcatagatttgttggctccttcttttgaggctccctcttttgtgaaactttcccctacaattttcatctcctctggccgccccaaattctgtcacatctcaaatcaataggactgcaggcattgtgcttctgttgtagctgtaccatgttgcaaggactagggaagttgctgcctgaggggaaaaccatataaactacataaagctctcacccacttggttcctttcaagagtttcttcagtctctggtttttgctgctttaagtcattctccagtgctgcctttccccccactttattactatctttttttgagacagcattttgctttgttacccgggctggagtgcagtggtgtgatcacgacttactgcagcctcgacctctcaggctcaagtgatgctgccacttcagcattccgggtagctgggactacagatgagtgccaccatgcctggttaatttttctatttgttgtagaaacagggtttcagcatgttgccaaggctggtcttaaactcctgcgttcaagccatctgctggcctcggcttcccaaagtggtggcattaggcgtgaaccactgccttcagttccttctgatagtgttttaagtccatagttttatttatatgccagaggattagactaatatagctattactggtcaacccttcccttggccttgcccttgcccttgcccttccccttcccctgggtgtgaatccagagaaatggcagatttgcctctgatgtggatagtcccgcgactgcacaaggccattttagaacacacacacaaggaaaaacaggagaatagacagtgtggggttttgggaaagagccgattttagttgaagaagcagagtaaaacccagacatcgcatggctttaggctttagcctcaccacactcacgagcctcctgtccaggagggccattagtgtctcaggtctgctcagtgtggaccccgaagagccatccatcagggtgagcgaggagggataagctatggatgcagagccgctgcggccgagaggaactgttccggtgattggttagcaagcgggagagtggaaaggggagaagaaaaccgtgtatgggggttgaacgcctccagccaaagaaaatgaggtgtagaggtctcttactactagggaatgtatccgagtcacacagcaccaaatgtgttgctggtggaaggtagccgagtcacaggcaccaaaatatgttaccgtgctgagatgaatccgtacgggtctgcagcaacctcagttcttttctcctcagaagaaagaatgaccaaggggcataaggtagaaggagagactgaggcaagttttagagcaggagtggacgtttattgaaaagctttagggcaggaatgaaaggaaggaaagaaagtacacttggaggagggccgagtgggcagctcgaaagacaagtgcctggttagtgattttttttgacttcgtatttataactgattatgtttgtgtttttgactctgttttcttgctttaatcacttctaagctgacatctttctagaaggaaattgaacaaatgtatattgtctgtaactcattaagatctaagaaaggggactttaggagttgaaacaactatatattattaattgggattttaaaaattttccaggctaagtgctatttatggaggtacctatatgctgaataaacccattgaagaaatcattgtacagaatggaaaagtaattggtgtaaaatctgaaggagaagtaagtagcttttaaaatgaaaaaaattactatgttcttgtgaagaaagttgtgtattctaaatattgattttggtgtggacactgatgcatatgatttctgtatgggaagttagtatttattgtgactaaggactaattacagttgctgtgctt

SEQ ID NO: 4531 - DNA, 2300 bp, Homo sapien
tacatgtgccatggtgttttgctgtgctcatcaacccatcatctacattaggtacttctagtgctatccctccctagcccccatcccctgacaggccccggtgtgtgatgttcctctccctgtgtccatgtgttgtcattgttcaactcccacttatgagtgagaacatgcggtatttggttttctgttcctgtgttagttaactgagaatgatggtttccagcttcatccatgtccctgcaaaggacatgaactcatccttttttatggctgcatagtattccatggtgtatatgtgccacattttctttatcccgtctaccattgatggatatttgggttggttccaagtctttgctattgtgaacagtgctgcagtaaacataagtgtgcatgtgtccttatagtagcatgatttataatcctttgggtatatacccagtaatgggattgctgggtcagatggtatttctggttctagatccttgaggaatcaccacactgtcttccacagtggttgaactaatttacactcccaccaacagcgtaaaagtattcctatttctccacatcctctccagcatctgctgtttcctggctttttaacgatcaccattccagctggcgtgagacggtttctcacatggttttgtggttttgatttgtatttctctaatgaccagtgatgatgagctttttttcatgtttcttggctgcataaatgttttcttttgagaaatgactgtgttgagatggagtctcactctgtcacccaggctggagttggaatggcatgatcttggctcactgcagcctccgcctcctgggttcaagcgattctctcacttcagcctcctgagtagctgggatttcaggcacctgccatcatgcccggctaatttttgtattttttgtggagatagtgtttcaccatgttggccaggctggtcttgaactcctgacctcaggtgatccacccgcctcggcctttcaaagtgctgggattacaggcatgagccaccgtgcctggcataacttttatgcattttaaccctgaagacaagacaagtaattgttgcttgaaaaaattattctatgtagccatttggtttgtatctggagaaactgaacctccatgaatttagtgtgtactaagttggaatcattagctcgagtcagtgaatcagatacatttcacagtgactgtttgccaagtcctggcaatgcctcttctcccacagtctgccagatgaagcatttccgggattacccttctatgtggttttcccttttaatttttttgctggattaactgttttcgcattatttcctcttctcccctcttctctggccttccattttaattattcataaatcctttcagaatatcctcagctccataaggggaagttctggagatggaaaatccaagggaggaagattggggattggaatgtccttggctttcctggtatttgctgcaaacttctgccaggttaaagaggctgtagcagtttctgaatgtggcggcaagctccataactctgacttttctacaaaatcagcatctacatccagctccttttctattggaccatttagaagtctgcccttttcagccttgagttgtttattttctttccttaatctttcattctcagccacaaggaattccacatgcctcttcaaatctgcttctctataattgttttatctttcgggcctttgcttctaatacatggctctgctggctcactcttttgctaaagtaaaaatagtagcgtgtctggatccctgtcaaagatcccttgaatctcaggcaggcatttctctgtgaaagggctgtgcttctgagaaagggggctctggctctctgcatcctcagcagagggtttgtgagatgggcagctacatcctatgttctgctgggctttcagtcttttcacgctgggcccttttccacctgtcttggatgaggaggcgctgtttcctattcctttgcaattccagtgaaaaatgagcctgctcagactgtcagcttcacggcttctgaaggatatgccgcagcctttttgtgacaagaaatagcttctttgtagttgctgataaatggtctgttcatctgctctgttgatgagccaggttgagggatccattattttcatagactccggggtaagtggcagccttaggaaggggagcagtggcgcaggggaacatggaggggactgcagggaagcgcgatgcagccgcagggactgtggcccctctctgcgttcaagagccagcagcggggcgca

SEQ ID NO: 4532 - DNA, 2300 bp, Homo sapien
accgtgcccggcctccagctaattttttttatagggacagtgtctctgttacctaggctctacagcacaggctggtcccaagtgattctcccatctcccactcctggccccaagtgatcctcccatctcagcctcccaaagtgttaggattacaggtgtgaagcactgtgcctggctcaggtacaacattttagatgcactcagtccgttaaggcttagtccaggtttgattgttattgtccttctgttgggccatagggcctgtactgtgaactaaaatgaacttcagtgttaagtaaggaagggatccttattagccttaaattcaattcccttatctcagtgtcttcaagtttctcacaactcttgagtatcgataaaatagtcttcacctaaaacatggttaacataattcagttgacatgcttaaatttctcttcaagagccagaggctgatggcaattgtgaaaaaagctctttattgttattgctaataaaaaaaaaagggccaatagtcaggtgtggtggcctgtacctcttgtccctgctactggggagactgaggtgggaggatggcttgagcccaggagatcaaggctgcagtgaggcatgattacaccgctgcactccagcctggacgacagggtgagattgtctcagaaaaataaagaaaaagggttatttcatattggttcaaaaatataggtagtatgaccccctgatgacttgaagacagagcaacagaaggaccttctttagtcatcattagcttagccaaaagaaaagtcagttacactcactgttgcataatcagttgtatggtcaactgtgcactaattcatttggtcacaaatatatacaatcaaattaaggttgaatgtaaatttaaactttacttttgctttcttctcccctcccccccagaaagatccatggtccaatataacatatcttcttcaagtatttatggggtaagaaacattttaaaaagttgttacattctttcctctatcttaatgatttaaatatgagcaagttcggtctatcaaggcaggctctgaatagctactatcgagaagtatttgaggagttcttgaatgccaaatcttcattgtctgctgactctgcagatttatcacgtgctgaaagcacaggttttccaactgtcaacgtctttacgaaattcacctgcttaggctttcgtggggtcggcctcttggagctgagaacacagcttctgcttacacctgtgtcctcaatgaagccagagattcctaagagaattctagaaaaagaggagcggggtagaaggcaagcaaggaacagtttctaagcttagggcctaaacctttgcatacaaggatcagctaccacgtttacagcggctttaagttacagccctcggtaggtgcagatcggcttcccaatgaaacctggctttcactttcatctctgttaagggttaccttttcaaaagaagccgcttttcctcctaccaatttcctaaagcgcccaccggcaacgcactaaacaaggagggcacagagcgggaaaaaggacacgtgtgatttccgaactcttcccggcgggctccgggccccggcaagcccagccccgcgggaggaaccaaggccgccacccccgagaggcagcccggcccgcgctcctcgcccacgtggccgccgcacgcgcccgctcaaagtccaagggcggcgatccggctctgggaccttggaccgagcgagctcccgccccgacggcgggagtcagaacggtggtggccagcagtccccgcccgcggctccgtgcacctccaccccggcccgcgcgccgcctcccgaaccaccgtggcagaggccgcaaggggaaccggaagccaaaatggcgacgccccgcccttttcctctcgcgagaggcggggaaggaaaaaaagttgtgcgagcgacggggacgtaaccaattagagtgccgggagcgcctgattggcggccctcccggcgcctgcaggccccgccccggctgcggaggctcagtcacagccctcccctcctcgctccctcccctcctctccccgcccagttcttctcttcccgtctgaggtggcggtcggtctcgccttgtcgccagctccattttcctctctttctcttcccctttccttcgcgcccaagagcgcctcccagcctcgtagggtggtcacggagcccctgcgccttttccttgctcgggtcctgcgtccgcgcctgccccgccatgaatgaggagtacgacgtgatcgtgctgggcaccggcctgacggt

SEQ ID NO: 4533 - DNA, 2300 bp, Homo sapien
tcaagccattctcctgcctcagactctggagctccccagtagctgggattacaagcagccgccaccacgcccggctaattttttgtatttttagtagagacggcgtttcaccatgttggccaggctggtcttgaacgcctgacctcaggtgatccacccgcctccggcctcccaaagtgctgggattacaggcgtgagccactgcacccgcgcccccgcccccaccccctcccccccagatgttcttattctctgccttctgttttccaaaatcctcctttcccctgaaggtgacctgaacaagatgcggttgggcagtgctgggtgaagcagccacatgtgtgtactgctcacctgcagagctgtaggctgtacctgcagtatgcagaggagtccttctaattttgctctctgtcttccaggcacctgggcaaacagtgagcaggtactggaggatcagagggtcgccttctcgactggcaatgtggaaactgttccagccatctttgttcttcaggagtggattggcgccatgttccaccagctcctggatcacccccaggttcttccttgtgcaggccatcatcagaggagtcctaaggccaaccaggagaagctgtcagatggaggcagctgagacattagaagccaggggccaggtcttcaaaacacacacatccttggcacagatggaaaacctagaggattcaggggtctggcaggcaggaaaacagctttgaccggcaacctctgtgccttctgtgaggaccctgggagaaataataaggggaaaatgattgtaacgaacgtgtacctagaggagagggtgcctgggagacaaagcagcttataagctagttcacaggatagcagtgaattggagcagagctaagaaaacccacagacaaccctcaacacataacgaagtctattcccctgccccagtggggaagatgtacttccctatgttcctaaagatgttcacgccctctaacgaacctgacctagtgagtactaaaatcagtgtcaatctaacaaacgaaatgcaattggcttgtgtgatggtggagcagagtatctctgactgtggtggttatgcaaggctgcacgtatgtgatacaactgcactgtgctctacacacacgagcgcgtgtataactcaggaattctggatattgattggagcaatgccacttgaaacaatgcattggtgcagaagtaacttagctaaatgtccccagaacatcgcatccggaggctatctgtatagtgcacacacttcattgtttggtaacattctctttggttatattctacactattccgtgctctagaaagggaggtgactgccccgaccagttaacccacaagggcaggaacgagggactctgcaggtcatctgcgttataagggaaagttgggcaggaggtccctgccgctgagcaggcctggggtgagaactaggagctgagaacagctacggtgtccaaggggacggagaagcacagggaactcgctacgactctgcgagtagaggggaggcggggtgtctttccgctccacacctaccagtcggccttcttcaggcagtcgaccgctgccccccggcccagcaggtagcgcacgcagtctcggtggcccatggaggccgcctcgtgcagaggccgcttgtagtctcggttggtggcctcgatgtccatgccccaggcctcggccagataggccagcacgtcccgatgcccgtggcgcgcggcgcagtgcaggagggtatccccggccggccccgggcagcccccggccgcctgcagctcctccttcagggcgcgcagccggccctcctgcaccagcctgcagaggcgccgcgggtccccgggctgggccatcgccgcgggtcgggccgggctgcgcggggaggcggcgggcgggacaccggcggccgggcagggagaagccgagggcgagtgggactttccgcctcttcacgcaacctgccccgcgcgccccgaacccggcagaaccgcccctcacgcccccggctttgtccccggcagagccgcctcctcaaacccccggcctagtccgcaggcgggctgccccctcacagccccggcctgccccgcgtgggagaagccgcggttccgggcacggggcggtttttcctcagggacggagcggtccgggatgagcacggaggggcctggggatccgagagcgctggcgtccgccgtcctggagctgcagcggcccgtacgtgattcgggactgaacacgtaagggagtggggcgcgccgctacaccgc

SEQ ID NO: 4534 - DNA, 2300 bp, Homo sapien
gtcttcaaaacacacacatccttggcacagatggaaaacctagaggattcaggggtctggcaggcaggaaaacagctttgaccggcaacctctgtgccttctgtgaggaccctgggagaaataataaggggaaaatgattgtaacgaacgtgtacctagaggagagggtgcctgggagacaaagcagcttataagctagttcacaggatagcagtgaattggagcagagctaagaaaacccacagacaaccctcaacacataacgaagtctattcccctgccccagtggggaagatgtacttccctatgttcctaaagatgttcacgccctctaacgaacctgacctagtgagtactaaaatcagtgtcaatctaacaaacgaaatgcaattggcttgtgtgatggtggagcagagtatctctgactgtggtggttatgcaaggctgcacgtatgtgatacaactgcactgtgctctacacacacgagcgcgtgtataactcaggaattctggatattgattggagcaatgccacttgaaacaatgcattggtgcagaagtaacttagctaaatgtccccagaacatcgcatccggaggctatctgtatagtgcacacacttcattgtttggtaacattctctttggttatattctacactattccgtgctctagaaagggaggtgactgccccgaccagttaacccacaagggcaggaacgagggactctgcaggtcatctgcgttataagggaaagttgggcaggaggtccctgccgctgagcaggcctggggtgagaactaggagctgagaacagctacggtgtccaaggggacggagaagcacagggaactcgctacgactctgcgagtagaggggaggcggggtgtctttccgctccacacctaccagtcggccttcttcaggcagtcgaccgctgccccccggcccagcaggtagcgcacgcagtctcggtggcccatggaggccgcctcgtgcagaggccgcttgtagtctcggttggtggcctcgatgtccatgccccaggcctcggccagataggccagcacgtcccgatgcccgtggcgcgcggcgcagtgcaggagggtatccccggccggccccgggcagcccccggccgcctgcagctcctccttcagggcgcgcagccggccctcctgcaccagcctgcagaggcgccgcgggtccccgggctgggccatcgccgcgggtcgggccgggctgcgcggggaggcggcgggcgggacaccggcggccgggcagggagaagccgagggcgagtgggactttccgcctcttcacgcaacctgccccgcgcgccccgaacccggcagaaccgcccctcacgcccccggctttgtccccggcagagccgcctcctcaaacccccggcctagtccgcaggcgggctgccccctcacagccccggcctgccccgcgtgggagaagccgcggttccgggcacggggcggtttttcctcagggacggagcggtccgggatgagcacggaggggcctggggatccgagagcgctggcgtccgccgtcctggagctgcagcggcccgtacgtgattcgggactgaacacgtaagggagtggggcgcgccgctacaccgcaaagccccaaagtggagggtccgggagggcgcgcacagcctcgcccggcgccgtgcagggtggctcctgaggcagccaggcccaagcgtgacctgccccgcacgcgtcctcagggccgccccagcctccagcccctgggggccggcgttcctgggctccgcccccgtccccgcccctcgaccgccgctgctccgcggggactcggggagctcgaaggaactctgggaaagtttcccgctccgccccggcccgagcggaagcgcggatggggcgtggcccggtagctgtggccgcgcccccaccgattgcgcatttcgattggcgttagtggccgtccgtcagcacgccccctccggtctcgcgtcccgattggtcgcgggggccgtcagtccggctccggcggcgggcgcttcccggggctgcggcggggcggagctcgcggaggaagtcggcgggcgtctcgggctccaggtcccggccagaggaggagctcgctgccgggggacgctgggctgagcggccggcggcgcgggcccggcggcggcggcagcggggtccgggtccggagcgccacagtgcgtgaggccgcagacgtggcagggagtgtgggaggggctccgccgtgtggaaaacttaacctccggggtcctgcgcggggg

SEQ ID NO: 4535 - DNA, 2300 bp, Homo sapien
ctaccagatgcctcaacttccaatttgcactaacttcaacggcagcagaacactgcttggcacgccctacacttttgtgcatttcaaacaacttttatgccttcctttttttcttttgctggagtgacaaggcacgacagaacaataacctgagcaaagctggtacttggactagttctgtctccagaggctatccacatcactgttaccttaaccaaactcaatctgctcatgagtaaaacggacttatcttcatgggcccattccagaagtcttttcatttatctccgctcattttaccacagcggcagacgctggcggacactcaacacatgctaccatcctgccttccagaagactttattacctgtaattctgtaagaaagtcactgacttggttaggcctccacttccccacctgtaaaaccctactgatgcctcatagggttgtcttcggaccacagactgcaataaaaaatgtaaacggcactcgtttttaggcctggcaaataggagctactcccattctactccctaaaggaatcgaaaacatggagaggttaagtgactggcacctaatcagatcgggtaaggaacccaacacctactgatctcttccatcacccacagcctgcccagctctcgccgtgccctccaccagcgccaggcctcccacatcgccttaggcttcccatgctcagaggaggggcagagaagctaccgatgacacaggggcagagggcagcgaaaaatgacttgcccaaggtcaaaacgtcagagtagacgggaaagcctggcctcctagcagccgaggccacgtccccgcgcttgccccttcagccccgaggacccacacgctgcgccttcctggcctcggggggcagcgcgggggccgctcccgaccgagttcagtgagcgccctggcctcccccgcgcacccccgccgcgccctccacctgcccacggcccggacggccgagcccccacgcccgcgcttgcccgagcccagcctcgcgcccccggggcccccgctgccccaccccgggcccggaccccccgcgcaggaccccggaggttaagttttccacacggcggagcccctcccacactccctgccacgtctgcggcctcacgcactgtggcgctccggacccggaccccgctgccgccgccgccgggcccgcgccgccggccgctcagcccagcgtcccccggcagcgagctcctcctctggccgggacctggagcccgagacgcccgccgacttcctccgcgagctccgccccgccgcagccccgggaagcgcccgccgccggagccggactgacggcccccgcgaccaatcgggacgcgagaccggagggggcgtgctgacggacggccactaacgccaatcgaaatgcgcaatcggtgggggcgcggccacagctaccgggccacgccccatccgcgcttccgctcgggccggggcggagcgggaaactttcccagagttccttcgagctccccgagtccccgcggagcagcggcggtcgaggggcggggacgggggcggagcccaggaacgccggcccccaggggctggaggctggggcggccctgaggacgcgtgcggggcaggtcacgcttgggcctggctgcctcaggagccaccctgcacggcgccgggcgaggctgtgcgcgccctcccggaccctccactttggggctttgcggtgtagcggcgcgccccactcccttacgtgttcagtcccgaatcacgtacgggccgctgcagctccaggacggcggacgccagcgctctcggatccccaggcccctccgtgctcatcccggaccgctccgtccctgaggaaaaaccgccccgtgcccggaaccgcggcttctcccacgcggggcaggccggggctgtgagggggcagcccgcctgcggactaggccgggggtttgaggaggcggctctgccggggacaaagccgggggcgtgaggggcggttctgccgggttcggggcgcgcggggcaggttgcgtgaagaggcggaaagtcccactcgccctcggcttctccctgcccggccgccggtgtcccgcccgccgcctccccgcgcagcccggcccgacccgcggcgatggcccagcccggggacccgcggcgcctctgcaggctggtgcaggagggccggctgcgcgccctgaaggaggagctgcaggcggccgggggctgcccggggccggccggggataccctcctgcactgcgccgcgcgccacgggcatcgggacgtgctggcctatctggcc

SEQ ID NO: 4536 - DNA, 2300 bp, Homo sapien
agcaaagaaggttcatagagaagacacaagaggcagaatcgaatgtgcaacaccaatgaagtaaccaattatcctgggttcaaatattccaacctggctaggcacggtggctcacgcctgtaatcccagcatttgggaggccgagctgggtgaattacttgaggccaggagtttaaagaccagcctggccaacatggtgaaaccccgtctctactaaaaatacaaaaaaattagccgagcatggtggcacacgcctgtaatcccagctactcgggaggctgaggcaggagaattgcttgaacccgggagggggaggttgcagtgagccgagatcgtgccactgcactccacccggagcaacagagcgagactctgtctcaaaatatatatatatattccaacctactgtgaacccgtgtgtcccaattatgtttaaaaaacagggaaactagagacataatgcaagagaagatagtcatctgaaactgggagaggggcaggggtaaaagcaaaaagcatgaagctaccagatgcctcaacttccaatttgcactaacttcaacggcagcagaacactgcttggcacgccctacacttttgtgcatttcaaacaacttttatgccttcctttttttcttttgctggagtgacaaggcacgacagaacaataacctgagcaaagctggtacttggactagttctgtctccagaggctatccacatcactgttaccttaaccaaactcaatctgctcatgagtaaaacggacttatcttcatgggcccattccagaagtcttttcatttatctccgctcattttaccacagcggcagacgctggcggacactcaacacatgctaccatcctgccttccagaagactttattacctgtaattctgtaagaaagtcactgacttggttaggcctccacttccccacctgtaaaaccctactgatgcctcatagggttgtcttcggaccacagactgcaataaaaaatgtaaacggcactcgtttttaggcctggcaaataggagctactcccattctactccctaaaggaatcgaaaacatggagaggttaagtgactggcacctaatcagatcgggtaaggaacccaacacctactgatctcttccatcacccacagcctgcccagctctcgccgtgccctccaccagcgccaggcctcccacatcgccttaggcttcccatgctcagaggaggggcagagaagctaccgatgacacaggggcagagggcagcgaaaaatgacttgcccaaggtcaaaacgtcagagtagacgggaaagcctggcctcctagcagccgaggccacgtccccgcgcttgccccttcagccccgaggacccacacgctgcgccttcctggcctcggggggcagcgcgggggccgctcccgaccgagttcagtgagcgccctggcctcccccgcgcacccccgccgcgccctccacctgcccacggcccggacggccgagcccccacgcccgcgcttgcccgagcccagcctcgcgcccccggggcccccgctgccccaccccgggcccggaccccccgcgcaggaccccggaggttaagttttccacacggcggagcccctcccacactccctgccacgtctgcggcctcacgcactgtggcgctccggacccggaccccgctgccgccgccgccgggcccgcgccgccggccgctcagcccagcgtcccccggcagcgagctcctcctctggccgggacctggagcccgagacgcccgccgacttcctccgcgagctccgccccgccgcagccccgggaagcgcccgccgccggagccggactgacggcccccgcgaccaatcgggacgcgagaccggagggggcgtgctgacggacggccactaacgccaatcgaaatgcgcaatcggtgggggcgcggccacagctaccgggccacgccccatccgcgcttccgctcgggccggggcggagcgggaaactttcccagagttccttcgagctccccgagtccccgcggagcagcggcggtcgaggggcggggacgggggcggagcccaggaacgccggcccccaggggctggaggctggggcggccctgaggacgcgtgcggggcaggtcacgcttgggcctggctgcctcaggagccaccctgcacggcgccgggcgaggctgtgcgcgccctcccggaccctccactttggggctttgcggtgtagcggcgcgccccactcccttacgtgttcagtcccgaatcacgtacgggccgctgcag

SEQ ID NO: 4537 - DNA, 2300 bp, Homo sapien
tgggtatgctgttgagcatgcccattggtacactgatcatttgacaggtttcgtgatttgtgagtgtgtgtagacaccactattggtattagatttagaattctaattttgggtttgttgacatcatctttttgctgcttatctcattcctctatccctcctaggctgattttatttggaaactgaatttggattccatctttgcctttctggctgtgaaattacctacttttagaaagcatctcaaatcttatatctgtaactgtcattcacatgccttttgaagaccagtctcagatttcagaggacctcctggagcataaacatggtattccacagataacttaaagccagaaattatttttaaaactaggactttcagcctccctctcactccgggggaaaaagtgattaaaacacaaacactgtttctcttttattccttaacatggttaatgacattaacatctctttgaatgttctactagaaatgccagttatccttgttgctctttatcttttatctttctgtcttgtcaaacaaagccatgttcttatgcacctgcagggtctgctactctcaggcctttgccaattctcacataggttgatatggtggctttctgagttgttttcctgacaatctccatgtctctccaccttctatcctctctcccgagtcactgtcctaaagtgtaaatttgattgtgtaatgaccctgctttaaaaattggatgaggccgggcgcggtggctgacgcctgtaatcctaccactttgggaggccgaggcaggtgtattgcctgagctcaggagttctagaccagcctgggcaacacggtgaaatcctatctctactaaaatacaaaaaattagctggctgtggcggtgtgcacctgtagtcccagctactcggaagactgaggcaggagaatcacttgaacctgggaggcggaggttgcaatgagccgagactgtgccattgtaccccagcctggaccacagacagagtgagactctgtctgaaaacaaaaaacaaacaaacaaacaaaattggatgataccttgaagcccctacctgataaagtccaatttctttttttgaagcccaatttctttatcattatgtgtaaggacctttgtagtctgtggctccaaattccttttccagccttatctcctgtcattcctcatcagggaacctcttgttttgatgaagcccagctttcctgccactctagtgcattgttaatgcctctgtatttttgcacacattgtttccttccgccttactgaatcccatgattctttcaagactcaactcttcgtgaagcctttttcaacttgcctaactctatttatgtttctttactatcataacacttcatgcatgcatttatgtagttgttatattactttatctttagtaacttgtgtttgttttggtagctgccttatgggtaggcttattcacttttgtatcactaatgtctaaaatagcatttaacaccaaggataccataagacaaagctctcatggagtttaaaatgaatctgggacatagcagatacgtaaaagtagttgtggaatgaattgactgtagaaaaagcctttcaaatatataaaattatattctagaccataagtagtgatctttctcttgtttttcaaacattcctttctttctttaggaaaaacatagaacggaaagcccagcccatccttgttggctgtcatacacgagtgctgtctccaagggagtcacaggtgtctcagatgtgagaggatcccggggagattgagcttactgcctgggaacttttggatttctggagaagcaggctgtggtagcctggctctgcgtcagtgaatacctgggaaaggagctggagctctattttgcttgctttctgcattcgtttcttttagagctaatggggacacaatattttgaagtttttccatttcgggtctacagcatttagtggtattttccttatagttatgttttccaaatacttctcaatttctttggttctgacatttcacaatgattttaaaaaaatgtaatatggaaattaaacttgaggttttcagaagctgctttcaaggtgtctagatacagagtgaagaatgtcacagtaggaagtgcactggactaggggagtcaggagacccgggttcttgtgttggcaccatcactcatgagctacgaggtgacttcaggcaagtcctctctgagccccagcttaatcatggcacaattgtaggattgctttgagggtcagacgagaatatag

SEQ ID NO: 4538 - DNA, 2300 bp, Homo sapien
gaatgtccccactatgtaccaaatgaattcccactttagttaataaatctagattgccttatttccctttgatacaactaatttcagaattcaactcaaatattatctggttgtcttttttttttttgaggcagggtcttgctctgtcatccaggagtgcagtggcaccatttcagctcactgcagctctgcctcccagctcagcctcccaagtagctgggacttacaggcgcgcgccaccatgcctagctaatttttgtatttttttgtagagacagggttttgctacgttgcccaggctggtctcaaactcctgggctcaagagacccacctgcttccgcctctcaaactgccaggattacaggtgcgagccacctctcccagcctggttgtctttaactattgtatgtttcctgctgtgggaactactataaccaactgtatgaggcagtttgaaacttacttatatcctgtctgatactgagtttgttccatatatagaagtctgtttcttctctattttgagttttttactgacaaggacttgtgaggtggccctgaccacgtggtgacatctcagtgactgtgggtgtgactggattcaacagttggaagataccaggatttggctgggagcagtagctcatgccttatttgtaatcccagcagtttgggaggttgaagtgggagaattgcttgagcccagaagtgccagcccagcctgggcaacataatgagaccccgtctctattttaaaataataataatattttttaaaaaagaaaatgctaggatttaaccctgatcatatggatttaacctgtagtaatagtgaagtcaaaactctgggtttctatcagattgcccaagaaacagttaaccgttataattttttttttaaattttactaatatagaaaaatatctgtttcagtttcataaattttgttaaaggctaaaccgagtttcagtccattctcttccaaagtgaatattttggatacagccatttagaaaggaactatgtattattgataaagtgtttacttctttggcatttaaaaataatttttaggagtttgaaaatgttccctatgttcctgaaaagtctgtgaggtttttcactttacatttgtctcagaatcattggtgcttagtaaatgttcactgaacaaacatgtagaagagattaggtaccactctaacactataaagagaattctgagtcccgactttttattttaaaaataaattaatgtgtcaccttcacaggaagaaatacaaataaaagctgggcgcaggggctcacgcctgtaatgccagcactttgcgggaggccgaggtgagtggattacttgaggtcaggagttctaggccagcctggccaacacggcgaaaccccatctctactaaaatacaaaaatgagctaggcatggtggcatacgcctgtagtcccagctacttgggaggctgaggcaggagaatcacttgaacctgggaggtggtggttgcagtgagccaagatcacaccactgcactccagcctgggcgacagagtgggattccatctaaaaaataaataaatacataaataaaaaagaaataaaaataaaagttttagcactgtcaaatgagaagagtgagattttccgaatcctgatgaccccaagcatgtgaatttctgcttaagcacatgtagacttgctgttgtagagttagtgggagcggggcactttgtgagtggcggtgtggttgtgagcagtcacctcctttttgtctgtccattcagatgttccctgtgcagcgtgtttctctgtacttgtttttactgcagggagtattgctggccatcacatcatgtgaagactggtctctgtctctttgcaaatgtgtgtctggtaatatgatagagccaaatataaatattgtttggattagttatttatataatcagttggcccataaatgtgtttttatctctttccactattaacatagataattgaaaattagtgtgtcttatatggattaacagcaggtcaacagtcatcgttcatttcttgtccatcctgtttgggttctctctacaggtcagggaagtcaaagatgcatccctgagttcttcctagcaggcaagcagccgtgcaccaatgacatggccaaaagcaattctgttggccaggacagctgtcaggactctgagggtgacatgatctttcctgcagagagcagctgtgcactgcctcaggaaggcagtgcagggccgggctcaccagggtctgccccgccctccaggaag

SEQ ID NO: 4539 - DNA, 2300 bp, Homo sapien
agttctgtctacagctcatctgctgtgccctgaccacagactgcacattccttcccctccctgggttgctctcatcctcccaccttccccacctggagggttcctcatatctcccttgacttctttttttttttttttgagacagagtttcccactgttgcccaggctggagtgcagtggcacgatcctgactcactgcaacctctgcctcccaggttcaagtgattctcctgcctcagcctccccagtagctgggattacaggcgtgcgccaccacacccggctaatttttgtattttcagtagacatggggttttaccatgttggccaggatggtctctgaaactcctaacttcaagtgatctgcctgccatcagcctcccaagtgctggggttacaggcgtgagccaccatgtctggcccattttttgtttgtttgtttgtttgagtgtaagcatttatagcaataaacccctctcttaaaacagcccaacagcattcattgcatttcataagttttggtatgttatgttttcattttcatttgtctcaagatattttctacttttctttgtgatttcttctttgacccattggttgttttaagaatgtgttttttgttgttgttggtttttttttttttttttttgagacagagtcttgctctgtcacccaggctggagtgcagtggctcgactttggctcactgcaacctccacctcccaagttcaagtgattcttgtgccttagcctcccaagtagctgggattacagacatgtgccaccatgcctggctaatttttgtatttttaggagagatagggtttcaccatgtaatccaggatggtctcaaagtcctggccttaagtgatccgcctgtctcagctgcccaaagtgcagggattacaggcataaaccactgtgcctgggcaagggtatgttgtttaatatccatatatttgtggatttttcagttttccttctgctattgatttctggttacattccattgtgatttaaaaagatacttcatataataacttaagtggtttttaagtttgttgaaacttgttttgtggcctaacaggtgatctatcctggagaatgtttcatgtgcccttgagaggaatgtatattttgctgttgttgggtggagtattctgtatatgttcgttcagcccgcttagtccatagtgttgttcagatcctctgttttccttatttatcttctgtctggttgttccatccatcattgaaatagcagtgttgaaatctccttctattattgtgttgctgttggtttctaccttcagttctgtcaggggttgtttcctatatttaggagctctaatgtgtggtgcatatatatttatagttattatatcttcttggtgaattgacccttttatcattatgtccttcgtctcttataacagtatttaacagacagaattgacttaaagtctgttttgtctgatattagtatagccacagctctcatattattttgttcccattgaaaccctgagttacgtgtactaatgtttcagacagggaaactgaagctatagtttttcccagattctttaactataacaagttagtgttagaaccaagaccaagacccagttctcctagtttccaacaaaaatttgtgtaacatttctgcctgattttcctggcttttgaattgtgagctgtgattgcttttcactggtaaaaggttatctatgtgtttgtggcttaatctgctttttttctttctttttttttttttgagatggagtctcactctgtcacccaggctagcgtgcactgcagtggcttgatctcggctcactgcaacctccgcctcccaggttcaagtgattctcctgcctcagcttcctgagtagctgggactacaggcatgtgccatcatgcctggctaatttttgtattttttttcagtagagacggggcttcaccatgttggccatgctagtctcaaactcctgacctcaggcgatctgcccgcctcattaatctgctttctaatggccctttgcctcatgttattttgtttgttttttaactgcatagttcattccttggaagaagctgtaccatcgatacctgatgaatgaagagcaagctgtcagcaaagtggacggcatcctgtctaactgtggcatagaaaaggagtcagacctgtgtgtgctgaacctcatacggtgagctttgcctgtgctgtaaagaaggcgtctttgaagtcttccttgtacatcagtgcttatggtcaccctactcatggcctctcc

SEQ ID NO: 4540 - DNA, 2300 bp, Homo sapien
tttctgccttttctccctacatccccttcccgctacctgccagggcatctttgctctgatctgtcatccaactaataattcaataacagatcaaataatcaatctcaaaagcaattggccaaggaatacttacttccccggaccactccatgaacatccacagaattcctgttgagacaggtagttcacagcagttagttggtcgggcagatgcccccgggattgagcccagcattgtgatgtttgctcaggcactgattgcttctggagagggagggcatgttaatccccagcccagggtttcaggagctccccagttttatagggtgatgtctagagggcctgccttagattggcttttaacttacattcataaatatattatctacaagtgtcctgcctcagtcagccacgccgatccactcacagcctcctgaagtacttggttactctttcatcacagcctttgctcgtgctatttgctattttttttctgcctgtaatcccttcctgctccttttgtggctaaataccctgctaacaacaacaacaacattttgaatgcctgcagtgtgcttggcattgtgctgatcctgatagcattccgtaaggttgcttagttattcttgttttatagaggaagaaactgaagcacagagagccttgcccggggttgaataagtggataggtggtggaggtggaattcaaagctggacctgtctctctccagagacatgccttccccctccctaaccctaccctcctatcctgaggggtcctttttgccctcgggaaccctacctctaatggatacccacttatttctgagaagcaaactgaagctcatgaggtcaaggggtccacctgtcctttgcccctcggctggagcctgccccagctgagatcccagcccaccttcacctggctttgaatctgctgctcttttggtggcactacttttaccagcactgaaaaacttgttactgtcctgctctcaagacagaggtgtgataagcctggacaaggcctgattggggatccctgggcatgtcttgtctggtcagagggtcacctcctttcctcctggcttccccaggcactgggaagacctcaacgctggtcaagtatgcagagaagtggtctcagagcaggtttctgtatgtgacattcaacaagagcatcgcaaagcaggccgaacgcgtcttccccagcaacgtcatctgcaaaaccttccactccatggcctacgggcacatagggcggaagtgagtactgctgtcactagtggcactgttgctgctggcacggtcgcgtcttactgttttcccgtgacgatcacatgtgagcttacaccacagtgaccccgaggagtgtagtgctgttatctccacttacaggcaggaaacaaatacataggtttagccatttgtacttttatcctgtagcaacatattgtttacatataatgccgtcttgccaagaggggtgttctcatggaagtgaggcacagaaagtcaaaatgacttgcttaaagttcagagtctcacaaatcctgatcagttgtaggcttttcttggaagggagtgaggaagactcagccgaggcacacttgacccaggtctcctggatgtagaggcatcagggaactccaagggtccctccggggaccttctggagcccagcttcatggtggaatagcagtgtctgccgaaagctggttcctattctgggttggtacatgtgagtcctgaaagccatttccagtcagacatggaccatgcagaactttttcgctttaaaacattaacactcgcctgtgtgtggcacttgaagctacctcctggtgacattagagagaatggaggggacgttcaatagcaccaagccaggagagccacgtgctgttcatttgggatgggtattgcaggtaccagtcaaagaagaagttgaatctcttcaagttaacacccttcatggtcaactccgtccttgctgaagggaagggtggattcataagagccaagcttgtgtgtaagactctagaaaacttctttgcctcggctgacgaagagctgaccattgatcacgtgcctatttggtgtaagaacagccaaggacagagagtcatggttgagcagagtgaaaaactggtgagtgtctaagtgtctgaagtgttagggatctgaggatgggggaacaggggaagtgttagggatctgaggatggggaaacaggggaagtgttaggggtctgaggatggggaaacaggggaagtgttaggggtctgaggatggggaaa

SEQ ID NO: 4541 - DNA, 2300 bp, Homo sapien
tgttctttatgtcatcatataagaggcttttggctgggcatggtggctcatgcctgtaatcccagcattttgggaggccaagaaggacagatcacttgaggtcaggagttcaagaccagcctggccaacatggtaaaaccctgtctctattaaaaatacaaaaattagccaggtgtggtggctcccgcctgtagtgtcagctactcaggaggctgaggcaggagaatcacttgaacccaggaggcagaggttgcagtgagccgaggtcgcaccattgtactccagcctgggtgacagaatgagactctgtcttaaaaaaaaatagtttttaatagttatttttaaatgaattaaaatttataatatggtaaatatagatagatagagctcatgtaaataaaagctctttggaggctttttaagtgtgatttttaagtgtgaagcatcctgagaccagcagttcgagaaccactgcttttaagaaacttatttctgattagaagagatgtctcacttggatgaaagtatcaactgtgctgtgttttgtgatgttattgaaagttccgtagacgcctctgtgactcttcccttgagctcctactgctgtggtgatttagggtagcgtcactgcagaggtgatttgttcttttaatagatggtatttttttagaacagtttcagatttacagaaaaatcgagaggagagttcccatatatcctgtactcagtttcccattactaacatcttatcgtcttatattaatgtggaacacttgtcacgataatgaaccaacattgatacattattatggactgaagtccatggttcatttgcatttccttagttttgaaataatgtcttttgtgacttcaggagcccatccaggatcccacattacatgtaaccatgtgtcatgaggctcttcttggctgtgacagttgctcagactttccctatttctgatgtgaccttcacattttccagaagttccagtcaggcatttgtaggctgcccctgtgctgggatttgtctaatgtcttttctcatggttaggctagagtcctgggttctgggaggaagaccacagaggtgaagcgccattttcatcacatggtgttgaggtgcatactgtcaccatggctcatgacttgatgttgaccttgaccacctggctgatgtagtgtttgtcaggtttcttcactgtagagttccactttttttcatcctttccttactggatgctttggaaggaagtccctatatgcagtccacactcaaggagtaagtgttggagaatcttcccaaattatttggaattcttctgtaaaggagatttgttttttctctcccatctatttaaatattcaatcatttatctatcttaatatgaactcatggatatttatgttataatttcggttatggttcactcagagtagttttatagcaacaaagtagtgtttgtttaaagtctagttttcgtttgactgttactgctattcaccaaagcacatgaagttgtgtgtgcatggaaaaaggctgtacacaccccgagtgtagggaagaatgatatcttgccagctggaggggcgaaggaagcagggtcttgggctgagttttgaaggttaggaagtgactttggtggatgaaagtcagacagaaaaccgcgtgggctgaggcagggcagcacggacaatgtgcaggtgctagtgcttctgccatggctggttggtgcagggcagtagttttaaaggtagtgtggagagggatctcaaaggcaaggggagaagccctccttacccgatcttcatcttttgtatgatttagacttcactagatttgatttggagaaaagggtagatttgcttaaaagaaaaatttactattggtgttgagaataatggaaaataaagactgctgagttgtgaaggaccttgaaagtgagcctgtgaagttcgctttccatgcggggggtcaggaacaacttgtagggtctggcccggccaggctgtggcagcagtgatggaaatgcacggacacaccacagggcgggctgctgactccctctgtcttgttgttttcagagttttcggtttggtgtggaaatagcttatgtgggagctactatcttggatgtttgcaagagagtcaggaaaaagactttggttggaggaaaccatcagagtaaggcttttagttactcttctcttttgtgttacaaaagttttcctctttatttcaatttgccatagagtttgtgctctctccctaaaggtggcattagaggtgacgcaaaggg

SEQ ID NO: 4542 - DNA, 2300 bp, Homo sapien
ctgtgaaaaaagccaaacaagaaagagttcctaccgtgtaattctatttataaaaaattttagaaagtgcatcaaattgcctgggagatgggcgaggtgggagatgaggactgtgcagggcatgaggaagtctttgggagtgatagttgtgttcactcttggtggtggcagtggtttcatgagtatgtatgcatttacctccaaacttatcaaagtgtgcaacttcaatatatgcagtttattgtcggtcaattatacctcaataaggctgttaaagggaaaaaaaacaacggctgggcaagctggctcacgcctgtaatcccagcactttggaaggccgaggcgggcagatcacaaggtcaggagtgatcaccatgttggatcagcctgaccaacatgatgaaaccccgtctctattaaaaacacaaaagttactgggcgtggtggcgatcgcctgtaatcccagctactcaggaggctgaggcagcagaatcgcttgaacccaggaggcggaggttgcagtgagctgagatcgcgctactgcaccccagccggggtgacagagtgagactccgtctcaaaaaagaaaacaagaaagaaagaaaaagaaaaagaaaaaacattgagagctttgggaagggaaggtagcaacatctttctaaggtcaaagggcaaggctgtgcagctgatgagatcagagatctcacagtggtgctcccctatccactcagtcttcaaggaagacacctcctctctgctgggctttgactaaggctgcatttcactttcatattgtgtaatccagctgccccagttgccagctatggggtcctgtgacactgctagccaactgggaggaaccaaccggtcaccaactaactctgcttctcagatgtggggggaaatccaagcatcagagtctcatgaaaacgaaacttcaagaagcctcgcagagctggggtgggggtggcagagggtgggggggcgttcaggccacaccaggcagcagcaactgtgcgtggaatggctttggccagggcctgggcagactggcccgactggatgtaaattattcagggtctcgcttaaaaacacacacagatcatggcgttactaattcctatagagagtccatggatggccttcagtggggctttgaccccaaaatcatatgcacattttgtaactatgttcattcatgcatttttctgggggccgggggttcatagctttcatcagaccctccaagagctccctgactataaaaagataaagaagcgctgacaaggatagagctagaccctgctactgttttcctccttcctctggctgccgggacaaaacccctaggaatcgctcattccgtcctccctgccgagatcagagctccgcgacccgctttcttctcgaatacaccaagcgatcacagatctcttccccctttttctgcgagtgtagactccaggctggcccccactccccacccccatccggtcccgaccgcctctgctggtttcctgatcgcttaagaattggaagttgtttccaggtccccaggtgtgcaacttgcccgacgcgtttccccctgggacacagctcctccccaccctcccagctcccactgacataatttacttttgcctgggagtcgggaggagtagtttctcccggacccctccgaggaccgcgtgctatgcaacacccgccctgcagtccaggcgcctgggagaagcgcactcgcccgtgtctccaaactgctggacgccgccggctccgcgctcccgtggccaaaacgggcttctcagaactgctcctgacctcggcctcggagaccccagccaggccgcccgctcccttacgtgggtgacccgggcgcagcggcggcgctctccctgcgaccccggctcccggcacgtgtccctcctgcccggcgccgcgtcccctccccggcctgggcctgcgcgcaccgcgctcccgagggcaccgacgcccccgcacggcccggggagatggggcgcccggttccctccagctccacgtcccggcccccttccaagtcccgcccgggcgcccctgctcccagctccctaccccgcgtcgccggcggccggagcagcagcagcagtagcagcgccgggagaccgagggtccggcagccgcgcgcccgccgcggggccatggcggcagctccacaggacaccgctggactccccgggcgagcgctgcccaggccggggggaggtggcgagcgctgctctgggacctgccgccccgccagtcgcattcgctttcgcttttgc

SEQ ID NO: 4543 - DNA, 2300 bp, Homo sapien
caggatgaggcagtaggctcatggatatccactatatttattgattgctatagttcgaagtatatttgaaatttacattatttaacaacgtatatatatgtaatgaaatagagttctttaagcataccaaatttacaattttattttcaaattttaaaatttacttttggtcagaatgcagtaaaatgggtactttaacacaatcaatgctagttagaaggtatattgatacaagacttttggaaagcaagatagaaatatttgtttaaaagagaaaaagcctttaaaaatattccctaccagttgactcaatagttccactgtaggaaatctattctaagcgatcttaaattcacaagattttgtagaaagacatttatgacaatgttatctttaatattaaaataatagaggggatgttaaactatgataatttgcagccattaaaaacttttacaaagagtctgtaataatggagaaatctctacttcataaatgtccatagaataaaaaatgctctattgtatacatgctatgcttagcctgcattcaataaaccctcaatatatttgagaatattaaggaatattgttaatttttaaatttgatcttatcatcttgagatttattattaagtattgagagaaattgaataatgtgggatttccccagttggagtaagggtggctattcctgcttagaaaaaaagaatggaccttgtgtggtcactgccggatggtaggttcattattctttctactttttttttttaaatttaagagacaggaactggctgtgttgcccaggctggagtgcagtggtgcgatctcagctcactgcaacctcagcctcctgggttcaagtgattctcctgcctcagcctcctgaatagctgggattacaggcgcccgccaccatgcccagctaattttggtatttttagtagagatggggtttcaccatgttggccaggctagtctcgaattcctgacttcaggcgatccacctgccttggcctccgaaagtgcttggatttcaggagtggccaccgcgctcggccctaaattcttttatttaacttttaagttcagggttataagtgcaggtttgttataaaggtaaacctgtgtcttgggggattattgtacagattatttcgttttcaaagagaatttgcaagtatgtcacaaaagcctcataaacacgttgtgagattttaagaggcaatgaccgaggcttggagatgtctcgtcctgtccaatgtcaccgctagacctgagaatctgcacttgggagcttacagacccggttctcaggcttcacttgagaccccaagaaagaaaaaaacccaccagccaaagaggaggatggcagcctggaagaacctaaggaagcgaggctcagaggtgaagcactgtggctcctctcccccttctcccccctccgccccctctccttctaagatgaggcattttctaggggagcaaagctgcagcaggaattcggcgaagtggcggagctggggccccagcgggcgccgggggccgcgggagccagcaggtggcgggggctgcgctccgcccgggccagagcgcaccaggcaggtgcccgcgcctccgcaccgcggcgacacctccgcgggcactcacccaggccggccgctcacaaccgagcgcagggccgcggagggagaccaggaaagccgaaggcggagcagctggaggcgaccagcgccgggcgaggtcaagtggatccgagccgcagagagggctggagagagtctgctctccgatgactttgcccactctcttcgcagtggggacaccggaccgagtgcacactggaggtcccagagcacgacgagcgcggaggaccgggaggctcccgggcttgcgtgggtaaggtcctgggtccccaccgggcacggcccatgcgtcccggggacaggggtggctgtgcggtgccgcggcggccggcggggctccttccccagcaggggtggggacgctgagtcacggatctgtcaccgctttgcacctctccgagccctcgggggccaaagcaaaagcgaaagcgaatgcgactggcggggcggcaggtcccagagcagcgctcgccacctccccccggcctgggcagcgctcgcccggggagtccagcggtgtcctgtggagctgccgccatggccccgcggcgggcgcgcggctgccggaccctcggtctcccggcgctgctactgctgctgctgctccggccgccggcgacgcggggtagggagctgggagcaggggcgcccgggc

SEQ ID NO: 4544 - DNA, 2300 bp, Homo sapien
tttggatttgggatttggagatcaggggtgctcaatctgtatggtactgttcatatgaattttttttttttttttttgagaccgagtctctttctgtcgcccaggctagagtgcagtggtgtgatctcagctcactgcatcctccacctcccaggttcaagcgattctcatgcctcagcctcccaagtagatgagattacaggtgcgtgccaccacaccctgctaatttttgtatttttagtagagatggggtttcaccatgtaggccaggctggtctcgaactcctgacctcaagtgatctgcccacctcagcctcccaaagtgctgggattacagtcatgagccaccacacccagccttaatcacatgaatttttaaaaatgtaagccatcctgtccgttgcacatggacatacacatggaaaaggggcctaagaatgcctgggaatgatgagtaccagtttcaagaaacatttacctgcgagaaagtggaagacggaggaagagaaagatgcaagaatacaaaggggcttcaactttatctgtaatttttttattccaaaaaatatctgaagcaaacattgagcagacatattaagttttgacaggatgaggcagtaggctcatggatatccactatatttattgattgctatagttcgaagtatatttgaaatttacattatttaacaacgtatatatatgtaatgaaatagagttctttaagcataccaaatttacaattttattttcaaattttaaaatttacttttggtcagaatgcagtaaaatgggtactttaacacaatcaatgctagttagaaggtatattgatacaagacttttggaaagcaagatagaaatatttgtttaaaagagaaaaagcctttaaaaatattccctaccagttgactcaatagttccactgtaggaaatctattctaagcgatcttaaattcacaagattttgtagaaagacatttatgacaatgttatctttaatattaaaataatagaggggatgttaaactatgataatttgcagccattaaaaacttttacaaagagtctgtaataatggagaaatctctacttcataaatgtccatagaataaaaaatgctctattgtatacatgctatgcttagcctgcattcaataaaccctcaatatatttgagaatattaaggaatattgttaatttttaaatttgatcttatcatcttgagatttattattaagtattgagagaaattgaataatgtgggatttccccagttggagtaagggtggctattcctgcttagaaaaaaagaatggaccttgtgtggtcactgccggatggtaggttcattattctttctactttttttttttaaatttaagagacaggaactggctgtgttgcccaggctggagtgcagtggtgcgatctcagctcactgcaacctcagcctcctgggttcaagtgattctcctgcctcagcctcctgaatagctgggattacaggcgcccgccaccatgcccagctaattttggtatttttagtagagatggggtttcaccatgttggccaggctagtctcgaattcctgacttcaggcgatccacctgccttggcctccgaaagtgcttggatttcaggagtggccaccgcgctcggccctaaattcttttatttaacttttaagttcagggttataagtgcaggtttgttataaaggtaaacctgtgtcttgggggattattgtacagattatttcgttttcaaagagaatttgcaagtatgtcacaaaagcctcataaacacgttgtgagattttaagaggcaatgaccgaggcttggagatgtctcgtcctgtccaatgtcaccgctagacctgagaatctgcacttgggagcttacagacccggttctcaggcttcacttgagaccccaagaaagaaaaaaacccaccagccaaagaggaggatggcagcctggaagaacctaaggaagcgaggctcagaggtgaagcactgtggctcctctcccccttctcccccctccgccccctctccttctaagatgaggcattttctaggggagcaaagctgcagcaggaattcggcgaagtggcggagctggggccccagcgggcgccgggggccgcgggagccagcaggtggcgggggctgcgctccgcccgggccagagcgcaccaggcaggtgcccgcgcctccgcaccgcggcgacacctccgcgggcactcacccaggccggccgctcacaaccgagcgcagggccgcggagggagacc

SEQ ID NO: 4545 - DNA, 2300 bp, Homo sapien
gtatgagatcctgggcaatccgtgacaaaatgggtctgcttttgcacccccaacttcttctcacatccctgcatcgtgccatgcagcatcaactggaaacctcagcatcagcaaacgacgacagagcgttcatccgtaaggtgaaccagaaaagccagttcaatgacttgtttaaccatggtccatctcagaaccaagagttgggcctcttatttaccagaaaaattgtgggggctttgtgatatggctttaaaaaaatcttgtaattgccaggcgtggtggctcacacctgtaatcccagcactttgggaggccgaggtgggtgaatcgcctaaggtcaggagttcgagaccagcctgaccaacatggtgaaactccgtctctactaaaaatacaaaaactagctggatgtggtgacgcgtgcctgtaatcctagctactcaggaggctgacgcaggagaatcacttgaacctgggaggcagaggttgcagtgagccaagattgtgccattgcgctccaaaaaaaaaaaaaaaaagacattaacataaatttaaatattttataatgacaatccacattaactacttaaagcataagctattttccaggagaggcagcaagtgcattctactcccatgcccaagaagaaaggagcgtgactttggtgggagtactaggagtttctactggagcacttgcccgcagagtgagaaacgttcctagagaggaagttatacctgctgtggaatttaagagaatcttgtcatattttgacaagttttttgagatggaagtctcactctgtcgcccaggctggagtgcagtggcgcaatctcagctcactgcagcctgcacctcctcggttccagctattctcttgtctcagcctcctgagtaactgggattacaggcgcccgccactacgcctggctaatttttgtatttttagtagaaatggggttttaccatgttggccagactggtctcaaactcccgacctcaggtgatctgcctgcctcagcctcccaaagtgctggaattacaggcgtgtgccactgcgcctggctaatttttttttttttttttttttttttttttttttagtagagacggtggtttcaccatgtcatccaggctggtctcaaactcctgacctcaggtgatccacccaccttggtctaccaaagtgctcggattacaggcatgagccaccaggcccagtcaacgtgatgtgttttggaaccctgaattccttggcttgcccggagggttttctttttgttaatatctttgcttgctttctagtatttaaaaaattgtgttttgctctaactatgcaatggctttaagtcttagacaaatttccagggagcaaaacacactcaaccatttcataataatcagaagagagctctgatcaataaataagcaagactgaattttacaaaataatccaaagtttaaaaccaaagcccactttttgcatgatcctttaagagaaagaaatctggaagcaaaacaccttataaaatgacaatgcactttcaggagcccagggcactgtggtgaaatgatgatggctagtacaggttataagccttggggaattatttatgaattctcaggatccttcagttcgccgcatccttctccattatttgaatattggaggctgcctgaccagaatcttgtcaggactttgctccttcatcccaggtggtcccggctgactcctgaggacgttacagccctgaggggaggactcagcttatgaagtgctgggtgagaccactgccaagaagtgcttgctcaccctaccttcaacggcaggggaatctccctctccttttatgggcgtagctgaagaaaggattcataaatgaagttcaatccttctcatcaaccccagcccacacctccagcaattgaacttgaaaaaaaaaacctggtttgaaaaattaccgcaaactatattgtcatcaaaaaaaaaaaaaaaaaaaaacacttcctatatttgagatgagagaagagagtgctaggcagtttcctggctgaacacgccagcccaatacttaaagagagcaactcctgactccgatagagactggatggacccacaagggtgacagcccaggcggaccgatcttcccatcccacatcctccggcgcgatgccaaaaagaggctgacggcaactgggccttctgcagagaaagacctccgcttcactgccccggctggtcccaagggtcaggaagatggattcatacctgctgatgtggggactgctcacgttcatc

SEQ ID NO: 4546 - DNA, 2300 bp, Homo sapien
aagggaggaaggagtggtctcagactgcagagtggagacgccaagcagattagggagtacaggtagacagcaggttcaacctggaggaagtcctgcagctctggacctcctaatcagggcttttgcacccccaccggtgctttgatcacggggtggggagagacccagtctagacaccttctatctttgcccttcttcctttttctgtttacacgctattactttctgcttcttttattgaccaagtacgtccttctgcttctcacatttttattttatttccagtttcttgcacaagtgcttaattcatttagctttttccaagtttttaattgatacaaaaacttaaaaccatgaattttcctcttagtactctctgagctaaatcccatgagtatgtcattttcatacttttctagatattatgttattttgattttgttttcctttttagtccaagtgttatttaagcatttaaaaattttcaaggggtaggcatgttttattttctgttttttcattaatttctacttttattgaattgctgcagataatattaccgatatgattctacttattggactatgttaagatttttctctgtggtttaaaatatgactaattgttgtgaatattccttagacactggaaaagatgtaatgtctatttaggggacagtgtttgatatattagatctatcataggaattgtatttttaggtcttctcaatccccatttactttttgtactcttcgtctggcaaggagtgtgccaattatttctgtctattcactcactcctacagtgtttgctatgaataatgagattatgtgatttggtgcaaagattttcctatttttcctatttttttcttgattgtgaattgtgctcctcaagattataaaatgtccttcttaatcttacttaatgctttttgccctgaaatcaactttgtagtaagcggtttgtgattcctgatttttttaatttttttgcatattcctggtatatcttttccaatcttgtattttcaaactcagaataacgttagcactttcttgtatacaacactgagttgcatgatggtttgtgctcctatctgagattgtagttttttagtaggtaagcttaggtctatatttcttcttgtgagacatttggtcttgttctgtcatatagtttggttacgctttctgttttgtaactttttaaaatatttccctatatatatattttttttgctgtggttttgtgtgtgtgtgtgtgtgtgtgcatgcatgtatgtgtgggtgcatgtatgtgtggattatttgaaagctttgtagttttgttctgggttaccctcagaatcataccatcccatgacgtccttaatcctctatttctttagattgtcttttgtctctccactgtatttcttttttcccccttttcccgttttcttaatgactggattttaatggattatagtaactttcttggtatactccttcggactaagacgtctgcttaaatctctactatttgatttatcggcttgaactctatttgacacccaattaattacagatgtaaaaatcatatttacccgaagtcccactttccctttccctccctgcttctgtcagcgacgtcgtttttaaagaccgaggctttatagcattgacattcttttctgtacccctaatcgcggcatctgtttccataatcttacgcttaacctcgtgctccttgccatccttttgcagcatctggcctatgcagacttattttcaactttttgcttatataggagtggctttgaatgaatgagatcgaggggcctggagggacttcccccacctcccctatcagaaagcccggcctcggaccacttctcctcctcaccatctgggggcgctgccgcgctccccaagccttgtggaatttcgaaaatgtgcgccagggcgacacctcttgatggtaagaagacgccggcggaggggagcgtgcagtgcggtcctcccgcgggcagggggcagtgcggcaaggcgccctcggcgcaggcgcagaggccgaagcaggcgcaggcgcaggcggggcgcaggcgcgggcgcgctctcccggcagcccgcgctccctgaccccgcgccgccgagcgccctgaggactcagcgaagggtgggcgccgccgaggcctcctgccgctggcgggtttccgcggagtgccgcccggctccgctctgccgccggcgcggctcatgggcagagtcggccgggcgggccgggtaagtggcgccccggcggccccgggtgggtgg

SEQ ID NO: 4547 - DNA, 2300 bp, Homo sapien
tccaagtttttaattgatacaaaaacttaaaaccatgaattttcctcttagtactctctgagctaaatcccatgagtatgtcattttcatacttttctagatattatgttattttgattttgttttcctttttagtccaagtgttatttaagcatttaaaaattttcaaggggtaggcatgttttattttctgttttttcattaatttctacttttattgaattgctgcagataatattaccgatatgattctacttattggactatgttaagatttttctctgtggtttaaaatatgactaattgttgtgaatattccttagacactggaaaagatgtaatgtctatttaggggacagtgtttgatatattagatctatcataggaattgtatttttaggtcttctcaatccccatttactttttgtactcttcgtctggcaaggagtgtgccaattatttctgtctattcactcactcctacagtgtttgctatgaataatgagattatgtgatttggtgcaaagattttcctatttttcctatttttttcttgattgtgaattgtgctcctcaagattataaaatgtccttcttaatcttacttaatgctttttgccctgaaatcaactttgtagtaagcggtttgtgattcctgatttttttaatttttttgcatattcctggtatatcttttccaatcttgtattttcaaactcagaataacgttagcactttcttgtatacaacactgagttgcatgatggtttgtgctcctatctgagattgtagttttttagtaggtaagcttaggtctatatttcttcttgtgagacatttggtcttgttctgtcatatagtttggttacgctttctgttttgtaactttttaaaatatttccctatatatatattttttttgctgtggttttgtgtgtgtgtgtgtgtgtgtgcatgcatgtatgtgtgggtgcatgtatgtgtggattatttgaaagctttgtagttttgttctgggttaccctcagaatcataccatcccatgacgtccttaatcctctatttctttagattgtcttttgtctctccactgtatttcttttttcccccttttcccgttttcttaatgactggattttaatggattatagtaactttcttggtatactccttcggactaagacgtctgcttaaatctctactatttgatttatcggcttgaactctatttgacacccaattaattacagatgtaaaaatcatatttacccgaagtcccactttccctttccctccctgcttctgtcagcgacgtcgtttttaaagaccgaggctttatagcattgacattcttttctgtacccctaatcgcggcatctgtttccataatcttacgcttaacctcgtgctccttgccatccttttgcagcatctggcctatgcagacttattttcaactttttgcttatataggagtggctttgaatgaatgagatcgaggggcctggagggacttcccccacctcccctatcagaaagcccggcctcggaccacttctcctcctcaccatctgggggcgctgccgcgctccccaagccttgtggaatttcgaaaatgtgcgccagggcgacacctcttgatggtaagaagacgccggcggaggggagcgtgcagtgcggtcctcccgcgggcagggggcagtgcggcaaggcgccctcggcgcaggcgcagaggccgaagcaggcgcaggcgcaggcggggcgcaggcgcgggcgcgctctcccggcagcccgcgctccctgaccccgcgccgccgagcgccctgaggactcagcgaagggtgggcgccgccgaggcctcctgccgctggcgggtttccgcggagtgccgcccggctccgctctgccgccggcgcggctcatgggcagagtcggccgggcgggccgggtaagtggcgccccggcggccccgggtgggtggcctggcgggacctgaggcgggcgcgccttcccgggaggcgctagacgcaagcccgcggctttaggcccgtcgcgaggggcggaggccgggccagcgcagccggagcctccgagggtctcagtccccgcggcgggcgctggtctctccacgcggctgcggcccggtaccctccgcccgccgccgcctctggtgaccctggccctgaccttctccctcttcccttcctcctcctcctcctcatgtctgcctcgggctgtttggtgctgaagagcgtttcttctccgtctcgtgcaccgcatcctgacgaaattgtctggtc

SEQ ID NO: 4548 - DNA, 2300 bp, Homo sapien
cttaaggaatggagttcattattttttcttgatttggcctcagtgcttcaggcctgtcacgagacatccccaagttcctgaaaaaggtcagttttgcactgaagacatctatcaggaggagagtctgtctgcatcccggcatcccttcattcttttcttttcttttttttttggcggagtctttatctgtcacccaggctggagtgcagtggtgtgatcttggctcactgcaacatccatctcccgggttcaggcgattatcatgcctcaccctccggagtagctgggattacaggcacccaccaccacgcccagctaatttttgtatttttaatagagacaggttttcaccgtgttggccaggctgatctcttaactcctgacctcaagtgatccgcccacctatgcctcccaaagtgctgggattacaggcgtgagccaccgtgcctgaccatcccttcattcttatgtgattcatttgagcagtcggccatcaatacccctggacagtctgctttccctgcttctctacggccttgcggggacctttcatttaaaaatcaaaatggagaggttttagttaatttgagggttcacgtatgaaggaatggaagaaactaaaaagtggtgacagttttctggggtgctgacttcaggcagggagttactgtacttaagaccagggcagttcttctgagggaacagaagttggtgtgcactccgtcccccactccacacagtgtggtaccaacatcagcgaaggtgttggggcggcagggtcttagaatccctgtaatgggggagctgagaagtaagagtaccttcaagagaaatgcttgccgaatcagacctaaggagggtatgtgttaaatattttcctcctctcctgagccacagaacacaagcaaattaggcttttcaataacacggtttccatgggaaaatgctttatgggccccctgggaactgacagacttatttgtccataaactgggaactactgtgctaagcatttacttgcaatttgtgggtttctgtttaaattaagttctctttctgtctgtgagattgatttcttatttgaagaagtaagctatgttggtgggtttcagaatgttgattttttttttaaaaagtggcagttggggttcactggcgagggctctggagttggcctggctgggttggaaggggcttccgctgtggccttgggcagattgattccctaaaccccagcatccatgtctgtgcagtgctgggctttcatgggacctgctgccgatgctgcattgcatgtcatgctttgcgcctgctgactcggtttttgtttccacgtgttcctctgttctgcacggaagctgtgtgttgctcgttcacatgcagattgttgattgtctctttgtaatcactatcattaaagatgacagatttccacttggtgtgatatgaggaaatcagagtatttaagatgtaaccagtctactccccccttgataattgtaattgacaaaatcacatctaagagatcatttctgtcatttttttccctaggagtacgtttaaattttttctttataaaagggtagctaattgtgctacatcaacctgctaattggtgtttttgtaaagcttctactttttggcactgacataaatagaattttttaaaaattggatatatgtaattaataatgttccaattcttacctcattatgtgccctagcattgaaggatttcactcatggatcacttgactgcatgatcttatagatggaaaaatgaattttagaggcttattttaaaaataatccatggtctagcttcatgtatcaggaatagccctacattaatggtaccaggagcctgggcctctgttgctgaaaggtcctggaccttttacctctaaaatttcatgatacttattttaacatgaaaagcctttattgaattgtgcattctttaatccccaccccttttgcctttcagcattaaactgaagaaaagatgtccctgtacgatgacctaggagtggagaccagtgactcaaaaacagaaggctggtccaaaaacttcaaacttctgcagtctcagcttcaggtgaagaaggcagctctcactcaggcaaaggtaaagacaagcccagagcatgagagcagaggcctccagagtgggttcctcattaggatgacaaggaatttggtttcagcttgctcttctgcctttgtattgggtaaatggtgttaagcatttgtagggggagaggaatgaggagtttaaggccactttgctactcctggct

SEQ ID NO: 4549 - DNA, 2300 bp, Homo sapien
gcccactcctagttaatgagtgactttgttgaagcccctgtggagcatgcactctctccagaaggaggttgttgtgatggaaaaatgcaacctatctccagttgacgatgtcaaggctaagagtcctttcccttcttctcctgccaggggcacggtggcgcacaagatcatgcagaagtacggcttccgggagggccagggtctggggaagcatgagcagggcctgagcactgccttgtcagtggagaagaccagcaagcgtggcggcaagatcatcgtgggcgacgccacagagaaaggtgtgtccccagggaagcgtgtgactagagggaaaggactggccccatccatatcagacatggccagtcttgatcctcatgtgtcagcagggggacaatgaggcgtgtggccagagggagagggctggccctgccatcactagaacacaggccgtcctgttcatatgatgcactgccacttccgttttgtgaaaccaggaatcctgaggctcatctttattttttcagaacagacgtagagagatgaaggcttgtggaggaaaagatggtgagagacttgggcagaaaatgagtagtcctcaggaagaaatcttggttatgtgtttagagcatgaaggacagagccatatagtgtggcagtgaatatacctgctatctccatctcagaggtcgtctctacttttcccttttgccctttcagtatagatgtgatttctgattctcttacagattgtttgctttgcgagatctgatgttatgttgcagtctcttggtaaatgatgcctagttggtgttttattttcatttaatttttacagtctgttctgtgttgagggaattcaggaaagagacaaacatatgttagcattttaatcagggaattaagtttgagtcagcctagctgaacttcctttgctaaagaaagaagaaaacttttctggcagccccgttcatgcacagcttaggatacatcacgagcctgacaggtgagtgccagaaaccaacagttgtcccgacttgtgaggttatctgaagtaaggcagccggtggctggattagtaactgcatattcccctgggcccgtgaccttgaacgtttgctccaagtcaactcacctataggaattatcactcacatgccctgtcagccctttgggaagtgagatgagcaaaaattgcaagtaatggtggaggctcaaaacatccagatgctattgtaaaaacatgccaaagcaaagcagaggcttttattgcagataaggctgtgttttcgctcagagaccaattgtgtagatgcctaggacataaatggtggggatcgctattgaaattaaattaattattgtaagtaggactcagttctgtaacacatctaatgatatgctgctcagttctgtaacacatctaatggtatgttttgatacagatgcatccaagaagtcagattcaaatccgctgactgaaatacttaagtgtcctactaaagtggtcttactaagggtaagaagctgaggaaagcaagctctctgcctgcctagatttgtgtgtgtcaccccagcctaccctgctccccctaaaagttaaaactgaaaatgatacttttgcaaataatactttgggcagatcccacgtaaggctgattttagatttttcactaatgtgtaagtctctttgctaagtacagtgtttaagactgcagtgagtaattaaatatttgaaattgctagagcttcagatagtttatacattttggtgcttgcatagatgcttttgtaactctttacaggcttaatatatgttttagtgttttaagaaatactaacttttgggtactttggggatgaaatttttcattatgtcgtttgggattgagaacatttaccatcactaagtcatatttatatacctctgctaggtgtttgtaagttatacttggtacttgaatttgtttatttttgtgtttaaagaacatggttggtgcgggagaggtggatgaagacttggaagttgaaaccaaggaagaatgtgaaaaatatggcaaagttggaaaatgtgtgatatttgaagtaagagtgttttcttttgatgtttataacacaagttgtaattggcacattacaaaacattttctacaaacaggacagggtatgctataagtaacattcttactgcagaaggtgacaggcgttggttatttgtacttctcttgctcaattattacagttttaaacataaagacaatgatttcaagttttatttgatgaagaaacaggaatgcttc

SEQ ID NO: 4550 - DNA, 2300 bp, Homo sapien
cccagcccccatcctggagctgcccagtcctctcactgacattcaaaaaacactcatccctctggagatcccaagggttttggaagctctggaccagaaaacaggatcaaagaccaaatatgcagccacggccccatccacctctgagggcatgtgctctggccttactatgacggcggcggtggcgagtctgatacaggcgggatgatgcacgctttatctggaacccttggccttggataaaatttgtcttctgtagcagttacgtccatggagctaagtccaggtccacctgccattgcaattatggcagggaaaaggacagagggagctgacgattacacctaactttggatttggggcacccttctgttcccccacttcctgcttcgctgacactcacacccccaaaggcggtggcgcagaagctgaaatcagggctcaggactccatctacagccaggcccacgagcagggtctgttctgaaggctccaccagcagctgtgtcccaagccaactggcaagacaccgtcccacccgacagtggcttcctccccgtggcgtcatctcccttccaaagagggaggaatttggactattacccacgaacgatagcaggctaagaaacaaattatgattacgaaagattaaagaaaaaaaaaaccacccacacctactggctgtacctttcctgcatgatttttgccaccgcatgggaagcgggccaattgctatttgcctgggtgttttaaatatcaggagatcaggagatttgctcctgacataattttttttcgaagtgcaacagaaaatagcacttttcacaacaattaactgttaactggctccaaagaaggtctgcttgttagacattagggaggaatagaaggcatcttctcagatgttggcctttgcggaggcaaggtcagtggtgccgggaggtgactccctgcatttccgtatgtccgtttcttaagtcgcactattacttcccttgagtaagggacgtaatattgagtaatatttattgagctgtgtgtgagagactgtttcaggctccgggaaaacagcgaacaaaataaaaacaaattggctgctttcatagaccccacacactaataagcacatagggagtcggtcaggcggtgacccgtgcggtggagagaaggcagccggcgggacgtggaagggtcgaggttaaaccgaggtagtggggaggcccccagtgaaagacgcgagtttccggggtgctccctctagccagcagttaattgcaattctgccgggcgcggtggctcacgcctgtaatcccagcactttgcgaggccgaggtgggcagatcactttaaaccaggagttcccgaccagcctgggcaacatgacaatacccgtttctacaaaaacatttagaaaaattatctgggcgtggtggcgcacgcctgtaatcccagctacttgggaggctgaagcaggagtatgggttgagcctggggaggtggaggctgcagtgagctatgatcgcaccgctgcactccagcctgggcgacagagtgagatcctgtctcaaaacacacacacacacacacacacaccccccaaaacaacaaacaaaaaaaaaaaagagaaagaaaaaattacacaatttcagtttgttcaatttgagtcagctggtgattcgagcgtgtcccctgtgcccgtaggacataaaagtaaaaataagatggaattccctcaggtctcgtccttcgggaaggatggctcggaacagcccgaaagagaaaagggagttggtttcttcccggaccagttttcccctgtcccgtggagtccacaagacaggcggcagcttcaaggccggcaagttccgcgtctggggggctgcgggccgcccctgcgggaccggggggatctgggcgggacagggcggcccggcccacgccccggcttcccccagcagcccgagggcgcccggagctcacggctggcgccgccccgcgcttcctgcctcgccgcggatcctcctccgcgccgtgacgcgccaggctttgaccaaatatgtccctttcccctccctcgcccgccccgccgcccgcaggcgccccgagtcgcggggctgccgcttggacgtcgtcctgtctgggtgtcgcgggccggccccgcggggagcgcccccggcgcgatgcccttcaggaaaggtaggagtcccggtgacgcggcccacgcccccagcgcgcgcggggacctgagcggccgcctgtgggtacccgagccttgggtcctcgccaggcgcggaagcact

SEQ ID NO: 4551 - DNA, 2300 bp, Homo sapien
tggacctccgggacatcaactccctgtgccctaagagctgaccgctgtcagatgcgttatctaggtcaagagatgaatgatgtgccgctgctggggcagacgccgtctctctgctctccctgtgagctgaaaccagcagtgtttgcaagcttgtagggagtgtggaagaaggccccctggtccgcttgcctcgcctgtacgtgtgcaaaatcggtgggcaagcagcgggcgcgcaggtgcaccgtcattccccaggaaccgcgggcgctctttgcaggggtgcagccgctctccccgcgcgcagcctacagccctccccgacccccgcgaaccccagggcgggaactcgtcccggtggcgcgggcgctcgctgcctgctgtttccctcttcgggtcagcccactcttatttcaggagtggagtgggactctcccctgggcgtttagggtgtcgcctctggcatgtgctcccactgcagaaaacaagtccaaatgcaacgcatcgggtttctgaacagccgccagagcgcggaaaccagaccgtcagcaaagctgtcgcgggaacaggggctctgagagggcggcgcggggggcggggtgccggagtgggggtcgaggcgggagggggagtgggggtcgaggcgtgggggagggtggcggggcacaggccaggtggccgatgttgcgcgttccggggcccctcggcaggcggcgggtcgggaggagtggaggcccgggtggggcgggcgcgcggggcgggagcagccccggtcgccgcctgggcgcgggcgccctccctgtggagcatgcgggacgtgagcgacgtgtggcagcctctgcgcagacttttccgccgcggtgtaggtttcagcgagcgccgccttccctccaatcacagcccagcctcagcgctaagtgtgcacctctctgcaaggcggcgcagcgctcccgtactgaggcttcgtttgcaaaagttacatccgtcccggcgcgggcggcggttccccaccaaaagcaacccagatcttccccgcacgcctctgacctgactgcacgactgtcacaagtcgcgagctggtgcaaactgcgagggccgggaaaggagacggggcacgcatgcaccaaaaagtggggaggcagagctgcagggtgtgcaggataacggagtgaattttaggagtctgcctaataaggggccgcccccaatagttttccctcgacttaggtaatgaattgcagatcgaaatgggtctagttttattcattcttctactcggggcgataaaggtttattgaatggtgtacatggtgagtgtgaaaaccagatgccagctgcccccagccccagtccacttcagtccagctccccggggctttcccgccccctcctcgtacccagcaccgcgggcctctcaaggttcccagtctttgggctaggggaggggagcaaggctcagttcaagtccaggtttctaagggattcagcaaagtggacaaggacgaggtgaggtgggaggatcagggaagcctcctccccgcgggtcgcccgggtcgtggcgggggatgggctcacgggtattatcagggagcagcctggcccatgtccttacctggactgcgcctgccccacagcgcgtgttaggaatgcagagtattggggctccatggccctaaaggagctgcattggtaggatgcactttaagcagcttcccaagggattcggctgcggggtccacggtctacactgggcaggactgcgtctctgctctcctcccggccagcacagttgaggtgaggggccggaattagtcggggaagctgtgccagacgtcccgaggggacaacgggacgaggggataacagcagccaggacccttcagcagggctgggcgcgctccaggcccggggcagggcggcgggagctggtgcaccgccgtcgccggcccgcagggggagctcgcaggctgcttcccggctcgcccaccctcctccccacgtggaagggggctgggacccaaggaatgcggcccgccccgaggctgacgtacgcgtctgcggccagcccggactctttaaaagccggcggtgcgcggggcatcccagccaagccggagaggaggcgagcagcagggcctggtggcgagagcgcggctgtcactgcgcccgagcatcccagagctttccgagcggacgagccggccgtgccgggcatccccagcctcgctaccctcgcagcacacgtcgagccccgcacaggcgagggtccggaacttagcccaaagcacgtttcccctggcagc

SEQ ID NO: 4552 - DNA, 2300 bp, Homo sapien
tattgtgcaaaagggaaaccttggtttggatcttgtgggtttttttctttttttgagatggagtcacgttctgtcacccaggctggagtgtagtggtgcgatcttggctcactgcaacctccgcttcccgggattctcctgcctcagcctcctgagtagctgggattacaggcatgggccaccacgcccggctaatttttgtatttttcatagagaggattacatcatcaagaatgaaacattttttttttaatggcttaaggggtatatggctcttcaaatacacgcaggggttatgctttctccatgtggagggtggtgctccctctgcagcccacccattcggagacaggctttcttcatgctggagtatctcattcctcgaaatatgcttgctatttcatgcttgaaatcaagatgtctcccaattcatggcaccttgtatttgacaaatagactgcgtaaagacagagtctgtctttagggaatgagaggatttttggtaaaaacagaaccaaaacttctactgacccaagagaaggctttgtttgcttggagtggattatcagccaaatgctatctttattttgtgggattttggcctttgaatcaggttcatgggtggcatgctatagaaataggataacaaatgggataattcttcaaacagaaacatggcctagaatgggaggggttgttgtttatttatatgtatgtgtcataaaaatattttagatcataacttagcaaatgtatgaaagtggaaaatgtgtttatggatctatttcataaaagggccatgcttcagaaaaaaaaaaaatcccaagaaacaaaccaaaaaatgccaaaaagagaaatctctgtatgggagactatcatttagctgcagacaggatagttacagattaattgctggccttatctaactactagctacaataactccaatttggggtcggccaagtaccaatgaacttcgctttctctgggcaacagctgagatgttgcagctgcaagtggggttaaatagcctccaataaaggaaaaaacttgaggagtaattcaattaaaaaaaaattgacataattatagattcaaggatgatgcaaacaaaaagtgtgcaggaaggtccttgtccccttccctcagtttctcccaatgtgacatcttacatagctacagtacaatatcacaaccatgatattgagattgggtcacagaacctacctagatttcccattttatatgtatttgtgtgtgtgtgtgtgtgtgtgtgtgtgtagttgtaggcaggtttatcacatgtgtggattcttataaccatcacccaaatcaagatatatcttgattttgctccatcaccaggaggctccctcatgctacccctctagagcctcaagtcaccttccctcctttctcctccccacctgctggcaaccactaacctgttccccattgctgtaattttgtcatttcagaatgttgcataaatggaatcatattgtatgtgatacagtttggatctgtgtccccgcccagatctcatgttgaaatgtaatccccagtgctgcaggtggggcctggtagaaggtgattggatcatggggatggtttctttttctttctttctttcttttttctttttcttttcttttctttttttttgagacagagtatcgctctttcacccaggctggagtgcagtggcgcgatctggactcactgcaacctccgcctcctgggttccagcgattctcctgagtagctgggattacaggtgcacaccaacacgcccagctaatttttgtatttttagtagagacagggtttcaccatgttggccaggctggtcttgaactcctgtcctcaagtgatccacctgccttggcctcccgaagtgctgggattacaggtgtgagccaccacacccggccgtgggggtggtttctaatggtttacatcatttcccttgtgctgtgctcacaacagagttcttgcaagatctgtctgtttaaaagtgtgtggcatatccctgcccccgcacctccctcctgctctggccatgtaagatgtgcctgcttcccctttgccttctgccatgattgtaagtttcctgaggcctccctagaagctgagcagatgccagcaccacgctttctgtacagcctaaggaactatgagccaatgaaacctcttttcttcataaattacccagtctcaggtatttctttatagcagtgtgagaatggactaatacagcatgtaacctgctagtggacttcttcattcagaaggattcc

SEQ ID NO: 4553 - DNA, 2300 bp, Homo sapien
gtcctacatttccatttactcctacagaaggcagcatctttgtgtctagtaagtgattatcctaaccatggttagaaaatgatgccagggaggctgagttcctcccaactttatctgatgaagttagcttctttctagactttgtccatagaaatcctcattgatcccaatcagccacttctaaaggcatgaatggcagaagcttggagggaattgcacaggcttatgacatgctgagaaaattacccagataggcacaggcgccctgacatccagaagagaacttagggtattccgagaaactccatctctgtttatatcacccaattcttcattcttcaaaccacagccatggagtagaaagaaagatcattaagccccaggtacaaggagaaacatcctaatagtgcttaagataattaagcaagttgccaggaaagcctgtccctacagtcataacatgtcctttgcaagtagggacaggtgggagcagacagaaacagtctacagcgaaaactctatgcattcatgtcctccctgacctaaccttcaaagacatttgctaacaagaaataacgtattagtttgggtggagacacttagccaccaaagctgggttcaggtgctgttgcttactcactgtgagtcctttgcacagttttgtgggttgtgggagatccaacacataagccctcttggctatgcttgtgcttagaacaaacggagaggcagatcaggagacagggagatggagaagcatgtccaccagttataacaaaggccagatcgatggagatggctaaaacgttcaggcaaataagttggtcgtctgttcacagcgtcccaggcgatgctggactgtgtcagggaccctctcacccctgccaaccgaggaggatgcgcccccaccccaccccagcctatgacatggccaaggatagtgcagaaatggttctgcagatcagcagatcctgcaacatgagaagaggagggtggagatgggtgggaacggtttattcatgtagaacatgttaaccaaaaaatgagtgactgaggcaagtttctctatcagttgaggtttattgagctaaagtttgaggacacacccgggaaaaacaccagccccagaagcacctgtgacctgtgctttccaaagagggttttaggaactcagtgcttaaggagagggggcaagcaggagggaagagggaggagggaggcagtgaggctctaattagcgcttaccaaatccatgtcttacataagataaggtaaatgtgtgagaacagggagcagaggaacaaatccattatgcacctgcctcagagtcaggagaagagtgactgatctcagctggcccttcttctgtacctgggaagatgagcttgaaatcaacattgtcagttgagttcctaaaacagaactcagttttagaagttaagcttaggttgcagtcctagggttgcaatcggcataggcttgttttgtaggggaatgtggatcctgaaggatttaggggccagaaaggaatttcctcgtaagcagtgtgtgacggtggccatctgggagaagctcggggccttttgtcattgtgggagcctggcttacgtagaatgctgtgacacagggttgtgaagtgaccgctgtctcctggggaaaaagaatggcacggtggcaggacttggcttccaggcttacctctccccttggcataactggtttggggggcctgagattttattttcttttacaaacgtatccatcagatcaatcactcttcttcctggggtacagggatgaggagtgaggataggttagagggatgcaagcctctctgtttgaaaacacagggagggaaaatatgagccttctcataatgaccatgattagcaactgctcggtaagtgatgggtgctgttgtcctcataaccaacatcatcatcattacagtttttatatcttttactgactgctgttttctagatatggaaattatatgacatagacctcaaatatctagtcccatgattcccaataagtacccacttgcccaagaagtttcagtacctggctgctgaaaatacaacttttacatccttagttcatgtgtcttaattcttgattcagaaaagctatcaactgtattctccatatctcaaagttaacgtgtccaaaataaaatgtctcatcttctcatgccatctagttcttcccgcagtgctcccatcttgtgaatggggatggcctcctaccatgggttggggccccaaaccttgaggccgccctgctcctccttttcc

SEQ ID NO: 4554 - DNA, 2300 bp, Homo sapien
tcactgaaacaaaggctgatggtgcccagcaggttactcttgaaatcagaaacagaagttcatgagaggcaagaagacagaaacaacaactgaaaaacttagagtggatcgctaacttgcaggagctgtgcagctttggctttgcaggttttagaagctctccctacgccacgtctttaaatatatgtatgttcaatcagcaggaggaagggactaacaagagccttctgcggtaagcacctgcatcaaacaatggcactgatctcagagggattttaaacagctgtgcataaacttcaaaagtaatttgcaaccatattagtaaatgtcactcttcttcccgctagacacagcacttttaaaagagattaagcatccgcagtaagcctgccattttacaagggttaccaaagataagttagggaaaatatgaagatgatgattcacaaggtcggggtgtggggtggggtgggggacccaggaccttaggaatagggcttgtctatcacacagcctcgggcaagaagggcccagtggggaccatggcttctagggagcaaaccaagggaaaagagcaacggagtggaccctccaggcttcttgcctctctcacggagcctcacgaatcccagtggtttagaattttctttggcaaaagaaaaggtcaaagaggccggagttgacagaaagcatgggcggacttctcagatcttgtaggtggttcttaaaagaattcagcaggcttgaggtgtgctctcaaagggcaactggaacgtcaaggacttggacaccaggcacagatggttcatttcccatggacaggaagagggcacggagtgctccctcttccctccaccttctccagcctagtccccctcagcctgtgccactcctgaatcatcttttatagcaccacgtccagcccgcacaggggcaggacagcccagggaacaaggcagtcctgtggcgctctccttgcagaaatgaccggagtctcccaatccagccagcccgtggacctctcttcatgcccacgggggagtgcacacgcctgtagcattcaacagtcactctcccattgataacggtggctctcgaaaatccaataccacaaagatactttattgcacaaactttgcttggttaacctggccctcaaagctggggaataacctcacttgaggctacaggaatgagcacgcagatttttcttttttttttttttttggtatctttcaaagacctgcctccccctcccccaggcccttgaccagaaacttggcttgtttagaagcctgagcaatggcacccccgtccgtgctccaatacattcccagaaaaggggttatgctcccctgtggacaggataccatctccagaaaacatgtttcctcacgcattttttttttttttttttaccaagaatacaaaaactttccaccttcttccctccccgcaggccccctttcgttcaggtgagaaggaaaagggagaagaaaggaggaagcgcccccaggccggcggcccccacccggctaaggtcgccagcatcccgcatcccgtgcgacctgcgtcccagaaacccagcggggaaattcttcccggtgcgctcttgcgcccgcttggttccatttcctactccgcctgctcacccggcagccctcaccccttcccggaggctctccgaggggcccgggtagcccttctcgccacgggtctcggcccctccagcccgctccctcccggcggcggcgcggggcgcggggccctacctggagcgagcacggcgccgctgctgcccggtggcgctgggactgcgcggggactgcgcggggactgcgcggggactggcggggctggcggggctggcggggctggcggggctggcgggcccggcgcactgcgggtgcgcctagaaggcggtgcccgccagggggcgctcgccagcctccccgccagcccggcctcccgggacccggcacctctagccagggacgcgcgctcggtcccccgccgtgcgcccccggtcccgcgcccaggctcccgcccctggcctccttaccagccacttgtcgcccagctgcgaactggagcgggaggcggcggccggagggcccaggacagccccgggagggcggcgaggcggagcaggagcgccccggctccggccacattctcagagtcaggaaaaggggcgagaggccacatgtctccctctcgcccaactgaaaacgaaacggcgctccagcagattgggtggaaagagctgggtctcttttctctgtttttcacgctagaaa

SEQ ID NO: 4555 - DNA, 2300 bp, Homo sapien
tcacgccgctgcactccatcctgggcaacacagcaagactctgtctcaaaaagaaaaaaaaaagtccttatcatacctggtgtatatatgaaactttttctaaagccactaactactgattaaattaacaggacatatgagcttcctttcagtgcctaattgtcaatgagaaacccagatatggagcgtgaggaatctaccatcttctaggcacagtagctgttatccgtttgccatttcttctttgcactgtaacaggatccgctgaaaaacaattggagaaagagccagatggatggcagtctgaactagggaagcttctgttttgtagtttgcagaaagaatctgcatggggatcactgcttaagctttgcctctttgtttccagacacagacgcactttcctgcctaatttccatagcaaatacccaatgagcgcctactgtatgccaggttctgatgatgtcagagtgagccagcacttccgaggtactggccactctcaaacctcctggctaggatcttccaagagctacagcctctggcctgagggtcagtccaatgctgttagatattgacaaatgcggggctaattttaatggaatatagttttatccttaaaaggtgtgtgtgttttggctttatttgggttcatatagattaggggcatcatcataactcgcttcctagtgcagacctgagtgatttaatcaagtcttgaaacacttcggggcctcagtttttcatctgccttcccaacctctgaggttctttttagttgacatcctacattcccatgatcagaaggctgctaattcaacttttggcttttgttaaaccttttttttttttgaggcagagttttgctgtcacccagactgcagtgcagtggtgagatctcagctcactgcaacctcctcctcccaggttcaaacgattctcctgcctcagccttctgagtagctgggattactggcacgtgccacaacacccagctaatttttgtatttttaggagagacacgattttgccatgttggccaggctggtctcaaactcccagcctcaagcgatccacccgcctcagcctcccaaagtgctggcattacaggcatgagccaccgcacctggcctgttttgttttgttttaatcgtttttaatgtctctctcaaaacaagaaaagaaaaaaggacaaaaaattactattttacttctcagattaatctgatcttagtacactacagcaacaaaagtcttaatcaagtacgttttaattatttggtgtcatcattgcaaggaaaccattcagtaagaatattagtaaccagacatataattttctaacctgaatgagaaattagttacatggagtatagaaaaagaaaccaccccgtttatcctccctgtgaccatcattagtattacccgcaaggcataaaaagtcctaaaatgacacgcacggcggcaacattacctttgcagcttcaagcacagtaaagttgaaagcagtcccaccttggcaattgtgtataaaacgacaatgtgcagatacaggaaaagtcccaggtccgaagccacctaggaacgatgaccccaggacagaagtgtgcccaaacaaatgcctggggtaggtcattttaaaaggaacaatgtttacaagccctttctagcgtgaaaaacagagaaaagagacccagctctttccacccaatctgctggagcgccgtttcgttttcagttgggcgagagggagacatgtggcctctcgccccttttcctgactctgagaatgtggccggagccggggcgctcctgctccgcctcgccgccctcccggggctgtcctgggccctccggccgccgcctcccgctccagttcgcagctgggcgacaagtggctggtaaggaggccaggggcgggagcctgggcgcgggaccgggggcgcacggcgggggaccgagcgcgcgtccctggctagaggtgccgggtcccgggaggccgggctggcggggaggctggcgagcgccccctggcgggcaccgccttctaggcgcacccgcagtgcgccgggcccgccagccccgccagccccgccagccccgccagccccgccagtccccgcgcagtccccgcgcagtccccgcgcagtcccagcgccaccgggcagcagcggcgccgtgctcgctccaggtagggccccgcgccccgcgccgccgccgggagggagcgggctggaggggccgagacccgtggcgagaagggctacccgggcccctcggagagcctccgggaaggggtg

SEQ ID NO: 4556 - DNA, 2300 bp, Homo sapien
ctcatccagggttggcttgataagaggcttcacattttttgtagaataagaaaaaaacctggcattgtcacaacacactgatttgttcatgcagtagtgcttggggtcaaaaactcttggaatgaccaggcagagtggctcacacctgtaatctctgcactttgggaggtcaaggtgggcggatcacttgaggtaaggagttcaagaccagcctggccaatagggtgaaaccccatctctcttttttttttaaattatactttaagttctagggtacatgtgcacaatgtgcaggtttgttacatatgtatacatgtgccatgttggtgtgctgcacccattaactcgtcatttacattagatatatcttctaatgttatcccttccccctccctcacgctgcgacaggccccggtgtgtgatgttccccttcctgtgtccaggtgttctctttgttcaattcccacctatgagtgagaacatgcagtgtttggttttctgtccttgcaatagtttgctcagaattttttaaaccccatctctactaaaaatacaaaaattagacaggtgtggtggcgggcacctatagtcccaggtacttgggaggctgaggcactagaatcacttgaaccaaggaggcggaggttggggtgagttgagatttcgccactgcactccagcctggacaacagagtgagactctgtctcaaaaaaaaaaaataaagaaaagaaagtaacaaaaggtttgaatgctcctgcaaatacagtcaaacagggataagttcaactgagatttttaaaattttgtgaaaagtcagataaagagacatcatcttctcctccaaacagaaatgtcatgactgtgcttgagggatactttcaagatgacacaaaaccaggtttttggagtgctttgaagatggagaatggcttattaacactagtcacattggcagatgtttttcataacatcaaccagttgaataagcctctgcacagccctggagaaaatgttttcaccaaaaatgtcaagagtttttggatttaaaagaaaactaaagttttggaaaaaaccatgaggcaaaagaaatccttgagatgtttccattgttgcttgggcctggggccatcagtaagtctcaattcttattgagcagaacctggcagcactgtagaatgaaactgaaccatacctaccctctctttaaacacaagtgcatgaccaggcgagggagcgtttcgttgaatctttgactcagtctgagaacagagtctggagagaagaggaagaatcctgcaccccatgcaaccccagactctctagatgggactcacatatcactctggaggcgagtcctgggtttctgggtaagagagtgctctgtcagcctcagggaaaccatgaacacttcactgcagttgcaacttcccgcacataggaacaaattttctgttatttaataaacaccaagagcaagggaaaaagttgtagcccttcagttgacaatgacatctgtgtgtacctcaagtttgactcagaattgaatttttaggcagcacatgtgtcacattaaagaaggtcaagttgatcaccaatgaccaatggtttaatcagtcacggcttcgtaaaaactaaaaaggacagaattcagagggcttgcagttagtggaacacgtggagggccctggagggtgtcatgcccaggacatgatagctctgtaccccatcccatgtatctcaccatatgcatctcttcatctgtgtcctttgcaacattctttagaataaaccagtaaatgtgtttccctgagtcctgtgggctgctcttgcaaattaatcaaacccagggagagtcgtggaaaccctgacttgatgccagttggtcagagttcaggaggcttggacttgcaactaggaggaaggagggggttggggactgagcctacaaccaatgggattggtcactatctccaggtagatagagttggaattcagttggaggacacccagctggtgtccactgcttggtggtgagaagaaactcccacacctttggtcacagaagtcttctgtgtttattgttctagtgtgagaacagaggagaagcctggtttgagtgagtttttcctgaagcaaaagggaagagcttaatttcaaaaggtaagttagttatatttttctctaggaaacaattgattgcttaaaaagatatgattaggccgggggcagtggctcatatctgtaatcccagcactttgggaggccaaggcgggcggaacacctcaagtcaggagtttga

SEQ ID NO: 4557 - DNA, 2300 bp, Homo sapien
ggcctacttcgtgccaggtgtggttttaggacctttatactatgattttatttcaacatttttagcatcagcaatctcattctactaggtcatggcaaaactggactaagagctgtggcatttttctctgaatcccatgttcttttcagagggattacattacttctacaaaataacactgtcttagtcaatttagtgttgctataacagagtatctgagactgggtcgtttagaaagaaatgaggtctattgagctcatggttctgcaggtgggaaatttcaagggcatggcgctggcttctggccagggctttcctgctgtgtcataacataacagaaggtcaaaactggggtaggcatgtgtgaaaaggaagggaccaaggagggtgacatgttttataccaacctactcttgagggaactaatccatctctgcaagaactaatccagtcttgcaagagtaagaactcactcactatcctgagaacggcaccaatttatcgtgaggaatccacccctatgacccaaacacctcccactgggccccacttcccaacactgtctcttgcaatgaaacttccacatgggttttggtgaggacaaggcacatctaagttgtagaaaatacccataaaaagcttgagaaagcacatggatggatatacatgactttgtttcaccatctttgcccttttctattgatacaacgatgctcttgagtctagaaaaaagtgcttcaggctgaacgggtttcagatggctgtccactggatttctggttttaccttttatctctaatgggctcaccccgcacctaccttaaggccaggttcatcactgcaaaacacaaatccaattccaaaacactgggaagcaatcagattggattgttcttttcttaggaaaagaaagcaaaaacttacccccccataaggcaccactgcctaaaaccatctgtaagcatttctgtcatttccttggaggcttgagactcacctgtgagagggaaagcatcaacctctcccacatacccttagttgccctaaacgattcacccctgtgttccacctttagtaaaagaaaagcacggtgattaccagaattcagtgcagagccatcccttaacaagcaatggttaagaaacaagggagggaaggaagaaaggaagaaaggaaggaaggaaggaaggaaggtaggtggggggggggagggagagagagaaggaagaaaggaaggagggaagggagggagggaaggaaggaaagaaggaaatggaaggaaggaaggagagagggaggaaggaaggaagaaaggaaggaaggaaggagggagggagtgatgaaggaaggaaggaagaaagaaagagggtgggagggagggagagaatgaagaaggaaggaaggaaggcagggaaggagggagggaaagaaggaaatggaaggaagaagagagggaggaaggaagaaaaaaatggaagaaaggaaggagagagggagggaggaaggaaggaaggaagagagggagggaaggagggagggagggagggagggagggatcagaaatcatagccagtgaaacccagaaaaccgttaggcaggaattaggacaataccttactcaggtttgcattcccagcatttagcaccatatgcatcatgcatcaaaaatgttgttgggtgaatgctgagcaacagccacacactgaataaaccaggcaggttgacgtcacaggggagggcacagtgttcctggactctgagtgggtggctatttttcatgccaagtcatgacagtagcattcagtgtggtgggtaaacacagtcttatgaatctcacttttaaaaaactggaagtgctatagataaaagctttcataattttgagataataatggtaaaaattatcatttttgcttactatttgtgatggttaatattgagtgtcaacttgattggattgaaggatgcaatgtattgccccggggtgtctgtgagggtgttgccaaaggagattaacacttgagtcactggactgggagaggcagacccaccctcaatctgggtgggcacccagctgccagctcagctgccagtgtggctaaaataaagcaggcagaggaacgtggaaggactagactgcctgagtcttctgaccttcatctttcccctgtgttggatgcctcctgccctcaaacatcagactccaggttcttcagcttttggactcttggacctaccccccgagtggtttgccaggggctctcaggccttcggctacagactgagggctgcattatcag

SEQ ID NO: 4558 - DNA, 2300 bp, Homo sapien
caggagtgcatggagctgaagctggggcctgccatcaagttatgccaccagatcgagagagtcaaagtggctttctacgcccagtacgccaactgagtctgccctcgggaggtggcccattattgctgggatgcggtgttggtaaaggtttccaggactgaaactttgattttccgggatatgttaaatggtacagccactaagtatcaccagaaaaccagaagcccaggatcttctgcctccgccagcctgtgagctgtttccatgttttcaaagcacagcagcagtcgcttctggggagtgccagttaaagtcatgcatcagaccctgccagacgtgggcctgcttcttggctcacccacgttttgcctttctcctgccccaaatcaggcagctcccttggagcagggtttcctcagatgaggactgcattctttgaaaacaaagaatgtcgccaaggaagaaacctcacgccatgctgtagtgtttcctgtaatcacacgagcacatttatatatgcagtttcccatggataggcgtgtgaccctggttgagtggcacttgcggtttcatcttggtggcaactcctttgcaatgcagctggcagcgacatccttataaaaacatgtgctaaagctctgtcctctgttagaggtgccttttaggaatacggggagtgaaggaaggccggcaggcatctccatgcaactagatggtttgtttgtttgtttgtttgtttgttgttcattttgttgtgttttttgagacagggtcttgctctgtcgcccaggttgtaatgcagtggcgcaatctcagctcactgcaacctctctctcccgggttcaagtgattctcctgcctcagcctcccaagtagctgggattacaggcacccaccaccatgcctggctaatttttgtatttttggtagagacagggtttcaccatgttggtcaggctagtcttgaactcccaacctcaagtgatctgcccgcctcggcctcccaacgtgctgggattacaggtgtgagccactacgccccggcccaactggatggtttttgattgaagcctagaacatctgtagagacaaactctacccagtcttttctagaccctcaactatctccagtgttgttgtttaatcgtagccggatcagggagtgagtcttttaggcaaatgttggattatatatcaaaggaaaagcttagtttcagagaggaggaagggaaagagatgtgagggaagcatttcatcaaccagctacgtcccccttagaaggatcactgcagcaggtcaccgagcaggagtccctctgagcgtcccttctgtctcgttctgccctagctggcagcatatgaaccaggcatgatgcagcaggagcagtgaatctggagtcagccacttggcaccctggtttcgctgagaacaaactctgagatcttgggtgacttctcatcactctggacctccattcctgtgaagtgacaggtgtggaccctgagggtgcggtggtgagcacactgtctcctgctggcattcaccccactcatgctggaaaggaagatccagatcgtacaaaaattagaaaaagaaagaataagaagggtctggtcccagttctgactcggccattcttacagctctttctggctttgagtttgcttgtggaatttcctgggcagttgtgttaaatccgccaggtcacgtgcagacaaagctgtggctgcgagagttggctggcctcttggaccagaagccatctccatatcctcatgagcgattccatatctccactcagaccctgtggactacagtgttccgctgtggtggctgccaagatgccttcttaaacttatgcaaggaaaccaaaccctcccacagttcccaagcagacactggaagcagaggcttctcacccttcctgctttttcaccacaatcaccttgagctcgtcccttggactagagtctccacagttccagtaaaattctgcggtgggctgatgagctgcttgcatttctgtgacatttccagatatgattctcagtgggattttggaaactttgattgctcaagctcacccttcttaacattctgtaatggttacagatgagaatggaaaacacatattttatggatgaggcgttttggtctcccctgcagtcgatttctagaatcaagttttagagttcggctgatgcatctgcctggggacctcagatgggaggagtgtgtcagttgtaccccgacagaaatgtctctgggatctgtggctggcttgccccgggcatctctcc

SEQ ID NO: 4559 - DNA, 2300 bp, Homo sapien
agctcacgaaccgcagccagggaaacgggagtttgcccagttgtccttgcggaggggtgtgcggaaacgcccgcgatgggaactttctgcagatcatgtatggagggagctcacaaaaaggaggaaggggagcgcggtggggaggaggccgcgtgggcgtggaaggtcccagggtcctgggggtgcccgcctgcttaggcgcagggaatggcgcggagctggctggggaaggagccgatcacgtcccgcaggctaattggcttaagaaattttgcaagcgctggaaaaggtcgttgaaggagttcgctgcacgcgcacgcacacacatacacacacacacaaaatcttaaaaaaaaaaaaaaaaaaaaaaaaaaaagagcgccgagcatgcgcacagagaggatgccatattggaatgagctgtagtgggagccggaggaccggagcgggcgcgcgagggaggcggcgggcggggagcgagcgggcaagggcgggcgagcgagcaagcgagcgaggccggtgccctcccgggcggcgaccggggcctgggtccacgccgagggcaggacgaacttcaccaggtaggacgccgcgccggctgctgtccccggcgcccaggctggccggagagcagcccttcggcccgcaggttgagtgcgctggtcaggggctttttccagcctaggaaaaaaaaggaaaaaaaaaaaaaggaaggaagcctgagggagctggggttggaggtggcgggtgggggaaggctggggagggtgcaggggagcgaaagagaagggcaggagaagaaagcgactgcacttgagcgaagcttcaaactcctctgtgcgctccaggttgtcatttttgcttcccgggtccccttcgcctgcgtctccgggctcggaaaagccgagccgtgcgggagtccgtccggagttgcaaagtgtcctccttccccgggcgcagcctgtcccctcccgccgcccaccttcctcgtttctgcactcattttagcgacgcagccgccgctgctacctaccccgcgctcccgcgtctcctccgcgctggggtctcccctttcttttggtttgggtgggagaaaaagatggtgaggacggggaatcggagaccggcatgggggtaaaaatcgtgcagacattcggaatcgctcccttggaaacatttgcctgagcaactgaaataaaattggcagtagtagttttggagcgtgctccagcgaggatggtctttttgttcattattttctctttaaagtaatatcctgtcacttaggggctttccggttgtctcctcttattcgaccccctttcaaaattgctgacttgagctggttctggagtttattttttaatatgcgtgcgtgggtatgtgtatgtgtgtgtatgttttgcagaaatccgccaaaatgcaactgtaggaactgcgagatgtatttattgattttgaccaggggcggtgggaaggggctggagggagctgggggatcctggagggtgggaagtggctgattctcggtggccggacactcatccagagcctgatccgtactcgtgttttcttggaagcgccacaactgcggggaaggagtctttagaaaccgtgccagtttcaatatggcgggctaaggtggcttttaaaaactgaaaataaaggttttgaggtgggaaaaaacccagctgaagtttccaccccttagtttcgactctctttggctaccccaggaagcgctttagcgaattaagtggggaaaaaaagaaggaatgggctgtccggttttttttttccgtggttagagtctgtgtgtcaagtccattgctaggggggaaagggatggagaagtgcccctggcccggaccagggcaccgaaacgcaactgtcgtgtgtgcctgtggattagtgtgcaggcctgcgtgtgcgcagtttttttgggtgtgtgtgtcaaagagaaccaccccgaatgtgtgtgtgcgtcttggaaccagaccctgccatgatttgacgtgacaaactgcggacacgtggtgtaaagtacatgagggcagagggagtgatttattttgtctttctaggagacgagctagctctcgccttgtgtgtgctggatcctgcgcgggtagatccccgagtaggtggggcgaggaggtgcttattaaaaggactaactgtcccgggtattgggtgcaatcgggctgcagacgccagccggatttcgtgtgtgcagggggcgcgctgcacttaatagtgggctcctgctttcctccacgccgctctggggtgggaggtgg

SEQ ID NO: 4560 - DNA, 2300 bp, Homo sapien
cattttgtggacccaggagcaaaattatacggggtctacgtacccaaaacattaaaaaaattcaactccttcggagtaaccaggtaagataatgaacgcagtcatacactgtttgggatcaggtgttcttctgcatttgcttttatttggatgaaagaatgtttcgtgcacaatgatgacctaaaactggtaaacaagcctggagagagcgcggtggctggttgcagctcacgtctccacgactcctgcagaaggaaattacgttctccccttcccccccgcacccctacccctaccccaagcccccgggaagccctgcgctggcaccagggcaagcgcctgtcggctcccgggagctaagcgaggccgcgcggtctgggacgcaaatgggagggagcagccgctgtcgccctgcggggccagggccactgggtaggcgcagcgcgggccaagagtgggaggctcagggcaggggatccgcactcggggccattcctgccgcggcgcgccctgcgcttcagcagtgcacagggtggggacccctcgaggacagtggtgcgccgacgggtctctcggcccctccctttccacaggccccgctgtgtggtgaaggagccagaagaggcgacttgggtgttgagacccggggccaaaccgtggagagtgtctggagcccacactccagatttctggacgccgcagtcagtccagcaggttctacctggagccgcctcggggctcaaccgggaggcagcggggtgcaggcgagagggttaatgcgcccggttcggttggtttgaggagtctctgctttcagcgacccacagggcagagagcccagggctccggcttgatgtccccaacagctggggactggagagctggaggggtcgcagactcaggctagagtttaaagtgcgccgcgcggcgagtcgctggactcttctgggtctcacgtggctcctgtgtcacatggagtgacaggccggcggaaggcgctttagtcgtcgcccagcgttctccaaggtgtaaggaggcaggatcttcccatactggcggcgcagggggcctcacggctgcggacgcccgccctggatctctcagctcggcagatcctttgggtggagaggcgctctccagggtcgcggcgaaggagagcggcttctcggcacgtccctccgtatttcttctagatcagctccggccccaccgtccaggagagggcccgcctgaggacctctgtctgtgccgcgcgtggtcagccccggtcccctcactccatggctggcccctagcccttcagagcggacacctctccttagggatgcagggcgaggaagggcgggtggagctgcgaacccacggggacctggaggacctcttggccccctggagaggggtactatgagagggattcatgggacacagatttgggggactgggtaattttaccccctttggcaaccataaaaaccctgagcaaacgtgtccattcgctatttcgcagaaatatacaatgcaggcccacacaggcatctctgcgaggccccctagttaagggcgcagcgttcttcggaagctcttggtcttgctaccagggcgtcaccggcttttccgcactggggacatttcgtttgggctctgcgcagccgttgcacctaaggccctgggagctccgcgttcctccccaggcgcccgggacaaagtgcccgagggctccgcagacgtccagccctgcccggggctcacggccgccggggctctccaacggaccgtcgagggccacgttttgctggggtgtgagcgacgattcttttcccgccctatgaggcccgccactagctaggtgccccatgagacgccgtggcgagcacggctacctggcagctcgcccgggcagccccaacttaatttcctgcccctcggggcacctttccctcgaatagctctcctcggcccctccagccctgcccaaggggcctggaaatgttcgcagcttcaagaaaggctctatttaagcacaggatggggtggggcgggcggggccaagattgccctggggattgaatttatctccgctcccagcgatccccggcggataaagcgcaagtttgtgcacacggtcgactgagccattggaaacccagctcacgaaccgcagccagggaaacgggagtttgcccagttgtccttgcggaggggtgtgcggaaacgcccgcgatgggaactttctgcagatcatgtatggagggagctcacaaaaaggaggaaggggagcgcggtggggaggaggccgcgtg

SEQ ID NO: 4561 - DNA, 2300 bp, Homo sapien
agaaaatgctttggaaatgtctgagcaccttaggtgggctcggccgaggctgacatttcgagtacatgacagttattggctttcacaccacctggtcagagcccagcccctgtgtacaaggacaccctgaccagccttcatcggcccgttacccactcactgctcaactccactctgaacaggtggggtgaggtctcaacactcccctgcatatagcctgctgcgttcccatattctctactagcaactatttgttttacctccacgctctttcctcaacccccaatctctgtcttcgtaaccatcaggaacaatgtctacggttcatccacatcccagaccagacactccatgatggcagagccatgggccctggactagtctcctcctagtgtggcagcaaatcctcacaaccatgatgaaacctttctagtgaccactctgaaaaggatggctctcctgccccatgtcatccccaggccctgacctgagccactccccacgcatctcattcacgccctgttggttccctgataccctctgactcaaataactcttcttggaggatccttgaagttttttgagaattgctgttcagaataagttatctctactagaaatgtcttgaggtccgtgaataggcgtctaggatgcattacgcataggagatgcccaacaaatatttgccacctcgacttggtaaacaacaggcccaacagatgtcatggcatcgtatttctctgtgttgtaattggcgtatgtctcaggggtgcagtcgctttttagtttccgtcattactgctacacggatctgtttctcactttttcttatcactgttagttccttgccatttcaccagagagttatagcagagaggaaaaaagaaaacaaaactcagagaaaaaaaggatgagatggaatccaaccaaaacctcagtgccactgctgaccccaaatctgaatttaaaaaaataaaataaaataaataaaaaattaaaaaaaaattctctggtccaaaacttttagttattttttttccatccctcagaaacactaacttagaaattaagtggtaagtgatttggcttttcttttatatattttaaaatatataaacatggacacattctttgggagctttaagtcttttaactcaaaggagaattaatttcagtaaactgccgtcaacgtggtggttgtgaacgacagtctgtttatgtgcaaagccgtacttttccattgagtctattctttgaactgataaatctcacctgagcagaaaccacggccacaaaatgtcacaagcagagagcacaatgctgcaagcacttagcagctcaaagtttttacacctcggctctacagtagcagcaagattttcactaattgtgtggggccccaggatgtgttttggttttgcaaggttttttgcagactctgccttcctgttcctctgtctcggtgtgctctcacacacacacaatgcagaggacaagcgcacgtctttacaattcaaaaccagaaaagaccagaacatttttaattagtctgaaaataaatttaaaaaaatagcagctctgaaagatgtgttcctctatctctttcctctggaaggctgcaatttaatatgtttatggggagaagtggtccctacaatcccaagaaaagtaagggggagttgggggagtctcaacccaattatttggcagtcaactttgcccctccaataaatgaaactgcaaagctgtcttttacaggatacccaggcactgacagcaaactgcaggaccacagtttcacatccattccctgggggcatgatttaaacccagaaacctgtcatcaggagggaagtggagagcggctccaggactggctgagaagtgatggtgaagggtttttgtctccctttcaaccccgtaaacctaagtgaacccgatctctgattgattattaaacacttcgcattcaatggctgaaggacagtctactcgttaaatcagtgattcttagcagagctatttctgctagatgatattgttgggtgctgggaaggaggtgccgataatgagaaggaagtagccatcgcaagttggcaaaactcccgaggaagtttaaaaaaaaaaaaataacttccgtcagcatcattgcctgcaaaatggatgccattctttttgagattaaggaatccagtgaacaaacacaagtcaatcacatttactacggaaaacaattactcaattcagcgagaggaagaataacatctaccggagttctagccttccattctgaaggggca

SEQ ID NO: 4562 - DNA, 2300 bp, Homo sapien
ttcatcagctccacctagccctagacaacactggaaggcatctgagatgtcagcagctaccctcctcctcttcgttccatgcccctcctcccctctgcggctctttctccctccacattcctgctgtcttctatgctcaacaccttcctgctcttttcaaagccattctcagaagagggcacagaagccattgaagctcaggtaagctaaggcgtcgccacatgccttctggagaaggtttgttacagtgggataatccccattcacttatatgcatttagtaaatgcacttgcttttagcaagtttctggatggccccttaacacctcactcctgtgagcatttgggtggttgagcgtgaactgcagctatgaaagtgcattcaggctgggcatggtggctcatgcctgtgattccagcactttgggaggccaaggtgggcggattacttgaggtcaggagtttgagaccagcctggccaacatggtcaatcccatctctactaaaaatacaaaaattagccagatgtggtggtgtgcacctgtaatcccagctactcgggaggctgaggcgggagaatcgcttgaacctgggaggcggaggttgcagtgagtgcagattgcgccattgcactccagcctgggtgacagagcaagactccgtctcaaaaaaaagaaagtgcaatcagagtgcggaggtgagtgcagaggcttgagctgttccgtgttggtgtcctgcaggcacagacatcaacggggccctgcagagggccatcaggctcctcaacaagtacgtggcccacagtggcattggagaccggagcgtgtccctcatcgtcttcctgacggatgggaagcccacggtcggggagacgcacaccctcaagatcctcaacaacacccgagaggccgcccgaggccaagtctgcatcttcaccattggcatcggcaacgacgtggacttcaggctgctggagaaactgtcgctggagaactgtggcctcacacggcgcgtgcacgaggaggaggacgcaggctcgcagctcatcgggtctgtggtctgtcttcgtaggcatgagaggctgtttgaggggctgaggggtggctgcggtgggaattcagagaggagtgtgttgctgcaccccagccttgcatctgctgacaacgatcatagctcattgcaatgggaggtgtcaccatgtgttttgaaactaggcagatcagagttcgaattctgatcctcctttatgactttaggcaagattttttttttttttcttgtgatggagtttcgctcttgttgcccaggctgcaatgcaatggcgtgatctcagctcactgcaacctctgcttcctgggttcaagcaattctcttgcctcagcctcctgagtagctgggactacagtcacacaccaccacgcctggctaattttgtatttttagtagagacaaggtttctccatgttggtcaggctggtctcgaactcctgacctcaggtgatctgcccgccttggcctcccaaagtactgggattatgggcgtgagccaccacacccggccctaagcaagattttaagacagtctgtacctccgttttctcatctgtaaaatgaggattatggttggttgcagaatttaatgagaaaatcgctatataaaaacactatgtatagcactggcacagtggccatcccatattaagtatttaatgagctctcatagttcattgacatcctgatatttcaaagcactttctagtaagtttacttttattctaccctgtgagcaagtagcagagtactgttatgttcattttgagtactagttaaaagatacttttatttggaagcaaaaccatcagataaaactgttaaataatcagattattttgaggtggagaataaatgagatcttttaaatgagagatggagaaaactcagatcttttaaaacagaaatagcttccctccgatattatgttgccacgcatcagtctgctcctttgctgttcattgagtgaagtgccagctcccagttcagcgtgaggtgctttaatctgcatcgtggcatatgtggtatctacttaaaagcaaaggggaggtttgggtagatttataggtgtttaatagccatagtcaaagcacatttattaatgataaatggaaatggagacacctaaggtgtgcagtaaagacaggtcctcggtttgggattcgccaccgtttcctcccacgcattttaatgaaagatttaaatgaaaacacagatttgctttccacattttaaaaattattcaaaac

SEQ ID NO: 4563 - DNA, 2300 bp, Homo sapien
aaccaatatttgaatgcaggtttctgaccatgatcgtgcgttcttagctgatatattatgatgcctgtcactctgggtgctttaacaatgaccaccaatgagagattgaccctggacagcatgcagtttcctttaatttcaaggacttttcctttttcagcacccgtttctttgtcctgtctaatgggtctaaggcatcttcaaccatgctggtagtgacctgggctgtgccacctgtccatgcactgtctggattttcccaactccttcagatgagcagatctgtggactcgtgttctctcttatgtaactgtctccctacaaaaataaccttttctctttgctggctctctgatcacttccaaaatccctgtccttgataagtgcaaataatagaagaatctgttctaccttgtggttcctgttaaggttacacctaaattgtctctgaaaaataattgcctattttgttaaaggaaatgtttaaacttcctttgacttgtgtgtctaataaaccctcagcagaaggaagtttatttttaaatacaaattactgtggccacttaacgcctcatttcctttttcattctgctaattggagatgggaaatggctggtcagcctatttcatgctatcaacttgagtacatttaaaaagataatcagaggctttgcagcagttttaagtctggctttgattcaatatctggataaaaagcctccacatgcccttatgattaagaattcttgtttatgttttcatgttctccagggtgcatgcagacctcatcttttggggttttattgctaagtacatagatatggtgttgtttgggtttataaacgtgagtagtttgctaaataattctctgtgttctaacaggaaatgaaggtcaggactaaaagatgggatgctctttgcttaatctgtcatcacactaggttttcataaattacataatatccatttatctgtttatctttctgtaattctaatttatatcctaaatttcatgtgaaaaagctttgagaatttttttttttttaatgagccgtaagccgggcatggtggctcacgcctgtactcctagaactttgggagtccgaggcaggaggatggcttgagcctaggagttcaagaccagtctgagcaacatagcaagaccctgtctctacaaaaaacaacaacaaaaaatgatccaggtatgctggtgtgtgcctgtagtcccagctacttggcaggctgaggtgagagaatcacttgagtccaaaagtgagctgtgattgcaccattgcgctctgggtgacagattgagacgctgtctcaaaaaaaaaaaggaatacagaaaaagagaaatcccataggacaaatgaccagcgatttatcacatatatgcagcatcacaaaagaggtggaggcagacactggagattaaaagaagcaagaaataaaaatggaatgtgattggggactcttctaatcttcattcaagcaaatcaaccataccaagaccctttctttagggaatcagataaatttaaatacaaactgagaattagataataatagggcattgagcattaattttgttacttgtgataatggttttgtggttatgttagtaaaagagttcttacaggtaaagacatactggagtatttatggatgaaatatggtgtctggaatttgttttaaaatgctctaggaaaaaatggggaatagataaaaacatacaaaaggttggtaacatgctgatgtttgttaaagttgggtgatgggtacaggggttcattttactattctctctacttttgtgtgttttaaaaatgttcataagaaaaggttcaaaaagaggcataagaggaaactatatgatgacataactctcgcattgtgatatatgagtacagtcttagaagttcctgtgaaatacaagcctgtaataaaatgaaatctaaaactctgtgtctgccaaacagtttttatttctttttggaaaaatatatattaagttattaattatgtttctatcttgtttgcagatgattctgggcctcccccatctactgtcattaaccaaaatgaaacatttgccaacataatttttaaacctactgtagtacaacaagccaggattgcccagaatggaattttgggagactttatcattagatatgacgtcaatagagaacagagcattggggacatccaggtaataggatcgtcgttgctatttcatgttggttggttggtactttggacagactcatactgtggatcccaatatttacctaagggag

SEQ ID NO: 4564 - DNA, 2300 bp, Homo sapien
attttggtcagtaacggtggaacagcccatatgaacctacttaacagatttttttcccccttaataaaaagatgattctattttctagagatgctcctctggaattgctcccagtaaacttaaaaaaaaagtagtgaaaaatttattgggtcacatttactgtctgcttcttcctgggtggtggttggcctcaggaaccaggctccttggtgagtaaccaaactgagaatcaacccattctttgggtgtgtaaaataatcccatttagttgaatctcatgaattttcatcatgagctagtaaaaccagaggtcactaggaagccaaaataatcatacagtatccttcctcatggtccatatcaaagagcctagtcgagtgaatgatggacagagaaattatactttctaatccccagtgcttttactcagccatgaatggtattaattcagggagcttgtaaaaagcattttcacgagattggaagcaagactaagtaggtacatgctggcagcataaagagagtctaatctaattattgtagaatcttagagataatctaagtgctgcctaattgcatacaacacattttattgacacttttctatgtgtaaggcacacagaccatgtgtaagctacatgcctattttctatgggcaaaaaccggaatcacccagagggctcgttaaaacacaaatggcggagtcccatccccagagtttctgactccgagtttctggggtgggcctgagaattggcatttctagcaagttcccaggagctgctgatgctgctggttcaagatcacactgtgagaactgctctacaccctcgtgggggggattattccagggttcacttgagcccttctaatgggatgggttgtgaaggcggccgatcccaacaggacagctttcttagggttcaccgacactgcgctgaaaagtgcctcccggaaactctctccctggtcctaattctgccggctggaattgctctggacacacctaatcctcatttaataaatgcccatgcacattcatcctaaggagaaggacagagaggggtctgtttggcaaataacattgttatgttccatgccggggaatgcctgtttaatctactttgctaacaataaatttaaatgttaataactggggtgtacatacaccataaacggtacaaatgtcatgtgtacagcttgataaaattttacataggtataccctcattcaactgccttccacctcaagacatggaatattttcacccttcctcaaaattaccacgtgctctttcctggtcctgagcaggccttcaaaggtcagcagtgttctactccagttgccatgggtatttcatgctcctcttgaactttatgcagatggaagcagagagaacatgcgcttttgtatctgatattttcactcaagaagactgtgaggttcaaccatgttctaaatagcaatattagttcttttgtttttattgccttgtggtatcccaagtttgacttgtgtttatagttgtatatgtaattgctccttctatttttttttttgcgggggtagggggtggtgggatggaattttgctcttgttgcccaggctggagtccaatggcactatctcagctcactgcaacctccgcctccctggttcaagcgatattctcctgcctcagcctcctgagtagctgggattacagccaccacacccacctaattttttgtatttttagtagagacgaggtttctccatgttggccaggctgatctcaaactcctgacctcaggtgatccacccgcctcagcctcccaaagtgctgggattacaggcgtgagccaccgggcctggcccctccttctattttatatagttaaggttggaaattgatatggtttggctctgtgtccccacggaaatagcatttcgaattgtaatccccatgtgtcggaggagtggcctggtgggaggtgattggaccatggaggtgaatttcccccttgctgttctcgtgatagtgagtgagttctcacgagatctcatggtttaaaagtccggcgcttcccagttctgtctctcgctcctgccgccttgtagacgtgttcgctttgcgtttgccttctgcgtgattgtaagtttcccgaggcttccccagccatgcggaactgtgagtcaattaaacctcttttctgtataaactacccagtctcaggtacttcttgataacagtgtgaaaatggactgatacagtaatgatataagctagcatgactgctgactgtgaactggaaaatgg

SEQ ID NO: 4565 - DNA, 2300 bp, Homo sapien
ataaccactctgttagcagtggcttgtggctttccttacaaatgttttcttccttcttcaggcctctgctaccagctgtcaccagatgtagctctgttgtaaggactagaaaaagccctgaagagttttaacaggcttttacatttgcatcttctagttactgctctcatcaggggcttttgggagaaatttaattagcacagacttatgtgttcctttttctgggttctaaattctctagatactctgctgagttcagtattgattcctatttcacagtaatgcgcctgtaattcagatagggaagctctggtgtatcgtttctctaagtggacattgaaagtaattttaaaatacgagatttttgttagtcatgttccggtttttggaacatttcggtagtcctgtaaatgtgatataaaagtgataacagaagagtattatatacagcacatactttacttctaaaattccgatgattgaactgtttaaggaacgtgtattttctgccaaattggacgtcttcactgtgttcacttgttaaagtcaggttaaaagatttgcttgtgtgttattaattgtttatgcaaaacaaccaaggttgttttacaaaggaagggagttaaaaatggggaaatcaggaaaagaagaagaaaggaaattggaatcacatgccaaaggctcccaaactgaagattatttcccttgtggaaaaaaaaaaagatgttccactaccaccaaaatgctttcatgcatcaccgatgatactgtgtgttttcattcctacagaaaaccaaacctttgatgacagaattctcagtgaagtctaccatcatttcccgttatgccttcactacggtttcctgcagaatgctgaacagagcttctgaagaccaggacattgagttccagatgcagattccagctgcagctttcatcaccaacttcactatgtaggtgacacgctggtcagggatgaagatttctgcctagggtggtcaggttgagcctgagatgtgaggtccacagccttgtgactgtgaggatttatattccagtagatggtatatagatcagaaggtcaattcttttgttcaaattcattggttggttcattcattcattcattccttttcttcttctctttttccctccctccttccctccctctctccctccctccctccctccctccctccttccctgcctccctccctccctccctcccttccttccttccttttctttccttccctcctcgtctctctcccttccttctattttctcttttttattcaatttttttcttcctttctttctttcctctttctttctttccttcctccccttcaacaaatgaatgacctttatgggccaggttactcttcatgaaaactggtgcacttctctgagaaagacagcctcacagtgctgcacaaattccagtagggagaaccagtcaatagataaatgaacaaagaataaatgagatgaatttcagacagttgcaaatatgataaagatggcaagtcagaccaagagggtcttcttcagttagggagatctgggaagagctttcaggaggctcttcctcctccatggtgaagttgagggttgaaagacaaggcagtgtagaacctttgatatactagattggatatctttcctccttctctgagccaagaagtaaagatatgtaaaacgggctaggtgttgggtttaatttttggcccaggtcagatgtaagttggtgaatcttcatggtagtgtgagcagatcttgtgacttttctcctggagaatcacagaggcaccatgggttgggtcttgctatttggacctgttgaaaattgccctagaataaaatgaatgattcaaaggtagtgccctagtctggaatgcattctttctacacatccaaaaggcaaataaaaatatttcctggggttgtcatggttataagatccatgtctgaatttgtcttggaactgcaagctggtagcacaactgtctcttgtatttcaggcttattggagacaaggtgtatcagggcgaaattacagagagagaaaagaagagtggtgatagggtaaaagagaaaaggaataaaaccacagaagaaaatgggtaagtattggttaattaaggaattaaaaacccattttagcaaagtgccacattttctatgcctttgcctactcctcttgtcgtcttcctttcctccaaatacttttctctttcttttttatcaaaatataaatacatctagtgaataatatagtagataagtgtttgtaataa

SEQ ID NO: 4566 - DNA, 2300 bp, Homo sapien
gacgatggagtctctgttctgttgcaatcatgggttgaaataatggccgctgtatggttccctattgcaaataaactggctttgtccaattcaacttctggttcacaaatagttactttcctctggagggaaaaataaccggctacagttgtttcttattggttgcatgctgactagtggttaggctattaaaggattaactgctgatgacaataattttcctttcatttatttcacagtagcaaggtgtttgtttttaacctctcctaattcattaaacaaagagcatttcaacaagaatagatattttcgaggatctcaccacaaactaacctacccactgcttttatttttcatgttttttttttctagttatgtccctccatatgtatttctacctaattgcaatcatactgttgatacgatttggtgatgtgattttctctttagattacactgtcaacattctccatgtttctggagacgtcgcacgattatttaatggccccatagtaacctgcatggaatagtattctctattccatggtccgaagttagccccttccctgttcttggtccttaaagggtctgtcactcacctcacctatttagatgaaattatcacagagacataaaaaacatcctttgcaacatgaaataaacaagtagccccaactgcaatgtgtatcaccagataaaaaagacgcactcagcctgtagaaggccaggtgtggacggctggtgggtaagaattcttccaatggcaggatggaagtatcaccaatagtttgtaactaagatacatactggcactcacttacatgattaataaccagaaactcagaaatactacacgctaccaagatacttccctcgtctcctctgtttccttagaacataaaggctggcagccttgctagtccctcctgcgctagactgcaggtagtatcctttgtcctgcctattaagcgtccctggccaatgcagaggggacgatctgccggcttcaggctggcaggtgcggggtgggctgtgtgctgaggaccaggctggccttctcgcgtcctctggcgacagaaattaagcaagtccgcaaagaagcatattgcaccttgagggagaggaagaaagagttgcgggggcgcgtggggtagggcccgggaggcagtgggtgttggcaagaaacggagtaggaggctctacagaggagactggtccttggttaagtgtcacagccgcaggatgggagggtgtgggaggggtccgtggggccaacacaggtggcccctgctgtgcgcggcgaggcaggcttggaatgccttctccccgaacagagctagcccagcactgggggctggaggcgcggctctggtgggactgaggccgggaagcggcgccgggcggggtggggactggggaggaggcggggctggtgtgggggccacagggaggcgggccgggtttaagggggtggctgtaggtggggtctgggaagttggcctcggtggggacagggacaggagaggtggggccgggactggggaggtggggggaaatgggggcgtggagaaacggagcttggggttggggacctggggaagctgggtcctgactggggacagggaggcgaggccgggcttggggggtgtccagggaggcagggtgtgggaaggtctggggcggggaagtggggtctgggctggggtgggagagttggagtccagaaggggaccgcggggtggaaggggtccgggctgggaccggggtaggcggagtccaggaggggacgcagggtgggcggggtccgggctgggtccgtggggtgggcggggtccgggctgggacgcggggtgggcggggtccgggctgggtccgtggggtgggcggggtccgggctgggtccgtggggtgggcggagtccaggaggggaccgcagggtgggcggggtccgggctgggtccgtggggtgggcggggtccgggctgggtccgtggggtgggcggggtccgggctgggaccgcggggtgggcggggtccgggctgggtccgtggggtgggcggggtccgggctgggaccgcggggtgggcggccccgagagcgtcccgcagtggctggagccctgggcgctgcaaagcgtgtcccgccgggtccccgagcgtcccgcgccctcgccccgccatgctcctgctgctggggctgtgcctggggctgtccctgtgtgtggggtcgcaggaagaggcgcagagctggggccactcttcggagcaggtaagtggagccgaggggagccgggtcccgg

SEQ ID NO: 4567 - DNA, 2300 bp, Homo sapien
caggtggattactcgaggtcaggagtttgagaccagcctgaccaatatggtgaaaccccatctttactttaaaaaaaataatacaaagttagttgtggtggtgcacgcccgtaattccagctacttgggaggttcaggcaggggaatcgcgtgaacctgggaggtggaggttgcagtaagccaagatcatgccattgcgcttgagtctgagccacagagtgacgctccctctcaaaaaaaaaaaaaaaaaaggactttgggatctgaagacagagtatcagcatggaaaaaagtccagcctgcttttggtttggtttattctgagataattctgaatatcagattaaaataatcagaaaggaaatgatcaatggaaggaggtatgattttgaaagtcactgctgtttttgggagaacatgccattgggttttttattatttatttatttttttcttttgagaccaagtcttgccctgttgcccaggtggaatgcagtggcgtgatctcagctcactctaacctccgcctccccagttcaagcaattctcatgcctcagcctcccaagtagctgggattacaggcgcatgccaccacacctggctaatttttgtatttttagtagagacggggttgcactatgttggccaggctggtctcaaactcctgacctcaggtcatccacccgcctcagtctcccaaagtgctgggattacaagtgtgagccaccgcgcccagctgccattgggtcttaattctccagaaacagtatctcagtcaagaatgcaaagctgtggcaggatttttccatgaggggtccactgaggcactcactggccaaggtgggcgctcaactagtccaacctaggcaagggaggggagaatctgttttctcccttccattatttcagaagttatgtttctccagcagacacacggctgtgcaatttcgaagactgaggggaaactagggaggaaaatgcagaaaactctctgttgcatgccctgtgaattgggctttaaatgtagcaaggagctccaggatcccagaagttggcctggggtgcttggtcctgaggataagacaacctcccttgtattgtaattctgcccacagctggagcttcctatttcagtgttgcatccaagaagttacatttcctgtttgttgcaagaaaaatagaatctgaccaggatggaggctaggcatgggggctcacatctggaatcccagcagtttcggaggctgaggcaagcagatagcttgagcccaggtgttcaagaccaggatgagcaacatgatgaaatcccatctctacaaaaaatagccaggcagtgtagtgcacacctgtagtccagctactctggaggctgaggtgggcagattgcttgagccgggggaagttgaggctgcaatgagctttgatctcaccactgcactccaattctgagactggggagtattgatttgccactgacctgagcccggctgataggggcagcaggacagacactgttaccttaatcaaagacattcacgaagcattctcactgaagatctgccctagtatcctgcacagccacttgcctgggtctttataggtaacaggtagacagtcatcaaagagataggggaaaacatgcacaatgaattctttgctcagaaaaacccttctgtgtcttctcccactttttctaaatttttcctgctttcatttagatcaaaggattttgtttcttggaatagttctgcacttggtcctttagaaaggatgacaattatctgtaggtctctctgattttaagatcaatagaaatcagcaaaagccaaaaaataaaaaataaaaataaaataaaagcacacaagcacattcaagcacatccatctgcccctgacttgtcctcacagtaagcaactgcttctgactttgctgtttgaataacctctgggtgttcgatccacccacacagctcaagtttgagctccagaacaaatatttgtcccaattttgaacaaagttagagagttttttcttcttttttcttctttcttaaagcgaactgtactcctctgctgttcctttgaacttggttcagtaggaagaagtgatatcctccccagaccatctgctttggggagcttggcaaaactgtccagcaaaatgaaaagactcacgtgctttttcatctgcttctttctttctgaagtatcaggcttcgaaatccccataaatggactttctgaagtaagtacttacagatcactccttgctgttggcttgttcatgagctcagtaaatc

SEQ ID NO: 4568 - DNA, 2300 bp, Homo sapien
aaagaatgttattataaagtgttttatctatgacaatttagaatcatgtaattggaggaaatccttcatacactctatattttcagtagtagagtagtaaagttgaactctaagtgtgactaaattttaaatgtcaaactataaatatagaagcagctttattgtggtaataattcatataccatacagttcactcatttaaaatatacatacaattcagtggtttttagtatttttgcagaattgtgcagccatcaccactgtctgattttaaaacactttcataccccaaaatgaaaccctttaatagtcaatcgctatttttcccctctgccctagccctagacagccactaatgtactttctgtctctatggatttgccctttctggacatttcttataaatggaatcatataatatgtgatcttttatgactggcttcttacacttagcatcatgttttcaaggtttatccatgcagtagcatgtaggcgtgcttcatttgtttttatggctgcttaatattccactgtatggatgtaccgtattttgtttgtccattcatcagctgataaacatttagattgtttctactttttggctattgtgaataatgctgccatgatcacccatttacaggattttatgtgaacagaagctttcgcttctgccaaactcttccagagcagctataccattttacagtcctaccagcaatgttgaactatagttttatttgtttttaatttttttacttttagagacatggtctcactgtgttgcccaggctgctgtcaaactcctgggctcaagtgatcctcctgcctcagcctcccaaagtgctaggattgcaggtgtgagccacagcaccctgcctaaccatacagtttgaaataagtagggcagtgtattattagggaatgcaaaagacaggaaacccacatttgcctgtgccaaaggaaaaacgaagggatatttgtagtgcacatgactgaaaggagcagacgctagcttccagggcagcgggaccgggtgtgaacagccttccctgggcttccgctctgtctctggctcctgtgctggctctctacatttacattcttgagcactctaggtttacatcttacccttcagcagcaccgggaagagagagatgatctatcttttctttttctttttttttttttttctgacacagagtctcactctgtcacccaggctgattgcagtagtgcaatctcggctcactgcaacctccacctcccgggttcaagccattctcctgcctcagcctcctgagtagctgggactacaggcatgcgccaccacgcccagctaatttttgtaattttagaagagatgaggtttcaccatgttggccaggatggtctcgatctcttgaccttatgatctgcccgcctcagcctcccaaagtgctgggattacaggcatgagccactacgcctctttttttttgttctgttttttgagatagggtcttgctctgtcatccagcctggagtgcagtggcacaatcatggctcactgcagcctcgtcctcctgggcttaggtcattgattctcccacctcagcctcccgagtagctgggactacaggcatgcactaccatgcctggctaatttttttgatttttagtagagatgaggtcttgctatgttgcccaggctggtctcaaactcttgagctcaagcaatcctcctgcctcggccttctaaaatgttgtgattacaggtgtgagctaccacgccttgcctgagttgatcttctacaagagttcaaacaaaaaacagaccataccaggatgatcacttcaaacatgaggatgggtataagctgacgtcagacacaggtatggtgccaaaccctgggatctctctctttaactgagagtcagggagggctgattgcttctattctcagaagatgggagaacgtatgctgttagcagaaatgtaagaggcagtaaagaaatactaataggatgatggcagaagctttacagaaaatgttcctcagggatgaattaaggtttttccaaagtaacctgacagcacattatggaaagcaactgggttttgggtgtgggcagtctttagatcaaattctggcagttctgttcattggctttgtaatattagaatgttaatgttcttgaattgcaatgtttttaatgtataaattgtcaaaatgtttttcagcagggttgatgggagacctacagaaaatacatataaatcatcagacatgaagtccagcacatagtaggtattgaataaa

SEQ ID NO: 4569 - DNA, 2300 bp, Homo sapien
accctaatgtaaactatggattctggatgatactgatgtgtcaatgtagtttcatccatggtaacaaatataacacctcgttgcaggatgttgatgatgagggagactggagaggggagcggaggtcctaataaccaaacctataacagtctattgcttttgatcgaatcttgatttcaaggagcagttggaggacaactgaggaagtgtgaatgtgtattagatgataaagaggaacttctattaattgtgttatgttgatgacatatactatggttatatagaaaagtatcctgaaattttagagatgcctatttaagtatttaaaggtgaaatatcctgatattggtatttaccttaaaatattttttaaaaagtaaatacggcaaaattacttaaagtgttaagtctgggtgttacagactgcatgtctgcgtcccctcaaagttcatatattgaaccctaacccccaagggaatggaattaaaaggtgggcctttggagatgactggatttagatgaggtcacaagggtagagcctgcatgatgaacagggtgggaccgtatctcaaaaaaaaaaagaggaagagaagtttctattagagcttgctctatctgctttgtgaggatagaggcagtttcgcaaaccaagaagaggaccctcactagaatctgaccatgccagcaccttgatcttgaacttcccagcctccagaactgtgagaaataaatttctgtcatttaaaccacccagtctactgcactttatatggcagtccaagcagactaagacattagataatgcatatacaggtattccttaatagaactaaagagagtaactgtatcaatattagtatgagtcctacctaaaatacctcttccttcacttgcagaaacactggattagattattccaattgcctcagtgttcttccacccttacccaatccagtccaatctccggagaaaaatatgatcacatcactagcctgcacagcattcaatcaaccacctctttaatggggaaaagtgtaaattccatagtgtagccatataaggcttttcgagatctgcccagactccttgagccactctatatatacttcactcatttaaaactcagcgacaatcctacaagtaggtgaaattattattccctctttacagataagtaaaggggaatataagtaaataacttgcccaagaccacacggttggtaagtggccctgcttgactttaaattttgacagtctgatatatccataaaccagataaatccataattttaaccacaatattattctgtgcccggtacagtgtaggtgctcaataaatgcttgctagatgagtagtgtggaagagcttagctctcctttttcacctgatcccaaaagaggagtgaatcctaaccaccctgtttctcttaagagtcaagtcaagtaagagctgatgactgttactggcattgcccgggcgtctagtattgcagtatccccgcccctgtgaggggtgcaaaaccttttctgatttcatttctttggtggtggggatcggactggggaggaatgaggggtcgcagaacacaggctgcccgctgggcccgggggctgcggggagggacggctctcgtgcgctgagtagttgactcgcccactgcagacctcagaagcctcacgacccggaccccgggagccccagccccgcgccctcagccccgcgtccaggacctgatcctggattgccaggggccctcctgggaagacggggccactccgggcccactcacctcgtcccggcactgcttctggcacatctggcaataccagcgtagcttctgcagccccttggacttgatcctgttggcgatagccttgggagtaagaaaatccgacttccccatggcgaccacggcagcgatcactttctggaccccagtactcagccagccggaaacggaaccgggctggcggcggtgggcgggacaaatcccagctgagaggcggaaggaggtggggcctgggaagactgggttgcaacggtcgcgagactcccctcgccgtagcgcgaagaaacgagactgaagaagagagcaaggtgggaggggcgcgctggggagcttcggcgcatgcgcgctgaggcctgcctgaccgaccttcagcagggctgtggctaccatgttctctcgcgcgggtgtcgctgggctgtcggcctggaccttgcagccgcaatggtatggcagcttgcgggaagatcggcaggaccgcaagggatggaagagcttgggcacggggcaggg

SEQ ID NO: 4570 - DNA, 2300 bp, Homo sapien
agaaatggcagaagaggaaggaaagacattaagcaccagcagtgaaggaatacatgaaaagaagaagacagaatatgctttcatagtggaacactgttgattgatgatttataaaaccaatattccaaagggattaaggtcaggattaggacctttatatgctgattgtggttccgatttaagctcctaacagtagttgtcttgaactgagagctcttatttaaaacaatccttcactaaaagagcttcaaattatcttacaggtgctttaaaaaaagatatttctaaaattttttgtaaaatattgtctttgtttcagaaactatttccacttttttaaagatcaacttagaaactaaggttgtaaaaatactgacagataacattaatgcgtggcaagaaggtaaggccaggagagctgatgttcgcagagcaccactgcatgccaggcactgtcccaggaaactgactgagaccttatctatttgctcaccatcacatttgggcactttccaagtaccaccgggtggagtggaagcactcagctaatgtctgctgagtggttaacaagtgggacaatctatacaactgagaattcaactacagtgaccttttaattcccatgaatgttctttttccatattagagaaaaaaaaatctgacttccaaggccaagccaccaaaaattttatgtggctaattcacatcagatatcattctgaaaatctcgtatattactatcagttatttgcttaatgaaaaacctatttatttcaactaatgctttatggtcccttcatataaattaggatacgaaaatctagtttagcactgtagcgccttagaaatcctccacactgttaagagcagggaattgctacgacacagcctagaatccccttagcagcgtgtctggaattcttccagattccgtcaagcttcaaaactgaacagcaccacccacaaaccaacttttacctgcccattcccgggccttctaatatgcacttcccccagcccaggtccccctacccggaactaatgtttaaaattctcgaggctcgtggcaccctttagttgcatgtcagttaacaaatgccacttaaaagcccaccgaactcctcccccaggacctgggggcaatttcatgaccttgcagggttacggtttcagcaagtggtttcaaggtagtgctaggtgtccttcccttccccgccctcagacagatctgtacggtcccttctgcaccaaaaccaccctcagaggcatctaggatgttcgcctttgctgttgcagcacccagcaaagcgtctgcaacacgggaggtgctcgacggccgcgctctctgactcgatcgaatcttaaagggtcactctgtccagcactacagggtttcaaagggcgtcaaggacaaaaagcacgacttaaccttcccctgggctattgctcaggctcccgtcaccttgcaggccctgagactgggggcctggcttgcagtggaagtggaagctcaggaagtgctgattagctgagggaactcaagaccgcccagacgtcaatttggactcaggccgcagtcccgaggtcccaggtggccctccgacctcagggaaccgggcgggaccttgctccgccggagcccggccctgcgcacaccttgcccgacctcagagccgcttcctgcagcccccgctacccggcgcctccgacgggccaggggcccagctaggccctgcgaccccacatctgcccccgcgcccatctcctcctccctgccccgtgcccaagctcttccatcccttgcggtcctgccgatcttcccgcaagctgccataccattgcggctgcaaggtccaggccgacagcccagcgacacccgcgcgagagaacatggtagccacagccctgctgaaggtcggtcaggcaggcctcagcgcgcatgcgccgaagctccccagcgcgcccctcccaccttgctctcttcttcagtctcgtttcttcgcgctacggcgaggggagtctcgcgaccgttgcaacccagtcttcccaggccccacctccttccgcctctcagctgggatttgtcccgcccaccgccgccagcccggttccgtttccggctggctgagtactggggtccagaaagtgatcgctgccgtggtcgccatggggaagtcggattttcttactcccaaggctatcgccaacaggatcaagtccaaggggctgcagaagctacgctggtattgccagatgtgccagaagcagtgccgggacgaggtgagtgggcccggagtggc

SEQ ID NO: 4571 - DNA, 2300 bp, Homo sapien
aatagatgaactgtgatgaatgctctaatccactgctcagagccccctcaggactgaaggacttcagctgtccttggaattgaatggactcagctgcagtgttcctttgcctgagagcacacaccctttcccaggtagccctcatgcagtgacctgttcctatgggaatataaaggtccagtcttcttgtttggattcagggaagctctgaagggccactccagcttctgcacactatggcattggcttggctgaggctttcttgccaaggaattcactgcaccctggctttcactccttcccccaagtcccaggaggatccctcaatgaactttctgcaggctcatctctatttcagagttgacttcctggggaaccaagcctgtgacatatggtcttgtgtatagttatgtgggggaatgttcttgttttggggtgatacatgtcgaggtgtggtggggttaagtgtcatgaagtttgcagcttattttcaaactgctggaaaaaaaatacctgcgtgcatatataaatacaaaatatatagtaaattggcaaaatgttaacaattggtgaatctagttgaagtgtacacgtgagtctatgattttgtttcaacttttctgtaggtttgaaattttccgaaataaaatcccctcccctatacacagaaaggcaaatgaagaggaacaaacacccagggtggcggcggtagcgggacagatttgtgaaatccaaggcgcaagagagtttcaatgttacagaagcgttcaacattatcaaatagctacaaaataatcaagtacggctaggactgaaaaatgtctcatagatttagcaacacaatgttcctgataacttggggacagagtgtccagggagtaaatgcaggcaccttgccctttagtaccttgcttctctgcagatcgtcatttagctgaagaaccataatttcagttctattattgagtttcccagactttgaaaaatgtgaatatcatgttcaaagttctggaatagtccctgtcggaggaatatagagccactcataaactcgcaatttattggaggagcacataaactaaatacactgtgataagtacagaagggcatatttaagaaaccgcatagttcagccactacaatcgggcgacctgcaggctgaatctagactaaccgtgggatcagtttggcttttgagatgtgttcccaattctgtatttaaaaatcaagatatttatccctaaatccgatttctggcaatacttggatggagctgggagaaggctctggggtaggcaaccgttcccaggacactcggcctgcgacaccggtttaaggctcggtttggcctctgtaggcagccgaggtccccatcccccgataggtcacagccgcgatgctcaaatcgcacactatagcccacaggcagcttacctgttttttttaaaaaaaaaaaaaaaaaaaaagttttattggaaccagggctgggattagaatgacatgagtgagtcaggagtttatggcatggatttggatttttttaaaaaaactgttaaaatattatcgatcttgatgactgagttttttgaggcccccattaatttggcacagagtcctcctagttcctgccctattgcgaagggctttgaagggcatgcggaacagcttggactttatttaatctttgcagtggcaagcagctcaatacacagatttttagctgaggcaacaccagcgcaggtctgcgtttggcgagctccgtaagttcccacgccccaaacttctctctagcacataactctctaatatgactaacgttattagtgctaactctctaacctgtcaatgtcgtatcccagatccctcgtttgcctctaaaacactggcgttttcgtcaccgctgtcccccaggtgagcgccccagcacctgccgccctgggcgcctcctccacctgcgcgccccacgcccgcttccggccggcttccaggcctcagaggcgatcccgaggaatcgttccgctcccaaggggcggagctttctcatcgccgcgctcggcattcggcttatgctgcctcgccccggcggccgtccagcgggaggcggagcgagtccaaaatggcggctctcaggctggcgcgctccgtgctgctggggctttgaggtggtcgccgggggtccgggggaccctttccccgccgcggaagccctagaggatgaatcggggaccctgctaaggtctggcggcggggctggagagcagtggcagcaagggctgcggtggcgtccacgcagcgggatg

SEQ ID NO: 4572 - DNA, 2300 bp, Homo sapien
gcggagaagcatttttcattttttctttcagcttgtatccttaaatcttaatcccgggcttcttagcaaaaatgcgtgtgcattcgtttctccttgtttatggagaggtttccggtgaatgttagacagcaactaaataattaaaaggtttagagagcgctgtgagcaggagaagatgcgggcagcctggctggcccaggagagacgagtggtcagagaatgaaaggaaaatcgatgcctcttaactgggccgcctaataacgggagaccaagtgggctcaggagaaacgtggcggggggggggggagctttctttaaaaaattggggttctttctttctgtcctatatatggaaattcagccctgatttcaaacaaacatcagatttaagaaggtgaggactccaaagaagatccaaacgcgagaccaggaagattcacgtttccactacttcttccaatacatttcactaatctttctacagggatagtgttttaaaacacgacgaccctcacacaccaaggtgaagttgaatattgttgttgttccttcaccgcatgaaaggaatccttcagaacttactttcagggacggcttcttctatctcgaatttttgcatttgtagggaattttatggggtagaggagcgaagagggaacaatgtctccaattcaaataaaaccccaaattaagctctcagccccatcggtgggatagcctgcgggggaacccactccctctcctggcagcattgccctgggggcgagcagagagtggatttggagtcttcttttcccgcctgacccctgctcgcccgagcagcattttcgggccagcggctgcagccacccgggcgccgctaggggatgcagtggctcaaaggaccgagcgggcggtgcaggttggaacccgcggggcggaccaatcgcggctcggccacagcctcgcccgctgattggtccctccaggccccgcccccgctcgccccgcccctctcgctggggcgcctcggagccgcgtgccctccgccccggggtgcccattgcgcagagcgtggcctggagacccgcgagccggggaaggtcgccgtggagtcccgaccagaggccggggttggggtcggtgcagaccgagggctggtttccttgactgtgggagaaacgccgggagccggagtaagtagggctccgggcggggcgaaaggaaaagttgggtccctagagtgaagaccgagttctttctgtccgtctacactgagcgtactcggggaatgagttagagccagtctcttcctcccctccccccttctcatccctcactgttgccactcaagtcaaaagcacacattgattacaaatattaggtctggaaagggcagctgcaacagctgaagcgtgttcactctgggggcttgagagcgcagaaggctcgggaaagaggtgacaatgacaacaaaattgacgcggacgctccagtcaaaggcatctcccctttatccgatgactcaccctcttaggaagtcggcccgagaggcaaatctcaaaataccttgacatgaaacattttgtttttctgatcaatttaacgcgcacgtttccccacatcgatgcgctctcccaaacaccctgcattagatcctaataatgatccatgcgtgcctattttttaaaagtctgaaaaagaaaattctgcccatcgaaatgaacttcatgaatggggcaggctggctgcaccgggacggaatcgtccacccgacccgaatgaattggcaggagccgcggccacatttaaagggccagagcgcgcgttccctcccgtccgcccccaagccccgcgggcctcgcccaccctgcccgccgcccctccgccggcggccgccctctgcggcgcccctttccggtcagtggaggggcgggaggaggggcgggggtgcgcggggcggggggagaagtcctggagcgggtttgggttgcagtttccttgtgccggggatcctgtcccctactcgccagcgccaggctcctcccccccggcgcggatgacactagaacctccttaagttgcgtcgcgccacagctgtctgcgaacactgagctgcctggcgccgtcttgatactttcagaaagaatgcattccctgtaaaaaaaaaaaaaaaatactgagagagggagagagagagagaagaagagagagagacggagggagagcgagacagagcgagcaacgcaatctgaccgagcaggtcgtacgccgccgcctcctcctcctctctgctcttcgctacccaggttggtactggt

SEQ ID NO: 4573 - DNA, 2300 bp, Homo sapien
ggaggtcggggggctcctgccgtcggagggtcgggggtcgttgaatgatttgctttcggtggggggatgggaaggctgggaagcaaaggtgagcaaaggagaaggttttttaaaaattatcttggaggggtcgtttagcaaagagaagaaggggaagacaaaaatccaaaaactgggtacggcagaataaaacgggaccaggttgtaaaaaggggcgacgactctgcaattctgcgagccaggctcctctgcaccggggtcctcagccgctcggaggcggagtccctcctcgggtcacctgcaagggagagaatgggagacctggatgagcccctgagttgctggagtggcacaacctcccctcgcgccgcccgcccgcccagcgcacccgagacccgcacgggagcgcggggacacggccgcggagcccgcagggctctcggggacgtccctgcagcccggctcgcgggagccggggctggctgagcaacttggagggcaagtcccagggctgactgttacgacttggagggcaagtccctccctcggggacaccggtcccgggaccgtcctctcagcccctagaaaacctccaaaagaggagagttgagtttttaaaattgatttaggtcctcccaagtggttgggggcaaaaaatcaaacttaaaaaaaaaaaaagtcaccagtaccaacctgggtagcgaagagcagagaggaggaggaggcggcggcgtacgacctgctcggtcagattgcgttgctcgctctgtctcgctctccctccgtctctctctcttcttctctctctctctccctctctcagtattttttttttttttttacagggaatgcattctttctgaaagtatcaagacggcgccaggcagctcagtgttcgcagacagctgtggcgcgacgcaacttaaggaggttctagtgtcatccgcgccgggggggaggagcctggcgctggcgagtaggggacaggatccccggcacaaggaaactgcaacccaaacccgctccaggacttctccccccgccccgcgcacccccgcccctcctcccgcccctccactgaccggaaaggggcgccgcagagggcggccgccggcggaggggcggcgggcagggtgggcgaggcccgcggggcttgggggcggacgggagggaacgcgcgctctggccctttaaatgtggccgcggctcctgccaattcattcgggtcgggtggacgattccgtcccggtgcagccagcctgccccattcatgaagttcatttcgatgggcagaattttctttttcagacttttaaaaaataggcacgcatggatcattattaggatctaatgcagggtgtttgggagagcgcatcgatgtggggaaacgtgcgcgttaaattgatcagaaaaacaaaatgtttcatgtcaaggtattttgagatttgcctctcgggccgacttcctaagagggtgagtcatcggataaaggggagatgcctttgactggagcgtccgcgtcaattttgttgtcattgtcacctctttcccgagccttctgcgctctcaagcccccagagtgaacacgcttcagctgttgcagctgccctttccagacctaatatttgtaatcaatgtgtgcttttgacttgagtggcaacagtgagggatgagaaggggggaggggaggaagagactggctctaactcattccccgagtacgctcagtgtagacggacagaaagaactcggtcttcactctagggacccaacttttcctttcgccccgcccggagccctacttactccggctcccggcgtttctcccacagtcaaggaaaccagccctcggtctgcaccgaccccaaccccggcctctggtcgggactccacggcgaccttccccggctcgcgggtctccaggccacgctctgcgcaatgggcaccccggggcggagggcacgcggctccgaggcgccccagcgagaggggcggggcgagcgggggcggggcctggagggaccaatcagcgggcgaggctgtggccgagccgcgattggtccgccccgcgggttccaacctgcaccgcccgctcggtcctttgagccactgcatcccctagcggcgcccgggtggctgcagccgctggcccgaaaatgctgctcgggcgagcaggggtcaggcgggaaaagaagactccaaatccactctctgctcgcccccagggcaatgctgccaggagagggagtgggttcccccgcaggctatcccaccgatggggctgagagcttaatttgggg

SEQ ID NO: 4574 - DNA, 2300 bp, Homo sapien
cacagtgtcataaatgaatttgttcatttgttcccaagaaactgattttcacttatttattcaaaaaatatttgagaggctggatgtggtgactcacacctgtagcactttgggaggccgaggcgggtggattgcttgagctcaggagatcgagaccaacccaggcaacataatgagaccctgtctctacaaaaaatacaaaaattagcaggggtgtagtggtgcatgcctgtaatcccagctactcaggaggctgaggcgggaggctcacttgagcctggaaggagggggttgcagtgagccttgatcgtgccactgtactccagcctgggcaacagagccagaccctgtctcaaaaaaatatattatatataatatatgaaaatatttgtatataatatatataatatatatattatatttaaacatatataatatatatattatatttaaacatatatatttatatattatatatacatatatatttatatattatatatacatatatatttatatattatatatacatatatatttatatattatatatacatacatatttatatattatatatataatatatattatatatacatatatttatatattatatatgtaatacatatatactatatgtataatgtatatatataaaatgtataatgtatatatataaaatataatatatatatttatatataatatataaaatatatatgtaaatgtttatatataatatataaaacatatatatggaaatatttatatataatatataaaacatatatatgtaaatatttatatataatatataaaacatatatatgtaaatatttatatataatatataaaacatatatatgtaaatatttatatataatatataaaacatatatgtaaatatttatatgtaatatataaaatatattatatatgttaatatttatatgtaatatataaaatatattatatatgtaaatatttatatgtaatatataaaatatattatatatgtaaatatttatatactatataaaatatattgtatataaatatgtacatatttatatataatataaaaataaattgtatataaatatgtacatatttatatatcatatataaaatatattgtatataaatatgtacataattatatataatatataaaatacattatatacaatatatgtaaatattatataatatatgaaatatattatgtataatatatgtaaatattatataatatataaaatatattatatataatatatgtaaatattatataatatataaaatatattttatataatatatgtaaatattatatataatatacaaaatattttatataatatatgtaaatattatatataatatatgtaaatattatatataatatatgtaaatatttttatataatatacaaaatatattatatataatatatgtaaataatatataaaaatatataatatatgtaaatattatatataatatataaaatatattatacataatatatgtaaatatttatatataatatataaaatatatataatatatgtaaatatttatatataatatataaaatatattatacataatatatgtaaatatttatatataatatataaaatatattatatataatatatgtaaatatttctatataatttataaaatatattatatataatatatgtaaatatttctatataatatataaaatacattatatataatatatgtaaatatttctatataatttataaaatatattatatataatatatgtaaatatttatatataatatataaaatatgttatgtataatatataaaatatattatgtataatatataaaatatattatataattataatatatttaatatattatatataaatatttacatatattatatataatatatgtaaatatttatatataatatacaaatatctgtttgactgcttaatcagtgtcaggcactattccaggcaatgagaatagagcattgatctaatgacatcaaatattctgtcctcaaggggcatccgttcaaataaaaatgcgtcatgatattgtgttttagaggatgacaggtgctgtggagttgggagactgagactgtcaggagcgaggagggatggctgtaattttaaatagtggcatcatcaggatgaaccttgctggtaaatctcaggactcaaggacctctgctgagttctgcagcgtccccgacacggggagcaggagagagagtggtccatgggctgttgtcagca

SEQ ID NO: 4575 - DNA, 2300 bp, Homo sapien
acctgagagcagctggtgtaacactagttactgtttgtatttaaatattgtacattagaagacctttgaaaaggtgttttataatgtttctctttttttattttttagcacctattggctttcaattgttcttttttcttttattttcttattcataaatattttcagagcctgctctttcagaaacttttgtctcatttccaagtcagacaaagcaagttaagatactttacaaagtgctaattgaaatataattttaaattagagtggttatttgcctttgccttatgtcttcattctttataaaattaaactggggcttttttgatttggtaagatttatttcccaccattttctgttttcaaacttttgtcctttctggttattattcaacataacaaatgtatcttcttgaatgttagatcaaggcaatatgaaagtatttttattttaaattatgttttgaataaaataaatgatctatatcaaaataaaaatcttaaacatataacatgttttcatatgtagattaatagaacaaaaaagctaccaaaattacaaataatagaaccataatatatctcaaattattagaccaaaacaagttttaacatgtagatactgacactaaaattactggtgtttttagaggtttaggttgcagacagcctttagataatggttcaaggagagtagaagagaaagaatcacttttgaatgatgaaaatgaattcatgaaaattatacccatactttgtcctttctttcctttaaaacttctttacatactcaaatgaattattgagaacattagttagatcaccgaaacccaaaatgttcctgtttatttgcatacttgaattaatgtattttttcttccatttggatttatctcaataaatgctctttcattctgtactcttgcacatattgaaaattttgatttcaaatttagggcaagagtataatcgtaaaacctttcaataaagttgaaatggtaccagatattatgcatattaaatacatgagtagagagaggtgggagaagaagccattgtgatagggaggtatcagggtgaatgactaaaatgacccacagatctttcttttaccaatacatttaggaggaactcaatcagctactgatgactccactgattatgggctttctcaagctgcctttatgaagaacaggaagacaagatggtcggctcttatccctgaagaggaacttgatcctgatggaaacatcctaatggaaaatgtgggttgggatgggagcccgtgatgaagtggcagcttggcctcaccacaagtcattccagtgacatgcgtcacagtgccttccagctccaaattttcagaaatagttttgcatatggaaaaatatgaggtgacataaaatggtaacaaaggttctacatttctattgactcttcaaccacatgtcaattagggccaatatttagaacatactggatcttctgaaagcgtgagaaaggaaggtgcatttccttgctctccttgcaaaatatacatagctacgcatttgatttttattgggaatgtaatcaacagaatattttaataaaaaatgtgaaagcaggcagaaaattttcatatacaacatatatatataatatatatatgtagaaaatgtactttattatcagccatttcaattaccatggactctaaatgttatgagtttaattaaataaagatgagttttaaaaataaagaaatgtacacattcagcattttaaaaactatacttctaaaaactcttatttatagagatgtcccttaacatgcaagatatataataagcacttaggataggctggcaatggcaaaatatatattagtcctaagtaactaatacatatgtacctatacatactaactctcaaatgaaatgataaagactctaattgtagcaaccaaaagatctttccttgtttgaagattgattgaagagaatcctgacttatgtttctgtttatatgaaaagtaacaatgaagaaagagaagcagaagaaaaagtgcattcaaaatgctatagcaatcatgaggctctcaccttgcagttaaaaaaactccagcaaagttgagcttattaagggacaaaatggaaaatttggtaagtaatggaggtaaagacgattgataaccaaaagaaagggaaagggaagaacaagggaggggtgttatttaggatatgcgcagtgtagacaccatgtagctctgcttttagcagctcaaaatgtcatgtcattgttcagtgtgttcaaaatgc

SEQ ID NO: 4576 - DNA, 2300 bp, Homo sapien
ataattatagtgatgtaaaaatacgcactaaaaaaggcaagaaaatgtaacaatatgaaagacaattttgaacagctgcatcatcaatagaagggcagatcagaaaacaaaactattctttatgaagaaaaattggcttaattgggtagaataaataataagagacaatatttaatttaaaaaaaattaaaagttgcatagctatgcagattcaaagggcttcctatgtccagaaaattccagtcaggagaaacacactcaaattgtttttaattacagagagaaagtaaaaatcctactggcatccagtagatataaaacaaacaaataaaaataatgaaaatctaaagcaataaagatcctatgaaggaatgcaaactagcctacttcacatttctcctttgcacctttttatgtagattataccaacttttgcataattctttaggaataacagtattttttcttaggcaactaaaattcttagttgaacaaggacagtacaaacacaattcaaggttagtttcttttctataagtatctgtttatgattcaaagttaataagaaaaaatacaatttaagtcgaaggataggatacagtggctgtgaagcaaatggtaataagcacggagttcacctaagaaaaatgttaagtataaataattactgaagaatctactttagctaatggatgctgggcttaatacctggatgatgggatgatctgtgcaacaaaccaccatggcacatgtttatataagtaataaaccttcacatcctgcacatgtacccttgaaattaaacaaaagtttgaaataaaaatatattttaatacaaaatataaacagtaaaacttcctggtaaaatttaaaaaggatattgtaaaaattaccatttgtaaaaattttatcttgaattttcaaatgatattggcaagggcaatgttgcaggatgcttgaaaagaaagaaacaaaatacagtacatttctcctcttcaaaatggaaaacttaagcctggcatggtgagtcacatctgtaatcccagcagtttgggagattgatgaaggagcatcacttgagcttaggatttttagaccaccctgggcaacatagtggtaacttgtctctaccaaaaaaaaaaaaaaaaaaattagccaggtgtggcagcatgtgccggcattcccagtttgggaggctgaggcgggaggattgtttgaggttgggagttcgccactgcagtgagccgtgatcgtgccactgcacgctagccactaacaaaatgagacattgtctcacaaacaaaaaccaaaacaacaataaataacaacaatgaaggaaaacttcaaaaatatacaatgtcactattgacattaatgaacagaaaagatagaaacaatacatctcactcttaaatagcataaatacaatgttacattgttataggtatataacttgacaatcctaatatatcgccaaaaatactggatgcaaatgaaggaataaaattatacactcaaaagatgacaagaaaacaaagaacagttaaaacaataaaatgaaagcaagaaagcaaaataaacagaatggcaaaaagaataaacatattagttaataatgaatatgaattaacagaacactttgttatgtgaaatactgttacttgtattgaaaaccagtacctaattaaatgccaattttaggagacctactcaacaatgcaacgccaaacaattattggaaggtaaagcctttggttatatagacctattttacattatcttcacttcgttatgacatcctggaaataatttaaaagttataaatatacaacagcaaaaggaagaggtaataaaaggacaggagatttttaacatatttatggaggaagggaagtagaggactggcaataaaagaagcagaaagtggaagctggatcctagacacagagttccaagccggattctagatacagagcacctcattgggattctagatacagagcgcctgagtgggattctagatgcagagggtctcagcagatcctagacacggagcgcctcagcggatcctagatacagagcacctcagcgggattctagacacagagcatctcagcggtattccagacacagagcgcctcagcaggattctagacacagaatgccaagccggattctagataaagagctcctcagtgggatcccagacacagagcgcctcagcgaagtcgtagataatagagcgccccagcgggatcctacacacagagcgccccagcgggatcctacacacagagcgc

SEQ ID NO: 4577 - DNA, 2300 bp, Homo sapien
ccagagcaaaagaaaaatcaacatttactcagcgcctctatcttattggttatatgataagtagtgtcatatgtggcgtctcatttaatatctaaaactttttggatttttcttgtttttttttttccgtctttatgcaaataattgaaattcagaaagttttgataacttacccaagttcagaaagctaatgagtgtcatacttaggactgagctccaagtgtgtgtatgattcctcattcagctgcatcatgccaccgtcacaagacattttagagatggtcttatataagaacaagaggcaggaaactatcttcttagagcaacaagttagatgggaagtacagttgcaacgaaaaagcgatagctactgttacagtccagcgatattataaatatgtaacactgcacaggctgacatatcagaacggatgctaacctcaaactattgtagagaggtaccagagcctgcttgctagctacagccccctagccacatatcagccctgttaatagtgccttttaagtgaattccctctcttgacagagagcacaccctagaggctcagaatcatgtgcaattctccctttccagagcctctgatgataaaataccagatggcttacataaccagatgttttcctcattgtcctatttttctgttcactgctactcggtatacttcttgaatttgtatttctttatttatctccataaatattggcattttctatacttccagcctcagccatcttcagtattttacccagccattccctttagagggtactattctttcctaaggaaaggtgatcctcaactcttccaagtctttgaaatagggtctcactcagctgcccaggctagaggtcagagatgtgatcgtggatcactgccacctccgccttctggcttcaagcgattcccctgtctcagcctccccagtagctgggattacaggcatgggccatcacgcccagctaatttttgtatttttagtagagacgaggttttgccatgttggccaggctggtcttgaactcctggcctcaagtgatcctctcaccttggactcccaaagtgctgggattacaggcatgagccaccaggcccggacacttccaagtctttatttattaaactagtggtacccagaacactcgccattgcccctgcttctcctgtatcacccgctgctcagatcggcttttcacatctccctgtcatcagcaagttctctttggtcacctttctcaaagtatatactgaaagctctctatcattactgtcagagctttggacaatctcttgctacactaacatggataatttcagtagcctccaaacagatcttgttgtctctactcttgcacagcttaatccatcttccacacagctacaggagcactttctccaaagcacagaaactgctcatcagatacccttcccacttgctaatatgaaccgtaactgcctagaggtgagtttgtttcagtcagcttttttcaattcactgggagaaaaattagctttaatacaaaaagctgtgcataatgctttagaataggcaaggaaagcagtctcttttaaaagcatctgtcagataaaatgcaccttagcaatggcataaagaaaacatcttgcctgtagaagaaatttatgaggcaagaaaaaaaagatgaaaggaggagcctattgcagaagtaaattagaaatctaggtaaaagaaaaatatcagggcagcacctcctaaattaaacttaattgaaagagattaagctgaattaaaattgattaggccaagcctggcatcattatgaattttaataataataataataatattcattgaacacctagttgatatagggtaagacactgtcccttcccctgagtttataatccaaattagggagggagagtgagttggctgaaaaagtaaaagcgaaatagacttcaaggaaatgagttctaatagcactgactccatttggagagtagtttagtgttgtaatgggagtaagtaacctcacagaatgttagattctttgtaattatttaagggaggaataaggttctggaactttagccaatactgtagttactggtgaggtaaaaaagtgtcagtctgggtggaaaaggaaacaaaaaataagggaaaacagtatgagatatggtaaacaaggaagaaaactgcattattactccatttaatggaaaataagcgttcaaaaaacatgtagtttcttgtagatctttgcagtatcttaattttctaatcattaattctatcatataa

SEQ ID NO: 4578 - DNA, 2300 bp, Homo sapien
aactttataatcacctgcggagctagtaaaatccccagttctctggcctcacctgagactaattaattcagaatttcaggggtgaagacccaggcatcaatatttctttaaagctccccaggtaattctcctgcacgagcaaggctgagatcctctgatttagagagtggttctcacagggttggtagccttcaatgcagctggagggcttgtttaagctcagattactggatcccatccctagaattgtggcatgagtaggtctgtaaattgtattttaaacaaattctcaggtgatgttcttgctgctggtccagggaccacactttgagaacaattattttagaagaatccagtaaacctcagagaggaagtaaatcctgagggactgccattgatgtggtcatataagaaagataaaacatgctcctcagcaattctatgggaaaacaaaacaaagctaatcatctatatgtgagttatctagaaagataagctggtctaaataaataaatgttccagttatggaaaactgaagtcctgtagaaggaaaaattcaacaagcatgagaatttaaatatgagtgtatgcctgaaaaggagagaagaacatgattctgatttataatattttaaccgaataagaaaaggaggaaaatctaagttttaattaagtaggcactctcaggaacaattttataagtggcttctattatgagcattagtggaacaaaacaaaccagcaaatatgcctctaataataatgatgatgatgataaatttaaattggtcttggaatatattgcacaagctacatttgacttcttgtgttttcatgttctgtaaatgtaaactgttctgtaaatctgaaatattgcataacatataactaagcctcaaacagaagaggaactgttttatgtattgttctgctctatgtgaatttgtccgttttcacgctgtggataaagacataccagagactgggtaatttataaagaaaaacaggtttaatggactcacagttccacatggctggggatgcctcacaatcatggggaaaggcgaaaggtatgtcttacgtggtggcagacgagagaacggagaaccaagtgaaaggggtttccccttataaaaccatcaaatctcgtgaaacttgttcaccaccacaagaatagtatgggggaaactgcgcccatgattcaatgatctcctacttgttccttcccaccacacgtggggattatgggagctacaattcaagatgagatttgggtggagacacagccaaaccatagcactatgctaataccaagaatgaatagcattatcagtatggcgcctgccacaaagtaaacccagggaagagagccattaagcacatgctgatggatggatagacagctgtgtatgggaatagatgttttcatcttgaactttgaggttggttggttggttgattggttggttggttggttagttggttttctggcacatattatgtacgaatgtgatgtgatttagtccagggaactctaaactggttctcaaaagaagacttcctggacttgccttctctgtcacccagtccacaatgtcattgatgttcatcaggaaagccagaatctcagggaggacaacctgacagagtctacctatagggaagtgacaatgagacaagacaggcacagaactctttgctgtgagagaatccacgctgttgggagacagttctccatgggtctctgtacttctgcacatcttataaacagagacactggcaacttctgcttcagactatcttttcagggatgtttgtgtagtgaagacagattgtttccaggagaaggcagatttgtttgcccactaatatgataaagataatggctccctctggggcaaagatgggagaggcttgatggtggcccttttaaaagattggggtttcctaggtttggggttcctcaattctgacacaaacccagtgtatgagcagaagctgcctggtcctacagtcaaaatgatgtccaaaggaagaggaactggtgttagcacggagctctgctggctacggtattgtgagtgataaaatcctttctctttgatgcaggaggttggagtcttctgctgacatcaaggaagctgtgtcaggctaacttgttggcttaaagtaagttaaatttcagacctttcactgtgttaacaaatatcaaagcaacatctgtgcatgcgtggttaatgtgactatgtcgtaacagaagaaaagtagggaaaaaaaacaaactatgaataggggccatg

SEQ ID NO: 4579 - DNA, 2300 bp, Homo sapien
gtgtaatctaccactgtttcattaaagctgattgcataactatttgggaagttaacatggcttcttgagtacttgacctgccctttttttttttctatgctacagctgttagtaggaagtgagcaaaggcattcattgctgaacagtagtagagaaataatcctggtaaaggttataatacaagacaaagatggagtttcactctgtgcatctcagacctttccatttttaattggtttggttttttgatgagacctcaaatgacagaacaaatatttgacagctaaatttttaccaatttaaaaagtgaactcatatttatttaaattacatttttaatcatttatcttttgaaagtctgatttttaaaagtgaaatgcattaaagcagtgcgtccttgaatttaagaggttctgcaagttgtgcagaaatggtgaaatccatttaaatggcttgaggtagggataagaggtaaataatagtttattttaaaaagtagattaagcacaatcatgttatcaagagtaactctcttctgtgtctttggccactgttgaagaactgtgtacaattatatattttactccttagcaacccacccccagctatgggacatgacacatcagtcagcatggtcctctcaagttagggtagtcggatgatcagagaaaaatccagacttgcataggagcaccaatgccataaaccttcataaaagcagtgcttcagatcaagaggcaactttatagatgttccctactacaacagtcttccgatagctttaatactgaagtagtcgctaacacactcgtctgaaaagagcatttagaaaagaacaacaacacacacaaaaaaaaccttgttgaaaattctgcacaagcaatttacatcctgacagaagaaggatggggtttattctctttcataattcctctgctacacactcgcaataccctgcacgttaagtatcaggtttttcttgctaaaattaaagcggttttctataggagacaccttaggtaaaattggcaatggagaccaagtttatttccattatttttagttatttgcacaatacataaatacgaaaataaacttcttgcatttcgttgtggagactttttcatttgaatatttcatccttcctagaagtttctggggttgatgggaccttcatcctaggccctctgtcccttaaactattcttagtatgatgcacctccctgtagccctcccaccatccccaaaaaaagaaagagtcagagcagaagtggaaaccttactaatcttggtatttccatctctatattcccagaaatttcagtgtttaggaattaaaggaaaagacaggaaagaatgtgttttggagcaggagacaggaacagtaagaaatgcacaagatgtcactaaactgtcatagtaaaaatagtgttaataattatagatgtttagaaaaagaaaaaaaattacaccccaaacagaaatcaaacccaacatcatgtactatggtgtatcaattaaaatgaatgggagttacatgcaaatacctcaaataaaatacctcaaataaaaaatgtagaatacctttccactgatgatttttagttgtcaggacaagtgagacccaaacagcagacagaatggtcccagcatgcttgttgcctttttttgtttgcacagtggctgtcagttccagccttgcaggtagtggaacccagccggaagaaggggcgggacccagcattgcagcctgaactgagagcaaatttaaattactgagccttttttttcctttttttatttttctactctgcgacaaactgaaaagattccagcacgctaatttaaccaccctgcttcttctttgcctttttttttttttttgattttttttttttttctctccctgcttctaggataattaaaagagaaacctgtaaaaggcaacattcctgtgagcgagttggtgctgcaacgtgctggtaagaaaacgagtttaatttttttcatctttttttttttttttttttttttgctttttctttttttaaagagctgaaggctttgtctgtctaatgcagtcataagcgtggcttccctgccgtgaggggttagcgtataatgaaaaggtgtaatagcctgatgtacgaccttcgcgtcatacttataatggttaataacagcattcctgtctaccccgatgatgcttctctctgcaaatggactatttgcccagttgcaacagggctaagattgtcgcactatgacaatgagttgttgattgtttggagttgcggtgt

SEQ ID NO: 4580 - DNA, 2300 bp, Homo sapien
tttagatttgttttctctttagcagtcatggatactttccctaatggctgtgaatgactttcttcagaagtgcaactgtctctagactaaaattaaaagagaatttcatacctcgtacaaaaatcattgcctttctgggacttcaagcttcttcctgggctgtgttatcccactgtgaatctcagaccacagcgtaatcatgtgcaaacatttacataacacttttaatctccaagtacttcaccaaatgtgggtgataataatagcttttatacggagtgtacctccaaagggttccgggtgctttgataattaatgaaatgtttttccctttagaaagttagcaagagagtagcaaaagattataatgaaatagtgtccgcaactataatgacatcatcctcatccttagcccacggcaccagggagattcaggtctggggaagggagggaaatgagttcttaacacttagagttcagggttaatggaggaaaagggtgggatttggcttttggccaaaggacaaaaggacaaacccatttttgtaaattatgaaataccattttaaagcagctgtcttttcaaaaactttttaaaggtagtcagtagaatgttccttcaaataaaatcttgtaccaagcccaagtacagaaacagatacagtagtagctgaagtgtattactaggtactaggaacggttctaatttcattaggtgtgttgattcattcactcctcataaccaacttgtttatgaggtaagttatgagttgtactccccatttgttaatgcaaatgaagacatttgggtgtggagaaattaaggaactggtctgagctctcagggcactgaacttagaagcgatgcctgtggacctggcgagtaaccgccacacagcacttcttccatctgcttgggggcttttcaaaagggatttttaaagtcatttccataaacggaaaatcagcttcagtggtctttggtagaaggcaactgcggggaacaactaaaatataacaattattgttacgcccagacactggggtggggatggggttggggttaggatcaggatagggatgggtaagaggaatccctgagtctcaccgattcactcctaagaccctatagagaaaccctagagtttaggaggataacgtttgaaacccacttcccaaaagtatttagagaggaaggagagaaattatcttttaaaggatgcattgagtccaagaagggcagaatattttgcctttttcttaatttcaaagtccaagtgtgtgtgtgtttatgtttacatatactggaaattaattccatgctatcacatactgcaaatttctttttccttttccctaagtatttcattcctgatttcaatggatcacacctaatggatctgtttcctactaagaaataggccatcaagacaattaattcatcttcaacaatgagggtgcttcctaaacacaaacaaacagaaatgttgccttgttcaaaactgggccaactatttatctgtaacacagaaaggcaacagtaaattttctatttataaaaatgagttaggttcagccttaataaacttcagccccaaattagttttccgtcatgtcactctataaattgtaagagttcattctctttgtcttctttttcacaattttgatacatttacccctttacataaaaaaaaaattttttttggcattcataatgattcttaaagagtcacctctcctgagagttccctgttaaaaaaaaaaaaaaaaaagttgaatccatataatgcaacattcgtgattgtcctgatagtaccagcaacaagtctcgtcactttccttttcatagagctaacatttctgtgatctccctcccccttcctttggtttcttcggtggagaagccaaaaccacaacccaattccaaacaaaaataaagcccactgtttgtacctcctccatccaagcaaacccaaccctctgagcctgtggtttccgcaagtactggggttagagtcatgagggaagtgtgggaaaatgtggagtgtcagtcaagaggcaacactaggaggcaaggaatctgcatttctttcagaccttggcagagagcgccctgggaaatgcggatatagaaggtcaggagaacatctctcctggttatacagcattccaggtgggctttcatgtggttgaggataatatcattagcaccaaaggtgaaaatccgtggaagctcatcttatttcagcagaagagtaggatgggccttgtggcacgagtaagccaaacaagggaaa

SEQ ID NO: 4581 - DNA, 2300 bp, Homo sapien
ccctctatagattttgtaccaatttatgctcctatccacagtgggagaggggaggctgtttctcaccccatcatttacacaatctgttgtcaaattttctgacttttgccaatctgatcatcaaaaagtggtatcacgatggagtttaatttgcatttgctttattaggagtgtgtgatgcatcttttcacatgttttaaaataatttcaataccttttcctgtaaaatgattattcataccctttgcctctttctctatttgtctactagtatttgctattttgatttgtatcaacccttgatatattttcaatagcaggcctatgaaatagaggaattacaaattttttttctggtttgtcatttttttttttttactttgcttgtgatgtttttgttctgtatattttagtttgccaagcagaatttctcaaaatgtagctgaatttatctaatttttctcttacggcttttgggttttgtctgatggtttcaaaaaggctttcccattctgatatcatgaaagaattctcccatggttccttctaagtttattattttgtatttttcatttaagtctttgatccatttgaaattcatcctggtggaaggtatggctctaacttctttttaactgggtgaattgtatttttttacacttagagaagaacaatatacaagaaagtgtaggtaggatttataacagcagtcttgaagatttcaagcaaagagaaaatgaacaattattcttgttagataacttcagcagctaaatttcttttgggtgtgaaagcacactcaatattcttctccctctccttaccagttgtcactcatttaccaaaaatattaatctgaacagtgaattgagctaaaaattatagatggtaattatagatggtatagagtgaaagtttctgaaatgacatgagtgatggactgtattttcctcccttgccacggaattctcttttgtgggcatcctatctccttgattttcaatgctttaaaagcctcaatgcaataacaatataatcataaaagctaattagtaaagattttgtgtcttgttaatgatgtacaattgattgtggctcgaggacagaacgagagtaaccattcatccatgatgagcattgcattttatcttctcacaatgtgaaggtgatggcatttttatgactgtgtttccattatggagacatctgaaccaactcaccaatctgttctgtagcatcatcttttactacaagcaaacctgagccctttaaaaatgtagagataattctggatgcctgattacgggaggaatgaggaaaattaattacatatggaccaaatggtgaaaaacagtcaggcatcatttatctattctatctttgcttaatttcctttttcaactacacttctctcctataaggccattggccataattacattatacaaatggctgattaaaaataaacttaaagcagctccttaaataactacaatcccccacctctttttttttttttttggaccatctcatactcattaattctttataaataaatatatgtagatagacacagacatgcacagatgttaaagtatctatttatatagagaaggaaacaccctgtggagactctgggacttgccaggaaaagctactctccgggaatctattctgctctaacttcctctcctgagtccaatggctggaagccttcattcctgacttccttgctcgctcactgtctttcttctcttttcataatttcctcctccacctcaagaggctccagccctgaagccatgcacgactgtagctcctatctttggggtttggtccaataccccatttttcaaaggcatgggagtccggctcttttcagagttggtctggatcacagagctgtgatgagaaaagtgcatcatgggtgcggaacttcaggggggaaggataatgagtttgttgtgacgtggttattttcttagatcgtacaaccaacgtggtaatgctggcataataattcccggttgccattttctgacatttgaaaagatctgaagatacgccccttggatgcctgcagagaagctctggggcttcagtcaatgactcagggtagccaccgaacatgatgctcgggcagtgggtgccacctggactccactctcccctctctctgggatcatagagtccaaggtgttctgtggcctctcggccaatcccagcagctcagcgtgcagaagaccgaggagccattggtcagtgtaggaggtgcctggagttttggagatgggatccac

SEQ ID NO: 4582 - DNA, 2300 bp, Homo sapien
aatatttaatggtttggttcagttccagtccttactaccatggatccacaatttatttcactgtaggaacagccccatatactacaacatgggcttccaatgttaagaatttacctttggataagcaactgcattattgttgtacgttagtgcttgcttcatagtttagcccccattagaaactgcatggaaatatgcaaaaagggctttgtgtccgagcagcgtatttttacttttctctaatggacaaaaccggtggctggtatcagtccagttatcccatttttaataatatttacgctgactgaacacacccagtttcactacaagctcttcacatgctttaaaataaattagcatttgttgcccccatttaaccgctggagtaaagagagccacagagaggttaagagacttctgccccagcaccgagcacaagtcacaaggcgaatgggctcaaactgtttctccctaagatctctctggttccaagctcatttacatgatgcttttcttacttcaaaagaacatcttagattttatatgatatcattcgctggcaaggttgttcatttttatatattcactgtaactttcatatgttagaatgaagcaagaatatgtaaaaaaaaaatggggttgttttagggacaaggctctcatttcatgatctgatttttgtcaagtgactcatcacgccttcttgttgccctctagaaatagggatggtgagtgctatccttcgcttatttgccatagtccagctgatacatcatgcaagatttctgtgcagtggagatttaaaaaccttcgtctccccctgcccagagaacatgttcatttttctagctgtggatcaagaccaagttcagaggtcagagacctagcaagaaattggagtgtgttccagatcttcaaataggtggggaacagagtccaccattactttcctcctctattattatccccagtaatgctttgagtccaggttatactgaggtgcatgttggagaatgggagcgggaccaggattcagtgacccacgtctgtttgaggctgttctatgttgttccatccaagctgagcgcattcttggcttcaggtcagcacacacctcctggaatagtgccttagcttgcacttttgatgacggattgctcagtccttagcatctcttctttcctgtgtgtgtgtgcgcgcgcgtgtgtgtgtgtgtgtgtgtgtgttgttattttacttggctaatctgcgtagaatttttctaattccaataaacagaagtacaatgtatatttccctggttaactgtacatgcgaagcctggtaggaaagcagatttttcttattttagaaaagagcaactcattggtcttttgcagatgatgctcctgtgtcgatgaggactccagtgccaccaaacaatctttgcattgcctgcctcctttagataccctcctccaggtgaatgacgctctgatttgtgagaattctggtgcgcacagagttaaaatatttccaaatcctcgatctctatgctatgcatctatgactcagggtggggctaagggtcttgaccttgtcactcttcctgaggacaagacaagaggagcagatgaatccaactgtgaatgcagtgtcccagaaaagagaggcaaaaatcctttttagcacactgacccatcccaatctgtggttactcatctgcgatgcttgctggtagttttgatagcaaaaggcaactgggaaattggttttgctattaagtgtgtaagaaaaaggtaaatgagttccttggttgttgttttttttgttcccccaatttttaaagatggtaattaggagaagtaataccagccaggcttgagtgaatgcagacaagacccctataggcagcacagtgtattagtgtaataatatgcatagacaacataacttgtcagagaggattatttctacttagtgaatctgcaggagcccccttgctctactattcagcatttgactagggaagagagtgggaagacagagagagagggagagagagagagagagagagagagagagagagagagagggaggagagggcgcgttagtgagcagcgactgtggcattgatgtttgagcatacttctgaactggcttttgttgagactatcagtatagaagcatgcgctgtcccaaatccgctgttactatgagaaatgaagagctgcttttaaggtatgttgttgtgtcctttgtttttaatgcacgcttttctagtttctagagctggctgagacaataattatgctctgaat

SEQ ID NO: 4583 - DNA, 2300 bp, Homo sapien
ttaaagagaaaataagtatttcagaagcgtacatgttaatgaaacatgttctaccttatagaatgtagatatacatgttctaccttacagaatgtagcctttatgctatggctgattagaaaatatttttcattttgattaatgcagttgtgttttgcttctgttttggaggccaagtctgctcctttcttaaaataatttttatatagtcagctgattatatacattagatatttatgcaaataacgtatggaaaaccaagaactgccaaggtttgtcttcatttatccagctaattattaagataattgaagaccaatcaaaatcctgtaatttcaaaggcagaagagtagctggggaataaatgcagcttagtagtctggggacaagtttggccctttgggagtataagaattcactcgattgcaaccattcctcagttccttaggagcccagacctggttcctccagtaaggtagtatttaaaaaattaaggttagtttagccctacatctaatgatcttggaaatagaaggtcaaaagccagatacattgttcagctgaagaaggcaaccaagtccattaagcatgtgtggacttaattgaatatcccaggtctgatactttgtattgctcaatgcatcaaactggatttaaaattgatatgtaagtgtccatttgccttcataacctctaaagatagttagctgtcatcacacaagaatctggtgagaaataattaaaatcatattttgtctatatcatgtctgatacatttaactatttgtaacttggttgtttaaccctctggtttgtgtgatggtatcctcaggcataatttgtgaggagaaagcccagcttcctagcacagttctgatttttagaaagacaaagactgaaaattacatatttcaaacaaaaccatgtgtgtgtgcgtgtatgtttgtataggtatatggatgtatagctgtatagacacatacattaccctaaaagtttaagatgtcattacaaaatcaagtgaaggtttctctaagaggtaaactataaacttttggtacgcaatttatgatgttgattcagaatgtgaaatatgccatgaagtcttacatacttgtgactacactgtgaaaagtttgccacccacataatcaacagtgagaacgatcaattagaatgtcaccttagaaacgaattagttttccagaacttatgcaaatcacttaaaaattaaactcgccagcttctctgttttttctgagtttggccatttttctcaattcttgttagtaaatcagtcacaaatcttaagtggatatttaagcttcatggcccttacattacagacctaacactcgtgaattcactcagctggtttctaattattgtgttaaatactaggaaatggcagattcatgattatcgtttgtgtagaaaacgtgatttatgactttattttcagccgcttatacttcttagtgtttgcaagatgacagaaaaggcagtgccatcgtgcagagacaggtttgtcttccttagggcactgcgataagtccctaaatgtcacttgggtcatagatctgatctttattttgcctaaacctcctatatcctttcggtgatcgcccttagttcctgcccgggcaagcacaccacaccgaggagcatcgaagcgaaccctcgggctgctcgcctcccgcggctgggctctgggagcgcggctcgggtatggaagtggagcgggctttggcgcctgggtggccctaaacctactccgagcggccacggcggcctcttgccagggacccccgggcgggggagcagagccaggcggggagcgggtttgccttcgggggcccaggggaccctgagaagtctggccgtgcccgggcggtgagcgcggaggcggcccgccctgtgtccccgcggggcggagccgggttcggggccgcgctctgggccggcgggcccgcaggggttaagcggcggcgggcgccccgcgagctccgcccccgcccgccgcacctggcgctcggcagccggccgccccggcgctggatttcggaggggattggcggagcgcgaggagagaatgtgacaagtgccggctcggcggccgccgggggaggccgcgcgcacctgtccctgcccgtctcgcgccgcccgcggccgctcggacgcgcgcagagccgccccccgccgctgccgccgcgtgcgcccgcgaacatgacttctgccttcaagctggatttcctcccggacatgatggtcgagggccgcctgctcgttcctgacagaat

SEQ ID NO: 4584 - DNA, 2300 bp, Homo sapien
taaaatatagcatagtattcaatccccaagtatttgtcaaatacttgggactgcagtaagtgtgaattcaaactacaactaatcctcctgtggacaatgttgccattcctccagtcttctgtagggtagcatctaagcggccaaactctacagaccgcactccaaaacatggaggtggctattggtggatgagaggattccttcccagaagctcacaagtgtgtggtgtccacatcaacacacacatctggaatccagttctctgaagaatttggggcccacaggccagtttagcctggagctgcccccctaggagaggcaggtgctgctggtttgccacagccccccagcccccttcccaaaaccagcactgctcaccaggcctcagggacacctgagttggccgccttgcttctgccgccaatcacttattgctgggtggggacagctaggtaggcagcctcctgagccgctgaggaaaccggtatccacgcagctcccttagtacaaaacatgttaagtcttacttctttgtttttgctttaagcccagttcaagtgggatgtctggaagggctgggctccctctgcaatctgctgggcaccagcaggggataacaaggcagggaagggaagcactggagctctcccctgcaggcacaggaggtgccccagcagcctttctgcagagaggtttagatagtaagtctgagctgagaagtagcctgcacactgaagcgtcattgtccccaaggactacaccactcagaatcccatgctgggtgtgtaaacagaaccacaactgcaatgccctttccctcctcaggtgttagctccttccgtaaagaccacaagtacaaatgatgactgtttacttcatagagtattcattgttctctttatgttaatttttcatccttgcttaaaatatctacttcaaatgctcagggaattccaccctggagggtgctgggtccttgtccccatttcgtagttctacagaaatgaacatattgttcctgtttcaagactaatattaaaagtgtcaagatgggctgggcgcagtggctcacgcctataatcccagccctttgggaggctgaggagggcagatcacttgaggtcaggagttcaagaccagcctggccaacatggcaaaaccttgtctctactaaaaatagaacaattagccgggcacggtggtgcatgcctgtaatcccagctacttgggaggctgaggcaggagaatggcttgaacctgggaggcggaggctgcagtgaacagagatcatgccactgcactgttcagcctacgtgacagagcaagactccatctcaaaaataaataaataaataaataaataaataaataaataaataaaataaagtaaaataaaataaaagtgccaagatgaccaagttctgggtttggatgttttctgccttaagcttgtctgtaaagtgggtaataccttccaaaaatgatcaagacatatctgataatgaggccatgtgaaaatcataaaaacttttcatcatttctctgcaatatgaagccctggtacccagtaaccacattctatcaaaagagccaagtgaatacctgcatagctttgattttttgttctcattacaaagaatctctaagtgaaccagacactatataatgccagatagtaagtgctatgaagaaatctaaagaagggtatgaggtggagtgtgactggggtatcgtattccagggagtagtggagactggagcagaatctctatcaggtgggggagcctgcaagctctgtggacatgcagcgggaaagagcacaggatcccagagcagagatgtgtgaaggtgtctgaggagcagccagggtgctagagcacacagctgcagaatgacctggctaagagaacacaagatgaggagaacatttacattgagctgggggaatcagagaaggaattaggttaggtatacgcaacccaaaatgaaaacccagtggccacctctggtgggcaattgaaaaaatgcaaatgatgtcacaaaaggcaggggctgaagacacatctaggagtcactgttgtcttggagataatcaagtcatggccaactcttctggaagggtaagagcaagagcagtgggtatgtcttattctgcttcaggatctgttctatgattttacaaacaaaacctcccttggtctccgtaacaccactttgggataggtaacttaattattccattctacggatgaggaaactaaacaaactgatgaatttaaagcacaggaagcaaactgatg

SEQ ID NO: 4585 - DNA, 2300 bp, Homo sapien
ggatgaaatactaatgtacaccagccacatacaggccagaggcatgaggcattggccggctcctctacttcccttacttgatgcatcttggtgagtttatatttttcgaaaaagagtaaatggcctcttatttgcagaagcattgaagactgcttgctctagaattctgacactagaactagtacaatgccactcccttctccattgtgttacattatgtgctccgcagatgaggtgcggcagccccattttttgaacttctgttttctgttagccgagacctgtggcaataccttcctcttttcaatctagctggttgtcaacagcagtaaccacaagtctttcctgtcccagaaataagtcttgccacactctcaacccccgacagggtgtgaacatgacatgctgtactgcaaggggctccactgcctccaccccgctacagccacagacccacagggttcaagtgttgattgaattctcaaagagcgacttaaaaaggataggtgcataagaacaagataaacaatctggctctaatataaacaaggattacattacaccaaaattgttgagagaagattttgtactcagtattttattcagcagaacattttttataacaataaggttgattagagcaagctctgaaaatgcttcaagttagacagtctgattgtttatttcaaggataaaaaaataaagtggtaaaatagggggatacgaagaagtagaaattgaaaccaggacctagcgaagagtatttgacatcattttcctctctaggttgaatctcattcaggatttttccttaccccgtagggttttggctttttaaccatgagtatcttgtttttaggggcttagggccatcctagacccacagcagatttaaagtgctctgatggtgtatttgtctggtgtttcattttaaccaagtaagtagctctctgtaagatctttgtctaccttcttggtagtaccaggaagctacagggagatcacatctggcccttgcagtttagtattagttagcatgtcccctttctgacctctctgctttttggggtgggtctgctcatggaggaggctctgtaggggcagcttctgcctgctttgtttcggcgccttctattttcacaggctgagaagctggagcaagcgcgcagtgctgcaaatgagctgccgagaggcattcagccttgtcacttggcagagtagctgggttcagggtatatttggagcgggggtagggggcacaaaaagggtacatggttttgctttactgtttattcctgctcaaaggagggtgggggcaagtgaaaaagacatgtcttcatcatcgtattacttgatggtgactagaagtgcgggctgtacacagcattctcttccaaatggggattttggaaacagcgttgaggaggactgatatgcaaaagcttatggttgtgctctctgtcagccccaaatatttactgaagctgggagaagaaaaggcagactttctttttttctctcccaaacgtgtgattgtttagaactcaagtgcaacatctggaagtcagatatacagagaacaatttatggagtgtgagagatttgaaatattcagtgtcttttagtgggaactcaactttctggggctgcttttttttttttttttaacccagcacaaagcaggcaattctgagatctcctttgcctctctgaattaaaccctttgtgcctgggtcccataaacaatgtgctttttaaaggggagccccctcccagctccggcctttttctccagcgtgggcagccaatcagctgcgcagagctgcatagctggaccgctttccattctgagtagcaacaacgtactaatttgatgcacacatggatgcctcgcgcactctgcaaattcatcacccgcatcttgcattagtcatctgacggactgccaagtgtttcattttctttccatgtgactttattattaccacctctctcctctcttccaaaaacctcccaaaaagggcggtggggcggggggcggggcagggagagggagagaaatccagcagacatctagctctgcctttctttcccagccacagccagggtagggctgataaggcgctgatgcgttgatggcagccttgcagagctagacctgcacttaacttgcagctgcctcccgagcctccaagatgtccacgccctgggtgacaggcggcagggcgctgccccgtgctcccccggctctgctcgacagcagcacgcagtgagagcctcgccgccgccgaggagcaact

SEQ ID NO: 4586 - DNA, 2300 bp, Homo sapien
gagactttggtgctttaaccactgtcttctcctcagccctgcactttacttagggttaattcgtttttttctctactgctttatcacaaacatgacacttagcaccagaagttgtcaaatccgctgctgctctgtggccctgtgagtgagccacgccactcctgtagtcagcagttgttcatcagttaccgtgtgccacgcatgttgctaggagctggggctgcagcactgaatagaaaaaggaagaagaaaagaccccaagagactgtgtctctgaccttgtagaactgacattcagtctactgatttaagtatccagaagtcacttaaacattgaacttggatttctgcagttgtaaaatggaattgatggtaactgtctcacctaagttgccttcccctgagcccaagactcaaataaggtgtttgtaacagtctctgtaatgatagaatgcctctatgaaatgttgattactgtttgcacccagaggtggtctcctggcctctgcaggctctccatggagcgtgctggcctgggaagaagaccacttcacccaggcgggctcctttcagcccttgtgctccagaggtgcgtgcttgcagtctgatgacttccttggtgggagacacgagagatgactcttgtattttgggatgaatcctgttggtacaagtcatctcagagtgtgtggccaccaagaaatgttccctgcctttggctccatgatactctaaactgtatttagagtattcaggacaaggaccatgaagtgaaagtctatggaaaagggtttgtctcacttctgaacctttggttgtagatatagaaacatgacaaattagccaaattgaaaacatttgacctgaaatatcccagtactgaaacacaaagggatttttttttttttttttttttttttttgcattttctgctgtgcaggtattcatttgcctcagagaaccctttctacaggcagctgccaggagtttgcagagtgttttgttgttctttctgtccagtgtccactgtggtccctgagaatcacatttgctttgggtctagaatcacagcacataataaaactgtcatgggcacacccaatgttgcatgatcacagaagccaaggaggaccgggcaccgttatttctaggataagacggttacctgaaaatgctgtttttcaagcagcagcctggggtagcagttatgaactatttggagaagcctggatttgacccgactccacgcttgttggttttgtccttgggcaagttatttaaccttactcagcatcagtgtctcttcagctgtgagagggggctacagtggtgtcatctgaacacttgttgtaatgcccgtcttacaaggttatttgaggtttacataagttaacgtctataaagagctcagcataatacccggcacgtagcaagtatccagtgtgctaagttctgctaagttaacactgttattccactcaccgaggcagccttttcagtgcactctgagcagcagaggccggcctgtccaggcctgggctgtttataccgaagcatagctctgtatgtacaaatcaaaacccccaagtcttctagttgggccagtgctccttttgctttgcggattgaccttcattttctgaattttcagtaagaaaagtccaaaaatataaatgagcggaaggctgcttttaaatggcttttctttccagaggcccaaatggaacctcaccttgcacagacatgaacagcttcgaggttctctttggacctgatggaggaatcaggaggaatatgtagttttctaaagcgagtgataaaagccacaagccttttctaatttcacatggcatttttgacaggtaagcatagtttcaaaagctcaaagagcacaaagatttctttggctcagttgctctaaatagctcctgtagttttgaaagaagtataacgagctctaattgcacttttattgagtttgctgacatttatggatagcacaaaggactcatcacagttagacagttactgtcttcattatcactgtgttcagatttctaaaactttgtatgtgctgagccagaaagagctgctaatcatggattaattcatgatggacaggtgaactccagaaaagcagtcacccttggcagctttcgtccatcgagcgattctgagagagggaacctctggggtgagccccgaaacgttaggttgcgctcagatcagccctgcactttgggatgtcactgagcagacttcccgagtctccatggcttcctgtaacctgccctttccat

SEQ ID NO: 4587 - DNA, 2300 bp, Homo sapien
ttatagaacttaattatggcagggggtgagcagtgagaggatatttggggattgcaagaaaggtgatcaactttcctggacttagatctgcagagatgccataacccttcagaagatgtagctgggggaaataattaaaaccatttatttatcaacaaagccagagtggtatataaatatacaatggacaagaacttcatctgaagagatcgatgaaaaattaaattagaaggtaactataagaccaagtgagaaagactgaaataaataggtttttgcttttgtttgagagagaggggtatgtctgtgttccccgaatggagtgcagtggctagtcacaggcatgaccatggctcactgcagcctcagctcctgggctcaagcgatcctcccatctcaacctgccaagtaactgcgactacaggtgtatgccaccatgcccagctttcagttttttttttttttaaacatgaataacaaaacaactgctttctgttatgacatgggttcagttcaatttgataccttctaaccgtgctctagaggccagtgctgcctgttgggctgggccctgcctggggccaagggcggcacctaccttccttctggctgcctgcagcgctctgctgctgcagcaggctctggctgtacagagtgggcagcgcggcggctgcgtactgttgaattcctgagtaggcctgggtgagggcgtccatggtgccagccgtgccattcgtcaagcctgtggcgccaagtcctccattcagagccgccatacctgagagcatttgagcaactttacaaaaaacccaacaatagagaagagaaacagcacttattcattagtgctttccaaaggaagttagagaatcatttaaacacagtacaacagcaagtacatgcagctagcacacaattacactgacaggaaactaaaaatgaaaccatgaagaaataaatcgtgataatgggggaaaatgacctaagccatgagaaccctcactccctaggccagtgattcaaatgcactgtggcacgagttagacgagacagctcaatgccatgcagcgtgctactggcaagtaccgttgttatcttttggaagtaaaagccttttgcttctgggagcttaggagcatgtaaaaaaaaaaaaaaaaaccttagtagcagaggcctgtaacatctgtacactgaaatccatttactgggctctttgaggaactatgggatagcttgcagggctgaggaggaaaggatgaaataaaacttttttcccttaggccgtgtgatgaggaaatggtggagaggacaagttctgtactctcggaaccagtggacctgcagtttgaggagttacagtgtgggaaaacggactttctaaacagctgaatgatgatgtcagggactaggaccttaggaataaatagcctggctgatgaagaattgaggcacagaagccatgtggacccttcccacagtcgcagagagctgaagctactcgttcggtatcaaagtggtgcagttttcagcagcaaatagttattctgtgcgtgcacgcatgcacacatgcccaagtggcaactggggtttcggccactgaaagagctccaggtcatgtttttcagtcagccggagacagaggtgtgtctatgggctggaccttggctatcacctgatgggaacgggatggtggccagtagactcgatttctccccttgtatcctgactgctctttggctctactggggtggctgactgtcacattttccctgaatacggagtcaaagcaagcaacactttatagagtgctaactttcatatcaactcaggaaacggaagaggtgacatcacaattgcctctgggtccctttatgatcacagttctttaagaaaagatgtttctgagaagagcttattgaaaacattaatgaaaatctcaatgaaagtagggctattgattggagatatgaaaacagcaaggatggctaactgaaaaaataggtaagaagtctaatgagaatggaggacagctaaggtaaggctgcctggaaacaccagagaatccggcagcagagtgacctccacacgcccagcaacgctactgccctaacagagcaggtggggaatgttctgtttactccacttgtgcttctatttggccaacttcgcctcttcaattaaaaggacacatgtaagatatgaattaggctatagcttaacagtggaggactgtcattgtgcctcacctcgggtattcctgtgcttctcagaacagacaccaagcaggggtggcgagacga

SEQ ID NO: 4588 - DNA, 2300 bp, Homo sapien
gtgagataaggaagatgatgattgaaatttatgagacatgaatttagatactcctctcttccctggccaggtatggaggaaatagttgactgagaggttaatgtcctgcttatctccttccttgcagaaagagaaagactgggagagaggaaagctaatggaaagttacctgtcaaaacagtaccttccaaagatcttctctccagaagagaggaagtaatttctcaggagctggaaacatgattggaaaacaaaggcagtagatacttaacacttattacgtgtcccaaactgccctaggaagtgggatgaggcacagagagaattggggaaacttgaattgaggagttagatttctacttttatttgtttaaatttacatctacagaaggattcaagatcacagttttgacttgaggtttaaaacttagtctttgacccatctgaactcttactttgatttagtttgtgagtacgaacatattctttaaagataatagggaattaggagagtggtcctcttttgtcctctctttccaagtattttctcactgtcatggcttggagcactgatttctgaacctaacacccatatggagcatacattatgggtggtatatatgtacatggtgtagcacgtcgtgtctgaagagctgaaaacttcaccttgaattttaaaactagacatttttacagacggtgcttgctggagagaaagcagaaggctgatttttggatcggtttacttgtaaccttggttgattcactgtgctcagttgtccagctgaaaaatgggaaaataacaagcctttaactgtctgaaggcaaaggaactgcctctgatttgctctgggatctaatattttatgatatgttaaaaatgtcaaaataattcatgggaaggaaagaaaaataggagaggaaaattggcagtacagtaagaggaacaaattgctggtggagaatcagtttaataaacatagcatttagccatgttcacctgagtgtcatttttctcttttagttaactctgtaggtttactttgagaagggctgctatgggataaatagaacatataacaaatatattaaatattaattcagcatttgttacaacttggctgttaaacatcatatggaaggagcagtggttatacttgttttgaaattatctggtccatgccgctggatgttgagaccattgaatttacagactcctatgggaatttctagtgtgcatgtgaatttagacttctattcatggactgggatgtcagaggtgtatatgtgaggaggaggacaaggaatttataggatatttttgaggcaccatatcttttatgcaaatctgggagcttagagttagcaagatagattttatttttatccacattttattttccgtttcaaatacaaggtttttgagaaattggaaaaaagtattaaggctttcgacagtgcagggtattttggttgactacttaaaaacttgcacatagcatctgtgatgcactgtgaaaatttatagcagagcactttattttttctgtcatggcttttgtgagaaaatgttttcactttgcttagtgatttacagaagattacccacattttgttttgttttgtttataactagttaaggctgtgcatagtaatacattttggactttgaggatggggctttcacacgtgctgaaatcactttgaatccatcatttcaagaagatacagcctatcctttcgttgtttcttattaactgcttcagagccttcatggatagctaggcaaagcattcatttctctgaagttgaactgtgttcgtgcttgagctttctgaaagcagaaatgagcttctggtgatgaaacctgttggatttctagaggaagcagctggagtctttggcttgttaactagcaatgattcaagtcttgcagattgtaaaggagctggtgacaccatcaaggcaaaaagcagccacagtgaaggaaggtaggattagcagaatgaacaatcaagcactttcagggcactcagattttgctaagtatggacccaaggatgtgctataaaaaggggttttgagtttccgtgtatgcttttgcatttctgatatattatggtatctgaaaaggatcaggtaatggcataattgttaacatgcctcattattactgtttttgaacaaaaattagggggatattattaagaggtacagagtaaggggaggttattgcattgctgctgtaatagtacttttcatgttttaaagatcctcttgcattatgtattttggaggta

SEQ ID NO: 4589 - DNA, 2300 bp, Homo sapien
cgggttcaagtgattctcccatctcagcctcctgagtagctgggactacagggacacatcaccaagcccagctaatttttttatttcttggtagagacggcgtttcatcatgttggccagactggtcttcaactcctgacctcaagtgatccgcccaccttggcctcccaagactgatgtctcttgagcatctctgtggttccaaggtctcctttagtgatgggagaccacaatcatagcaatttaattcagtaagcatttactgaggactttttatgtgcaaagcaatctgctgggtccagcaggggctacaaagagatacgagtgagggctctttcctgtcaggaattgagaatagcccagtctgggtgattgctaacctgggaatcctgtaactttcggagaagtatttggttgttgaaaataactctggtctgcttttagcccctcaattcatgtattaaatgagttatgccattttggtatcaggatcctaaaaataaatactagtcttcagaaacctggtttaaatgaatgaaagaagccccaaaaggaagtatagatttgtattttcttaaacagcgtatacacagtcatgtgccacataacatcgttttggtcaacgatggactgcacatacgatggtggtcccataaggttataatggagctgaaaaattcctatggactagcgatgtcatagccatggtaacattatagcccaatgtgttaccttgtctatgttgaaatacacaaattcttcccattgtattgcacttgcctacagtgttcagtatagtcacatgcagaacaggtttgtagcctaggagcaataagtcacaccttatagcctaggtgtgtaggaggctctactatctaggtttgtgtaaatatactctatgatgttcgcacaatcacgaaattgcctaaggatgaatttctcagactgtattgctgggtatccctgtcgttaagattaccacacttgagagctagaaggagccttagagaccaaacctaatctgagtcacagttctcaaagtttgggtgctagcaaagagcctgtgaccctgcctcctccttccaccccttctgtgagatattgggcgcagcattcagtttcttcgtgtcagttttcaccagctggaaaagagagataaaaggcacagtgcagggttgccaggttcagtaattctagttcctggaatcaaggacaggaagccttttggttacttgtacaccctaacttttctagcttcgattgaatcaatcatttaactgtcagctaattacggctttgggaagtttacatcattcatctttttatggcaccccttaatgggaggctttggagattaaaactcttgacaatttccacgatgtaaaaaaggaaagttgacctacagaaagatgggacagtgatgaacatttgagaagcttgaagcagcaatgggatctacacagtagcctacttaaagtagtgctgatgtgaacgcttagcctaagttcctgaaaaatgacagcagtgtcacctatgtcagtagcaatggcattttattgagctttgcacttactaccaagcactcgcttgttccaggacagccccatgaggcaggtcctattatcattccactttacagatgaagaaactgaggcacagggaaaagtgtccaagggctgacacctggtaagtagttgaggcagaaatgaaaaaaaaaaaaaagccaggctggctccggagaccatcctctcgccccctactcagctgacctccctacgtctctgctatcctctgacctgccggctggacacgccaatgtcgctcgtttgcgtgccccgaagccccgctttgggtcctgggcttccagcgcccgcttcccgccgaggggctccgggcacctgcagccctgggcgcgcgtccccgaggcgggcgggagcgcgcacggcgggagtgcgggagcggagcgcacgtgccgccgggaaggggccgcgccaatatggcggcggctgcggccgctgcggtgacggttggcggcggccggtgaggcgggcggggccggaggcgcggaggcggggtcccgggcgagccgccctgggaggcgggggccgtttccatagcggcggcaggaggtgtcgcgccggggaacttcctggttcccgggctcggcttcgccgggatcctcttggaagggaaacaatggggcggagggcactgcggtagccgccgccgccgccgcgccgcgccgcgccggatctgctcggccgcccgggaccgccagctctgtccgctgcccacagcct

SEQ ID NO: 4590 - DNA, 2300 bp, Homo sapien
gctgggcttctcaccgacgttttatttgcgcctctgcctgtggggcaccccactgggggtatggatccctgtggccttccgttgtctaaatttgacctgctcctgtttcatccagagtctcacttcctccattcattccccggtttcggcatcggaagtccagaccgcaatcatccaaactcctgccacttgaatgcaaatggcatctatcacatgccaggcactgttctaggcacttaagatacatcagcgaataagacagataaactttgcagagcttacactctagtggggatgggagcaagcctaactcatatccacaataaataagtgtattatatacaagcagacctcagagatattgcagttctaggccactgcaatagtgaattatcacgataaagcaagccactcaatttttttggtttcccagtgcatataagaattatgttgatgttttaccagagtctattaagtgtgcaatagtattatgtttaaaaaacaatgtacatactaagttaatttttaaaataccttattgctaaaaaaaaaaaaaaaaaaaaaaagctaaccatcatctaagccttcagcaactctttcagctggtggagggctgcggctcgatgttgacagctacagactgattaccaatttctccataatcggcaataaggttgttttgctttctgatcattcatgggttcactggagtagcacttttaatttccttcaagcactttttttttttttgagacggagccttactctgtcgcccagactggagtgcagtggtgcaatctcggttcactgcagcctctgcctcccagattcaagtgattttcctgcctcagcctcctgagtagctgggactataggcacgtgccaccatacccagctaatttttgtattttcagtagaaatgggggtttcactatgttggccaggctggtttcaaactcctggcctcaaggccacctcggcctcccaaagtgctggggttacaggcgtgagccatcacacccagccccaagaactttttttcattcataactcagctaactggttcaagaggcctagctttcagcctgtcttggctttggacatgccttcctcactacgcttcatcatgtccagcttgcgatttaaagtgagagatgtacaacgctcttcctttcgcttgaacacttagaggcatcgtagggcactaattggcctgattcgatatttctgtatctcaggaataggcaggtgtaaggagagggagagagacagggagcggccatcagtggaacagtcagaacacacacaacatttatcgattaagttccccattttatgagcacaattcttggtgccctgaaacaattactatagtaacagcgaagatcacagaccaccatcagagatataacaataacgaaaaagcttaaaataccgtgacaattaccaaaatgggacacagggacacgaagtgagcacatgggtcttggaaaaacagcaccaacaggcttgctccatgcaagactgccacaaaccttccattttgtaaaaagtacaatatctgcaaagcacaataaagggatgcacaataaaacgatgtgggcctggccgggcacggtggcttacgcctgtaatcccagcactctgggaggctgaggtgggtggatcgcctaatctcaggagttcgcgaccagcctgggcaacacggtgaaaccccatctctactaaaatacaaaaaattagccgggcatggtggcgtgtgcctgtagtctcaggtactagggaggctgaggcaggagaattgcttgaacccgggaggcagaggttgcagtgagtcaagatcgcgccactgcactccagcctgggtgacagagcgagactctgtctcaaaaaaaaaaaaaaaatcaaaacaagaaaaacaacaactaggtgtgcctgtggtatgtgggaagatgttaagtctataaaagaagaaacagttgggaaggtcaaagaggatttgcaaatgcaaagcaggaaacgtttcggggtggggattgcacttttttttttttttttttttttagatggagtctcgctctgtcgtccagggtggagtgcagtggcgcaatcttggctcactgcaacctccgcctcccgggctcaagccattctcctgcctcagtctcccgaggagctgggactacaggtgcacaccaccaagcctggctgatttttgcatttttagtagggacagtatttcaccatgttggtcagactggtcttgaactcctggcctcaagcgatctgcccgcctcggc

SEQ ID NO: 4591 - DNA, 2300 bp, Homo sapien
cagatgtggagtggaggatgagggtgggaaactggaatctgatcatgttacatgcccaagggctctcactgaaagtaggcctcaccatcttccccattgcacctctgaaccatgtcattacatgtctaccttagaaaggcctgaaattaaaaaataataataaataaaaaataaattcaaaaaccactccataagaagctgaaaatctgtacttcacatttctttccctgagccctgaggtggtctaagtcttccttcattcattcccacggcctcccgggaaccgtgtcttcatcctgagttatttctgcagtgttccatcaggcatctgcgggtctttaaaggaaatgtgaaaaggtagcaaagacacatctgtgcagcagagacatgtggcacaggaaagaagtgcagaaatcaaagccagggagaagcctgctagccacctagaaatcaaattgtgtcagggagaaagcctgcgtggaaaatagattagaaaggcactgaacaagagagaagaaagaaaggcagcccctgcaaaagttaatgagaagcagaggaggccgggagaagcagcctgaatttgaaaagagtcctgcactgcttgaggaaggactcaagattcagtaagttctatcgacttctgcctgggtaatgcggtggccgtccacctgcatgtccctctttgctcaccacgctcaaactgggggctgcaggctctgaaagaaaaccagggaggagggagacatgaaaggaatgggaacgcaggcctaggacttcagatgagaggggaccctccatccacagcgccatccttcatctgacctccagccccgtcctgactctgtaactactaggcctggtgccaacagggctggtgaaattggtgggaactgcgataatgatacctgcctggacaaccccgaatgttgaaagagacggcataggtacaggaactggcagagtggggctccacaaagagcgacctgttattattaaatgtagaagcaggtggaagtggcctctgagcctttccattttcttttgagacggagtctcactctgtcgcccaggctggagtgcagtggcacaatctcggctcactgcaacctccacctcccgggttcaagcgattctcgtgtctcagcctctcaagtagctcggtctataggcgcgcgccaccatgcccagctaattttttatatttttagtagagacggggtttcaccatgttggtcaggctgttctcgaactcctgacctcaggtgatccacctgcctcgacctcccaaagtgttgggattacaggcgtgagccaccgcgcccagccgtctttccattttcatctgcgcagtccaggctcggagtgctctcctagctccttcgtcttcccgaaaccccgtgtatcagttccctcttgcaccagctcccctgtggagtggggcctcctcatctcctcccagccagcgaaagtcatcttagtaagagaccagcagtgaccctaagccctgggggcggtcacttttatcaggctctgcgacccccgtgctcccccgtgctcggcctcgtcggtggcacttggcatgactgggagatcaagctcaggtgttccggaaatttaactttattttgtttatgaactcactttccatttccagatacctggaggcagaaacttaaagtgtggacccccagcgtctggatgagaggacacaaaggattaaaaagtcaacatccgcgcagccaggccccccacgtgctcgccctccaggctcggggcgtttcccaggcaggtaggggagcggttgctaacagtgcagcgccaatcacccctgacgctcgttttcctaatgcaggcaaacgccacattcccggtgttggtgcaaaaagaaatcatcctactcctcccctcgcttaaactttcccacaggccttgtcaaacaacccctggagccggcctgcaggttttcaatgcgcgcctttcaccgtgcggggcgcggcggggagcggcgagccgggggcgggcctcgtgggggcggggcggggcgtgccggggcggggaggggcgtgccggggcggggcggggcgtgccggggcggggcgtagtacggactgggcctggcctggggcgtccccgcgaagcctgggcctgtcaggcggttccgtccgggtctcggccaccgtcgagttccgtcgagttccgtcccggccctgctcacagcagcgccctcggagcgcccagcacctgcggccggccaggcagcgcgatcctgcggcgtctggccatcccgaatgctatggccg

SEQ ID NO: 4592 - DNA, 2300 bp, Homo sapien
cttcttccttgccaaccccatcatccttcaatctcatccctctcatttctttttcaactgtaagaaaaggcaccataaaagtttaaccaagcaaaaagaataataaaaagaaaaataattctaggaagcatttatcaacatttatcaaaattatcatttatcaaaatcaagggaaagttttttttttctcttgatctgatttccttaaagggccgggcgtggtggctcatgcctttaatcccagcactttgagcggcccaggggagaggatcacttgagcccagaagtttgggactaccgtgagaattagaccctgtctctacaaaaagaaaaataaaaaattagccaggcataatggttcgtgcctggagtcccagcttgggaggctgaggcaggagaatcacttgagcccaggagttggaggctgcagtaagctacaatttcaccactgcactctagcctgggcaacagaaccaggccctgtctcaaaaaataaaataaaatgaattccttaaagacagcagctgctatattacctgtcacctataggtagatgtttaatattaccatttattatgtcacttcatgataaatgcgttcatatttaacacaacatgagacaaaaatgtaagagggaaaataaaagaacataaccagaaagcttaggtttattattcactgaggattaaggattgtcagagttgattgtctcctggattttgttcagaaagagaggataataatactgacccaattaagtagcatgttgggtagattaaagtgctttgtaaacattaattaaagatgcagggagttaggtgaggccaatgtgttattagaggaaaagttttcttccctttaatcaggtatctctttctggggagggcaaagaaatgacctcaggactaaggcattggggctcaaccctgagtggggccagtgactcagtcattctgtgcaaccatttccttcttagttttctgtaaaatgggaagcaacacaaacattttgggaatctaggttgttacaacgtttgtcatttgagtatataacaaatcctacaattaatacaaccccataactcttgctttctccctgcctactgagttaaacccagtaacattaacttccaccaacttacaaaagccttccgcaaccagctattaaccttcggagatatttccacggtgatagcctgaagaagaaaatgcaacgagccatggggtcaaaaattctcccatgagtttcttcagctgtctgaacctcagctttcctgctctgtaaaatggggttaagaaaccagaaaaccattttaaggattagatgaaataatgtatgtggtgtatgcacattaaatgctgtgtctgagggtacaggtatgcaataagttgcatcagcattattaagtataaaatagcctctcaaagctgaccataataaaaaacaaaagaaaaaattaaaggccaggtgcagtggctcaggcctgtaatcccagcactttgggaggctgaagtgagaggatcgcgtgagcccaggagttcgagaccagcctgggcgatataatgagacccccccccccacccacccatctctacaaaaaattttaaaattagctgggtgtggtggcatgcacctgtggtaccagctactcgggaggctgagatgcgagtatcacttgaacttgggaggtggaggttgcagtgagccaagatggtacaacgtgcactccagcctgggcgacacagcaagaccctgtctcaataaaaattagattaaattaatgtcccatctcttgcaagcttcagacacacatccctattgcttttctccgcgtgggtcgctcggcgatggggttggggattttcacggtgctgtcccccaactcgaacttcacaccttgaccgaggacccccgggaggcggccgcgaggtcccccagcgcggcggggcccggccctttaagcgccgcgggcgcgcgcagtgcgtgcctaaggagtgcgagttcgggcggcgcgagcgcgcggcggcagtagagcgcgcgcgggtgggcgcgcacagggagagcgcgcggcggggcgtcccggaacagtctgcgccagacgggcggcggcgtgagggctccgggtcgctggcggcgtggacacctgagtcccggggtaggggtctcccgcgaggtgagtggggccctaggactccgggcagggctggagcgacgggagggcgtcctggcggcggtggcggcgctgggctctggctgggacgccggcgggtcgggcagagagggggcgccggaccctgcct

SEQ ID NO: 4593 - DNA, 2300 bp, Homo sapien
tcataaccacaatgagataccatcttataccagtcggaagacctgttattaaaaagccaaaaaatgacatgctggggaggttatggagaaaagggtacacgtgtacactgctggtgggaatgcaaactgttcagtttgctatggaaagcagattagaaatttctcaaataatttaaaacagagctaccatttgacccagcaatcccattactgggtatatacccaacggaatataagtccatctaccaaaaagacacatgcagacgcgggcagtggctcacacctgcaatcccagtactttgggaggccgaggtggatggctcacctgaggccgggagtttgagaccagcctggccaacatggtgaaaccccatctctactaaaagtacagaaaattagctgggcgtggtggtgggtacatgtagtcccagctactcgggagggtgaggcaggagaatggcttcaacccgggaagtggaggttacactgagccaaggttgcgccattgcactccagcctgggcaacgagtgaaattccgtcccaaaaaaaaaaaaaaaaaagccaggcgcggtggctcaggcctgtaatcccatcactttgggaggctgaggcaggcagatcacgaggtcaggagatcgagaccaccctggctaacacggtgaaaccccgtctccactagaaatacaaaaaaattagtcgggcatggtggtgggcacctgtagtcccggctacttgggaggctgaggcaggagaatggcgtgaacccgggaggtggagcttgcagtgagccgagatcatgccactgcactccagcctgggtgacatagcgagactgtctcaaaaaaaaaaaaaaagacagatgcacgcttgccttaatcgtagcaccattcacaatagcagggacttggaatccacttaaatgcccatggatggtggattggataaagaacatacagtacatatacaccatggaatactatgcagccataaaaagagtgaaatcctgtcttttgcaacaacgtggatggaggtggaggccattatcctaagtgaataacacaggaaggaaaaaccaaatactgcacgttctcacttacaagtggtagctaaatgatgagtacagatggatgcaaagaagggaacaacagaccctgaggattacttgagggtggagggtgggaggagggagaagatagagaaactacgggtactgtgctcttacctgggtgacaaaattatctgtatacctaattcccatgcaacaagcccacacatttaacccctgaacctaaaataatatctgaaaagaaaatacataaaaataaaaacacaaaggtccttaatgtctggtggtgtcaaagacacttcaacagacttttgacagaatctgcttctgtttcctgagacttctatttgctcttaggcggttgtctcttgctctgagacctcagaacccacagttcctaactgtcccctggcccgtgagctgagcggtgatggggaatgagcgggcgagacgcgttgtggctttgctgggcatcccgcctctcgctggtcatgggggccctgtttctggaaggtgaccagtgactggaccattgctatatagggtgactgtcgtgttatccttgtgaattcttcttcccctgtaagtcccgtggcttcctgaagtgctccttctttctggacatgctctccacttctggtgggtgtgctcctccacactgccctgttttggcggcgtcctctcggctctctggcgggcctcctcccccttctggctggcgtgctccgctttccggtgggtatgccccccctcgccccgctttctgctgggcttcctccctcctttccagtgggcgtgctcccccatttctgctgggccgcctccttccgttccggtgggcatgctccccttatttctggcaggcctcctccccctctttccagcacgcgtgcttcccccatttccagcgggcctcctcccccgctttccggaggacaagctccccccacttccggtgggccccctcccccttcttccggcgggcctcctccctccccttaagctgaagtgctccctgcttccggtgggcctcagtcgcatgcaggacagcaccgcgtgcggcagctgctctggtggcctcctgcttacccggccctccactttaccgttagcacggagtgcggcaccctgcttgggcctttcggctctgcctcccctgcccgtcacggcgggtcacgacatcggccaggacgcagcagaagggacaagacacgcaaagaagatggcgcaccc

SEQ ID NO: 4594 - DNA, 2300 bp, Homo sapien
gtgctttgtcctttgtagatcaaaaggctaaattaaaggactgcaggcttcttgtgaggactttgtccttgtttagaatatggaggtaaaaatagatcgctgtttgtgaatgaaactctaaagatggtagcggccgcaatcagtgcactcccaagtctccatttgcttcctggttgaggaagaagacgtatgcagaaaaatcaatattaaatccgtttcctactgataaaccaaaagataatacagtattgtgcctttggtagttttttgttttcagacacctgaaaattcattgtctcatgttagttttatagtatcccaatgttaacataatagttaattggaaaacactaaaaccatttttatcatattttaaaaataacttttaatagtattaaaagtaatgtgttcatgacagtaatttttaaaaaaccaagaaagcaataccaatattccatacagaaagataatcgtgttaatattttaatacatatttttctactctttttaaattttttttgtgtttgtgattttctaaccaattggttctacttaatacattatgaaattttttcttgacattacacatattctcttaaagctttattttttgttttgtaattggctgtattcatttgtatctatgtgccataatttacttaatacagctgtttcactcttaggttgattctagttttataccactgtaaataatatttttagtgtacctgtgattttctcaggatagataggattactggctcagatttttattttaatttaagaacaaaactaaaatggtaattggcaatgttatttaattctggtttggaagtgttcaaagcagtattcatgaaatgagagggttaaatcacatcatcgctaaagtttcttcctgcttgaatcctctaagattctatgcatgaacaggtatttatttaacacctactgtgtatttattaatatatgggctgtcttaagttttgaacatttaagacaagttctttgtcctcaggggtcttataatctgatgtaatatttatgagatcgttaggaaaaaataacaacatgctatatcatcaaatgtaagatgctgtaagttctccacatgctttaggagcaaataggagaaaaagtaatagattgaagtactcattgacagttcatgcaggaagtaaaactgaaactgaacatgaagagtggatgggatttgaaagtgcatattgaagggtattctctattgagaaggatattgggcaagcaagatttcaaagcagtgtgttctgtgacaggagacgtctaaggcaacttcaggggagggcttaggagagaggagtgggtagcagatcagtgggatcagatgagaccacattgtgtgcatatcaaaagtagagagggtggattggaattccaacaggaagaagaattgactgggcagtgaaatgtgggatggacacaggaggtgaaagcaaattcaggccagggagttccattaggcttaggaggagaatgctgttattgaagaaaaaaaattagtctgtatggtgacaaagctgctatggcgttttgccccattcccccgtcttaatttgcatacattcaaattgatagccacatatgatttctccattaaagtggcacgatttttttcatgtcttttgagtttttggagactctttaaatctcacttggtaaagagtgtggccaacgctgtatcttacatatggctgagactgtacctcatctgttactgttttctacctttgtccaagactgagatatacaagattatccaagtatttaaagctgtaagaaaagagggaaaagtatacacacacatacacttattttttctcgctttttgttagttgtgtttatttgttgaaatgtaggcctacacatttagttttttaaatgtttctcaccgtagtttttaattcttttacctttgttctgagaaaatggctgttgaattcttaatgcatacttttacatgaattggtatagtgtagaaaactagcctgtgtctatttttaatgtatttttccatttccaccttctcatttcaaggcctagtaaatgacaaagactcaaaagattctatgacagaaggagaaaatcttgaagaggatgaagaagaagaagaaggtggggctgaaacagaagaacaatctggaaatgaaagtgaagtaaatgagccagaagaagaggtgatgacttttatatgtagcaacatagagtacatttgtataagagtattttgattatatgagccaaaatttttttaatacataagacct

SEQ ID NO: 4595 - DNA, 2300 bp, Homo sapien
gctatctcggctcactgcaacctctgcttcccgggttctaagtgattcttctgcctcagcctcccgagtagctgggattacaggcgctcgccaccacatttggctaattttgtatttttagtggagactgggtttcaccatattggggccaggctggtctggaactcctgacctcaggtgatccaccagcctcggcctcccaaagtactgagattacgggcatgaggcaccgcaccagccagaagtaaagcttcttaaggtaatcccatgaaatgggaaaaggaaaccttgaagagaagcgtgggtggctatcaccaatatggtatttggggcagttctcataattgtttatcaatgctgcagaatagcagtattcatctttctcttttttttttttgagacggagtctccctctgtcgcccaggctggagtgcagtggcgcaaactcggctcactgcaagctctgccttcccggttcacgccattctcctgcttcagcctccggagtagctggaactacaggcacgtgccaccacggccggctaattttttttgtatttttagtagagacggggtttcaccgtgttaggcaggatggtctcgaactcctgaccttgtgatccgcccgcctcggcttcccaaagtgctgggattacaggcgtgagccaccgtgcccggccttcatctttctctttcactatcctttaaatgactgacctatgtgtagtgtataaaaaatatatatttttaaatacaggaagcagcaacactcagtatgagaggataatttgcgtgctaagagtaaatggggaagcaaacagtaaatagaggcaaatgggcaaaggttgagtcatagggaacctggacttgcctcaagtatttgtggttggtagtagttcattacgtgggcttgggcaccaggtggggccccctcaagtcaagcaaacgtcaagaccagtttcgcacccttgttcctctagctccggaccagccagagccacctactcggatcatgttggcagaacccagtactgtttcgaggccagatgcaccatttcagcaattcaggaggaaataagcagtgtggataaactgatacccatttttgaaagtcggcctgggttcgcattcagaagaaatgtcgacgctagccattttttttttaaaatgggtgatttgataactcagggaagtcttgccactgtaatttttaaaagtttgcttgctagaaccaggtactttctaagaagtgtatggaaaaagccttgattcttcttcgccctgggtggtttttacgtcgaacacctagaagtgcttctggaaatccccccgcaggactttcgatgtcttttagggcattcttaagactagacccattcctaagcgactcccacctcccaaaccagccatatggtttagtttctccagtttccaattttctaaatcttcaacgtctcccctcgaattagtccaatcaaactttctcttcttagacctcttccttaggttcgcaccaggaaacgcccaggagaatcacgtggccgggcttgtccttaatggcgctccgtaaccctcccactattccaccacacttcctcgcctcccgtgagctccgccccgccccattcgcgcttcccacccccatcccccgcgaagcgcctgcgcctgcgcagctccaattcaggcgctttccctttcctggcgaccaatccacttcctgcctcgggtcctcggaacactccacccctccgctggggccctggtttgaggtgctggtagtggctaccttacgtattgccagtctgaaaaattcgctcttctcatcgactggggaatttgaaagagctgttaagtgaatggcactcatatgagcctttgccccggacccgccaccccagagtcaagctgagggcatcggcatgccgcagggaagacgatcaggactgtttttaatcgggcagtcgcgcggatggccttttccctctcgcctccttccgccccgcccccactctcagcccggccgcgctggtgagtggcgggcgggagggctggcgggcggagggaggagggggagctgagggaaggcgggccctcggctgcgagataggtggggggaggggaggggagagcccgagcgctggagttggtgctgggaaacccggggctaatgttgacaacaggctcgaggtgagtcccggggatcctccttcccctccgctccaacgatcgggaggaaatggggctggggggcaccggcctagactcctactccctgggggaccccagaggcgactccacac

SEQ ID NO: 4596 - DNA, 2300 bp, Homo sapien
gattttaggtgatttccttttaacacctgattaaagacaaaggttgacttgatttaggatgagaaggatttattatatttattaacaaagaggtaaagcttttttctttctttcttttctttctttttttttttttttttgaggcagagtctcactctgttgcccagtccagagtgcagtggcgctatctcggctcactgcaacctctgcttcccgggttctaagtgattcttctgcctcagcctcccgagtagctgggattacaggcgctcgccaccacatttggctaattttgtatttttagtggagactgggtttcaccatattggggccaggctggtctggaactcctgacctcaggtgatccaccagcctcggcctcccaaagtactgagattacgggcatgaggcaccgcaccagccagaagtaaagcttcttaaggtaatcccatgaaatgggaaaaggaaaccttgaagagaagcgtgggtggctatcaccaatatggtatttggggcagttctcataattgtttatcaatgctgcagaatagcagtattcatctttctcttttttttttttgagacggagtctccctctgtcgcccaggctggagtgcagtggcgcaaactcggctcactgcaagctctgccttcccggttcacgccattctcctgcttcagcctccggagtagctggaactacaggcacgtgccaccacggccggctaattttttttgtatttttagtagagacggggtttcaccgtgttaggcaggatggtctcgaactcctgaccttgtgatccgcccgcctcggcttcccaaagtgctgggattacaggcgtgagccaccgtgcccggccttcatctttctctttcactatcctttaaatgactgacctatgtgtagtgtataaaaaatatatatttttaaatacaggaagcagcaacactcagtatgagaggataatttgcgtgctaagagtaaatggggaagcaaacagtaaatagaggcaaatgggcaaaggttgagtcatagggaacctggacttgcctcaagtatttgtggttggtagtagttcattacgtgggcttgggcaccaggtggggccccctcaagtcaagcaaacgtcaagaccagtttcgcacccttgttcctctagctccggaccagccagagccacctactcggatcatgttggcagaacccagtactgtttcgaggccagatgcaccatttcagcaattcaggaggaaataagcagtgtggataaactgatacccatttttgaaagtcggcctgggttcgcattcagaagaaatgtcgacgctagccattttttttttaaaatgggtgatttgataactcagggaagtcttgccactgtaatttttaaaagtttgcttgctagaaccaggtactttctaagaagtgtatggaaaaagccttgattcttcttcgccctgggtggtttttacgtcgaacacctagaagtgcttctggaaatccccccgcaggactttcgatgtcttttagggcattcttaagactagacccattcctaagcgactcccacctcccaaaccagccatatggtttagtttctccagtttccaattttctaaatcttcaacgtctcccctcgaattagtccaatcaaactttctcttcttagacctcttccttaggttcgcaccaggaaacgcccaggagaatcacgtggccgggcttgtccttaatggcgctccgtaaccctcccactattccaccacacttcctcgcctcccgtgagctccgccccgccccattcgcgcttcccacccccatcccccgcgaagcgcctgcgcctgcgcagctccaattcaggcgctttccctttcctggcgaccaatccacttcctgcctcgggtcctcggaacactccacccctccgctggggccctggtttgaggtgctggtagtggctaccttacgtattgccagtctgaaaaattcgctcttctcatcgactggggaatttgaaagagctgttaagtgaatggcactcatatgagcctttgccccggacccgccaccccagagtcaagctgagggcatcggcatgccgcagggaagacgatcaggactgtttttaatcgggcagtcgcgcggatggccttttccctctcgcctccttccgccccgcccccactctcagcccggccgcgctggtgagtggcgggcgggagggctggcgggcggagggaggagggggagctgagggaaggcgggccctcggctgcgagataggtggggggag

SEQ ID NO: 4597 - DNA, 2300 bp, Homo sapien
tcacttgaacctgggaggcggaggttgcagtgagtggagatctcgccattgctctccagcctgggcaacaagagagaaactctgtctcaaacaaacaaacaaacaaacaaaaacaacagcaacaaaaattagctgggcgtggtggcaggcgcctgaaatcccagctactcgggaggctgaggcaggggaattgcttgaacccgggagatggaggttgcagtgagccgagattgccctactgcattccagcctgggcgacagagcgagactccgtctcaaaaaaaaaaaaaaaaaaaaaaaaggaaaaaaaagacaagcccttgcaaaaccaggtccaaactagcaagatggggaggccaccaaagtgtggacctaaggggtcccagctacagtagctgtgctggatgacgctcctgtgcttgcagggggcacttacatgtgcctacattatataatctatcatcctgtgtgctgagttctatctacagctagactgggaactaagggcagaaactgtgccttattaatctttgtaacccagcagagtgctttatgagtgtactggttgaatgagtaagaaggaggatgtcttgggcttgtatgtataatattcctaggagtttggggtatagctgcacagcttactggaacgaaggatgactaaccaggtaaggatgcagactctctctcctaccatactggcaaagttaaaagtaagccacagaaaaaaaatcatttgggaaactcactcagagacagaccaactaatcgttcatgtccagtttcttttgactcttatccctttcttccctgctccctttaccctatttccttctttctctcttaatgttttttgtttgtttgtgagacagagtctcgctctgtcgcccaggctggagtgcagtgggcacgatcttggctcactgcaacctctgcctccagggtttaagcgattcttctgcctcagcctcccgagtagctgggactacaggcacccgccaccacactcggctaatttttgtatttttagtagagacggggtttcaccatagtagccatgatggtctcgaactcctgacttcgtgatccgccctccttggcctcccagagggcctcccagagtgttgggattacaggcatgagccactgcagcctgttttgtttttttttttttgttcgtttgtttgtttgtttttgttctgttttttttgagacggagtttcgctcttgttgcccaggctggagtgcaatggcgccatctcaactcaccgcaacctccacctcccgggttccagcgattttcctgtctcagcctcccgagtagctgggaccacaggcacccaccactacgcctggctaattttgtatttttagtagagacgaggtttctccacgttggtaagactggtctcgaacccccgacctcaggtgatccgcccgcctcggcctcccaaagtgctgggattacaggcgtgaaccaccgcgcccgacctaatttttgtatttttagtagagatgggttttcgccatgttggacaggttggtctcaaactcctgacctcagatgatcctcccgctgtggccccccaaagtgttaggattacaggcgtgagccaccgcgcccggcctctgttaatgtttcttaagaaaacaaaaaaattaggggtattgattttgtagctgcgctaagtaacctttgctttttgcgtcccttggtctcagtcctagccatttcctatccaccctgtggctaatttgtcctttctgtaacagacaccctagactgtgtctatgcggttgggcagaggcgtgatgggtaaacactcctggcgggagactacaggcgctgcagctacatcctgtttcgtactgggagcaggtgccgccccgcggaacacttacttgccccgccctgcggtggagcagggcggtctcagccgccggaaccgccctggaagcccgccccaatcctgggcgtcgcttcgctgtgagtgccgctgccacggattggcttccagggtccggcccgtcggccaatcaggcgcgggggcgttgtctgggggcggggctccggccgcctctgacgagtcccggatttaccagggccggtgggatcccctcgggctcccgccttagcatgctggccgggacatctggtgaacatggcctctgctactgcggcagcagcacgacggggcctcggccgggctctccctctcttctggcgtggctaccagaccgagcggggcgtttacggctaccggccgaggaagcccgagagccgcgagccccagggcgcc

SEQ ID NO: 4598 - DNA, 2300 bp, Homo sapien
ggtgcgatctgagctcactgcaacgtctacctccagggctcaagccagcctcctgaggcctcctgaaaagctgggaaaacaggcgcaaaccaccatgcccggctgatttttgttttttttacctttcatagagacgtggtctcactgtgttgcccaggctggaatttagtgcatctttattgaaaggatattgcattcatgaaattagctcataattgagtgtcaaaactgcacttaagtcaatcattttgtaggctattgtacatagtagaaaaagtaagaacgaccactctatctagaagtttactgcatatcaggggagattaggcaagtataaaaatgactaatacaaagtagagtgaggtaaggatgaattaacaggatgggagattattactgtggcagattggattttccaaaaattcccacagcggtattttgaatcccacatgttcttccagaatcttgccacaatctcccctagaggtggtgtccctaggacttgtggctgcccctacagacacaatgcagtaaaagatgctggttcagttctgaggacatcccttggaccccagctgccacgctgtgaggaagcccaggccgcttggagaagccatctggaggtgctggagctgacaccagcacccaatgccagactggggaatgagggagccacctgatcattccagtccccagccctggggctgtcccagctgacctcaagtacagcagagactcatgcaagctggacctaaattgcacgcccccctgaaatatataatttatttcatgaacatagatctgaacattagaacagattattgaggccggttttggtggcccatgcctgtaatcccagcacttggggaggctgagacagctggattgcttgagctcaggagttcgagaccagcctgggcaacatagcaagactctatctctacaaaaaatacaaaaattgggtgagtttggtggcggaaacctgctagtcccagctactcgggaggctgaggtgggcaggtcgcttgagactgggagttcgaggcagcagtgagctatgattgtgtcaccgcactccattccagcctgagccacagagcaagaccggctcttaaaaaaaaagaaagaaagaaagaaaaaagataacagtggcttcaggaaaactgttccacggtaggaggcatacgatcctgatctctgtattttggagaagacggaggggactagcttacgtcgagacagaggagttcataactattaactatacacaacgacgtgtcacaaatgtttacaaacttccaagagataacgataagaagcggccgggcgcggtggctcacgcctgtaatcccagcactttgggaggccgaggcgggcggatcacgaggtcaggagatcgagaccatcctggctaacacggtgaaaccccgtctctactaaaaatacaaaaaattagccgggcgtggtggcgggcgcctgtagccccagctactcgggaggctgaggcaggagaatggcgtgaacctacctgggaggcggagtttgcaatgagccgagatagcgccactgcactccagcctgggcgacagagcgagactctgtttcaaaaaaaaaaaaagaaggaagcaaaatacgattggttcggtcccgtccgctctcagcggctcagtcccaggcctcggggccagaaccgtgttccccgcgctacttgggcggcgccgagatcgcggcctccccgaagggtgcccaggaggcctgggtcggacgtggggcgcgaggaaacggcgggttttccacactgagccgcgaaagcctgtagacgacgaagaaccccgcagccttggcctctgcgcggcttccacgccccacggctgcccgcccgagccctgcccccaggcgcgccagccccgcctcccgggtcccgggtcctgggaccgggcccgccctgccccggcgcccgtggtcaccatggcaacgcagcggacgtcggccaacggcccgccctgggggcggggctgggccggtcgggcgcgcgggtcaggtggcgaagggcggagtctgcgcggggttgggcggagcctgcgcggggccggtaggatcgcgtcgggagccggtaccgaggcccgagccgcgggagtcgagcgaaggcagcgccgaggccgcggtttccccctgggcctccccagcagcagccatgggcagtgagtagcggcggctggagcggggactctggctgggaacgcaggccccgcctgggctgcgggcggtggggctggcgctcgctcggagtcgtgggggcc

SEQ ID NO: 4599 - DNA, 2300 bp, Homo sapien
gggtgtcatgtttgattgtaggtgggcagtgacccattggtgtcttttcaaggcgttactaacattgaaaatatgtggatacactgaagagctatgattggatcagtgtgtttcacccagaaacataggttttgaaaactgtttgcatgccgttgtggaaggtatttctcaccttatttgtttatgtttcattcacgtggttagtgtttttcagctagtgagtttagaaatctacatagcaggtcttgactaaaaattttaaaaaactattagagaatatcagtgtgcatggcacataataaaggtaagtatgttttgacatactgaacaaaagatagtttgacaaaactaagttgtgtgtaggtgtcgtgcagggttaaaatgttaagtgccatgtttataccggctcatcatacatgtcgtccattccccgtgaacatgtagcagttagggttctggtcccatcactgtagacgctgctgtcacttcctgggttctcatcccttttcacaggcatgcatgatatttactggcttttattcccttaattatagaaaccgtttctcatttctgtataatttcttcctccctttggaaaaacccaagtttaattttcacaggacatatgtgaaccactctgtagtccgatggtcactgttctgaacagggggtgtggagaattagagttgtttcagagctgctgtgggactctggagaggtcatttctcaaggcccatcacgatgctttctgtggctgatgttcatggacggctgttgcctcctgcataggatgggtttctctatgatggggagtctctgttcactaattacatgattgtggttaaatagaatcggtagtaagtcctaacctctacattattttgtcaaaatgtcgaacttggttttcaagcagtaaaggattagcatgatctctcttagaagtttggagaatcgtaccctttctcctgcccattgaaactcagactaaaagcctgtaaatagacaagttaggctctgtccaactactgaaatggcagttaaggagaaaaacaacactgtgtaaggtaagcatgcctaaaatggtctcatgtggttactttggtcgctcttccagcaggtgatattggataaagtgagtacaaaatgagggtgggcggcttgagagctgggaggaatggaagtgacttcctcacttctgccggagggtgtctttaaagtggggacatgtgtgaggttgggggcatggaagcatattttcttcctgtcttgattaggttatttgagtgcagggaaggggtcatatgactgaggaggtcacttgaagggctagggactgtttttaattaatgcatacttttacaggaatgtcttctccaagaagcaagttcagaattttcaatatcccataaattaaagtcagtatgctttcatttttaaaaacaatatgagcttaaccttaaccgtcttcaaatttacattcaatctttgtcactatgtgtatagaatgcatttttacattgctgctcgagtacgtatttgagtacatatttgtgttctagttttttattctgtacacattttatagagtatacatatatataatatatataatgcttttttcaaaggatcaacacagcccttagacttatcctttgatggcagtgtacatttccatcttgctattataccagaattcatctgactttttacttccttggaggtatttgggatgttttcagtttcttgctgtcataaattctagaatactgtgatcattttttgtttcagtgtgcttttcaaacaggctttatttaaacattgcaaaagaaactattcagataagtgtaaatagactttaaaagttgaaatgtctgctttataatacaacagtatttccagtcctcttactgttctagattggcctgagtaaatgaaagcaggccaaaagatgcagttggtcatcacagtgagattgcaacgatcaggccttaatattcaaaacgcccctagcttggaaatagccaatggtgttcctctccccctttcttgagtttgttcttgcttccgcttacttgcatttctttccccacagttgtttgttgctggtttgattgtgctgctgttagatgagctgctacagaagggttacggcttggggtctgggatttccctctttattgccaccaacatctgtgagaccattgtctggaaggcctttagtcccactaccattaacactggcagaggtacatcgcacagcgactgcaactgcacgcgttttgctggatgtgtgctgggaa

SEQ ID NO: 4600 - DNA, 2300 bp, Homo sapien
ttggataaagtgagtacaaaatgagggtgggcggcttgagagctgggaggaatggaagtgacttcctcacttctgccggagggtgtctttaaagtggggacatgtgtgaggttgggggcatggaagcatattttcttcctgtcttgattaggttatttgagtgcagggaaggggtcatatgactgaggaggtcacttgaagggctagggactgtttttaattaatgcatacttttacaggaatgtcttctccaagaagcaagttcagaattttcaatatcccataaattaaagtcagtatgctttcatttttaaaaacaatatgagcttaaccttaaccgtcttcaaatttacattcaatctttgtcactatgtgtatagaatgcatttttacattgctgctcgagtacgtatttgagtacatatttgtgttctagttttttattctgtacacattttatagagtatacatatatataatatatataatgcttttttcaaaggatcaacacagcccttagacttatcctttgatggcagtgtacatttccatcttgctattataccagaattcatctgactttttacttccttggaggtatttgggatgttttcagtttcttgctgtcataaattctagaatactgtgatcattttttgtttcagtgtgcttttcaaacaggctttatttaaacattgcaaaagaaactattcagataagtgtaaatagactttaaaagttgaaatgtctgctttataatacaacagtatttccagtcctcttactgttctagattggcctgagtaaatgaaagcaggccaaaagatgcagttggtcatcacagtgagattgcaacgatcaggccttaatattcaaaacgcccctagcttggaaatagccaatggtgttcctctccccctttcttgagtttgttcttgcttccgcttacttgcatttctttccccacagttgtttgttgctggtttgattgtgctgctgttagatgagctgctacagaagggttacggcttggggtctgggatttccctctttattgccaccaacatctgtgagaccattgtctggaaggcctttagtcccactaccattaacactggcagaggtacatcgcacagcgactgcaactgcacgcgttttgctggatgtgtgctgggaacaaacccatcgtgtcgcagtacatgcctagagccgttctggtttgctctcctaggggataaggaatgcgaattcttcaaaacttaatgagcagagatttgtggagtaagcaatactacctcagagagaatagtatcaaaattttagcctctgcttatttaaaatttcagtggttgcaaacagattttcaaaatttcttttgttaaccttgcttaaggcattgctgcagaagtcatttatttgactgatttcagcatccgtagggggataaaaaggtagtggattttagatttttcaaatgaaaagactgttgttcattgaatccacctggagcactcctactctgctgctcttctaattggctttgtaatagcaccaaagttttgaaatatttcattctctctttccccttcctcatctccacttctaacagatactgtcctaagtggttaatacctaaactctgatcccagccttaagaaaactgtaatgatgattaatgttcttggtgcggtaaacttcgaggcaggctcgatagagtgacatctgtctcttattctgacatctctgctctgcttcgctgctgtttatttttcctaaaaacactctctcccttccctgaagtagaggagaggcaaatctctatgaatgaaattttgctttggtaaattttacgttgtatgttttcttcaagaatagtctcttgagaaaacttcggatttatgctataaaaacatagatttgcctcaatgatctaaatatttgtagaacctgctcacatggctatatcataaagcaaacattggcgaattcttttgacccatattttctgctgtatactggactttcacggttagttgtttgagctttgggacagctttggacgatgagtccacaggtcgtgtctgtcttgattttacaggtactgagtttgagggtgcagtcatagctctgttccatttgttggccaccaggacggacaaagtccgagctttacgggaggctttttatcggcagaacttacccaatctcatgaacctcattgctacagtttttgtgtttgctgttgttatatatttccaagtaagtataaccttttcaccaaagtaagtgggatgtagatt

SEQ ID NO: 4601 - DNA, 2300 bp, Homo sapien
gttgcctagctttagcagaatcaaaatacagtaatcaaaccgtttattcaaccagcaacatttgagaagtcggaaggaaagtattacattttaagatcagtttgctggccgggtgcggtggctcacgcctgtaatcccagcactttgggaggccgaggtaggctgatcacttgaggtcaggagctccagaccagcctggccaacatagtaaaaccccatctctactaaaaatacaaaaattagccaggcatggtggtacatgccggtagtcccagctactcaggaggctggggcaggagaatcgcttgaacccgggaggcgcaggttgcagtgagccaagatcgtggcactgcactgcagcctggcgacaaagtgagactccatctcaaaaacataaaaaaaaaattaaaaaaagatcagtttgctacaaagagtagcatctgccagttaccaagcacctgctgtgcccaggtgagtaggacatgcttcctgcctgcaaatgtccccaggcttgttcccaaacaagcggctaggaaaacaagaggctgattttacatctggcaacctccatctgagtgaaacaaattttaatgaaagcctgtggtaataaggtcctgagaccgcattcttggtagtagatctccagtcctaacatgcacacagtttaacttgccgggggaacatatgtatcccctagcagcagaaaagatggaatccctaagatcctacataatcatcaccatctggtttcagaaaagcaaagccctaccccagctataaatgaggtatagcgattggctctatacacttccaactttgctgttttcacacataaaatcatccctggctgggtgcggtagctcacgcctgtaatcccagcactttgggaggctgaggcgggtggatcacgaggtcaggagatcgaaaccatcctggccaacatggcaaaaaccccgtctctactaaaaatacaaaaattagctgggcgtggtggcgtgcgcctatagtcccagctactggggaggctgaggcaggagaatcgcttaaacccaggaggcagaggttgcagtgagccgagatcacgccattgccctctagcttgggcaacagagcgagactgtctcaccaaaaaaaaaaaaaatcattatccctgatgttcttgtctcatgctaggaatgtaatcttgcctttatagtctttattctttaagatccttatagaccaaaaaaaacgttatcaccagcatctagcataggaagtgacatatagtagtacctgctgcgcaaacactgattgaataagatgttttgtccttccttaacggcatgatctaagttgttttctttgctttccacagctctggtagctgaagaacatctcacagtggacgccagggtctattcctacgctctagcactgaaacatgcaaatgcaaagccatttgaagtgcccttcttgaaattttaagcccaaatatgacactggccatttttgtaaacgagaccaccaggccttcttcactaagactttgtattcaacttagtttaatgtagatttgccattagctttttcgtaaaataaaagcacagaacagatgtggtggtggtatggaattgtaattacaggtaggttgtgaccttcctttaaatttgttataactccagctaaaattaacaaagaatataaatgcaagtatgtttactccaatttttttaaagctcaacagcagttaactacagctcagttacttttctagtccagtctggtagacaggggtatttgtatagagaaatagacctgagttctcaattaggtcatttccactctcaacccccaatataaaattctaagctgggtatgcaaataaccatgtactccgttagtgtttaaaacagcgttaaaaagaaaaaaaaggctttttggcctcttctaattgaatttttactatgcaaaatttatctagggtagttgaatccaactagggtagggttcgatagaatcctctactagttttcagttcatctatttactgaggctgaaccagcttttaagtaaggaaaacggttgactccattcactacaccaaggctaggagactaatgaaaattcaggtccatcccgcaagcatctgcacgtgcttgaggatctcttttcctattcttacctcaaagagtacttgaagtttctgaaaacaaatctgtaagactgacatgtttggggcagtaatatcttgatgttaaaccatgaacagaaccagcaagatcagccagtacctgaaacccaatacagagtagttcaca

SEQ ID NO: 4602 - DNA, 2300 bp, Homo sapien
actcttttttttttttttcccgagacggaaaaaaaagagtctcgctctgttgccaggctggagtgcagtggcgcgatctcggctcatcgcaacctccgcctcccggattcaagcgattctcctgcctcagcctcccgagtagctgggactacaggcatgcgccaacacgcccggctaatttttgatattttagtagggacggggtttcgccatgttggacaggctggtcaaactcctgacctcaggtgatgcgcccgcctcggcctcccagagtgctgggatcacaggcatgaggcaccgcgcccggcctatgctcaaatgtttcttgggctgttaaagtactgctcctcgcagaagggctatgttcccgggatctattctcttccgtacattcattcctatcttcattagaaaacatctgacctaaataaatcccccatcgatgctaacatctccttccgcgcaattttttactttctaagtcaaatcaaaacaattatttgagcgactgctcctgtctgccattaagtctttctggcaccaccctccagacatatatacaatattgcttctttccctcaaatcagaaaggactgcatagttccggatcaaggcataaatgatgaatcatgactgtccatccccaccaacatactctgcaacattataatctatttacctctgctttgaaaatgtattctttaaagcactgcttccaactagccacttagccagtaacatttttgagaaaaacaaaacacaacccaaaacaatgtatatattcctggggggaagagtttctaactcaaaatacgcagataattgtttattattctaaggaacacccttctgaagaggcctgcagtcggtggggctgtttctaatttaaaactacttaggtgaaccaggaagaatgtacatttaaggagatacttttagacgcagatgcctcgcgcaagcctaaagctcgtgtggtaagcgacacgactaggggttaaaagcggctggttggtaggcccggggccgtggctcacgccttgtaaacccagcactttgggaggctgaggcgggcagatcacctaaggttaggagttcgagaccagcctggcaaatatggtgaaacgccgtctctactaaaaacacaaaaattagccggcgtagtggcgcgcgcgcgctctcagctactcgagaagctaaggcaggagaatcacttaaacccaggaggcggaggttgcagtgagccaagattgcgccactgcactccaatctgggcacagagtgagactccgtctcaaataaataaataaaagcagctagttacttctcattcttttaacgaaacaaacaaaactgaactttgctgggtgacaggagtgaagcaaaggaaaaaacgatagtacaagttcgattcgaattcttccagtcttatgattcgatcatcgcaggaatactgataaaaatctgcgttttttccaggttgacaacttttgcgaggccagactaaacgaattcagcgctccaaggagactcctctttcctctgctttctcacatttacctctcgccttttacctcccaaagtcgaaccctccaggatcgtacaggcggtattccctctaccaagcattctactcctctgcagatgctgcaatctttacactggaactaacacttagctgtggtgttccccgctttctttactcggagtagcccaggctcttcctctccaatccacaatttccctccaatccccagtttccctcttgggcgcctggacgcgtgcccagccgcagcctgggagacaccgcgcggctgcacgcaccatgcagatgtggtccctttccccttcttcttctcctccccaaagaggttttgtgctgtgactggcttgccccggttacttactccaaggtgtaggggtgaagaacggaagaggacgaaataactagctggaggcagcagtgtcagccgatgccggtgccacggctcgaaacaccggcgcctctcgcggtgctaaaaggatgggcgcgcaccctccttccggcatccgtagaacccccgcctttgacctagcttcaggagattactttccgggtcagcgtgcgtttagggcgaagacggagttgtaaacttcttaaaattcctctctcgacacttcggtaattcctctttcgagactaaagctctttttgtatgcgtgtgtgtcaagcgtatgccccgggattctcctccgcttccttttctcggtcttccttcttgctttagggaccggaagagtccttgaaccaaaatagctcggcg

SEQ ID NO: 4603 - DNA, 2300 bp, Homo sapien
cgctaagaattcatgatacttttggatgtgtcttgctggctttctattcaactgatcaccagagatataaagctgcttaaactaggcatgctttagcttaatttgtttcaggtaatcataattaaggatggcaaagccatacctgaagtctcttaaaaacttatgggataatttgttttttaccttgaaataataaattatcaaaaagccctaccacagatccctaagagtgctggtattattttgattttgaggcatatacatcttcaaaaagtggaaaagattacagcctgctttcccgaagttaacagaacatcaatgacttataacatgtctcatttatttatggaagaagttttttttggcacattacaaatggtttttttgcacaaaaaagagtattcatgggctacttcggttttaaaaataagtatttttatttatttttaaataaataaaagatcactgccactgcactccagcttgggcgacagagcaaaaacttcggttttaaaaataaatatttgatttatcaaaggtacaatttcacattcaaaaatctagttctggccgggcgcggtggctcacacctgtaatcccagcactttgggaggccgaggcgggcggatcacgaggtcaggcaatcgagaccatcctggctaacacggtgaaaaccccgcctctactaaaaatacaaaaaattagccgggggtggtggcgggcgcctgtagtcccagctactcaggaagctgaggcaggagaatggcgtgaactcgggaagggaagcttgcagtgagccaagatcgctgccactgcactccagcttgggcgacagaacaaaactctgtctcaaaaaaaaaaaatctagttcttcaggcttttaatttcttctaacaaatcttattacgtttgaaaatctactaaattttaaacaatttcaagcgaaactttgcaacttaaaagtctctttaaaattttaaattctattcataaaccactcaattttctttcttaatatgtctatttgctgattacaaataagccttcctaagtattttactcttacaaagctaacaagcgaaattgttaagtacaatgaatctaaggttctaccacacattccaatactatttaagaacttgaaacttttcttatacattttaaccattctaagccagttacacattttcaagtacatatccgatctttattgaatgaaaccatcatataatgaatcagcaattactgaaatgttggctcagaaaatcagttaagtgcaaagcccagattttctatcaacgcctttaaaaaaactgagagatgaaattgtatatattaatacttgccgcctacctgatgtttttaagtatatatacactgtggaataaatttagctaacaaatgcattgcctaacatagttatttttgtggtgagaacactaacatccactctccgtttttcaagaatacgtatatcgtcattaactatagcctccatgctgtacgacatatctgtgaacttgttctcgtatctaactgtaattacgtatcctttcaccttcccaatctccatcctctggggtgatggcgaaaagcaattaattctccgagtgcacttaggcagtgatcaccttgcgcctggggccattctaaaagtagtggtggtgaactcccaagcctaaactaggttaatccactattcctcccgcctccgaccctcactgaaaaccacaactgaccctcctagccagcacactcgctggctcgcaacaggacgcagacaattgctgatgtacttccctctcgacacactccctcccatgcagtcgctagaaggcctgcatttttttggatagcagtaagattcgctcagaagtcgcagttcccttttgccggtcgaccgggcgaaccccctcccatctcacctcttgatggtaacgcctcggaagaacgggtaccacgcggagaactggcagtgaagcacatgctccttcttcatcctccagctgccgccgctgctgcctttccctctcctgcctgcaccctcccggaactctgggcgccggccccggaagtgcccgccgagctattttggttcaaggactcttccggtccctaaagcaagaaggaagaccgagaaaaggaagcggaggagaatcccggggcatacgcttgacacacacgcatacaaaaagagctttagtctcgaaagaggaattaccgaagtgtcgagagaggaattttaagaagtttacaactccgtcttcgccctaaacgcacgctgacccggaaagtaatct

SEQ ID NO: 4604 - DNA, 2300 bp, Homo sapien
cctgtaatcccaacactttgggaggctgaggcaggcagatcacgaggtcaggagatcgagaccatcctgacacagtgaaaccctgtctctactaaaaatacaaaaaattagctgggcgtgatggcggacgcctgtagtcccagctacttgggaggctgaggcaggagaatcacttgaactcgggaggcggaggttgtagtgagcagagatcgcaccactgcactccagcctgagtgacagagcgagactccatctcaaaaaaaaaaaaaaagaaagtcaagtagaaaagatttggaggttagaaaatgtccattttgtatcatgacatatattgaagacatcttagcagtattctccaaaataaagttgacatcattaccaagaagttgtttgacggctgatactgtttcacatagttccaggaatgaagaagtgggtgccaaatggaggtgaggaaacaactcaagcggtgagaaatttgcagggcctctcctggggcttgtataaaatgaggaacttacctaaatgggttgtgctgaaaacatcctgcgaaaacatcctgcgacaggcctgtgccacttaactggaggttctggtatttgaagcaagtcctaattagatgttgcatctttcttaacagtttgctctcgctcagctgagaaacagtgccagatattaggcatgctggctcagcggtcttgttgcttggaatttcacagacacacacccgctcaggacatggcggcaacacatttatagaaaaaaacaaattcattattaaccagatggcacaaatatatgaatgtttcagtgagaaaagtgaaaaggagcaaagataaacctttcgaggaaacatccatccacttcgtgtcaataggtgttcgtgatcggatgccgtggccgtcattcctggcggcgcagcccctgtgcccccgctctgtgcgtgtcagcactggctgttttctgctcagaggccccagccctacctcagcacagtgcccccagctcaaaggtgacctttccctgaggagagtcaccaaattgcccacctgtggtttcagaacaggacaaggtagacatttctttcagaggttggggtggttttttttttttcttttttcttttttttttttttttacgtccccttcatatgctgtcaagctctattgtacagacggaacacttaccacattcacatagaaagaaaacagcatcttcaggctgggcacggtggctcatggggaggccaaggtgggaggacatttgaggttaggagttcgagaccagcctggccaacatggtaagaccctgtctctagtaaaaatgcaaaaattagccaagcatactggcgcatgcctgtaatcccagctactcgggaggctgaggcaggagaatcgcttgaacctaggaggcggaggttgcagtgagccgagatcgcaccattgtactccatcctgggcaacagagtgagactctcacaaaaaacaaaaaacaaacaaaaaccacagaaaaaaacccagcatcttcatccttgcatatggtaaaaaaatccacccttggcagcagcctttcccgagtcagaagcgctgctctctggagtcgcaggcactgcctggctccgtccggctccccctgaacagagcactgaaggctccgggaagacgctttggtcagaccgcagacccttcgcctttgggtgacagttccctttcctgctggaatctttttttcttttttttttggagacccggtcttgctttgtcacccaggatagatggagtgtggtgttttgatcacggctcacagtagccttgacctcctgggctcaagcaatcctcctacctcagccccctaagtagctaggactacaggcgtctgccaccgcaatcagctaatttttatatttttttgtagagatggggtttcaccatgttgcccaggctggtcttgaactcctaagctcaagtggtctgtccgcctcagcctcccaaagtgctgggattacaggtgtgagccaccatgcccggccctgctggaatctttgacttaaagttccactgtggcttgaggctggagttggaacgttatctcttaggcagagctttactgggtcccttctctcttcattcacagggggccctccctttagatctctgtctattcagacaggcggccctttctcagatgggatatagacagatgatcttttgaaataagtgagaagatttttaagattagaataatatgaagaatatctttctggccgggcgacgtggcttatgtctgtaatcccagcactt

SEQ ID NO: 4605 - DNA, 2300 bp, Homo sapien
gcctaggcctcccaaagtgctgggattacaggcgtgagccaccatgcctagccttagctctcacttctaagtgagaacatgtggtatttgactttctgtttctgagttatttcacctaagataatggccttcagttccaactgcgttgctgcaaaagacatgatttcattcttttttatggccgggtagtagagaatcagcacttcttcagctgtggggataatagctgagaatgagaattgttttcatgagctctggcggctgttcctgaggccaggcagcaagggcaacatagcagagaaccaaataggaaaagaggagaaggaaacacagtgggaggaagggaaggagaaagaaaggacaagaagatgctgactgtaggcatgagaaagcgacagttgggatcttagttgacttatgccctggttcccactgtttgtattatctaacctttggcacaagtaaaatacatgatagtttttcaaatgtttcttattgaaggggatgctgtttgccttgaactttggtaatgtgcctcaagtataagagaggttccttagtaattcttctcacccatccgtgttggaaattgggtttgtggatttattctacatctaaccggcaagtaaatcccctctttgctcttctcagtttggaaaaccttaagctaaccgtctttgaaagatggaaactagcatggaggtcccaggaatggggatgccagggtgtcgtctgacctctttagggtcagagtaggggctgagggagagcagctgggctgcctccacttcagccagagtcagaactaggcacaaggtgctggatgaagtttcctattcagggagcagattttttttttccttttacagtgaaattggaacagtcctgggaaaatgggacaggtgtccccagtcaagagacagagctgtttacccaactacgaggagaggccctgagggaggcgaagtgttgataccaagaaatctaaaattttccgatcaagaggtcgcccctgcaggttggggaccagggaactggagcacgtgggctgccctctgacaggtggacaccaggagtggggcgggcaggccaaagtacagctgggagatgggagtccggagggaattctctgggttagttttggcagtccataggaaagcaggtgcctgccccgcaacccggacaccctactaagccagccgcgggtgggctcctccttcgaggggactgcggggcagacgatcacttctttccactgagtctctgggaggagacagggagatgccagaaggggccaagcgtgagccagggcaaccaggccggccaggcccgccggccgctccagcccagcaccagggcgcccgcgcggctgccaaacacccccgggagttttgctcgcaaagggaccacgaggcagctgctggcgcgtcctgcgcgtacccgcccagaggctccccggcttgctcctcgcgggtctgtcccgaaactgacgtgaaaccgatttggtgcaatgcgaatgagctcccgcccgcctccgcctccatcccagccgccgccgccgcccgtcgccataacaaccggcccccaccccccccaccccacgccttgcccctcgggtcccccgggccacaggccacagcgcgggaaggcgccccgccctcggcgccccgcatccggccgccgcgcacccccgcccgcccggcgcttccgagccacgcagaggcgccccctcccgccggagacgggaaagccccggcgcccccagactgggctccgtttccagctcccggaggggctggggctctcccgcgtgcgccccgcacctgccgggggcccgtacccgccctcgccggggctccagggggcacgacggccgtggcccggcgctcttgggaggggagcgggacatccccgaaggcggcgcgctggaggcggggagcggccggggcgcacggagagggcggggagcccgcgggagggggaggagggggaggagggggaggaggcgcgaggtgggggggagcgcggcgggcggcagggagggagcgggagggaggcaagaaagtagcagaaagtgaggctggcaggcggcggcaaaggagccggcgcgcggcggcggcaggaagtctgtgcccgagaacagcagaaataagagccagggagggaccgcggccgcggcggcggcggcgagagcgaaagaggaaactgcagaggaggaagctgcgccgcagcccgagccgcccggcatccccgccgcctctgcgcccgcgccgcgcccccggcgccccctccccagcgcg

SEQ ID NO: 4606 - DNA, 2300 bp, Homo sapien
acaggaagagaacctagaatgtgcctttcgtgaaggtctgacaaatggggtctcagagtcctaggacccgcaccaaggtcagagtccacctgtagaggctgagcatttctacatgcacccagggtgctgggctgaggctaagggtggacgcgtagaccccatcacaggcttccttcctgagcccaagtcccccatttggtcactatcccttctcagagcaagtggattctcttttcctcacttggagtattcaatgttgaagtagtggcctggagtggcctttccctcagctgcctgtctgggcctccctggcttcccggatcttcatctcatacgtgaggcaataggaggagtttctattcattgagacaaacagtgagcgggcaccaacaggccagcagcttggcccttttcacagaggtggccttggagtctggagtctgggcagctgtctgcctctctacggctctgcttcccagcgggcacacgggtccggagcctcagaatgaagtggtgcagaggcgcagggcacacctaggagaagctcaatgaccaccaaagcccttgaggagagacggggtttgctgtgttagagaaatggcaacccccaggaccatgcacggctctggcagtgcacagtggctgattttcaccagttcctcctacccctgcctctgtcggagactagaaaacattctaccccttcaggtcttcttttaaaagaaaagagctatggcaaagcgtgccatacaaagttaaaaaaaggaagagtggctttgcgttcttgaccatggccacaattctggtcacttctagcatctgaccttgagaacggtgtagagtctctgagccaccgctggcctttgagagagtctcactctccagctagctctttgtgtagtgtccagggccccggcagtcaggatagagcgagcaaaagaagatggacagtggacagggcgcagtggctcacgcctgtaatcccagcgctttgggagagcgaggcgggcagatcacaaggtcaagagatcaagaccattctggccaacatggtgaaaccctgtttctactaaaaatacaaaaattagctgggcatggtggtgcgtgcctgtaatcccagctactcgggaggctgaggcaggagaatcgcttgaacccgggaggcagaggttgcagtgagccgagatcgtgccactgcactccagcctgggtgacagagcaagactccgtctcaaaaaagatggccatgctggccaaggctgggctcataggaaatatctgtagtaggatgaaaggaatctggcctagggagccccggactcggtttacctaccccgtactcatcccactcatctgtctaccctagtgtccatcatgccctggatgaatcgtaggtgggagggacagaagccgagaacaccaggcacacggggtggggggaatggggggagcccaggtgatcccctttggaaagtggattgatcctctcccctgtggaatgacagcttaacctgattaacccactggggcttgctattttatgagcatttttaaacagaaaggaaagatgatatcccagtgcaggtagactttatttttgaaagcatcgtggcccctcacctctccctctcccccagaaccttggccagaattgagtcttcgcgttggggaggccacgctggaaccattgctctagggctgaaggtggaagtagggccactgccgcagcttcagccagagccctcgctgcttcgcagaatttaacaagcacacgactgggattcctttggatatgagaaaggaaggcaagtgcgggcaaagggaagctcctcccgtttttcataaacagaagtaagatgtcctctttcccaggtttgcacaatcacttctggcaaattaattgaaggtccttgaattcagccagtgcacgaaacctttgcatgttcttctgaaactgtacttcttccctattctgtctacccacactctgcgaactttgccttttccttaaacacattccagaccaaacactgttcagtttgttaaaaaaaaaaaaaaaaaaaaaagatgtatatacctgtatgtgatccaccacccttttgaggggcacctggtcctcggttggggctgcaggtgtgcctgacatttgcaaaagatattccagtctttcgatgttcagaattgaaaatgtggagatagaaaagctcaaacagactcctaaaaggagggtttctttcctgaagactccaagaaaatgagtgtgcagatgagttagcttgacaacctcaactctggggagc

SEQ ID NO: 4607 - DNA, 2300 bp, Homo sapien
aagagttttgattctgtcaagtttatacaacaagagaaaaaacagccatgtttgctgatttttatttatttgctcacctatgtggaaagaaaagagagggccttacagtcttttggggtagacaaatcttttccaggccttcaagacacttgaagatgcagttagtaagaaaaactttcttactatcttatctgatgagttacagtataggactaaaatagagcagggattctgggtcatacaaaattaatgttaggtcagttgcacactccttgagccatcattggtgactctgctaaggttttctcttaatttgctctgtgtatatcctggttaaagggccgacctgtgtctttagagcatttcctatatttggccctattctagtgttgtagttaagtacatggatctggagtctgattgctgggagctgaatcctagcttggtcaacttgtagctttgtgatctttggtgtcaattaacttctctgtgcctgttatctgtaaaatgaggataatagttatatctacttcagaatattgtttggagaatttattaagatgacatatgtacagtccttacaacagtgattggcccatggtcaacaatgactaaggtttagcaattcttattataacttggcagtgtgtgctgtgagtctgcctgccaggaatataaaccatttgggatccctgctctctttctctagcaaacctgcagaacacctgctaaatagctcatatagactgaattatgtctcccctcccacctccaaattcatatgttgaagtgctaactccctaatgtgactgtatttggaaatagggtcttcaggcaggtaattaaatgaggacataagggtggggtgataaccccataggactagtgaccttgttagaagaggaagagaccagggctcactctttctccatcacacacagagagaaggccacgtgaggacacagtgagaaggtggccgtctgtaagccaggaagagaggcctcaccagtaaccaaccctagcactttaatcttggacttcctgcctccaaaactctgagaaagtaaggtctgttatttaagccaccagactagagtattttattatggcagccctgggagactaatagcattatgaaattgcataatttaaatattcagggtggatgtgggggctcacgcctgaaagttcagcactttgggaggctgaggtgggaggatcgattgagcccaggagtttgagaccagcctgagcaacatagcctgtctctactaaaaacaaaaaattatccggggtggcagtgtgcttgtattcccagctacttgggagactgacctgggaggatcacctgagcccaggggaggtcgaggctgcagtgagccctgatggagccactgtactccagcctgggtgacagatatagaccttgtctcaagaaaaaaacaaaaaacaaaacaaaaaacctgttgcctttagagataaagatggaactgtggagtcagtatcctcaaattcactcactgatgtgaaaagctgtttgggatttacttctgaatgtatttctcaggtgtacagtgtttagaaaatggaatcagggattatggaaaccaagaaaatcagggccaaatgattgctttttggaatcttttatcaaagcttttctaagatcttcattaaataactagcaaatctgagagagcacgagatctcagcccacactgaatttcctaatctctgggaatataaagtcagatttggtttctatgtatttttactctgaaatgtagagaaaatgtaaaaacttaggcagtaatcgtgcaaattaagagtcattctttaatgaatgccttgcgtttgcaaacaggctttacgcctggcaagctcggaccacgtccatcgtggggcgccaggagattgctgggccactgtccccaattcagggctgggtcccggcgtccccgcgttctccgagtccctggtccccgccccagccggcgccgggacccgcccgactccccgcccctcccccgcccacgccccagccgcagggggcagggcgggaggcgggcgcccggcgcgtccagtccccgggacccttttaaagcgtggcgcgccagggccgggcatgccgagccccgtggcggagacagcggtgcgctcagctcccgggagcggcccgagcagccgagcgcccagggctgcccttcccgggccggcgggctccccgggctccccgccgccgccccgtgcgccccgggagggcccggcatgctgcgccagctgctgctcgccgcgctctg

SEQ ID NO: 4608 - DNA, 2300 bp, Homo sapien
ttctaggtgttgaagacgtatttcctctttaatcttctcagcatccttaggtgagggctgtgggtccagaggccttatctaaaatttttgggtggctgggcaccgtggctcacacatgtaatcccagcactttggaaggccgaggcaggtggatcacccgaggtcaggagttcaataccaggctggtcaacatggcgaaacctcatcaatacgaaaaatgcaaaaattagcttggtgtggtggcacacgcctgtaatcccagccacttgggaggctgaggcaggagaatcactcaaacccaggaggtggagattgcagtgagctgagattatgccactgcactccagcctgggcaacagagtgagactccacctcaaaaaataaaataaaacctttggggcaagctctgctttagagtccagaattctggggattttcaaaaggctattcaataaatgggatttatatcacataacaccctgacactgtctgacgcagttctcctatcaactattcgattttccttcacaaaacaaatttaaaaatcacatcaagggatctaaataaagactgtaaatagctttccatcagttgggtctggtcagaaaagaggtttggtccttagaactttctggatttgggagtgtactatactccccattttacagataaagggaatgaggaagggtaagatgaagtaacttggtcaaggtcctacagctaagaagtggttgtcgggggagtgtgtgtgcatgtgtgtgtgcagtgcttcagggcaccccccaccccgaccccaccactgagagcaaggaatcaggagaaaacaactttgactgctttctgtaccagaaactcacctcgagcctcccacaccaaagccatgggcagcttgtgggtgaccttcttctcttggctctgagtttcactgatgctcattttaattcactttcatagtgttgttttgttctcgtttttgtttttgcttgagacaaagtctccctctcacccaagctggagtgcagtgctgcaatcacagctcattgcagcctctccctcctgggctcaagcgatcctcctgccttgacctcccaaagtgctgggattacaggtgtgagccaccgtgccccacctatagggttttaaacagtaaaaggagcctagtgaagtacgacttaccgcaggcaccccttacaggccccggggggacccttttctgccgatcccagggtacagctgtgacaccgtcttttctgcctggattatcccagtagataaacaaaaattagagatcgtcattccatttctctctgtatatatttttccaagcccttttcatgaatgatcagttatttcctgcactgattttttttttttttttttttttttgagacggagtctcactctgtcacccaggctggagtgcagtggcatgatctcggctcgctgcaagctctgcctcccgggttcaagcgattcttctgccttagcctcccgagtagctgggactacaggagagtaccatcatgcccggctaatttttgtatttttagtagagacaggctttcaccatattggccaggctggtctcgaactccggaccttgcgatctgcctgccttggcctcccaaagtgctgggattacaggcgtgagccaccgcgcctggccctcctgcactgatataaaaagaatttttttaaattctctatttctccccactcccacccccaggctcactccttataaagcagcctctagcctcatctgcccctcctacaccacaccaactcgagggcccggaattgggtctggggcagtcgctgacttgcttgcttctctgccctgctcttggggttagcctcaggggcagggttgagagtcaggcttggccaggcagcaggaggtccagacagcgaagcagaatccttcggagataccaggagagggcgcatctgcctttttcctgtttcagattaggttttgttgttgttgttttgttttttttctctccctctctccctccctccctctctccctccctctctccctctctccgtccctccctctctctctctctccccctccctccttccctccctcccatccctgcagcgctacccgggtactctggatgcacatagggcggctctcgctcctaccttgtcatcctgctgtctaatccgggggcagcttccctcctccacaccagcagaggctattcttcagcaacaagaatagccgagcctattcgtccgcaacaagagcccaagaagcatcctgcaggctttctgctttttgagtg

SEQ ID NO: 4609 - DNA, 2300 bp, Homo sapien
ggatttgggagtgtactatactccccattttacagataaagggaatgaggaagggtaagatgaagtaacttggtcaaggtcctacagctaagaagtggttgtcgggggagtgtgtgtgcatgtgtgtgtgcagtgcttcagggcaccccccaccccgaccccaccactgagagcaaggaatcaggagaaaacaactttgactgctttctgtaccagaaactcacctcgagcctcccacaccaaagccatgggcagcttgtgggtgaccttcttctcttggctctgagtttcactgatgctcattttaattcactttcatagtgttgttttgttctcgtttttgtttttgcttgagacaaagtctccctctcacccaagctggagtgcagtgctgcaatcacagctcattgcagcctctccctcctgggctcaagcgatcctcctgccttgacctcccaaagtgctgggattacaggtgtgagccaccgtgccccacctatagggttttaaacagtaaaaggagcctagtgaagtacgacttaccgcaggcaccccttacaggccccggggggacccttttctgccgatcccagggtacagctgtgacaccgtcttttctgcctggattatcccagtagataaacaaaaattagagatcgtcattccatttctctctgtatatatttttccaagcccttttcatgaatgatcagttatttcctgcactgattttttttttttttttttttttttgagacggagtctcactctgtcacccaggctggagtgcagtggcatgatctcggctcgctgcaagctctgcctcccgggttcaagcgattcttctgccttagcctcccgagtagctgggactacaggagagtaccatcatgcccggctaatttttgtatttttagtagagacaggctttcaccatattggccaggctggtctcgaactccggaccttgcgatctgcctgccttggcctcccaaagtgctgggattacaggcgtgagccaccgcgcctggccctcctgcactgatataaaaagaatttttttaaattctctatttctccccactcccacccccaggctcactccttataaagcagcctctagcctcatctgcccctcctacaccacaccaactcgagggcccggaattgggtctggggcagtcgctgacttgcttgcttctctgccctgctcttggggttagcctcaggggcagggttgagagtcaggcttggccaggcagcaggaggtccagacagcgaagcagaatccttcggagataccaggagagggcgcatctgcctttttcctgtttcagattaggttttgttgttgttgttttgttttttttctctccctctctccctccctccctctctccctccctctctccctctctccgtccctccctctctctctctctccccctccctccttccctccctcccatccctgcagcgctacccgggtactctggatgcacatagggcggctctcgctcctaccttgtcatcctgctgtctaatccgggggcagcttccctcctccacaccagcagaggctattcttcagcaacaagaatagccgagcctattcgtccgcaacaagagcccaagaagcatcctgcaggctttctgctttttgagtgtattttaaagcaaaaacgagtggaaagctatgtatgctcagttaactatgtctagatgttaaccttttttcaaaaaacacagatggaggcctccctccgaggatgcctggcattctcctctttctgtgggcggcagcgaccccctgcggctccagcctccactacgggatctgcgggaagacacggggaagacgaactccgcacactgcatttgattaatgatttattttgattaacgccgtcacagtgacgccttagagcagtccctgttcacccgggtcccagcctcgaccccgcacggacagcgagggtgggtagctgggggcggacgcaggaaagaggaggggcggggccttggtcgggtggggtatggaatgggcagggtgggggggatgggcggggtatgggatgggcggggcccgggaaattccccggcgcgggcagggagcggctggctgtcagctgagccgcgctgggcggggtcgccaggccgcgcatcagccctaggcaccccagtcccggctgccccctccgccaccgccgccgcccgccggcaggttccctggtcagcgtcccatcccggtcgggagttctctccaggcggcacgatgccgaggaaacagtgaccctgag

SEQ ID NO: 4610 - DNA, 2300 bp, Homo sapien
tgttttctgtcactgcaaagccatctgggtatcacttcataacacagattctaatgctcctcatacacatgtcaaagtggaaataacaaaaacttttaattttttctttctaaatgaaatatttttttaaaaaaaagtttaatttttttctttttcctttgggttttctatttcataaattccaaagaacatatatcaaatatgccaaatctctataaaacagaaggtgtatttcatggccagaatacttatgcgcctctacctaagtaagggcgggggttcggcaggacataatacagtgtccagttgccctcgagaataaagtttggttttccgggggtgggtgggggggtgggggggtggaggttaggttagttatattcctagcataatatgcaacctaaaggttagtttataaaaaaagaagctgttacttttattgtgttgtacgtaatatataaagaacgcctaaaattggcccagtggaaaaacagatgaattatgccaggacttaaatcaatgatcgtcctctgtctacaggtcacatttaaacttgccttgtccactccagggcaatccctggccttggggtctgccctgggacttctccagcccccgccccaaaactgggcctgtcctgggaggcagcctggcaccactaactcttctctccctgggtcaaaagagcaaggtgggttcttctgttcacacagcctgcaccttgctaaccagatccaaaggcttctgaggtcctcacattgccttacttttctatgctttcattttccatttcatccttacaaacagttccttggtgtacatttccatacaacagttttcctgctggtggaggccaggtcggaacctgggtttcattttctttgagcgatgtttacttcctgtagcttatgcatttcgatggcaaaaacaattcctttggggttctcggcctcatcaaatattctctctatatagagtgtacacactctcctagacacagcagtctatgtggattcccaccgaccctgggcacctcattcagctcgggtagtggtcccatgtctcccacaggcgtgtctgtaaccacctccttatggcgaggaactggctgcggaatccttcccagcctgcgggaggacgtcacctccaagtctctgggtgacttgtagaggggttacctgcggccaagaggccggccctggacccttcttgggcccaccctgtgttcactacccaccctctcccaccaggtcaggacccgccgaggcttggggatcctcccagggcagccgtctcgcgggagggccgccccacccctcgccaccctcaccccgacaggctccgggccgcggggcagggcggcgggtaccgttttcaggccgcggaagcgcccgccgggaaggagccgccgccccctcgcccaccgctgcagccccctgccctggctcacctgccgcccggcttggcttcgctcagggtcactgtttcctcggcatcgtgccgcctggagagaactcccgaccgggatgggacgctgaccagggaacctgccggcgggcggcggcggtggcggagggggcagccgggactggggtgcctagggctgatgcgcggcctggcgaccccgcccagcgcggctcagctgacagccagccgctccctgcccgcgccggggaatttcccgggccccgcccatcccataccccgcccatcccccccaccctgcccattccataccccacccgaccaaggccccgcccctcctctttcctgcgtccgcccccagctacccaccctcgctgtccgtgcggggtcgaggctgggacccgggtgaacagggactgctctaaggcgtcactgtgacggcgttaatcaaaataaatcattaatcaaatgcagtgtgcggagttcgtcttccccgtgtcttcccgcagatcccgtagtggaggctggagccgcagggggtcgctgccgcccacagaaagaggagaatgccaggcatcctcggagggaggcctccatctgtgttttttgaaaaaaggttaacatctagacatagttaactgagcatacatagctttccactcgtttttgctttaaaatacactcaaaaagcagaaagcctgcaggatgcttcttgggctcttgttgcggacgaataggctcggctattcttgttgctgaagaatagcctctgctggtgtggaggagggaagctgcccccggattagacagcaggatgacaaggtaggagcgagagccgccctatgtgcatccagagtacccgggtagcgctgcag

SEQ ID NO: 4611 - DNA, 2300 bp, Homo sapien
ttctttttaaagactgttggctcttctgggttctttgctgttgcgtaagaattttaggatcagcttgttaatttgtgaaaaaagccagctgggatcttactagggattgcattgtatccccaaatgatttggggagaattgctatctccaggattgtgtcatcgcagagatagtcttgctgcttcttttccagtctgaatgccttttatttctttttcttgcctgattatcctgtaaaaaaaaaaaaaaaaaaaaaaaaaaagtgttacatagaaatggagagagcaggcatccttgtcttgttcctaatcttagggggaaagctaaggccccacctttgtcatcacttcagaggttcctggtgtcactcatgcttgagtgtcctggagttcccacagtgtgaatctggttgcttcttggctgtccctactgttggctcaaaggtcggccttcttgggctggtaaggccccactcagacctgtactgccaaattttcctactattatttcctctccctttttctttgttcctgtaggcacatggctttttgaaggtccttttagtagagtttgggctgggaaaaaaattgcatgcatctgttcaacccattatctttaaccacagtctcttgtttcatttggattgggacggctttcctgtggttatgatttggtgttaagaatggtgttactttttttgttgtcgtttattcggtgacttttaaacttagctgtgtcctaaaaggaaaagtctttccttctctaatgaattcttatgaatgagataccatgttcatggaacacacatgcatccacatgtgtaaacacaaacaatttcaaaaacattgctgcataggacagttgcatggaaacaaatggtgttcaagatgagtttcacttgccttttacctctgtgtgtatttgtctgtgaatcaattctagccaattttaggatgaaaaataaaactaatgctaatatagtgaatgtgtagagattttgaaaacccctgatcctttatcccaattgtaaacaatgttctttttagtacttctgtaataattgctatttctcttaaagccaaagagaaagtaacttttctatcttctgtgattttccagagtttcagattttgaaaagaaaacaagtaatcgttctgagattgaaacccagacagaggggagcacagagaaagagaatgatgaagagaaaggcccggagactgtgagtcctaagattccacggccactaccacacccacacacacgagagtagtccagccactgaattcaaatcttgtgatgggttatttgctttagaaatatagaaatcatgttgatattgaatattatctatctattccttttatatgtccttgtcctgctctgtgtcaattgtagcgagatgtatttcttttttgttgttgttgttggagatggagtctcactctgtcgccaggctggagtgcagtggcacgatctcagctcactgcaacctccgcctcccaggttcaagcagttctcctgcctcagcctcccaagtagctgggattacaggtgcccgtcaccacgcctggctaatttttgtatttttaatacagacagggtttcaccatgttggccaggatggtcttgatctcttgacctcgtgatcctcccacctcggcctcccagagtgctgggattacagatatgagccactgcgcccagctgcaagatgtatttctatcagtattctacaaaacgatttcctatgtctcttcttgactgatttcttctcctcggtccttcaatgaacaagcctactgtaggaaaaggaatgttgtccactttataatgagatcatttgaggatatgacttagaaacttgagggagaattgaaagatttgggttctatcccattactggtttgaataaagtagtttgaaaggaaaaggttcactgttgtcttgttcagtgttgtctggtaattgagagaggtgccttcgagtctgcagagagtcttcagctttcggaagttaatgaagccgtgaaggttgatagccataggggcccacgtgaaaggcatttacataaaatattcactttaggtaattaatttattcaacaaatatgtacattgaatgcctattgtatgtcaggagactgagaccttactgttgaaagaagagagaacatttagaaaacagatgaagagaccaccagtgaataatagttccctgttgactaaaacgaattcaacagccagtagcagggaaatatggtctttcaaggcatcagaaactcatttacaaaaattata

SEQ ID NO: 4612 - DNA, 2300 bp, Homo sapien
atcacttggccgtttctcttcttacctcctcccagttcaaaatgctagcatattttaatagccagcactctcttagagctgcagctgggctcaacgcactcaagccttggcacaattttctgtagttttagccctttcctggaaaatcggcttaatttgcccacgatagccactctgcttcctgtcataacgccgctttccctgggcatacagagaatccttctccttcgtgtacagtgtcactttgtggggttggtgcttgccacacttcttatagaaagtctggcgggttttaggaaacttcgtaatgtttgtgtgagcgctatcggcacggaaaagccacattcaatggattttaaaaaatctatttgcctaattgtttctcaaaatcacctccacttcttttctcaaagtcaccactatactaattccaataaaaagtgcttgattcttcacttaaggaaggtttgcgggcttaggttggttctgtttctgactccttgcccggaactggatgcaaagaggacctggaaagtgaaggtgaagaaaagaacttcagagtactgatcagaattagtcaaggaatttctgcataatggctaagaataaatctatgacgaatcttttttttttaataactagatgtagtgatgcatttatttatttatttatttatttatttatttatttatttagacagagtctggctctgtcgccaggctggagtgcagtggcgagatctcggctcatcactgcaatcgccacctcccaggttcaagcgattctccgcctcagcctcccaagtagctgggattacagacgcgcaccactacgcccagctaatttttgtgttgtgtgtgtttttagtagagatggggtttcaccatgttggccaggctggtctcgaactcctaacctcgtgatccacccacctcggcctcccaaagtgctgggattacaggggtgagccaccgtgcccggccttagtgccgtatgtttaaaagtacgcatttaaacatactttttcaatttgattactagagttcctccattactatgaatttttaacactagcagctctcagaaatggttgtattcctattcctgagccaatataggtttaagtaatagggctgagctcataaatggagcagtaatattccattaggacacagaaaaaagtcaacgtagatggcatcaggactgtttatcttcagtcttcctaaagtcgattttaattgttctgaaaatgaaagtacgtagtggatagagataggatcttataccaaagggattattagtgggggaactgcagtgcctgaacagtgtctgcaaggaggaaaaggggggaaagacttaaagtggccatttggtccatcaaagtctcttctgctatcaatcccttgaaattatgtaaaagctaaatgttattctgcatttagaaactatgttcttagtattatgtacaaacactattttttagaatgtaaatacataaagaggcctgaattttactgaaaaaaaaatctgtgaaagatatggtctgctgataagttctcttcagccctgacgccccttagaagtcccaaaatctatggaacaggaattactcgggaaatggtggtttcagtgtaaaagatgtcatctaccctttccctcactgcacagatggtgaaggggaaactcagagagataagtcacttccccaaggtcagacagggtaaaagtggaccggatctgtttggtcctgagcccaaacatttcgaatggacataaggctgacaaaggaacagtcggtcccagagcgtcaggagttgaggtgggatgggaccgcagggaaaatactgggtgggatgacttaaacttcccggcaccagggggcgccagacactctattttacctaaaggagactggcttctaccgacaggaaggtcccttgcccccaacaaagagggcgtccaatgacgtaaaccaatccgattgctctgtgccagggccgggattcgctggcgtagccagtcagtgctgccccacagccgcgtgcgtctgacgtcaaggcaggggcgggatccggttggaattttggcgggttcagctgtgaacgaagaaggcgtcccggcatcgggtgaggagcgcgggccccgggcgtgcgtgtgaccctcgggcggcggggccggggccgcctcgcacgtctctgcgcgggttgcaaggggtccgaggctagaggcgcggggtcccgggagctcgggtgggcgcgatctggatttggcggcagcttgggaccgctcggagctggcat

SEQ ID NO: 4613 - DNA, 2300 bp, Homo sapien
cagcacacacatgtatatgcacaaaacagcagtgaaaaggctttctgccctatgtattgcttttcttttattgccgggagacctaagacaagatgggcctgataaaacatgggttggaggacacagcattttattggctgcacgtgtttggaaaagcccctttgaatagcatgggtctgtgccacagtcgtagagaactacttccgcctgagtgttcacattaatctgacagcaagttatatattcagatatccattcaggagtagcatccatcccctcaggacctttggcattactagggtgttgcattaggtaatgtccaaagtttggttttaaggggtggggaatgggcctggcctctaggttctaaagttctagggtcaccctggcccccagtgtgagagcagtgatccaaagtccctttgagggcaaacaacaatcttatgaaagagagagtgatattttattaaggaaaatacccaagcatctgactttcaggagaattatcaaacacttctaaaatatgaaaagtaactccatcagggatatttaatgaagcaatagtaaatagaataccagacccctaactttccttggtcccacaaataaaatggaatggaatgaaatgaaacaagaaagaagaaaaggggagctagttttggattttttttttttttttttttttttttgagacagagtctcactctgtcacccaggttggagtgcagtgggatgatctgggctcactgcaacctccaccttctgggttcaagtgattctcctgcctcagcctctggagtagcatgccccaccatgcccagctaatgttgtatttttagtagagacagggtttcatcatgatgggccaggctgatcttgaactcttgacctgaagtgatctgcccacttcagccacccaaagtgctgggattacagattcttaaagtagaatttgaactgtacataaatctccactaattactcattctgaaggaggtcttgtcctccctttgataatctgcgccagtgctctgtatcttgatgaatattcagtaaacatcattgcatagagaatcagtattatagagtggaactatctagtacagtagccactagccacctgtggatatttaagttaaaattagattaaatttagttagaaatgtatttccttaaaagcacagggtcacatttaagtgactgatggtcacatgtgtctggtagctagcaccctattggacagcaccaatgtacaacattattatcatcagagaaagttctattggactgtaagtccaagaaatggtcttgtggggcatgctttgttcccaagatttgattattgcatgtgttgctttaaaaaagggacaatcctggccgggggcggtggttcatgcctgtaatcccagcactttaggaggctgaggcaggcggatcacctgaggtcgggagttcgagaccagcctgaccaacatggagaaaccccatccctactaaaaatacaaaattagccggacgtggtggcgcatgcctgtaatcccagctacttgggaggctgaggcaggagaattgcttgaaccctggaggcggaggttgtggtgagctgagatcgcaccactgcactctgggcaacaagagtgaaactccatctcaaaaaaaaaaaggaacagttcggactgtgtgcgtgtgcaatgtctcacgcctgtaatcccagcactttgggaggcctaggtgggtggattgcttgggctcaggggtttgagaccagcctgggcaacatggcaaaacccgtctctacaaaaaatacaaaaattagccgagcatggtggcacatacctgtgttcccagctactcagaaatcgcttaaacccaggagatggaggttgcagtgatcccagatcacgccaccattgcactcctgcctgggtgacacagtgagtccctatctcaaaggaacaaatccgtaaaaacaaatttccaaattccgttcgtgattatcagtgtggttgccttttcattaattgtgttaattttctagatcccaaaagctcatcttcaaggatgacaagtgcaccctcccaacccctacagacgatttctcggaacaaacctagtgggataactagaggtcaaattgtggggaccccaggaagttctggggaaacgactcaacccatctgtgtggaagccttctctggtctgcggctcaggtcagtagctaaaccatctattcatgtgcgccacggcatagctttttgtgcctctcggagtcctttagaagtagtgtgtttatacatcag

SEQ ID NO: 4614 - DNA, 2300 bp, Homo sapien
tgtcattgttttgggtgacacatgtggttgtccctgtgacactgtgatctctcccatggaggagaggcgcaagtaaccaaagaggctgagctcaccgattctttggaggtccctttagatgtaaagtaccaaccacaaaagtgctgaaattgctggcctgtgtcagtgccgtgtgatatatttaatttgatggttattaccaaagatctaacaagtttcaaaatcacttttgactgagtcataaatgggaaagttattctgtgacctggcaagtcagatagcctgtcttctaagccttgtgcctttaactagcgatgttaccttaggttggctgttaatctttctttaccggcttccatttccttatttataaaatgaaggaactgactttgattagattgaaaatctctcctatctctaaaatgctatgattgatcatgctcaatcatgatgttattctctaatttagatcttggcccacctttggtttttcgttagagctgacatggggttgaattttaagagtacctggtcctaagccattatcctccacaaactaatgcaggaacagaaaaccaaacgctgcatgttctcacttataagtgggagctaaataaatgagatcacatggacacaaggaggggaacaacacacactggggcctgttggtggagggcagggagggggagagcattagggaaaagagctaatgcatggcaggctttatacctatgtgatgggttagtaggtgcagcaaaccatcatgacacacgtttacctatgtaacaaacctgcacatcctgcacatgtaccccagaacttaaaaaaattttaaaaaattaaagattacccggtcttacactagccctgtcactgttgaggtaaatgtggacaggtctggttttcctttgatcaaattcttagttacttcataagtggctgtaatgacataataataatagacacgagaatttatctgaactcttccaagacaggcactgcacaaatccctggaagatggattccagctcagcgtccgggcagtagattccatgctgtaacccataaccatccccagcccgggatgcctctgtgagatagtgcaagtcaagattattcacagtattctggttttaaaaacaaccgtaaaagtggaggtttttcacattataatcggtcagcattttgagctgtatttcttcagatacttaatcatacttctgaaatgttaaggttaaactcaaccagttttcttgaaatgatgcttttgtaagctaagcagagatgtaatagcctagaaaggaaacttcttttttcatattaataatagacttaggctaggcttggtggctcacgtctgtaaccctaacgctttgagaggatggggtgggaggatcacttgagcccaggaattcatgaccagtctgggcaacatagtgagacctcatctctatgaaaagaaaaaaaaaattagctggggctggtagcacatgcctgtagtcccagctgcttgggaggctgaggatggaggattctttgagcccaggagttggagtgagcaacgggacatgattgcaccactgcactccaacctggatgacagagcaagactctgtctctaaaaataataatcatcatataattaaccaatgatatggaatagatttactcatttacctaatattgattcatatcagtaagttattaaatggtactgtcataccttccactgtccttttaatgatgtgtgtgtgtgtctctgtgtcattagaaaggcagtgctatcccactccctctgcttagacccgagataactagagactctgctaacaagtttgccactggcttgctttatttcactttcatctctaaaatgagaagggtaatagaatgcaaaagcctagagaatgggttaaagttatcacacatgctgatgatacatatttgaataacaacaaaaaaacttggattttatggattataggcatatagttttccatagtaaaactcttgaatcataaatgaggacggcataacctacagttcaaaattataaaaaataactatttgttccagggaaaaaccttcagcatatggaaactgaatgatcttcgtgacctgacacaatgtgtgtccttgttcttatttggagaagttcacaaagcgctctggaagacggagcaggggactgtcgtagggatcctcaatgccaaccccatgaagcccaaggatggttcagaggaggtaagagcctgtttctgggatttgattgatgattgtctttacaagttaactgagtt

SEQ ID NO: 4615 - DNA, 2300 bp, Homo sapien
actcctgacctcaggtgatccacctactttggcctcccaaactgctgggattacaggcatgagccactgcacccggcctttttttatttttttgagacaaagtctcgctctgtcacccaggccggagtgcagttgcgcaatctcggctcactgcaacctctgcctcctgggtccaagcgattctcctgcctcagcctcttgagtaactgggattacaggttcatgccaccacgcctgggtaatttttgtatttttagtagagatggggttttgccatattggccaagctggtctagaactcctggcctcaactgatccacctacctcagcctcccaaagtgctgagattacaggcatgagccactgcgcccgactgaaagtctttctttttttaaatagacatgggggtctcgctatgttgcccaggcttatctccaacccctggcctcaagtgagcctcctgcctcggcctcccaaagggctgggatttcaggcttgagccactttgcctagctaacataaaagtcttgtaagaggggagcttcaggtaggtatgggctgggttctaggtctagtgatggttcccattagacaaacattaaacgatgccagaaggctgacagcaaagagttgatggttcctaacaaaggcaacattaggaacacatctccaaggggactgagctctaatggccatgttggtgctgatttcattagtggtcccatttctgggaacccatttcctcccctacatggagtatgatgtgtgtcttcctagagatgcaggattagctgtggagcttttcagatacctgcccttctccccctccgctgtggaaggtgattgaatttggccttgctgtttttaaattttttttttttttttttttttgagatggagtctcgctctgttacccaggctgtagtgcagtggtgcaatctcggctcactgcaagatctgcctcccgggttcacgccattctcctgcctcagcctctctgagtagctgggactacaggtgcccgccaccacgcccggctaattttttttgtatttttagtagagacgagatttcaccgtggtctcgatctcctgacctcatgatccgcccacctctgcctcccaaagtgctgggattacaagcgtgagccaccgtgcccggccgctgtttttaacttttaaatttttattttattttattttatatgtattttttttttgggactgagtcttgctctgtcaccccagctggagtatagtggcgcggtctcggctcactgcaacctctgcctcccgggttcaagtgattctcctgcctcagcctcctgagtagctgggattacagacgcccgccaccatgcccggctaatttgtttatttttatttttaatagagacagggtttcaccgtgttggccaggctggtctcgaactcctaacctcaggtgatctgcctgcctcggcctcccaaagtgcaggggttccaggcatgagccaccgcgggaaggcaattgactttaaagggctctgggacccgcggccccaggagtttgtgtttggcttggcagtgagcatcagctggaagcagtgcatcaggtaaggtgttctctggtcgctgtcagcatgacccacacgtctgtgtgtcaccctgatgggtattccagtcattatgagcccttcttgactgacatttagatcaaaactcccccattgatcctctcttcctccttgcccccacccatgcttcaaccctgaggaccggggccctaacgtccctggagcaggtgccaggacctccttgacacaggccttggtcactggaaccctgactgttaggatgagccttcccagcagcagatccccagacacggacattggaaaggccactccaagaccgtcccacccagggccctaactacaagctctgcttctggagacatttgccaggtgccaaaaacatctccgttgctccatctaggagcagccaatggaaagggcagcccagccccctcctcctctcccccagtggtatcccagcctcctgcctctctcttccctcccccgccttccttcctctcgcctgggctgcctgcctcagaagtggggacccaaagggtgcaggacgcctggtctgccttgtgggtcctggacggagcccctacctctgcaaagatgacttggagacaggccgtcctgctgtcttgcttctccgccgtggtgctcctgtctagtgagtacaggagggtcaaggtggagggtgttagttacatggtaagggagacttaccatgcacaggtaaggc

SEQ ID NO: 4616 - DNA, 2300 bp, Homo sapien
gtttttgaaacacagtcttgctctgtcgcccaggctggagtgcagtggcacaatattggctcacttcaacctccacctcctgggctcaagcgatcctcccacatcagcctctcaagtggctggtactacaggtgtgccacgctcagctaattttctggggtttttgtttgtttgtttgttttctggttttcgtttttgtgtttgtttctttgtttgagatggagtttcactcgtgttgcccaagctggagtgcaatgacgctatctcggctcactgcaacctccacctcccgggttcaagcgattctcctgccccggcctcctgagtagctgggattacaggcatgtgccaccacgcccagctaatttttttttttttttttttggtacttttagtagagacgggtttttaacatgttagccagactggtctggagctcctgacctcaggtgatccacctgcctcagcctctcaaagtgctgggattacaggcgtgacccacttcccctagccagtttgaacaatttaatccaagattttaaaactcaaacattttacttagctgttcaaatatggctattatttaacaaatcatttaatttatatatatggggaaaactattccttagatcattttgaaaattgtgtttcaaaacttgtctgcaaggttactttcaatacgtaagtaaccaagcacattactggaagtggggggaagctaattttgaagtaatcttcaaaaggtcaactttaataagaaatgaataaatgcctaataccaaaggggaaagaacttttcattcttgtgataatgtttacattccattaatgttctgcttcaattgttctaaaatatttttattttaataacataattattaaagatgcctacttagggaattttccaataatccaaatagctatttgaaagaaaactagtaacattcatcaaattacctctttacctacggagaaattattatgttaattctccgtgggatcttaaatgaaaaatgttaaacccagcatccctctaattttaaaaaggcagataacaattgtgagcatttaagaatttccttcatctgtcggtaaaaagcatcagtttgggccgggtgcggtggtttacgcctgtaatcccagcactttgggaggttgaggcgggcggatcacttgaggtcatgagttcgagaccagcctggccaaaatggtgaaactggctctactaaaaatacaaaaaattagctgagcttgatggcgcgcctgtaatcccagctactcaggaggctgagtcaggagaatctcttgaacccggaaggcagaggtcgcagtgagccgagatcacgccctgcactccagcctgggaaacagagtcagactccgtctcaaaaaaaaaaaaaaaagaaaagaaaagcataaatttaaatacatctaaatatctaagtacatccttgtataaatgccttgggggagagatggcaggaattttcacatggttgtgaaattagggcattttaaaggaacagtaaaaacacaggtgtaagtagcttcatctcattcgaatttctttattggtcatgaaaaccaatcaccgtcagcgcgggtaaaggtcctgatctttttttttttttattttttcacccaggctggagtgcagtggcacgacctcggctcactgcaagctccgcctcccgggttcacgccattctcctgcctcagcctcccgagcagctgggacaacaggcgaccgccaccaccctgctaacttttttgtatttttagtagagaccgggcttcaccgtgttaaccaagatggtctcgatctcctgacctcctaatctgcctgcctcggcctcccaaagtgctgggattacaggcgtgagccaccgcgcccggccaaggtccgattttttaataaacaagggaagggtgatgaactgaattcacagcttcagttttttttctcctggcagcagtgcccacatttcaccaggcgagggcagaaaggagagaccgcctcgccggtccacatccagaaaggggcgttcccaagggcagaaagaggccgaccctccacctgcacccgccccaggccctgcgcttgcgttcaaaccgtgacaaaccgtagagtccttgagagccccgggttactcctacatggtcatattcccgcgcgggatgccgaagtggggcagatgaggtccggagctgctgagggatcccgggtccttctgttggtctgagaccctggggcgggcggaatcccggagaaagccggagggactccccagtggaagcct

SEQ ID NO: 4617 - DNA, 2300 bp, Homo sapien
ggatttgagcatctgtggatgttggtgtctgtgggagtcctggaaccagtcccccacagataccaaggaacagctgtcctcataagaggacagaagagtgtccttctgaggggtgtagggctgctcactgtgttcagctttcttggtgggaatgctagtctgagtttgtaaaatgcctgcattacaagtaatttttaaaggagtacagccttatctccaagacaaggagtagcgtatcttgactactactggtggtcttgggactcctctgacatagatgccagagtgtttatatccaggcttgattggaaatttccattgaattgtagattgggatttgtcctttcatttcatctgtgtgtgtgtcattttcacttttgactaaaatgtataagtaataatagcatttttcaatgtaaaaatattttacatggtttctgatgggacaatacgataatgtctgtaaagatgtacgcacaataactatacttaagataacccaagttccatttataggattctcatcttcaaagaaattgtatacggtaccagtcacacgctacagtaatacagtaaaataataaaagtcatacagtgaaaaagatttttattcaaggcatcattaaggattaaaactatgccatattggagttgagtcttgatgagtaacattttcattggtattttccatcctaagctggatatgtttcacgtttatttcagttacgcttcttgataggaaacacatggcttcattggcagcctgcagtttccataagtatcttatgagctcttcctgttcagagcactggtgatataaaatgaaatggctttcccgttttatttttggatgctaatgacttccatctccacaggcattggaatggatacttgtgtcattcctttgaggcacggtgggctttccttggttcaaaccacagattacatttacccgatcgtagacgacccttacatgatggtaagcgtgagccgatgtgtttttgtgactggaagggcttatttgtttggtttgggttgtggctggggttttgtatgtatctgtggggttttggttttatttctgttatatcccgactatactgccccaccctgcccagactcctgcagttgctgaagtcaggcctgtcccctgcccacacttggcactgggcataaagcaattagggaggaagcagggaaggccctctgctgctgttgcaactgagtacatgctgtgagtaagaacacctcttgtttagtagcatgtcaatggcctgtttttgtcattttcttctttcttgcaccttctcttctttgacattggtaacctccatcacccctgtgttttaggctggagatgttactgtcctctgtaataggactgatcctaaatgtttccttcaagagattaaggagctagtatctcatcacaattagatgcctcaaacattaattcggatatctggttaattcactcaacccagccacttgcacacccaccaccgtgtgatgtgccgctgtacatagtaggtttctgaccactgagttaaagttcctggctactgatgatacactgctgaggtgtgttccccagttgtttactgcgtagttgcagccagccaccctttgatccacccaacctttaaccccaatttgctaccacccaggaggagccagtggagagactaggaaaatctggtttgctataaaatgccaggtgttcttcgtgtgtggcaaggacagtgggatcaggctgcactgtagggactttatcatgaggcagccacgtggggggtgttcaccctcaggtaccagtgacaaataccagattattggaaacctatatttcttccgcacatctgtccgttttctcctctggagcaatactcttgagactgggcaggtaagccacagcccaggtcccacatgaccaggtggcagggatggctaaaaccacagtccattgttttccagcatctcctaaaatgagagcacccagaacagaaggggcgctaaatcaccacccccctaactagcgattggcttgtgcgagttgtagaccacctgttggccttgtggactggcttgatgatactgaaagtgtggccacagatggttgttgagctgcattgctgacctccaggaatgtataagaaagcctaaagcaagcaattaaacagccactggaagtgataacacttgggagtttgattatccttatgtcagaaggaaaatttgtattttctctttattgtctataaaagataaaaatttagataagggcaacttaacttttaaaa

SEQ ID NO: 4618 - DNA, 2300 bp, Homo sapien
aaaggcgtaaacatgtggctgcggggtcgccgggcaccgtcccttattaatgcaaatggatccccctggttccctaatcactgcacatttcccccagaaccccctcccccttcccatgccctccaaaaatgtaagaatctagtacttttttcattaggatgtgaggctgatttgtgtccttagtaccatttggaattttaaatctgagcgccttcctgatacaaggtgttttaaacttttttccacccttaaaactcttgagaagatagtaatttaaaaggaagtgatagccacacaattcccctccccacctttttgggagccaggagaggaatagataggaggtaggaaaataactggatgcctcgtgagttggattttttctttttcttttttttttcctggtaggggtgaggctgtgttaaatgcgaggtgttttttgaggaaaggactttgttgtttttgttgaaaacgccttccaagtcaaagtggtattcaaactttcccataactctaagatggcttcaaaattctcgtctcttgtcacttgcggccagcgcctgctctttttgggcagggagacttcttggaatcgtgttcgaaggctgactcctgctcagttgttacgtttcccaccgaaatcattgctcatcccaaaccgtgtttttgtgaagacggtttggattactgcccaaactcgggcttcgtgagatttatatgagcgatgtgcgtcccaagggatggaaaactctataaatgggaattatgttcttaatcataaattttataggggaaaccgaccttaaaacttggggtgtttgtaattctagtcccaataaagtatcagtctggaggtttgtaaactcgaggaacacatgttgttttttcctttagccccaaaggctaaaaaacgtaggagtgcttgttccagaaacctaacggtggtacacagggccgaaatgctgctgatttagtatggcttaatttattgtttcggttctgcaatgaaatgttaatgaggagtagcatattttgtcaatgatgtgtgtactagtttgttgggctggatgttttgctttctaggaaatagcactgcgtgaaaacatcagagaactttccaggctttcgcctgaagaacacagaccttactgtgttaaactgccactgtagtttttaagttgtgccctttagagaggactcctattagttttggattgcattgtgtatttttttattttttatttgagacggagtctcactctcgcccaggctggagtgcagtggctcgatctcggctcactgcaacctccgcctcccaggttcaagcgattctcttgcctcagcctcccaagtagctgggattacaggtgcgcaccaccacgcccagctaatttttgtatttttagtagagacggggtttcgccatgttggccaggcttgtgtcctgacttcaggtgatccacccgcgttggcctcccaaagtgccgagattgtaggcatgagccaccacgcccatccttgtgttgtatattctttgggctcagagggaaaacgtgtttttctaaaataaggatttagcatcgtgaagaattttgtccaatgcatttacattaatgcccttttctgacaagtttgtatcgggcgtttcattcttctgtgtgataaagcaaaagatatcaaaagattttgcggaaaagtcaccttagcgaggaccgccgctttctgaaccacagtgcttccaggttgacacatgaagtgcccagaggtgctgttctaatgctgagtcctagaagaacctttgggatttgctgttcaaggtggcacggtgtcatgtgaacctgcaggctggccctcttgccacagttaaaaccacagtccagatgtcagattttacatagatgtctgtgctgacgcagtcccgttatgaaaagatctattttgtcatatgcactgctgtggtgaatataagtggtcttgatgatttcagcccttgtcacattgacttttcgctgtcatgtattcacttgattcgctggcaggtcccagtgggaattcttttcatggcatctttgtgttttggtgacacccaggtggatccataaagaacccagccaacccgcagagggaggggaggggctgagctgtgaggagagcggggcccaagaaccatgtctacgcgggagtcctttaacccggaaagttacgaattggacaaaagcttccggctaaccagattcactgaactgaagggcacaggctgcaaagtgccccaagatgtcctgcaaaaattgctggaatct

SEQ ID NO: 4619 - DNA, 2300 bp, Homo sapien
gttcttagataaattattagcatcgctcctcattccctcccccaccccccacccccgcaaactggaaacctgggggtcatcttatccttcttcctctccttcctacgtgctaaatcacaccaaatcccttccctgggctgcattccccttgctttcagttcaagtacatctccgggcttgactagtacaataccctcttaatgagaaccgtgaccctgtcttcccctctgggagaagccatcctccagtggcaggcgcctgtaatcccagctactggggaggctgaggcaggagaatcacctgaacccaggaggcggaggttgcagtgagccgagatcgcgccactgcactccagcctggcgacagagtgggactccgtctcaaaataaataaataaataaatataaaataaaagaatgcagactaacacgttctttgcaaacttactacagggtatgaagaaagtacacaaagacaggagcagcctgtcttcgaggtggcatcacttctgcatccagcccaggattaaaacccggagcaactggcaagcggaaatgttaacgaaaagggcatctgcgtagcgtgccaacctgccgtgccacgtaaagcacggtccagtgacccaaaacatttctgctcccaaataacatttggaaaatgctgacctactgcctagaaaagttcgatcggcattcctgcacactgctgttttagagagaagccctaaacgatatctgaaagtatttggtttattttcatcagcaatgctttagaatctcgaaagcccagaaaaaagttatttcacgacgtgaagctcccccctcgatgtcaattcgaacacatccagggttgcggctgccatgttcgctcgaacatgtgcaggacaaacaatgcaaccagcggggaaccgtaaacctttttcctcgacttcctaccacgcacatgaagtgttcaagaaactttgcaggacgtctccacatttcacgaggctcccgtgaactccggagccgagctaaacaataggaaggacagatgctgggagtccccaagcatctaacgcgccgtttgtgttttcaaaaaacctctgcctggcgcccaggcggcttttcctgggctcctagcctcctgtgcaaattgttcccatggtcattgtcttccaggacgctccgctgcgcactcggggagcggggacagcgccccgcagagcgccgcgcggtcgagcccggccaggtggcggaaacgttcccggcccttgcagcggggcccgggaaaaaggtggcccgggcgccaagggcggctgccaatgcaactcgcaacttttgaaatcaatccttttttgcatcatgcaacggatgccaccgctcctcgggtttgcaaccccccacccctcccccgagaccaatcattgccgcgctcggggctgcacggcgcccccgcccccttcccgggccgcacgccgccacccagcagccagggccgcctcttaaagggaggtggccggccttaaaggacccccgcgcgcccagccggcgggagcgcggcggcccggctcccgcagggccgcgccgaggcaggcgagcccccgcggcgcccaggcgcgggcccgggcccccgccgccgccgccgccgccgggcgcggcatttttattcaggcgacgcttaagggagcccggccgcgcccggtgcattgtgggagcggcccgcggcccgttttcgggaggaggcggagggcgcaaagcgagccggtaagcggcgggcccggcgcgggggggaggcgcaggcttaaaggggaatctgggtccgcaggcccgcggcggccgttgcaaatccccctccgggccgcccgggaccgccggggagccgcgcgccgccggccccgccagccctgcctggagaggggcagcgccgggcttggtggggccgctttaaaaaagaagcgccgcccgcgccgccgccgccgccgcgcggggccggggaaggagggagggagggcggggaggagcggaggggagggcggcggcggccacgcaggggttaattttttcgcccgccgacatttttgcgcggcggcggcggcggcccgtgcgcgcggcgggagcggccggcctggggtcgcggggtgcctccggggcctccccgcctccccttttctccgcgcgggccctgtcgacccggggcgggtgcgtcccggcgtcctccccggctcctgggccgcacgcgcggtgcccgccggctcccgccgcctcccgccggcccgaacagggatggcccggccggggccccgagctgccgcctccgcc

SEQ ID NO: 4620 - DNA, 2300 bp, Homo sapien
cggaaccagcagagcctgagaatccagcggggatggctccctagaatggggttctggtgagcccgggagttgcgggggagcgtaggactagctcaaagcagtacccaaggaagaagctctcatcaccggcaaagaaaaggatgcatgactctgccagatgatctgggccaaggctgtagtgtggccctggatgaagtaaggcatctgtggcttacggcctctgcggcagagaactgcttcccggtgagctcgtggtgggtggaggcggggaggaagagtcggttctgaggatggtggcctcccaccgacgcagcggggatcggcctctgtcccgcccagccacttgatttccaagttctgcagagctctgtccaaggtctctttcacttttttcctgagctctcccttcggggttaatctcacctcttacggaggcttcgaacaccatttacatgctgatggcacccagatttgcatctctgagccccatccccacaccaaattccggacctgtttccctattaactttggtctggaatatccggcagacctgagatttgcaactctgagccccacccccacaccatccggcagacctcagatttaacatttccaaagctgaactcaccccgaaacttgtttgcctttcagcagttcttagataaattattagcatcgctcctcattccctcccccaccccccacccccgcaaactggaaacctgggggtcatcttatccttcttcctctccttcctacgtgctaaatcacaccaaatcccttccctgggctgcattccccttgctttcagttcaagtacatctccgggcttgactagtacaataccctcttaatgagaaccgtgaccctgtcttcccctctgggagaagccatcctccagtggcaggcgcctgtaatcccagctactggggaggctgaggcaggagaatcacctgaacccaggaggcggaggttgcagtgagccgagatcgcgccactgcactccagcctggcgacagagtgggactccgtctcaaaataaataaataaataaatataaaataaaagaatgcagactaacacgttctttgcaaacttactacagggtatgaagaaagtacacaaagacaggagcagcctgtcttcgaggtggcatcacttctgcatccagcccaggattaaaacccggagcaactggcaagcggaaatgttaacgaaaagggcatctgcgtagcgtgccaacctgccgtgccacgtaaagcacggtccagtgacccaaaacatttctgctcccaaataacatttggaaaatgctgacctactgcctagaaaagttcgatcggcattcctgcacactgctgttttagagagaagccctaaacgatatctgaaagtatttggtttattttcatcagcaatgctttagaatctcgaaagcccagaaaaaagttatttcacgacgtgaagctcccccctcgatgtcaattcgaacacatccagggttgcggctgccatgttcgctcgaacatgtgcaggacaaacaatgcaaccagcggggaaccgtaaacctttttcctcgacttcctaccacgcacatgaagtgttcaagaaactttgcaggacgtctccacatttcacgaggctcccgtgaactccggagccgagctaaacaataggaaggacagatgctgggagtccccaagcatctaacgcgccgtttgtgttttcaaaaaacctctgcctggcgcccaggcggcttttcctgggctcctagcctcctgtgcaaattgttcccatggtcattgtcttccaggacgctccgctgcgcactcggggagcggggacagcgccccgcagagcgccgcgcggtcgagcccggccaggtggcggaaacgttcccggcccttgcagcggggcccgggaaaaaggtggcccgggcgccaagggcggctgccaatgcaactcgcaacttttgaaatcaatccttttttgcatcatgcaacggatgccaccgctcctcgggtttgcaaccccccacccctcccccgagaccaatcattgccgcgctcggggctgcacggcgcccccgcccccttcccgggccgcacgccgccacccagcagccagggccgcctcttaaagggaggtggccggccttaaaggacccccgcgcgcccagccggcgggagcgcggcggcccggctcccgcagggccgcgccgaggcaggcgagcccccgcggcgcccaggcgcgggcccgggcccccgccgccgccgccgccgccgggcgcggcattttta

SEQ ID NO: 4621 - DNA, 2300 bp, Homo sapien
tacaagatactatatgtttaatttctgtaagttctatttggttctttttgaaatcagcctgttattttcctggtgcattgaatttttccttgctcattttaagcacacttactttgctgtccattgccatccacaaggggtgtctcaccctgcagctcctgagtccactgcctctggtatttgctgggtcattgtatgtgtttcattattttaaatatgagctcatctctagcaggcctgtttttcttttcttttcttttttctgtgagaatctgttgtggcccaggtttcaaggcatcctttcaaactcattctgcatttccctctctctggagcccaggagtctcaacagcaatgcttctgctcacttatagttttatgcaatggtgcaacctcagatcccaaacctctgtgaggtgcaggccaagcatttcatttttttttttttaagatggagtctcgctctgtctcccaggctggagtacagtggcaccatcttggctcactgcaacctctgcctcccaggttcaagcgattttcctgcctcagcctcccaagtagctgagattacaggtgtgcaccaccacgcccagctaatttttgtatttttggtagagacggagtttggccatgttggccaggatggtctcaaactcctgactgaaagtgatctgcccgccgcggcctcccaaagtgctgggattacaggtgtgagccactgtgcctggctgcctttagaattttctaaggaacctttctttttctccctcaaagtctggacagagcttgctcgttgcctccctgtactcgggggtagacccttgccctttgcagcctcaccagaggctttcgttccagctctcccatcacataggcccaagacctccttgcccttgccctgtgggtgtagaaacctgagcttcatgtgagactgcctttccctcacctgcctcaggacagtcgcaggctgtgcctttggaatgcacatgcccttccttgtgactggagcattctccaccttctttctcctttcttcagctcacctccacttttttctttggtttcagctcagccatcactttatctgaaagctttccccgctacccactcccacccaataatgggtgaggtgccccttggctgtgtacctggtgctcggcgtgtgtaattgcaggtttgctctgggctgtccttgacttcttactgcctttatcctccatttcactgcaggatttttggggacaagggaccatttgttcagtaacacctagcatagtcctggcacattatgtgtggtggataaatatgtcttgaattaatgcattttatttttgtaataaggtcacaatgaggtttaagtcccagatttgtaaccctccccccagtttgtgtacagtgtcagagaacatcatcttcaccatagttgcacttaataagaatcaacaaaaacgtgagaaaaaccatatgctgaaatagatcacatctcaagagatcacttgtgactgtgtgtcccgtgatgtgcctctaagatttgtgggtgcacaaaggccagtggtgcccactcagtgtgctgaggctgaggggcatccaaacacgggggtcatatgccattgaggacgcgtgaagagtcaggcttgctgggcatcccagctactcaggaggctgaggcagaaggattgcttgaggccaggagtccaaggccagcctgggcaacatagtgagacccccatctttaaaagagagagagagcaaggctttactccaacctgtttaaaatgctctcttctagaaggctctttggtttctagagtggaatgtcactcagttcccttaggaaaaagatgtctcgtggggtgcaggtggaattgggcaggaacagggctgctgtaaggcctggactctgcatccctctccatgagccttgtctctgtgtctctggtccctgcctctctttgcgcatctgcttcatcctctcctccctgccggctgacttcctccttttgtttgctggctcctcacagttctgtttgcacacagtaggtgcatcatgctactcgcattgtgacattttagcatcgctggctcttgctaaaccccttgtttcttcatctcctgccattctcaggaggacaggagagggcccggctcatcactcgacacatctgcggcttggctccccttaggtcaagggtgcatcatcttgcagccaagctgtggcttagagggcactgggacaaagcagtcctgcccatttgggcagcaggggcgagaagtgggcagtttcctgtgaacatcctgat

SEQ ID NO: 4622 - DNA, 2300 bp, Homo sapien
gcactctctctcagtttgtttgttaccatcttttatcgtgattacctgtgaataatcgtgttccacgtagtggatccttccctcctagccaagttaagggcaaccttgtgtgttgacttctgtgttgccctcacatgtatcagatcctgcaagactatgtgtcataaattctttgcgtaaaggaacgtgatctagtagagtcttgaaatttagtgagggggagaatccagcatacaatctttttagatcttgtccaaggagtatagttactaaactccaaaggatttcaggctgccaataaggtagtcacgtggcatggatccattttagtaagattcctttgtgtttgtttttctgaaaaggattcagcgtcttggaaagagatcaggaaaaatgcacaggtttccttatagcatcctgtctcgctagagagctcgttgctccaaagagcttccttttcctggtatctatacctggagaagtcattgactaatgataactggaaataccagtagaagtcagtgaatgcttccaatctcaatctcctgtatacttttcaccaatttttttttttatcaaagaacttggattccactatgatagaagaagcctgtcttccgaaaaggacttctagagccacaaagtgcttggttaacaccttggtgatggtgaaaatcctgtgcccctcctggactaccatgtgcccctccccgggttagggttcagactcttgctttaggatttaggaaaccagagaatattcagtggcttggctagtatccagtagcaggtgggcgtagttaggaggcgagaccaggtgtgggtgtaatagcccagcctgtcctgtcccacactaacactgcaccacactcaacgagcttctacggctcggcctgctcatctgctcccagcacccactgtccccagattatttaggttgactcagcttctttgtcattgtcacttggagtcttcaggcctcgtttctgatcctctgccccacctgccccaaatgtgcaaggaaacctctttcttcctgtctgccaaagcctgtcactcatcattccctgctgtggagtagagccccaggactccctcctcctaggcagcagctgcaggggtgacctgctcagctgcttctgctgctttgggtgaagagagtgtgactcagtaaaccccagagaccattcctgaacgtcccgtcatctcccctaagaaactttccacactctgcccttcttcaaccttccctgccgactctcagctcacctctcagctctcctctcagcacagacttctgcagttactgcagttttctgtgttccatccttttagttgttgtttgtttgtttgtttgtttgttttgagatggagtctcaccctgttgcccaggctggagtgcagtggcacaaccttggctcactgcaacctccgcctcccaggttcaagtgattctcctgcctcagcctccgagtagctggaactacaggcgcgcgctgccacgcccagctaacttttgtgtttttagtagagacaggctttcaccatgttggccaggctggtctcaaattccagatctcgggtgatccacccacgtcagcctcccaaagtgctgggattacaggtgtgagccactgtgccatcctttaaaggatgtgttccatcctttaaaacatgccacagtgagctaggccgtgagcttacttcctctgaggagggacctgcttctggccttctgccctcttcctttcagcactgtttcttcctcctcagtcccccgacgtcctgattttttgtgtatttgtttcgttttgttttgcctttgggagacatgtttctgcacacggcaggcgcagcccaccgccagaacccctcacacctgccaccttcctccctcattgccacctgcagcttaggatgctggttgtcaaaatgaaaatacaaagttatgcaaaactcaggttgtattttcagccatgtacttttcataggcataagttctggaactctgaaactgaggtcatgacaaagcagatttgccctcagaaggttccagaatccttgtgacgccttcctgttgctaatggtagcactgtatctatcctagcattatatctacagagcagaggcaggacctttggcaggagacacatcccttctcctgtgatgtgtcagttagtgtagagaagcaagctggcatggacttgagagccggggtgggtatctgccccatgtggcctggctatggctgctctgttcagggagcctggggtcaggggtggcggccaccaacctgtgcc

SEQ ID NO: 4623 - DNA, 2300 bp, Homo sapien
tggtctctcttagggtcacggcgatttgttcttttaagtgtttcttttcttttcttttttttttttttttttttttttgagacagagtcttgccctgtcacccaggctggagtgcagtggcgcgatcttggctcactgcaacctccgcctcccgggttaaagcgattctcctgcctcagcctcctgaatagctgggactacaggtgtgtgccaccaagcccggctatttttgtagtagagacagggtttcaccatgttggccaggctggtctcaaactcctgacctcagctgatccgcctgccttggcctcccaaagtgctcggattgtaggcgtgagccactgtgcccggcctcttttaagtatttctaaaagctcctggatatcttttttccttccttttgaatggaaaagcttgcttgtcagttgcttgttcaagtatttctctctatcactctttgatctcaggccttaatcaggattcagtgcacatgtttacataaacgtagaaatcaatgaaagtctaaaatgtaaggggaggctgttaactgtagctagtaacttctctggtttacactgacagtttcccaggtagccagccgttgtgttctctgtaaacttccattgctgttactgtcatctgtcttaacccttcaggttttttttgtgtctaacaatccctaatccctaaatcaggaaaatgctaataaattattatttgctcattgattagtgagggaaacccatattcatgcaagagtgttgccatatttagttcaaggacattttcctgtgttggcttatttctggcaaaagtcaggtatattttattttattttgttttgtttttgagacaaagtcttgctctatcacccaggctggactgcagtggcatgatcccggctcactgcaacctccatctcccggattcaagcaattctcctgtctcagcctcctgagtagctaggactataggcacctgccaccacgcctggctaatttttgtatttttagtagagacgggatttcaccatgctggccaggctggtcttgaactcctgacctcaggtgatctgtccacctcggcctcccaaagttctgggattacaggggtgagccaccccgtctggcctcagatatcttttagatgaagtatcaccccccacaaaagactttctaaattgaaataattcaattgttcatttttttgttttgtaaagcattttacccattatcagctgactcaacaaaatgatatttcttaccttttttgagtaagaaaaacgaaatgtcaaatattgttcaattatgatttcacaaaaacaatttttaaacgtgcttcaatgacatgaaaaaaataagtccactgtaaacaaatgttagggacttaaaaaatctctgacataatttttctcttcaatttaactttttttcccttgggttggatttaaaaaaaaaaaaggaatttctgattacatctccaatcatgtcactgaaaaatcttgattgctgaacacatgaccaaaaaatgattagttagcttgaggtaaatgttcaattatcaccaagattggtaagcaatctaaaacagagggagtgaagataaattgacttccaaactgctttaaatggttgtagtcgtttaagttcacaggaaatttaacaggctagtaatgaacagacagccctttcactctattgttacaagttagtattattgtttagatttttctcatccttttgcaaattttgcaagcaagtaacttcagaaaccctaatgtaaatttccagttaataaagatcttgatttaactggcattattgaggtgttcttcgagaggcttttggaactcaactagcaggtgcagagagtactacaaagacccgggtttccgtccacgttcacgtaaacctccctacgaggggaaactacaggcgcgctgccggagggcgccgccagtgggcactcacgcacagctgctttggccaccacaggcgccccgggccactctcttccctcatctctctcatcccagcttccgccggaagcggctcctgtcagttgttctcaggtgtttgggcttgttgttccgtatactcagtgggttcgcggccgccggcccagtgaggctgggttcgaggagctggagcgggaaactggagcttaaattctggcggcgagatggacattctgaaatcagagatccttcggaagcggcagctggtggaggacaggaacctgctggtggtgaggaccctgcggtcgtgggggtcgggatgtaagagtgagagtatgtgtgt

SEQ ID NO: 4624 - DNA, 2300 bp, Homo sapien
gttaggagagttagtttttgttctcaggctttttaaggaaaatagcacaaacccacttaggaaatacccagtgtgctgcagggacgtgtggcttgttgtattaaccactgaaacgaataaatgggactgcagcatttcttaaatgagatgatgaggctgatcttggcttctcgactagaagtctagggccataaacgacccattctctgtaaaactaagggatatgttgtgttttcaagtaggaatttggctgtgtgattactgagatggccattgagtcatctgcagtgtgatcagcaagattgcgaagaatctggtgatggatcttgggtttaaaaaacgagaaatgaaacaaaacttgcagtctgtcattgtaccctggctctgacactttctgttctgggagaaaacaggttgtgctaaacatgggcctggcattgcctgggatccgtccacattcagtcctcagctgttgacacactcccattctctgaatgctagcacttcctcccattgttaaggagtttattaataactaatgtaacaatgagagtgccagctatctgacatctctccaaacagagaggggagctgataggctctgtcagcgtcatgatggcggctgtgttcagctcagaattcactgccttgcgctgatataaatcacacgacgtttttcggttttgtcttcatcccttctcttttgtccttcctccttctcctccctgtatctctgttcctggccttttaaagtcctccattacccatggcctgtggcctctccttttaggtctaacaatggacaggattccaggggccttaattttggtcatagcctctgctctgccccagggcgcagccaaagtcggattgtgccagggtttgtttatgctggaccgtgtgcccagggagagctgcgaaatctctttctggggaatggatggttctggacatgtttgagcaggactggcctgagtcaaaattgagagggagacagagtcgttatccctttctgttcttattttgggggaaataaagacaaagtcatttacacagctatatttatcccctgaggtgttactaataaaggagcatttgcccactaaagggaaccaggaccaaatgacaatgtataacctaaatgaatgactttccaatgataacttttttttgagacagggtctcgctctgtcgccctgagtgcagtggtgcaatgctagctcactccagcctcaaactcctgggcttaagcgatcctcctgcctcagcctcctgactgggtaggactgtgatgaaattttaaatactaaaaagagatataactatcacttcccacgagcgtttctctgttcccatttagggccagccctctgttgcagtgctcctttgctgggagcacagaatgaggatgactgaaattcacagttaacctgcaaacgttggtattgcaatagcctaacaagcttggacccagaagataggtcagctccctcatttcacagcctaagaaatggaaactgtaggatttacaaaccatagtttcagctgggtattttactggatgctgctaattttttaaaatgaatgttcagttatttttttccattctcctctctctctgttaaattacatttgcactcttcaccgagtgccagtgagccatggaatctagccagaaagcaaagctcttccagagactcccagccaccatcaaaaggtgcttggttttcaaagagcttcaatttcaatgctctctgaaatgaactattttatttctaaaatttctaagcctgatgaaaagttctccaagcatgcattttttcatgttaaaaatcacatctaattctctataacagtccccagagatgacacgtttatcctgcagtctgcaatgtggcattatttcccgtggtctcctgggacatcttttatgtaaggaattcatcactgaggatttgtcaaggaaataaatatctttttatcataaagaagaattctaaccttttcctcatatttattcctgggatgtctgccaaaacttttccttacagcttttactgatctgctgggaatataccgccttcttcatttttttttttttttctctaaggtctaaagagacggattgtcatttcccttctttagttctagaacaaccgattcctttcttctttggagcattgtttgctttgaagtttcccctccttccagagaggaaagcaccccttctctgtcttctgaaatcagtggctggtcatcaatatcccctctgtgtcaaaaacagatgagccacgcgtggc

SEQ ID NO: 4625 - DNA, 2300 bp, Homo sapien
aagaataaagatataaagaaagaaaaaaaaacctgttaggaatttcaagatatcaacagcagagcaggaaatcaagccaaggaccttctgagcaaagggccctcaggtcgcacacccagaaggccgatcctgttcaagacttcactttgcctgagcaaggcgggtgcaggatagcggctgagggaccgccgtggtatgcagccaacaggaccctttcattgaagtaccatccacatcccttacgtgagaggaggggagaggcactgggagaaaaattctctgtatttaaggatttgcagcacacacatatttttttttttaaatccaaaactcagggcttgagttaggaaatctaagaaaagaatgattctggttgttctggagttactctcttttaatctgcaaggatttgggagaagtaagagcatttgggattcatagtaagatctaaggtcactttgtgccggtactgtgctacgatctgtggctgctgagatctaccttagaggggttatttttgccattttacagaggggaaaactgaggctaaaggaaatgctgtaacttgtgtcaggtccagcagcttagagcctgagttgggtgcggtggctcacgcctgtaatcccaaaattttgggaggccgaggcgggcagatcacttgagcccaggagttggagaccagcctgcccaacatggcaaaaccccatctctactaaaaaatacaaaaattatccaggtgtggtggcatagtcctgtaatcccagctacttggaaggttgaggcacaagaatcgcttgaacccgagaggcagaggttgcagtgagccgagatcgtgacactgcactccagcctgggggacacagtgagagtctgtctcagaaaaaaaaagtagtggagcttggattcaaacagatgtagtcagaccacaaagcctgcctgcctgaccgctttgctcagtgtactgcccccaggctatgaggccaatgtcgtggaacctgttcattctggtatttttgtagctctggctaagttcaggtggaatgtcgctgaatatataatacctggggaccagagaggaaatttgggtgttttaatggaaggatttatagtggccaagcatcagacaggaccatgagacctgggtctgtgtattttagtaatagactccgctaaggcgctgttgaatctctgacacaaagctgtcagccaacatagagctttgggccatttgctttccttgcagtgtctctccacccacctggagttgatgcttaacaagaaagaaaaatacaatttccttgggcttcagagtgaaatgcactctgagccggggacaaaagaggcaactctgtaataagagataatagatattctccttcccagtacttaacgcagacaaaataattgtaaaattccagagagcagattgtgaggataaaagaatgtggccattccagaagcagtttttattccagcccagttttatatggggtgctaggtccactagccaaccattgactagcagtgtccccagcctgggaagacagggtgggtcagatacaggaaatggccatcacgtctctaaggtgggcagaacatgagcaggtcagagagggtcaggagcctgaggtccgaggactctggggtaagaccctgaaaagcatttaactcagtggccagagaaaggggggagcccagggaagctgttccccgcagaaagacaagaacaagattcctactttaccccttctttccgcaaaataaaccgaaattcccagtatgtggaaggtgatgcagtaaccagcaaatattaatgcaaatgtgtgtgcacacaagttgaacctcctgtgatatttcccagagggttaaagtaactttctttttcatccaatgaaaggaaccccgttcctggagcaattggatgcagccctaattacttccaaacattacagtcagcttctcagttaacgagctcactggtccgaaggaggaatgaccgccagggccccttcattccacttctcaccctccctggccaagcttgagggagagactctggccgcagcgtccttccgggcgacagaactcttggttttctttgtgctgcagcaagaagaatgggcttgacaggctcacactgtgatcttgagttgcctgcccccgaaataaggtcccagcctcctccgccctttgcaaggctcttacacattagtgagcaggaagtggagtcccgatgggaggctgggaatttgaacgccttcccatttcagcactggaggggaggaagctcagttcagcac

SEQ ID NO: 4626 - DNA, 2300 bp, Homo sapien
caggcagcatcctccaacggcactgtcaccccgagcttccatgggcacagagacaggcgtctgctgctggtgtcaccaggctccgattccagactccagagcaagccccactaaagcacgccactcatccccgcaaatggtaaagatatcagggcagcttgagtaggtcttgctgttctcgggaattcttgtttatattcagtcatttttcaaaagagcttattatagcacctttatactcaaaagattcccagaccataagctaaatatatacatttcacttttttaatttttaaagtcactttacttcgtcgtagaataaaacaatgcctttagaactgtccctatccagaggtggagctttcagtgagccgaaatcgcaccactgcactccagcctgggcgactgagcaagactctgtcccagaaagaaaaaaaaaaaaaaaaaaaagaactgtccctatccagtccataattacatgctttggataagagtctggttcacagccaagatctccagaggttggagagcattagttcagagcacacacactgaaactaactataatatatcttgcatgtgttttttcatgaaaataccaatgcagttagctaatgttaatgtaagcatcattttctgcgtactgtatgctttttaatttaatttactcttcaccctccctccctttcaccctccctccctgccttcctccttccttcttcccttccttcctttcttcttatcttcctatcgtcctaccttccttcccctcccctcacttctcttccctcttagataaaactttctggtgatggggtttttgtagaaaggcaagattctgtagtacccacctgcttttcattactggggtgcaaaaataagggaatagtacacaggaataaaattatgcaccgtgttttgccttagggtgattattcatggaaaaatgataaaactatccaaaaaagagtttacattaaaatgggccaggtgaggtagctcatgcctgtaatcccagcattttgggaggctgaggcaggatgatcacaggaggccaggagcttgagatcagcctgggcaacatagagaaactcccccaaaaataaataaaggctgcattatattaattaaacaaattaatgcataaattcaaagcaaaaggagaaaacgtattaaaagaacataatttagagaaccacaaatttttatcctaagggtttcatattatcagtggtagataatgtccttgaattaccagatcataagtgggggaaaaaatatcagcctcatgccatggtctttattatccactttaagtaagtgacctcatttaatcctcacaacctagtgaggtaggtattatttccatcggtcagatcaagaaataagtcagaggagttaattaatttgtctgaggccacacagaaaatgacagagccaaattcaaactgaggttacaaaggactccaggacgctccagtagattagtagattttacatttctacttttctgatggtattagttaaggtcgaagagacagataataaataaacaaatggaatgtggagaaggcaaacatgccttatgacttaccatgatttttcaggactgtgcaatcaaaatgacattaaagattaaacatgctctttgtcttaattgtacagctaggtcgtggctgcattctcccctcccccttctttcccttccagctttggaatctcaccttttggtatgtaatttattgaattaggatgcagatgccattctaaaataatcaacaatcaaaacaacttatgaaattccaatggttatgacacgtttaattgaaggactttccttgagttaatttctacctgtagcttacccaacatgcattaaaatagcaagacggtttataggaagtaacccctcatgcggggcgaaaaaaaaaacgggataggttgactttacctccttttccctgctttcctccaaatcttggatgttgatatgaaatccatcagataagtattctttccagccatttcaatcccaacctaaacttgggacgcttccaaagaaaatgcctggcttcttacaaattgcccacagaaatagcaatttctccagtgctgctacagaatgggactttttgcttgaccttgtggaaactcatgggttctccaagttgtaaagagttaagaaaagggatggaatgtctggggaatgttgcagggaaggctgcagctctctgctcttagctttctcaccctggaggggatcccaacactcggtggtgcttctgggtctgaggtcttcc

SEQ ID NO: 4627 - DNA, 2300 bp, Homo sapien
taagtctccgacacccatggcaagacaatcagaaagatatttttggaccagcaacctttgagagccttgaaatcactccaaggagggggtcacctactccgcggggactggggagggctccattatctgggaggaggcttttgtgctaatatgaaaagtgatccttctccccgcctcccaagggaaggatgtggaatgtgtgagactcagatgtgtgggagtctggcccagggttatttttgttaccattaacattctcttctatatgtattttaaccttaatcaaatgcatgtgtttttgttttatttgcacttagttcatcaaaatgtcccttatgatctgaactatgccataagcctaagctccacagtgaaacactcattaatacccctgggaaacaggaagttgcatttagtcaaatgtaaataaattcagctccccggggctttgccctggcctgggtcagagaagaggacagtggcttctcagtccatctcatcattgtcccccccaccgaccccaaaactgagctggaagaatgacatgccgtgactctcaacagataaagtgttctgaaagtgtgcctatcctttgttcaaaaccgttacaacgtcaagtgcagttttacaaagaaatgagtttctcttgctttggctcaatcatcgggtatcgttccagattttttcccaccccccgccaatgctctgaaaccaggcagtgcaggcaagaagcaagaaagagagaaaaaagagatgtaaacctaaaccacctcaccaaagacgccgtgtgagccgtggttaagaggtttccgtctccccgtctctctcaccctctcactgactctcctactgcacacatggaaccaattacgaacaaagcccaattgttgtatatttggaatttcccacatcaacctgatgctttctttaactgactcgtgatgtgtgtctgcgctggagggctgaacccaggtttccagcccgtgcgctgctgccgccgccgtggcacccttcgcctctttcttctgattcattttctcatagtacaaaactctgcttctttccttcgcaccccacccccatttcctattaggtgtgtttgaataaacagaaccttcatttccgtcattttcaatgaagtaagcacactggtctgcagacagtgtctcaaagctggtgcccagagcgtatgagtggtatcaaggctaataccaaaaaccacgggatgattacaaaggaaatggccatccctttcataaaactcagaacagacagaagcagtgtatgtagaaatgctttaaaaagaaaaagaaaaaaaaaacccaaacataccccatatcctggaagcaccttacttgattttctttgtagtaattttttctgctatggaaataagccgatttcaggaggagtagagatggggaaggtaggggaaaatattacagaaaagttaacgtttgagaccatttatgccatccatcaaagaaggctgtgtgatctgaaattacacaatatgatcagaaaataattgacagacgtgatggatgaatctgcttcgacacagccgtgtaaaacgaaacataatttcttcttgtttactggcacacgtaaaaataaatgttctataacacaaacatttaaatgagaaggtgccaaacacaagcctgttcgatttgatttgattcatctgaaccatgtgattgcaacagtttcttcttctttccctcatactttctctctgtggactgtattcacatatacagtgagtaatacccgtgcgtttatttttatgcgttagaaagcaggaagggtaaacagatacgcatgtctgatgctcagttttatagatagaatttatgatttcaaagaggtccctgatgtgttctgtctgtggtcttcagatattgttcctccgttcagaagggagtgaaatcagagtgtaggattctgcattaatctccactccagatggtgatattccaaatagtctttttaaggtgagcatgtgacctactgtacggccgaggggcttgggagtcacgtgatggaatgaataatacgtctgatagagctttgattagacaactgacctgattaccatctgcagccacgagaagcaaagttgacatttctggatcactctccccagacgcgtcacttgcccacaagcgggacacggcagtctcgctgagccagctgtgcagagggacagatggaagaaagctagagatgctgcttcgtgggcgctgaagttgcagaacttgggctggttttctttcttcccatcccccctcctcctg

SEQ ID NO: 4628 - DNA, 2300 bp, Homo sapien
cgagagttttatggctaaatggatatgaagacacgaggcaatttagggtcacggagatgctcggctgagttcaggcacaaatggggccttgagaagtcagaagttcttacttctctagataatatcctcaaaaagccaagtgaagatattaagaagaaaaagccaaaaataacaaccgtggctataccattttgggaacagagttggattcacatatcctccgtccttctactttataaacattatttggaaaattaaaagtcgaaaatattataagattaaaattctgtgagttggagtcaacttgtcttctaaagcctaacgctttctgagcctcagttaagttaccacaagaagcaagccaccaaatttgccatccagaactgtgatgcatgctctcatttccagcaagatgtaaagcagggttttcataactgttgaagctgcatcacaaccatctccacaaaggaccatttatcagttattttgggaaaggggagggtttttttagaagagaagaaaccacgctaataagctttttgtctgcaatcatttcccactgagattccatatcagtacatctccatttgctacatatttagctttaaaggaaaatgaggtgagatggagatatttgagtcataaaagcaataaaacgtgcttccggaaaatagctttcctttcagtccccagacctgcacttcccagatataaagtttgtttctttaacaaaagtcttggtcaagtatagccaggcatactgattatcagagaaatatatacatatgtttataattcatatgaaaggaaagagagaaagagccaaaaagaagggataaaaaaataatagctttagaaatagagaaaagaaacaaaaacaagacatacactacgagaaccccttgtaacctgcacccttaccagctgtccaggaaacccagggtacctccatctctcagctcagaggttggtgacaggtggtgtcttttattcatatgccctccctggggctcttaataattggtgtatttcttgtagtccctttagtaggctgggggcagtagtgggagtgagggcgagttggatgctggcttgttaatggagctgaagggagggctacaaggtgacagatgggatgaagctggaagcttctttggtgggaagggagggtgttctaggtcatgaagaattagatccattgagttgctgcaagaaatgtcccattccttgagttcctaggtgattgacttaatctgcccatcagtctttgtgtggttggttttgtggttgtgtggataaatctagacaccaaggaccctggatataccctcccaaagcaaaataacactgggggctggggtcacttattacttggctggtgtccatgatgggaaagatctcagggatgatggctgatgttgttggcattgtctttgcttgtccaagggctgctgtagaagaagcgaacggagtgaggggaagtccaggggtatgaatgtgtcgtgttcatgggtttttcaccaccaccgggatcctgttgtgacctacccactggtcaagatgaaatccctaataacttaggtgttaaaagactggaggttgccctgtataaattgggtcaccaaaagttccttttaaattttgcatagggcggtggctcatgtctgtaatcccagcactttggaaggctgaggtgggaggatcacttgagggcaggagttcaagactagactgggcaacatagtgaaactctggttctactaaaatacaaaatttagccaggcatggtggtgtgtgcctgtaatcccagctactcgggaggctgaggcaggagaattgcttgaaacctggaggcagaggctgaacagagctgagatcgtgcccctgcactccagcctggatgacagagcaagatagtctcaaaaaaaattttttttgtttcatatgtagtaccatagcaccaagaaagtgcttaggtggtaagtacaaaggtggccaaggtgagttctgacagtacagaatggggtttccatggagacggcaaataatgaagcagtggatgggggagggggatgtatgctccaaggttgtgcccactcggcacgacccaggttccatgctacaggcctctacttgtccagacctgagggtcagattcagatggtgcaaatgtttaagacctgggtcttcaacgagatgaattatcagctatttcatagctgcagtgttggatatgccgagacgataaaagcaacagcaatcagaatcaacagttgaaacgacatggcagacgctgtgaa

SEQ ID NO: 4629 - DNA, 2300 bp, Homo sapien
ctgtcccatacctgaggctgctcctgcctgtctctcctcagggtttgtcttttctctgcccatatccaccagttgcaatagctccaatattaacgttttttcttagctttggttattttccaaacacatagtccatgtagaatcagaaagcaaatgtcctgaaaaagatgttctgctgttcctgaagttccagtgcaaaagctacaaaaaaaagaaatggtaagccctccctactctgtgctatccaaactatttgggatttttttttttgcatttcttacatattatcttgtatcattaatgattctaccagataaaaagttccttgagggcagaggtacaaagtcggcattctgcaaatatcagttgaatacatttagaaatccatctgaaaagttaggataaggtcccttaaatcactattatagacctgttccttaaatcattgttattatttttcaaatgtgactatacatattattttgaatagtattgcaatccaccagcacagtcagaatgtcctgacagttctgtgcaaggccacatgcatgcgactcaagtcatgctttgaatctccaggcacctgctggcaaggagggttgctctggtgttccggggatcagtaacatgagactccatccacacactgtggaatcaaggttcaagctcattgggccactataggaaaaacaaaatgggagaaaatttttcactcacttattttattttgttttattcttttcttttctttttttttttattttgagacagagccttgctctgttgcccaggctggagtgcagtggtgcgatctcaccacagtgcaacctctacctcccaggttcaaacgattctcctgtctcagtatcccaagtatctaggaacacgggtgcccaccgcacccggctaatttttgtgtttttcatagaacagggttttgccatgttgaccaggctggtcttgaactcttgaccaggctggtcttgaactcttgaccataggtgatctgcccacgtcagcctcccaaagtactggggctacaggcgtgagccattgcacccagccttcactcatttattgaatatattttagtacttactctgtgctaagcactgtgatgagcaaatactttttatttttaaatttttttagagacagagtcttgctctgtcccccaggctggattgcaggagtgcagtcatagctcccttcagccttaaactcctggactgaactgatcctcccacctcagcctcccaagtagctgagactctaggcacacactaccatgcttggctaattcttttatttctatttttcttttttttttttttttttgtagagatgaagtcttgctatgttgcctaggctcaccctgaattttgggtctcaagctatcttcctgcctcaacccccagaagtgctgggaatgcaggtgtgagctcccatacctggcccaaatcaatagttttaaaagtataagtaataaaggaacagtagctatgctcgtgcacaggaacatgaaaggtcattaatttcttccccctagtttcttatttcgaaaactgttctctatgtttctacatttcacactgtctagttaattttcaggattttttggagccattacaggaggtgagtaaaggaagaaatcagaaaaggacatactagaagtatcaggaataaccatttttagttgaatacatggactccagaagaagatacaagcttgacagtgctcatgaaaagatatctaattttcttaagtctttgactctggaaagccctttgagctacccattatataacaagattcggcaggttttttctttctcccttcattgacatcttccggggaaaatgctgcatgatatgattttcaaggctaacttgccttttcctgttaagcagtgtcccttgtgacaaattcacctcctatgcctccctgaactagggaggctccttcaaaattcctaacaggcagccctgtggagagatgggagggaagggatgggagggaggaagggcgggaggaagggagggagagagaggtagagtgtgtctgtatgcggcgtacatgtggtacagccagggagatcagaacgctcacagaacaggcagtgcaattccatgttcctcttaagtatgttagccctaccgggagctgagctggccagtctacttggagaggaaaagtagatctggggaaggtggaagggtcagttcctaagtgacttcctcctcggggatggtaagggcatttgctgatctccagtgactgcctggtgcctcatggtcag

SEQ ID NO: 4630 - DNA, 2300 bp, Homo sapien
tgactcatgcctgtaatccaagcactttgggaggccgaggcgggtggatcacgagatcaagagattgagaccatcctggccaacatggtgaaacactgtctctactaaaaatataaaaattagctgggcgtggtggcatgtgcctgtaatcccagctactcggaaggctgaggtaggagaatcacttgaacccgggaggtggaggttgcagtgagctgagattgggccattgtgctccagcctgggcgacaagagcgaaaccttgtctcaaaaaaaaaaaactgtagacataatatgaagcctaggatgattttattttcctctgccagtcatgtgggtggcattaaccatcagagatttcctcagtaacaattttagggattaaggtcattcagcccacttttgggggccgaggcaggcagatcacctgaggtcgggagttccagaccagcctgaccaacatggagaaaccgcgcctctactaaaaatcgacaaaaattagctggaagtgatagtgcatatctgtaatcctagctacttgggaggctgaggcaggagaatcacttgaacctgggaagtggaggttgcggtgaaccgagatcacaccattgcacttcagcctgggcaacaagagtgaaactacatttcaaaaaaaaaaaaaaaatcgttcagccaagtggcagtatctagatatgtctcccattactttactcctaggatgcagcactttaatgccctaacccaaagaaaggagcattcacaggacttccgccttcttaactctggactctaaacctattgctctgtcagaagcagcagtcagtgtcttagctggctttagaaattggcaaacacttttaggggaaatcagtcctaaataccagctgacttccccagacctctgtatatccttgcccagtaaattcttcactatcttgtctacctgttgcaaagacttttatattttgttcggattttctaggtatcttcattgagaaagttggtctgaattacttagtttgccatgattttgccttaatattagtaacttttcaagattggtttcttcatccatggtattcctctatcttttcctgcctcctgtaagaccttcctttgttaatgcttccgcttctcctctcctgcagcttggcaaattgtacttagataagtgctacttctgctagcagcgctgctggctagcatttactgaataccttctgatatggtttggatctgtgtccccacccaaatctcatgtcaaattgtaatccccagtgttggaggtggggcatggtgggagacgatttgatcatgggggtggatgcctcatgaatggtttagcaccatcttcgttgtgccgttcttctaatactgagtgagttatcgcaagatctagttgtttaaaagtaggcagtacctcccccatccatctctctcttgctcctgctctggccatgtaaaacatgcctgcttcccctttgccttccaccatggttgtaagtttcctgaggcctctccagaagcagaagctgctatgcttcctgcatagcctgcagagccatgagccaattagacctcttttctttataaattacccagtctcaggtatttctttatagcagtgtgagaacagactaatataccttctatgaactagatgctctgcaatcacaatatatgaattatttaaattaagcctcacaacaactgtaagaggtagttactatcatcaccagccccatttaaaactgataaaacagattgttagagttggtgttatctgccaagggttacatagttagcgataaatcggagtagagattcatacccacgctgatctcacttgatatgatttggctgtgtctccatccagatctcaaattgtagctcccataattctcacgtgtcatgggagggacctggcagaaagtaattaagtcatgagggcaggtctttctcgtgctgttctcgtgatagtgaataagtcccacgagatcttatagttttataaaggagagttcctctacacatgttctctctcttgcctgctgccacgtaagacgtgactttgctccccctttgcctgctgccatgattgtggggtctccccatccacgtgaagctgtgagtccattacacctattttttctttataaattacccagtttcaggtatgtctttattagcagtttgagaacagactaatacaatgctccaaccccacagatcctaacttccataccatactgcttaagtatttcctcttctactttcttctttccctttgcgtatgtaca

SEQ ID NO: 4631 - DNA, 2300 bp, Homo sapien
gtgtaggaatcatgtaattgccgcctactccggcatttgtcagtagtggggagaagtctctagaaccatattagacttaatagataggacactcatgtttttgtttgtttgggggtagcattttaaaagattattatcatagtctttattattaattattttggaggacaggaaagcatttaccttctatctactttgcaaactccatctgtgccataaatcattatggatgttgggttgctatactctgctttttaaataatttgggcaggacaggagactaggagaactgaggatgaaaggctatttttttcaatttaagaactaggaagcttcatttaggattattttcagatctcgtaggactatagatgactcatttgcccactctttgctaagccctggtgaaaggtctcccactgaactgaaagatacgcagatcaagtttagcattagggtaattttttgcagggaggcctagttaaacaaatgttttaaagaggatcaaggggcatttttatggcaattctctttcctgagtacactccagctagaaaaaatgactcctatctatcccaggaattatttgtaaatacgtttctccctctagagtgtgagaatgtggcttactcctgttttatccccagcatattagtaggaagctgttggattaatgtatattaaattgaatgcaaataagattttagcttccatctgcctttgtcacacaatagaagaaagaatatatgaatttggtattattatggccaaagcaaaatgagactatcaagttcctaaaatagaccacagaatttagaagccatcctatcctgcctgggaaatcatgtcttcattttggtggaaagctcgtcagtttagtaggctccgaaatagaatagcagttgtcactcaaagattttcagattatcttcacctctttggcctcagttcccttatctataaagtgtaaggtaggagacttagctgttctctaagaaacattttagctcaaattttttcttctaggaaaatctatgaaagggctccaagtcagaataaaggtcagagtaaaaccaacatttgcagaataagtgttctctaaattataggctatgaattattctgcaaaaatatatttagtagtttgggtcattgctgtaaaacctacagatttgtgcagttgagtctgtttccacattttttagagaaagggcttccattctgtctgtctttgtctggcctgttcttctccttgtttgcccagctcaactaacctgagacaatgctgggtttccctaaagtactatggtgtagagaggatgtgggctttgaggtcagagagaaatgatatgaatcttggttttaccagaacttaactttacctaccttatgatcttggccaaggtatcccctcttgagatctgtttcttcatctataaagtgggagataatagtatttttcttataaaaattaaagtaggctgggcaccgtggatcacgcctgtaatcccaccactttgagaagccaaggcaggtggatccactgaggtcaggagtttgagaccagcctggccaacctggcgaaaccctgtctctactaaaaatacaaaaattagccgggcttggtggcacatgcctgtaatcccaaccactcgggaggctgaggcaggagaattgcttgaacatgggaggtggaggttgcagtgagccgagattgtgccagtgcattccagcctgggtgacagagcaaaactctgtctctaaaaaaaaaaaaaaaaaaaaaaaaccaaaacttaaagtaaataatagcgtgtatgaaaatgcttaacataataagtgatcacttagtcacatctatcttccacttcctatgtgacaacaactggaatttcctattgctttttctcccttttctttgaaggattttggtctggttggaaatacattaaaaaaaaaaaaaagaaaaggcagatttcaaaatgaaatgaaaatatatctcatcttatctcttaagagttttcaaggtaataccaaacttgttagaaatacagtgattttaaagtgagaatttctcagtttctttccttttattcatcttttattttgtatactttttagagactggggtttttatttctaaattttagtgccaaactataggatacatcacatcaatactgtgtgtgtttggttaatgaataaccagtcttgattactgcatggtattgtaataaaaatccatttgcttttctgtagtttataacaagtcttcctacattttgtctcatctggtgctcttt

SEQ ID NO: 4632 - DNA, 2300 bp, Homo sapien
aggtttgtaattctcaattcagttcaggttgcaggcattcttgttgttaaaagagcaatgcaactagtgtctgaggaatgtttggtgtaatttattatatatgccttactgtttgataattttgagcctaatcatggagtgatatttaagatatttaaacaaatgttgcagctacattatttttcagttgacttagcctttggattttcattctctttattttcacattaactttgtaaagatgttgctttggtttggtggacagaacataacacggggaggtgctgggggcagggtcatacttttcagcagggcagctaggaggtcaggcctctctgagaaggtgacatttgaggaaaggcctggaaggatacaagcaggatgaagcccacaaggtgcttaaggaaggagacagtgagcagtgtcacaggccagcgagcaccgtgctgagaactagaagccttttccactggcacagggtcagcattgatatgtttgtagcatagattgatttgctgaggctgaaggattagcagtaaaggacctgggtccggtgcctattgaccaacaagtgaaacaacaagcactaaaacttagagaaatcgcagttagatttatttggagccaagtttgaggacttacttaagcctgagaacacagactcagtgtagactgagaatgggttccaaagtaagttatgtgaggcgcaatatatatacgtttcattccctttccttttctattttgttttgtttgagacagagtctctctctgtttcccaggctgagtgcaatggtgcgatctcggctcactgcaacctcttgcctcctggcttcaagcgattctcctgcctcagcctcctaagtagctgggactacgccaccacgcctggctattttttgtatttttagtagagacagggtttcatcatattggccaggctggtctcaaacccctggcctcaagtgatctagccaccttagcctcccaaagtgctggggttacatatatgagccactgtgcccagcctcttttttttttttttttttcttttcttttagagatatgaggtcttgctcttgctctgtcacccaggctggagtgcggtggtgcaatcatagcccactgcagcctctcaactcttgggctcaagtgattctcccacctcagcctcctgagtagctgagactataggcatgtaccactatgcccagggcatttccaatgttttttaaacatatggggtcttgctatgttgcccaggctggtcttgagctcctggcctcagtgatcctcccacaacagcctcccaaagtgctgggattacaggcatgagccaccttgctcggccttgtattttgtaacaggggaatacatgtggcacagcggtgggcgaagcaggcagtgaagcagcggtttcagtcctgtgattgtgattggtggtcacagaggctgtgcataagataaataaggtaaatatgcagctgagtgggtaggagaaaggttaggcatcttagagtctggtggagggtgactgattccatcccgtctttgttctgtatctggtaaacagatttatgaccaataaccatcagtgaaatatttaacaaactccagtaagataggcaagaggccagctttagtttataggcccctctttcctgacacatgtgtccaactgcagccattgtgggccagtgttccaattttcatttgaactttctttttttctgacatactcaagtgcttgttctgaggtcgatatggagacagggtggcaggaagcatcctttgtgaccggaacccaagttgtggcagtggcagtgatagaagtcaggccacagggctccctggccttagtcatgggcaagacgagaccaggccaccattctcttccctgccccagcccagttacattccaagcgctttagaatatttatcagcgatgccccagagtggactcaggaggatggcatgtgttagcatactgagcacagctctgtgggcctctgcatgtgtgggaaaagccttagcaaaaactgcaaatgagtgtttctcatctttctctttcagacagcccacctgaggatattgaccataaggactcatatctcattacaagaagcatcatggccgagccagactacatagaagatgacaatcctgaactcattaggcctcagaaactgatcaatcctgtaaaaacctcccggaaccatcaagatcttcacagagaacttcttatgaatcaaaaaaggtaaaatggtttcttgagcatattttttttttaagaggacttt

SEQ ID NO: 4633 - DNA, 2300 bp, Homo sapien
caaagctgataggatgctgggttcttgggtaatgaatcctgttacaacaaaagaaatgaaagcatgacaacttgggtaactcagggaaagaagccgatttctccatttcatgtggacttcgtatcaggtggagcatttacttaaggggtgccacgccacctttttctgttctttccctgagtcatactgctgctgtaggatttaaatccctcgatggtgtgttgagactttgggcaaacatcacttgaccatagagttattaggtagtaacagacttgattgcaatgcaatgaattgccagagtgagtaacttgatggaggatatgtattggttcttggggcaaaagtcctcatacctgacagccgaggactagagctgcagactcagtggtaggtggtggttgttctcacagacttgtgtagtggggaaggagtgactattaaggctttgttttgagagagacagacagagaattgacttgaggatggacgcttacaaagtagacatgagattactgcagtagtcctaaatgatccttaaaagcatcctgttggagtcaagataaatcggatcacttcacttctataggatctggattatgactgatgtctctgttcctcatcactaaaatgaagtggtatttctcgaaggcctcttttaactccagaattagatgaatttttgaaatgttgaatattttctaaaacagcctcctttccattcccgtaagaaaaacggttgttatgctctatagacatgtggcacccgatgtctgggtatttaccagtgagctctttgtttttaggctttcatcattctgtgttccttgtttgccaagtaggatgctcacttgcaggatgcggtcattttcccattcagcttttaagttttcctgtgtctgttactgtccatacagatagtgaaaggcttcagctgagtcctgtggggagatcacttcgagtttctgggtttgggtgtgctgtgatggggtgactgagatcactgtcggtggtgaatgaacggtctcatggagctggggttgccctgcttttgtttactcgtgactctacagggcagcctgtgggaaaatggcaaggcttggcgtcctggaaccacaagcctccagagggagttgaattaatgtgcagagttgaatcagggaaagttcagaggcagtgtagtttactcccttattccagtacccacactcactacaaatgtgtttacatttaaacttttgccaaagcccccttagtttaaaagggaggcttcacataaatggaaaagctgaggccaaaaggcctaaacttctctcatctttattgcttattgcagcttttattatagatgctgcgagtactcagcacttctaagaaactccgattgctcttgtttccctttcagcttggagctgggatccagagtagttaactgaggggcctcgcaagccccttgtcaggaggatggcctgcctttgaaggcagttgactcttgtatgtgtcttagtctctttaggctgccataacagatgccacagactgggtggcttaaacaatagatgttggtttcctcacacttgtggaggctagaagtcctagatcaaggtgccagcagattgggttcctggcttgcagacagccgtcttctcattgtgtcctcacatggcattgaggctggagagtacagggagagagattgagaaagaaggagctctggtctcttttcctcttcttataaggacactgatcccatcatgtgggctgcagcctcatgacctcatctaaacctaattacctttcaaaggtcccacctccaaatactgtcactttgggggttagggcttcaacataggaattttggggggactcagcattcagtcggtgtgtgtgtgcgtgtgtgtgcgtgtgcatgtgtacttgtagaggagggttgattgtccacctgacagccgttgccatcccctcttccctgctggatgccaatttgcatttttctggcacgttttgcggctagagtggtcatgtgacactgttctggccaatgaggcgatggaggaaggcccccgggggcttctgggagtgcctgccttcgcagctggagagagccctcctcaggggctgtctctgccttcccttcttcccatgtgtatctggggcagctgaggcagggctaggagaagagcccaggttcctcctgccacctccaagcgatgaagcagccctgggccaactccagcattctcgtgtgaactgcagaggagccctgcgcttccagctacttgcagccaggtgctgttacc

SEQ ID NO: 4634 - DNA, 2300 bp, Homo sapien
ggtatgtggtacacagtttagtccataacacttcccatatgccagatattacattaggcaagagggtataaagatatgtatatatgtcaagcatcaactctgggctcacagaggcacatatttacgatacagtgcaataacgccaataccatgtcgggtatgggaggggcagaaaagatccatttagtgtgagcaggtcaggaaagggtttccagagaagactgattctcagagaggagaggagctcttggggattggtgaaggtctgctaggcagaggggaagcccgtggaagagcatgacaaggccatatattcattatttcatccagtcttcatcacagagcagggccacttagcaaatacggcactctggctgagtggagccttggatgtttgctggggagcttcgacttgatcatgtagcaggaagcaggcatccactaaagtgtttcaagcagaggaggaaactgagcatcttgcacctggaaagttcacttgcaccccagaaagttgagaggaaaagcatgtgttagaccagaggctggggccagttaggaaacccctgccaccatattgtgactgagcccaaaggcaacagtggcggtgccagcagagggggagggagatagccaggaattgtgcacactgcacaaaccttggagttgatgccaatgtggggagggagagagtttaggctggatcctaggttttggtttggtgactggtggagccattgttaagaacagaaacacaactcaaggacgagagagaaggaagaatcataggaaacaccatgtataaagttcatggaattcagcttcctcagctgggaaggagtttctttaagttctctggcagggattccacccctcagtgggttccagggacccagggatggccagacccttacttggctggcaggctgtggcttagagcatggtgtgtgataggtatctttggaataagtaatttgtttaccaaaatccgtaactgatgtgacttttcagtatgactatgacccaaactgtcttagtcagaaaaatttccccataaataagcccttagtcatctgttgccaagacagttaaaaagcttttgatctaaaatccacgaacctgttgtcctttttgctacgctgaaaccgataactgtttcagtccctgattttgtacctgctgtgattcaagtagattgtaatctcagagccttagggttggccagaaaagcacttgtaagagagctgaagaaaaggagatcagagagcaaagaggcggaataaaccctttctttcttgcatatttaaatttccaattaccctttgatgaagggaggggaggaaaatgggtgaatctccaggtcaccgggttttgggtcctggcttgaccgtaaatttgtacaattacaacaaatgtctccttttcctccctgattctgtctgcgttttcttccaagaggaactggcaggatttctatggggacggcctcttagcatcgcagacttgccggggagacggagcccggacacccaggagcgagacgctcttgggtactttgtgtgtgagacagaataagagagagagatgggggtgagcacagagagagaaagagaatgaaagaatgagacagaggagagagaaagaatgaaagagaatgagaatgagggagagaatgagagaaagagagacaatgagagagaaagagattaagggagagagaaagagataaaagaagagagaatgtgtgtgtgagagagacagagaggtagagggagagagcgagggaacgagggagtgagaaaaaaggagagtgagcgccccggagctttgtggctgtgacccacgcggccgccttcccactttcccggtcatccggggccgccgcgctttccctccagccctcgctcccaccgagtcccggaggccgagcgctgcagccccggctggtgcccctcccggcgcggatgcccggcctttctggatctccgcccgacgcgcgcgagccgtggaaggaaggcgggggcggggctgccagggcggggcgcgttgggggcgtggccttgccgccccgcccctccccgccccgccgcttaattcggacgcgcggggccgcggggagcgagagccgccctgcgccggactggcttgcgggccgggccgccgcccccggagccgccctcgcgccgcctcgggccgccgccgagcagtcgggccgctgggcgccgccgcgggcgccgggagcgagctgggagggagccgcgcgcctttgtgcgcgcgccgaggtaggttcgcctcccgcactt

SEQ ID NO: 4635 - DNA, 2300 bp, Homo sapien
aatgagtaaaaatgggaataataatatcacctttcttctagggttgtgaggattaaatgagttaatttgctgagattcatgtctgataccaaacactcaataaccatggcctgttactgagtgttattctaggtcagacttagcaacacactaatcagaaagtctactgttcttagcgggccagtgctggaactccgatgagttcatgcgtgcctctgagcacacccactgagcgaggagaggtggtcctcagagcccggatgcaagcccagggcctccgcagacctagaaagtggctctgagctttcttcctcagcggtctcctgaatgtggccgctcgcaagctgcactgtgaactgctgactctctgttccaaaaggggcttgacacataattgaatgaatatatgaatgagtgaatgaaaccaggtgtaagagtgcatttttcttttcttaaatcccttcctgttacctccaagccttcaaaaatgtcttatgcagcatcacagccccgatttactatacgtgtgcttggaggggcacagcatggcacgacccgacccgagtggactgtagcaaccaagtcaaatgggagacaaagtgcagttccgaggggtctccaggaatatctgggaggggggaccctggtagaaacctgaaccccctgatttcttatgggtggggaatttggacagcttgcacttgggacacaatgaaaaaagaatgagctcacaaccctgggaagccagaaacagcttggatagcacggggcctgccacacggtaacctctaaataaatggaagctttctatattctaactttcagtagagactaaaataaaatgtgcatttgatgccatatccactcattctaaagccatatctgcctttttgtattatgaatatgactgtccatttagaacaatatttcccgtatggccattacatctataaaatgattgttagatagaatgagactcagaggacagataggagaacagggatctcgggcacccaacaagcccttcttagtggcataaacttgccttagtcacatgaaatttcaaagaattggtttctgcctctgtaaaacgggaatcagtgccataatataataactaccacctgtctgggccaaagagcacatcttgacattaaattaaaagagagagcaaacaaattaattaagagtgggtaacatgcccagaaatcttgaccctaaaatcactattaacggtaaaagcattacagtattacatttctataacattcctagcagacagttggctaaggaaaaatcttgattctgaattgtcttagaatatgtttataatttattatttttcaccattcacatattaatgtgttgagaaacagaagatctatgttcaaaaaggagttactttctgaaagtaggtgatatataccatataggtagaatacttcacatgtacataatacctccacacataataacataatacataaggataattgttaatgtagggctctcttttttctttttggtattgttgaaaactaatcaagaacttagcctagctagtaaaaaaaaaaaaatcaaattaccaaagacctatttatagttatcagaaaaggcaatgtggatcctgaaaccaggaaacttgttttgagggtggggggaagattccgggaagattccggaaagatcccgaaaagtccagaaagattcagaaaacacatcacaccgcatctctccaggcgaaagattgagtctacctcctattttaataatgaaacagctgctagggtcgtggcccttctaggggtcttcatttgtgatggacaactgggtcgtttttgttttgtttgggggaataaatatttgaaggggggtaaccaaagaaggttttgctgctgttatgatgttattgatacgcaggctgacgctattatggcagatgctatcaggctacattatctttatgcctcctaggtaacctgaagcaattgtctattgacttggcactaccctaccctgaagcgtctgccctgcctaggaactgtaaccggagccactcacatgcctccccaacagctttctttagccactgacagcatcacagaaggaagagcgcgaaattgcccaggatggacactttcaaaggggccccagcggctaagtgactctcagggaaggtggccttgccatcccaacttctatttaggggcaaccactagcaagttcttctcttcgggcaattggaaagagttcctataagcaaagtggaggtgatgtggacccctggaaaatttccttgc

SEQ ID NO: 4636 - DNA, 2300 bp, Homo sapien
agctggatgcagaatctggttcttttagttaccaaactgttatgtccttcctctgcgattacacaagcttctttacctaacaaatgaaatatatagacaggttagtcagacatgcaataatcacagcatgctgtaataaatttaggacagacagcataagcttcccatttaattaatccagatgctgtctctcttgaaacatttataagtgggagccccagatgagtcatcaaatcaattgtctttgcctcacaaagtctgttttaaaagtataggacacaattatagcatggtttggagcaaaattataacttagctaaacaaatatctttatatcgagtaataacatgtagatattttaaatttctggagaaaagtttaattattgcagagctcatagaaagccaggctccaattattaacactttaaggactgggcgctgtggctcacgcctgtaatcccagcactttgggaggctgaggcgggccgatcacctgaggccaggagttcaagaccagtctggccaacatggtgaaactgcatctctattaaaaatataaaaattagtcaggcgtggtggtggtgcctttagtaccagctacttgggaggctgaggcaggagaatcgctggaacccgatgatggaggctgcagtgagccaagattgtgccactgtactccggcctgggcaacacagtgagactgtctcaaaacaaaaacaaaaacaaaaaacaaaacaacaaaacaaacaaaaacacaactttagtacgactatacccatccattcactcaacatatatgatgaacctacaatttcctgttcactagggatatattttccagctgagggcatatacatttaaactaattattttcagtaaaacatggagtgagcgctacaggagtccagaaggaaggggctagcatagccacttaccttctttgcctttgctaacagatctctaaagtgaagtacgctgattttgcaaaaaccaaagtctcagagctaggggacttggtgggatacagactcacgtattctgactgcgagttcacagctgagataccgtgaacaaaaaggaaccactcttttgtattcctctctttcccaaggagtcagtgtactcctttgcaaagcaattttcacctacagagtcctaacaaatattagctatgtcctctgatttaagctactcaactcaatgccatgttttgttttcctttggggagtcaccaactagcttggacttgaaagacgtcttctgtgcaaggggaggcaaatcttgctggttggaagcagcagaatcaatctggcgccagtatcatctgaatctagcattctttgcacaaactctaatccaaatacaaacccaccagcttttactgctgaagtttaatattcacagcaaaaccacaacgtggcctcacgttaccaccaggcccggcttgagctttttactcgagctgggcttgggcgatctaaaacgagggacagggcctgcatttcctgggcggaatgttatttatagccagggccaggagaagccaaagccgacagctgctgcgccgcagcgcggggccgccgccatgcaagcagttgtcacaccgctcaccttcacagtcggcccctggccgccccccggcctcctggccctgcgtcagcaccgggtgagagaccaaaagcccggcgcaaaaggccaccacagcaactgggctcgcgcaccacatgctgggccagcagcttcaatcgcctccgccacccgcgcccaccgcccaccaagctgccaaagcgagctgagcagaattcgaggttggaaagaatctgccagtagttgccaggacaaatgacgcaactgaacacagagtttccattggctctcaaggaagggataggaagggggcggagtgtaggagccttttcccgtccctccccggttgcgcgtgcgcactgtgcagtttccgcggagcgcagagacgcgctgaagctactcgcggactgcgcgtgaagaaaggcggaaccttcacgctgattggcggcgacgcgggaggctgtagcggccgaccggacgcagggggctggcgggaacgtgaagctccgcggtgcctgatggggccgttgggcggccggtagctgttgctgttgggggaccccctcattcctgccgctgccgtccctgctgcctcatggcggccatcggagttcacctgggctgcacctcagcctgtgtggccgtctataaggtgaggggctgcggagctgggctagggcttcatgacggccacccggttttctggcgctg

SEQ ID NO: 4637 - DNA, 2300 bp, Homo sapien
aacagatgattaatctgattcttacataagacgttaatttagctgttactctaatgattaaatttgtaagtcaagtggaaaagttcgttcccagaaagtgtcacaaaagatcctgaggaagaaaatcaatagtgtctacataaattacgaaaaattgtaatagattcagcaaaattcaaccacattgtcaataagtcttcaaattcccacaaaatctttgaaatcctctcagttaaaaaaaatctaaaaatgtgaacaatccaaattaccacctctgacgcaaattaccaaattgacctgtcagcaagaaactaacatctgagtgaatcccatatcagagaagatccaacactaagaatcaaaagacactgcctactgggggtactctctgtaatgactcagtcataaaaagcaatgaagaaacaaactatgctgtttctaatttcttttcacattatgcttagaatttatgaacatgttcctattaccatatttaaaagtatcatttgattccataccttctgcccaggatctgctttactttcattactgtatttgaaatatttcttattctactttgttttgctgccaatccaacaatctgaaaaaaaaaataatatatatatatatatattacaatgtatgtaattttaaattatttcagaagtacaaaaatggggggactagtacctcttcattttctgagtaagcaacaacagctggagtaactcggtcaccggcatcatttgcaaccacaccagcccggccatcctagagaaaaaaacacgaaatacatagtctcattagacgtattcagacgtgtgcatttgtgcaccagtgttactttgccatctgtgtggaaagaaaaactgctatctcaatattttaaacttgcaaatttaattaccatttaatttcctcgttttcatagaaagcctataattccatgaagaactgcctcatgttttcagtctgctctgcaaagtcaacaattgaatcaaaagtaataacaacctttctacacacaaaacgaaggctattattacgttacctttcctacctctcttccttcttaccattaccatttcttttttttttttttttggacacggagtcttgctccgtggcccaggctggagtgcagactgcagtgccagatctcggctcactgcaacttccgcctcccgggttcaagccattctcatgcctcagcctcctgagcagctgggattacaggcgttcccggctaatttttagtatttttagtagaggcggggtttcaccatgttagccaggctggtctagaactcctaacctcacgtgatccgcctgcctcggcttcccaaagtgctgggattacaggcgtaagccaccgcgctgggcccctttcttcccatttctacaaatgaagtagtattattccctttggcttttcctaacaagtcatttgacatttaaacgcgggactagtggcaacggagttcatgattatcgtttcttctgcctccccactgatgagagaaaggccacaagtcctgtcaggctctcacttccagaaaggccacctctgtagaccacgcaccatcaactggcttcacagccaggcagctttgcgggaccatcagccccagctcgactgcagcctccccgcccctccgggacctagacgttcgggcccagctcagcgcgttctgcggccctgctgtcccagagaccaccgcctccaagtacctcgcggccacaactttcccaggacctcccacccgcgggaatcctgaggccctgacgtcagcgagaccccttccggcatccagaggccaggacgtccccgtgacctcccccaaaatgctcgcagccccgccgtccccgggaccccccgggacacccagcggccccgctgtctccgggacccccccgggcaccctgcagctacgtcgtccctgggacccctccgggcatcccgccgccatgacgccctgggaccccgcgcgtctacatcgccgcgagcctccgccgcggagtagacgactttccggaggaatcgccaggcgcgaggccgggcctgcccggcccttcgctccggagtgtcctcgcggcaacgccactccacgacatccctaggccggcgacacgccgctctcaagcctgtggatgacccagcgccagaaaaccgggtggccgtcatgaagccctagcccagctccgcagcccctcaccttatagacggccacacaggctgaggtgcagcccaggtgaactccgatggccgccatgaggcagcagggacggcagcggcagga

SEQ ID NO: 4638 - DNA, 2300 bp, Homo sapien
tcattagagtaacagctaaattaacgtcttatgtaagaatcagattaatcatctgttgtaagtttaattagaagattaaaacaggcttgcttccccagacttctgtctcctcaaattatagattgctataataattaggggttttcattttcactactgtagtaatacttgatagagtgtttttaaattttcaaagtgctttcacatctattattttatttaattctctcaacatccttgtaaaattggcaacgcaaatactatcattccccatttatagatgagaaaatcaaggtacaaagaaattgtggcattatcctagggggtaaactgggtaagactgcagatcaggtctcctcaccctcggccccaggttcttttctttcaactttgtttagtgagaatttaagtaaaaatgtcctggtgttgatttagaattggatattatagattaaatttatgcaggtatctcttacctgtttatcttattttctgtctcttacctgtgttcaattaaattgaacttgatattaatctttttcctcaggatacttatgcactaagccaaaaactatagttgtttggagagaattcaatattcagtgacaataaatacatccccatatccttttacctattgataaaacttagtaccgagcatattaaatataagttggtgtcaaatattttcagatcataaagtctagaaaaaagaatcgtagatgggtcttcaagcccaaatcactgagcagccaacaatatgatttttttaattaaactttttatttagagagaattgcagtttcccatgctgctgtgtaagaaataatacagagacatcaaacacattgctggattcaccacctctccccgtggttatatcttgcaaaattatagtacagtgtcacaaccaagatgctcacatcgatatagtccagatacagaacatttccatagatctctcccctggtagccaacaatatgttactgtttgttttatgctgctgtttgagggcacatggttagagtaattatgtggctttcttctgccatattgtgcaaaaaaaaaatttgtattagcagagcaacttaaactcacttttctggcccacactgacagtcagatgggtaacacagagccacagcgtgctgtgattagtaaagactgagcatctttcagattgctataccgtggtcatgcttggactcctttagcgttagctgcctcatggtccaggtgattttccctcccagcccatctactcaccagacaagggtgatttttacagatccattgttgtaccaactctcagccatgaaagcatttggcctttttgttaccaagccattaggttcttggtgccgtgtctaccctgggtgaactcccaaagttgggctatctcagtcttggcctcatgcctgtttatgacctactcacaggtagcaccacttaacttgctgccaaaattatccttacacccttcctgtaactctcattcccctgtggccttccagccagaaatgcggtccttggacctggcttctcagcaattatccctgagagggaagatcctggagatatcctgagagcacacagagcttccccacaccttcagacttgcaccttgctgtccagaagctgcctagccctcctttccaacccacaatggccagtgccaatagcagtgcgggcatccggtggtccagacaggagacacgaactcttctctccatactaggcgaggcagagtatattcagcgcctccagactgtgcatcacaatgcagatgtctatcaggctgtgtctaagcgaatgcagcaggagggcttccgccgcaccgaacgtcagtgccgctccaagtttaaagttctgaaggcattatatttaaaggcctatgttgcccatgccacaagtatgggtgagccaccacactgtccattttatgatacgttggatcagcttctccgaaatcagatagtgactgacccagacaacttaatggaggatgctgcttgggccaagcactgtgatcagaacttagtggcctctgacgccccaggggaagagggaaccggcattctaaaatcaaaaaggactcaggcagctgatcatcagcctatcttgaaaacagttaaggcatcagatgaggattgtcagctaagaatcagtgaccggatacgagaaaccagtgaccttgaggactcctgggatgaatcctcgggtgcaggtaactcccaagcatgtgaaggagttgggtcccagagtcttgtggctctaaacatttagctgtgtctgtttg

SEQ ID NO: 4639 - DNA, 2300 bp, Homo sapien
agtgaggtgagacaggattcccatcactggaggccctgccggccatctggaggtttgagttttattctgaatgctacgaagttcagaagtgtatttttccggatatgttcaatttgagatgtttgtgcaacacctaagggcatatgtccattacgcactgtggatattctagcctggaattcaggcagaggccagggccggagacgataagtgaggcatcttgtgtgtcaagatgctatttaaatccatgggaattggggcagtcacatagggagagggcggaaaagaaatgcagtcccaggactacagtctcttctctgaggaacccaggttggactgaggaaaaggagccaaaaaggattcaagagtggccagtgagtagcgatggccgctccttggtgggctctgaaaacatacaggagaggtaatgaatacaggggccggttaggacgggaggctgtatccaagtctgaaggcataatcctagatagactaagccttaaagggcctggatgctcttccaggtgacagggttggacagggccttttattccttatctcaaggtaatgagatatggaatacaaaatttactaaggactcaaatcttagaaacatgtctgagaaatgcagttgcattgaaacacacacggactgcagaacagtatttgtattatgatgccgtttgtagctaaataaagtctgggagcatgagtgtgtgtgaggaagtggtgtttcccatcgtagaaaatgattaaatatttaaaaacgagaagttaaaaagaaaatcactccgaaaaggctatttcgttattttcctatacatttttttcttccatagttaaaactatatttcagggggatttgttttggttttgctgaatactaaaagcttcatgaacacctttttaagacggctagacagtatttcataatggaatcaaataattaactattcctttaatggtctgcgttcatttccagtatttcaaatttatacatactgctttgaaacgtttatgtaattttttacatgaattttttaaggagatatcaaatggccttctgccagttttcgttatttgctctaagatttctgctttaggttgtttagaacaatcatggatgcagcgtcaagaatgggtgggggaggggggtggagaccaggtgggaggcccctggagtcgtcctgcagcttccttactaacgtgtccttctcctcccggcccccacccgccaccaggccgagctcaggagcttggcaacaacatgggaggggagctcgggtccccttacagacctacccaatcccaatttacattaaagttgagcccaggaggtctagtctgcagtgagccgtaatcgcgccactgcactccagcctgggtgacagagtgagacctcatctcttaaaaaattccaagtccagctcccccacccccgacgattcgtaagcccctttaagtgagaagcactgatgtggaccggtggtttccgctgtgccgcacattaggatcagctgggagctggatagcacaggccacaccccacaccaaccagtcggaatcccggcgactgccccaagccagcggaacctctccagccatgcccacgtgcagccgcttccgaagcccggagctctagagggagcggtgtcggggggagactaaccatggcccacggggctgcggtagctgcggaaccgtacccgacaggcagcgtccccggctccctaggtccccgctgcccgtgtcggatctcgcagtgtgcgagtgctgccgaagtaagacgtctccaaagcgcaaagtcctggccgacgtcttcccgagtgaaggcgccaaacgggcctggcgaagggaagggggcgccggacactgccgaggatccgggagcacgcgcgctcgccccgccccgctcctcgcgcttggggccgggcctagctttggggcgcaggcgcgctggccgccgcggcggggggtcggccgccagtgacgtcaggacgccgtgcgggttccgtcccccaacaagccccggcccccaagtcccgcgcgggccggccaggggcggggcgtcgggccagctgagctatcccgtcagaccgcgccagtttgaatgaaagctctacaagatggcggcggtcggggccgaggcgcgaggaggtgaggctggagcgcggccccctcgccttccctgttcccaggcaagctcccaaggcccgggcggcggggccgtcccgcgggccagccagatggcgacgtggcggttccccgcccgccgcgaccccaactccgggacgcacgct

SEQ ID NO: 4640 - DNA, 2300 bp, Homo sapien
ataaatgccagagtatcagtggagaatatagagcagtcactctgctctatatgtaagcctggctgatcattacgatcatatgcaaaacttcaaaaaaagaaaaaaaaaaaaaacaggtttctgtatctcattccagacctactgaatccctgaggaagataggaccaaataatttgatttttaagttctacagctgatatctgttcagccaggtttgcaaagcctgtgtgctctgcaaatagtagatgctcagtgggttggctgacttaggaaaattaaattgctttttattaaggtttttcttctgtgagcatcttattgacatgttttatgcacaaggttgcaacaggttaaatcaactttaaagcaaaatactgaataatcaacgtgtcaagaacttaaaattcaaaacattaataagcatgctgtgtcaacaaatgttcttaaaatgaaaaaagccttacttagaaaaacaaatattttcccatcttgtaacagtatctaacctaggaagaaagttaaatgcacccaagactactgtgtatggcaacttcttgttctactgctgaatctggtgttataataatccacttaaatgatgtggctaaacactgcatttttaagacactaatataaaggaccatagagaccattatccagctcccatgttccccgtgtgaagctaggcccagagaaaagggtgtgccaatacacacgacccaacctcattcttaaaggttcagtgttatgacttgtaactgaacttagggcttaaggtcactaagatatctaacgactgtatttggaatcatcctagactgcagaatgtagattttaagccaaagatcatatgtatgttttaggtccctcactactatgccaaagttgttttttgagttttatacagtcacagttcagcctctacctctcaggctcaggagatccacccccatgcccagctaattttttttagacagtgtttccccttgttgcccaggttggttttgaactcctgcactcaggcaatccaccccctcggcctcccaaattgctggaattagaggcatgagccactttgcctagcccaaaattacctttttatgaaatatttttgtatgatctctaagttgaacagttctgcattccaaatcagtgactatgcctgatcccaaaagacatttatcaaaaaggagtgtggattgggtagatgcataaaaggcacaaaagattaaaggaagaaaggacttttgcttccaggtaagatggagtaacggactagatttaacctcccacttgaaataacgaaaaatcagaaactatctctcaagaaaatggacatcgagcaattaaggacaatgacatgagaaataagacacagatgagtcctatgattgcctgactccctgcttcataacagattccagtcagggagggaacatctggatagagcccatggacatccttgatgtgaggtggaagtggaacattgaagaaataaatgtacctggagtttacagagcagaagaccagagaggagagtgctgcacagaaactctgaaaagctgcagaggcgtccccaccacgtgttcagtgcactaagcagcatgtgcttgtaaggaaactacctgcagccaggcaacgaatcactcaaacaaaaggaaagaaagtgcccagaactcaccgtgccaggaacagtgtcttgtcctggtcccaacagccagagtggaaaacctcatgatccatgggcatttgtaaaagaaccaagaagagccttgcctcagtagtggggaaaattaaccatatactaaatgctactctgttcctgcataacaaaggtaaaagacacgaaaagatcaaactataaacatgctaaccacatgccagaacaaagctcaagaatgtttttagaaatcccaaaattatgcaggacctaaaaaggtaaaattcagaatgtatggcattcaaaaacaaattatcagaaattcaagaagcaggaagatacagtcaaaactgactgtaaaattatgtaacatgggagtcaattttcatgatcttggatcaaatagtttcttagatatgacaccaaagcatatgcaataaaagaaaaaaatagacaaatttaacttaaaacctttacgcttcaagacaccatcaagaaggtgaaaagacaagtctgagaaaatatttcctaatcatgtcagataaaggactgataccagactttaactcttacaactcaatacaaaggtcaataatccagttgaaatgggggcaaaagatcagaatagacatttcactga

SEQ ID NO: 4641 - DNA, 2300 bp, Homo sapien
tttttgttggtgatcttatttaaatggtgaccagtcataatactgaagtcctatcgagtgttcctaagcacgggaggactgtaacgtggcttctagagaaaatatgtatgttagataggcatgggttatagggctattgaccatgagttcaatgttaatggatcaaagtgtctattaaataaggtgtctttcaacagaaacacacataaaacaaggttatgtattaattggctggtgaaaacgatgtcaccaaaggatggcaggaaccctgtattttccctagcagcaatggctcagtatttgctaattcagcatttatggtgactataatttatagagtataactactgtgaataaagagaattggcgctattgatgccttattttaaggcaggcatttgataaaagggagtcaacttatataaatgagagggggtgctcctttattgggtgtctcttatctccttggggccatttcatctctgagaagtagtagtgaaccatttctggtataggcttgactttactttttttttttttttttttttttaaatcctttattcccttcaaaagtctcagatttctaccagcctcagctttgtgcaaatcaaatcggtgttgggcgggcaggtaatgatttctatttgcatgcctcctgtgaaggtacaaaagatactgtttgtgaaaactatttaaagaatagatcttcctgcctttccactgtcttaaagtagcccttttatttttatgtagagttattggcaattcttgggtttctgcctctttcagtttggtgggatactaataattacattgggttctagtctgtccatttgcagaagggcataaaagtctttgtgttctcattatcaacttagtaatggatgattttttttttaattttttaatttttatttatttatttttttgagatggagtctcgctttattgcccaggctggagtgcagtggcgtgatctcggctcactgcaacctccgcctcccgggttcacaccattctcctgcctcaacttcttgagtagctgggactacggcgcccacgaccacacccagctaattttttgtatttttagtagagacggggtttcaccgtgttagccaggttggtctcgaactcctgaccttgtgatccacccggctcggcctcccaaagtgctggaattacaggtgtgagccaccacgcctggcctggatgattttattgactgtttcaccagataccaagctaagcacttcacatgcataatctcatttatacttttaaatgaagaatctaaaattagagacattaggtaacttgactgagatcacaagctcaccaatgtctaataagagacaaagctgaagttcctctaggttgtagagatgttttgaggaatagtgacagagttcctctgtttagcattctgaactttgcaaaaagtcaaggtattcatgaagtttttgcatgtaattgtttgtttagaattaatcattgggagaggcagtctatgtgcacagtctttcaaccctcactggccacataagaatgggacacttccttattgagagagagcgcacgcgagtgagagagagcaagcactcccgttagcgtgagcacacagcctgcggcagctcagtaccttgtgtggaaacatctttctctgcttcgtacttgatgtgtgtccctttgttctacttaagcctgtgtgtcaatggcccttaggcacaccccagctgtccttatttcagacagcatgatgggggttccttcctgtgtggcaggagagggttgcatgtaggcaggttgccctgtgttggctgcagggagagacacactggtcactggagaccagtgcacattgttggatttgatcttgcttggtcttttctcagtaagtgaagcattgctccctccagtgcttgactgcattgtgttttccttggtgactccaacaccaaggtacaatgggcagtgtttggatccttccctggaatcagtgacgaatgcatggtgttctgcccaatgagaatgaaccatttgaacaaatcaagtaacctcaaaggtgtaattctcttggcatcgttaatgattattggtaggagtaaataagtgcaattcttttgttgttcttttttggagatgaggtgtctctgtgttgcccaggctggcctcaaatccctgggcttaagcaatcctcctgcctcagccttgagtagctgggatcacagacatgtaccactgtgcccagctaagaaatgcaattctgagaccttgggtttttgtgtatattatagtta

SEQ ID NO: 4642 - DNA, 2300 bp, Homo sapien
ccagagtttctgattcactaggtttggtctgggctatgcttacctatcttgcctattttctatcctgtctttctctttgtcctgactctatttccctttgtttgtactgtatccattgtggaaagaggaggagataaataagtgagcaaatacataagatcacgagcattaacttgacctgcctttcctggagctctaccgtgagattcttcggacactagactcacagcagaatttgttgttaggtctccataaccctgccagggcagttgttcccatgtgttctaagacaaaccatcaaaggtgttgccagtagtatactagcaggatattttacctcaattagtgattatgttgtgtatacctttccatgtcacccctcctccccctcctcaagatttcatggaaatctgtatttgaatagaactctgagtatcatggctacaggcacaagctgacattcactagggatgtcattctgttttgttttgtttttttgagacagagtctctctctgttgcccaggctggagtgaactggcatgatctaggctcactgcaacctccgcctcccaggttcaagtgattctcctgcctcggcctcccgagtagctggagatgtgtgccaccatgcccggccgatttttgtatttttagtagagatggggtttcaccatgttgtccaggctggtcctgaactcctgacctcaggtgatcacctgcctcagccctccaaagtgctgggattacaggcatgagccactgaggtgggctgggatggcattctgattcctgatttccctggtcagaaatctttgttcctggatttgttctcacgttaccttgcgtctctgtggaagcatttatttgccatattctgcaaacatgttgtcgccagatagattgaatgctacccgaaggtttgtcacagtgctgtgcacaaagtgggacttcaagtgttatggaggcctggaaagccaggtacaatggctcacccagcactttgggaggccgaggcgagcggatcgcatgaggccaggagctcgagaccagcctggtcaacgtggtgaaaccccgtctctgctaaaaatataaaaatgagccaggcgtggcggcgcgtgcctgtagtcccagctactctggaggctgaggcaggagaatcgcctgaacccgggaggcggaggttgcagagagccgaaatcacgccactgcactccagcctgggcgatagaactagaccccaactgaataaataaataaaataaagcgaaagtgttctgggttgtttgtgtttaattatactaaggagatttgataggaaggagcacaataaatgtcatggtgattatttggtttattgtaatacaataaaggaaatacaataaaaggtttaacaaaccttttcataaagttgctttggttgttaaaaaattttagacctttcctgccatttttctttttttaagtacatcattctaacttcctaaaagtatagctcaaaaaggtgggggcccaggggagaggccagcagcgaaggcattattgggatcttatttgccccaagatcacgcagagatgatttattcagtttgtagattatataaacggaagagggaattaatagttcctgaatctaccatgagtcagatacaaactttctcatacaaccctcacggtaatcccacaaggttagaaattgggaacagaagagagagggcggggaactgagctcgggtttcaggctagcagcagacaagcaggaagcggaacgaagaatgatttctaagcgcagttccgcagcccactcacctcgtcggctggggccacctgctctgggagtttcgatttcccttcccgcgactgcacctccacagacatgggcaacgccttaccagagcaacacctgtgtttgttgggcgggaatgagccttgcactgggcagggctcagggcccatcgcgtgcagcgaagcgcgggtgatttaaacccaagcagcgggcgcctagaacccgaccggatgctccttgactttgcccccggtctccggactcctctgattggacgtggctgcgttcggccgcccaatggcgaggcagcgcgcggcttcccggaagtggcggcgcggtcagggctggccttggcttcagctgcggttttggggtcccggactctgggatcggcggcgctatgagttctttcgaggggcagatggccgagtatccaactatctccatagaccgcttcgatagggagaacctgagggcccgcgcctacttcctgtcccactgccacaaaggtgagt

SEQ ID NO: 4643 - DNA, 2300 bp, Homo sapien
tatcacagggtgtacacccactgtgatactgggagcaatatctctctaggatagtacaaagaatatcacagagtgtacacccactgtgatattaggagaaatatctctctgggataatatgaattatatcacagagtgtacactcatggtgtacatccactttgatattaggagtaatatcttcctaggacattacaaataacatcacggagtgtacacccactgtaatattaggaatcgtatctccctaggtgattacaaataatatcaaagggtatacacccactgtgatattaggagtaatatcttcctagggtattatgaataatttcacagtctgtacacacatggtgtacactcactgtgatattaggagtaatttctacctagtggataacaaataacattgcagagtgtatgcccactttgatattagctgtaatatttttcaaagttgttacaaataagatcacagggtgtacaaacatggtgtacactcactgtgatatcaggagtcatatctctgtaatatattatgaataatatcacagggtgtacacccactgaattattcagagtaatatctctgtaggatattactattaatatcacagggtgtacagtcactgtgatattaggagcaatatctttctaggatattacaaataatatcacagggtgtacgcccactctgctgtcaggagcaatatctccctaggatatcaaaaatcctatcacagggtgtccaatctctgccttccaggttctaagggattctcctgcttcagcctcccgagtagctagggttaccccccaccacgcccagctaatttttttttttttattttcactggagacggggtttcaccaccttggccaggctggtctggaactcctgacctcaggtgatccatcagccttggccgcccaaagtgctgggattacaggtgtgatccatggcactcggccaagagttatatattcaattcatttggaaacacagctcccatatttgagtgtgcatgtacttttttgaagaaatgatgtcagaaaacctcaggatgataataaatatgaaaagtaactggcatgtgaaaaggtgttccgattaagaactctaagtttcgatttcgtttttagataatgtggtcctagctcttgtatcgtccttttacatattctacatcaaaggaatttgtagcacggtgtcagaataaaacagagtgtatttcacagcttcttaatttctttcaattagactgagatctttttcttcaagagagaaggacattttcattgcattgtattttttctgaaaagagtaggccgtattttactgagatcacggatttgttatatatgacgttttggtctcctaacattctctagtggattttctctaaagtagtatgtacagaaagagttcaatagcaaaaaagtaaatcatgtaataattctgagatttttggatttgtcacaactgagaaacatcgctggcagtgtacggtccgcaagtgtgaaaatgttccttttcatttgcttgcatccaaaatatacacacagcattaagggctggtttttatcttttctttttccaatcctcttttcttcccaaggtgtccaagtcacacagagccacagaatctcacaggtatctgagaattcctcctcctgggactctcagaggatccagaactgcagccggtcctcgctgggctgtccctgtccatgtatctggtcacggtgctgaggaacctgctcagcaccctggctgtcagctctgactcccccctccacacccccatgtacttcttcctctccaacctgtgctgggctgacatcggtttcaccttggccatagttcccaagatgactgtggacatgcagtctcatagcagagtcatctctcatgcgggctgcctgacacagatgtctttcttggtcctttttgcatgtatagaagacatgttcctgactgtgatggcctatgacagatttgtagccatctgtcgccctctttactacccagtcatcataaatcctcacctctgtgtcttcttcgttttggtgtcctttttccttagcctgttggattcccagctgcacagttggattgtgtgacaattcaccttctccaagaatgtggaaatctctaattttgtctgtgagccatctcaacttctctaccttgcctgttctgacagcatcatcaatagcatattcatatattttgatagtactatgtttggttttcttcccatttcaaggatccttttgtcttactataaaattgtcccctc

SEQ ID NO: 4644 - DNA, 2300 bp, Homo sapien
ggcctaccaaagtgctgggattccaggtgtgagctaccgcaactggcccacacctttgacccgttggcatcctctgggctcttcctgagaggcccagttacgtctttgtcctcctatttccctggcatctccatctaacttttctgtcagcttctctttttctgcttggtgtttaaatgctagtgattctcaggactctatcctacactcttcacctgcaaaccactgactttcagtgcatcggtaattgagtttgaggagagtatgcacaactcccaacccctgaatggtaccaggcacaaatacaacaaatacacatggtatttttcttttttcttttgagacagagttttgctctttttgcccaggctggagtgcaatgacgtgatctcggctcactgcaaccttcacctccccggttcaagcgattctcctgcctcagcctcccaagtagctgggattacaggcacccgccatcacgcccagctaattttttgtatttttagtagagacagggtttcactatgttagccaggctggtctggaactcctgacctcaggcaatccacctgtcttggcctcctgaagtgctaggattataggtgtgagccagcgtgcccagcccatgagatgttttaatacaggcatgcaatgtaatgtcacggagaatggggtatccaccctctcaaacatttatcctttgtgttacagacaatccaattatactcttctagtcattttagaatgtacaattaagttattattgactacagtcactctgttgtgctataaaatagttggacatcatacttgcttcctccctctcccacagtctccatatctaagaaattatcaattcctactggtttcatggtcaaagtggctgaagaacccaagccttcttttcatccttagctcctccacattagcacaaaggcagaatgcattaggggtgaaaagcatagtttctggaaccagactacttggatttgccctctggtctgtttcctacccacgtgtcttttttttttttttttttttttttttgagatggaggagtctcgctctgtcgcccaggctggagtgcagtggcgtgatctccgctcactgcaagctccgcctcccgggttcacaccattctcctggctcagcctcccgagtagctgggactacaggcgcccgccaccacacccagctaattttttgtatttttagtagagatggggtttcaccatgttagccagggtggtctcagtctcctgaccttgtgatccacccgccttggcctcccaaagtgctgggattacaggtgtgagccaccgcgtccagccatccacgtgtcttttagtcagttacttaacctctctgtgccttagctttttttaatcttcaaaataggggacataataccttaattattcttgtgaataatgcctacatgattgaaaacacgaaaagtcttaataggtattgaaagcttagaagggtgcttggtccttagtgttatgtgtttgctaatattataaggccaggtatcactctttatcatctagatgtctaaaacagcctcttaacttgattttactgtctagtcagtaattctgaaagtcaattcacctttttccaccttccagtggattctcttcttctttttttttttttttttcagacagagttttgcttttgttgccctggagtgcagtggcgtgatctcaggctcactgcaacctctgcctcctgggttcaagtgattctcctgcctcagcctcctcagtagcaggtgcctaccaccatgcccagctaattttttgtattttttagtagaggtggagtttcaccatgttggccaggcccatctcaaactctagacctcaggtgatccgcccactttagcctcccaaagtgctgggattactggtgtgagccactgcaccagccttgccttccagtttagttaacttcttttattttcctaatagatggtacattgtgtctcctctgggccacagcccatgtcattcttcctgctttgttgttttcattgttctttcataatgttctgagattacctcatttcctgtgtcctctctttctttggcaatccaaagaaagtcatctttcagattgtctgctcagagttcatctcaaagcctggcaagtgagtatcttatattttaaattatctaaaaatcatagagtaataccttctcagatatgtctcatatgcacagcctatagttggattatcttttaatctaatctgcgaatattgctttgtaactagagaatttagtctgttt

SEQ ID NO: 4645 - DNA, 2300 bp, Homo sapien
aagtgctgggattacaggcgtgagccaccgcgcctggccccttcttgcatctcaagacaagacacacatggctaggcaatgagatggggaatggcaacccaggagaagaaaatactttcaaaagaggtcttaaaagaacattctggatttagagaaaaaagcagagaacaatgtagcgtccatccctctcctcttctggattcttacagtgacgataattccagaatgtctcagctgaagatatggactgatacctgaactcagtgcagtatttcctgctgaaacaccacagaccgggttctgcccgcagccaggactaggctaacagagaaaggcctggctgtgctgaagctgccatgagcctcagtacccccacgggacctttcccatcatctaggacttcaaacacaaacaactgcccagtaggtttttctaacattttgcttttggtccttcacttggaaatgcactgatttcaccaggaaaatatttgtgaggagaaaaaaaaagattttcatgaaaacgcaaatattttaaaaatgtagctttatgcaaaagcaagctgaaaggtttcttgttgcattgttgtacgttgaagctcagtcactttgctgacattgagtttcttttttctcccagtcacccttctccaccaatgctactatttatgcgaagtgtcggaaattagcttctcatgtgaccacccaattcggttccagtcctttggaaatgtaatcctattcggtgtgtctgcagacttggagtgacattgggtttgttcccctagaaaactgagtcaaattgaataggcgtttagtcctgtgcctttaccataattaaaaacaagttaagctgattatagcatgtgtccagaatttaggtggttttgctttataaagagaagaggtgcaaaccacaggccactttctctcatgataaacagcgcctggaggcagcgtggaggagacacatccatcatccacgtttctaggaataatggacatgagagaagtatgtataaagaaggaatcctgtgcttcgggaagccgaggtgggaggatcgcttgaggtcaggagttcgagaccagcctgggcaacctagtgagacgccccccccaccacctctcttaaaaaaaaaaaaaacacatatatatatattttttaatttgcacttttaatttataaaatttttaatttttaacattttaaatatatataaatttatatataatttttagagaaaaaatatataatatatatatacctaggaagaccccaacctctgaaaaaaatttatatatataaatttttaatttataaaattttaaatacatatttacttattcttttttttttttgagacggagtttcacacttgttgcccaggctggagtgcaatggtgcaatcttggctcaccacagcctccacctcccgggttcaagcgattctcctgcctcagcctcccgagtaactgggattacaggtatgcgccaccacacccggctaattttgtatttttagtagagacagggtttctccatgttggtcaggctggtctcgaactcccgacctcaggtgatctgccggcctcagcctcccaaagtgttgggattacaggcgtgaggcaccgcgcccggccaatacatatttacatgtataaatttttttaaattgaaaaaattacatatgtattttaagagagttggggcgggtctctctagataaatatatatctctctctctatatatatatatattttttctctctctctctctctctctgtctctctccttctttctttctttcgaaggcattccaggggaggcctgtgccctacggagacctctctgggtttcctgcaaagaaccgcttgagaaagaatagaagagagagccaagagcggagagaaactcatttaaattctcctgtcttcgcctttccatttgcagcctggggaacccggcgtgcagtaccgctcaccgcccagcctcgcccccgcgcccgcgaccaatgggaggcggccgggccgggagcgcggccaatggcagcggccggaggagacgcggccgtttaagaagcggtgggtgcgagagggggcagagcaccggacgacaacagcagcagcaacaacgcggcagccgccaccatggccctgcaggtacccggggcgcggggaggccacgcgggaggggcgctccgcgaggggagtgcttaagtggggctccgggtgggcttggcgcccctgggagcggtcggcggtgacccgggggacacgcccactccttccccagcgcccca

SEQ ID NO: 4646 - DNA, 2300 bp, Homo sapien
gagaaacatgaaaaagcgttatgtgtaaagaaaatcagaagacttaatctgtattagtttaatgtaaaagcatgcacatatgtgaaacaaagtagaagggaacactaaagaaaaaaatgggtgtgattgggtcatgggagaatgttttttactttttggttgtaatgtttgtgtgatacaagagggacagaaattactttcgaaatgtacttgttaattttagcaaaatcctcgtggaaattatactgctagttttaaaataaaacacaagcactaaaataataaaggttatgtttcatttttattaacttagttttgccacggttgagactggatttgccatagttcaatttatcaagcacttaactatgtgttccgcacataataatcatcttagcatagaggaacatgtcttctaatccgcacaagagatactatttttatcacgtcatagaggaggttaataaacttgcctaggtcataagatcttcagttgatgaagttaggatttcaacccagagccaagtaatgtaatggctgatgttttccacagagaaaatgtaagccgagatgatgctcaaactataaatctggaaccttagggggacaaaaacgtatggatgtctccttcccattactttagcattttaattagattcctgtgtctctatttgtctttggaaatgcaagctgcttgcagttcatcatagctaactcacacaattcattttatgaaacacaaacctgttctcacaaactcactgtcatctctttttaatctttctaattgtgataaaaatcatactgcactttaccctgtgtaacctccaatgatctttgaccaaaagccaaatcttttttttgttgtgtttacttatggacagttaggttctacataggtacttaaacatgaaaattgaaatcatagaggctgggcacagtagctcatgcctgtaatcccagcactttggaaggccgaggtgggcggatcacctgaggtcaggagttcgagaccagcctgactaacatggtgaaacaccgtctgtactaaaaatacaaaaattagctgggctggtggcccgtgcctgtaaccccagctactccggaggctgaggcaggagaatcacctgaacctgtgaggcgctggctggagtgagccaggttcgcgccattgcactccagcctgggcaacaagggcaaaactctgtctcaacaacaataataataataaataaaagaaagaaatcacagaaactataccagaaaataggatacaaaaccaacagtgaggagattgagaaaaggaggcagatacgtaaagaggaaaaggaagggggcccaagtaaggccggaaaaagcggggagaaggaggaggctcattaggtcagaagcaacctgccgtcttctaagttctggccaagggtagatcaacagatccagattcctgagctttaaaatgttattcggccgcttcatcacttgtccccgactttgcagcgactccgatggtagcctgagtctccattgcttggagcagccacagtggacactggacgggatattctgtgcagctgttgctgaactcaaggcaactcttactgcctttctcttttcgggctcaagattccctgcattattgcccataggcatgtgttttaccccatactccttctcccttttatcttgattttcgcggtgctggggagtctgcagggattccatggcgacgggctcactgggacaggggctggggttgtgcgtccctgaggcaaggcaaatacagaaaagcgaatagagacagagggctaagattccaaagcactgaaaggtagaaactgggttagaagagagaggggagcacaaacgcccggagagagcgagccctcgggataccattggctataggctggcctccgaacaactggacggtccaagtcctgagcgtctggttacccgggcaaccgcatggtctcgcgatacatacctcgcgcctgcgcactgcccctgtagcgggggtggggggacccggtccggagactccaccccggggcctaaactcgagtctaaaagattgggcctcgttgtgtcgtttccgggtcgcgcgacgctgtgggccgctttcccctctccggagtgacctaacacaggataacgaaacctgcactgctccgagcgcttcctccccggcccgtcgcgtctgcgaggcgaggccgggaggcgagggctctgcgcacgcgcggcgcaggcgcactgggcgccggtgctgttgccttcaggtgaccacggattcgccatcgtga

SEQ ID NO: 4647 - DNA, 2300 bp, Homo sapien
gctcaggcaatcccgtagcctcggcctccccaaaagtactgggattgagggcatgagctaccatgccccgcctaaactctaatgtgacataaaaggccctccacactccagctcaatctcccacttaggccctctttctccttaggccccaccaagcacaagtcctcaacaccgaacaacatactatttaatgaggccagcattttcccacctgcaagtctttatacacattagtccctctgcctggaataccactcccaccctcagccgcaggccccttcctttcttcaacaaatatttatcgattatccacgatgtgccaggccataaagattaagtattttttctcacagacctcatgagcttagagtccacgaggaaaaaatattagcaagtaattatacaataaagcctgatgcacatgaaggtcagggaacagtatgcttagggaacatccagcagaggcctagcttagttgaggggggtgggaaaaggcagtcctcacagaggaacttttttttttttttttttttttgagacggagtctcattctgtcgccaggctgaagtgcagtggcacaatctcggctcactgcatcctccgcctccagggttcaagcgattctcctgcctcagactcccgagtagctgggactacaggcacgggccatcacgcccggctaattcttgtatttttagtagagacggggtttcaccatgttggccaggatggtctcgatctcctgactttgtgatccgcccgcctcggcctcccaaagtgctgggactacaggcgtgagccaccgcgccgggccggacctcttaacctacatctaaacaatgcctaccaaaggaagtatggagtaaagaaaggtatctcagtattaaaagaaataagttggctggcgaggtggctcacgcctgtaatcccagcactttgggaagcccaggcgggcggatcacttgaggtcagtagatcgagactagcctgaccaacgtggtgacccgtctctactaaaaatacgaaaattagccgggcgtggtggcaggcgcctgtagtcccagctactcgggaggctgaggcaggagaatcgcttgaacccggcaggcggaggttgcagtgagccggaatcgcgccactgcactccagcctgggcgactgctatgtctcaaaaaaaaaaaaaaaaaaaaaaacacgttcaaataagttcaatgtggctggggcagagatgctagagaaagcggtgagaaactaggaaaggtgggtaaggaccagataatgaagacctttgcaagcgttccagtgtgaagcaactttaacatctaaagcagaggtgtcgtgattagaaagacgttatagatctttgtggatctgggcaaaggaagagtccccgagcagcaaagacgctcctggagtcgtccaggttagaaatgacggtggcctgcactagagacgccgcagaaaggactggagaaaaatacatgttagtcggaaaagaaggtagaatctcccgacacagtagtgaccagctggaagtaaagttgagaacggtattggtggtgactcccggtttctggatcccgccggtagccgaggggcgacggccgacccaaagctcacctccccactgcacgccgcccctggatcgagtaccttggtgctttactatttagcacacggaagtgttgttctgttgtccgtgtctccttggagaccgtggagaacagaagggccggcgggggttttcgctttgtactcctggtgcccagccggcgctgcaatccagcagaggagccggactagaaacgcggaagctctgggtgcacgcgcccggcccgggactgggcggcccaaccgggagggcggcgggtcctgcggccacgcaacaggcgttggggaagcagcagagaccctgcgtgcgcgcgggcttcggcctccagattccgcagagtcccgggcccgatccccccggggctggcctcctgccctacgtgggccccgcgcgcccacctggaactcacgatggcgaatccgtggtcacctgaaggcaacagcaccggcgcccagtgcgcctgcgccgcgcgtgcgcagagccctcgcctcccggcctcgcctcgcagacgcgacgggccggggaggaagcgctcggagcagtgcaggtttcgttatcctgtgttaggtcactccggagaggggaaagcggcccacagcgtcgcgcgacccggaaacgacacaacgaggcccaatcttttagactcgagtttaggccccggggtggagtctccggaccgggtcccccc

SEQ ID NO: 4648 - DNA, 2300 bp, Homo sapien
aaatgcatattcgagctattagtagaattgttaaactgagatatgtaatacagaaaacactagtcctttgttttaaattttaaatcttttttaaattggcagaaaggatttgatgtattcaatgcactggatttgatggaaaataagacattcttggaaaaactcaagtttggtataggagatggcaatttgcagtattacctgtacaattggaggtgtccaggtacagattctgaaaaggtaagtgaaatggatatagcccttgtaaactcaacaaatgtacctagacaatttcatacttgcttcacttagacttaagacagctttattttatttttgttcattttatttatttatttatttatttttttgagatgaagtctcgctctgtcccccaggctggagtgcaatggcatgatctcagctcactgcaacctccgcctcccaggttcaagtgattctcctgcctcagcctcccgagtagctgggattacatccaccaccatgcctggctaattttttcatttttagtagagatggggtttgaccatgttggccaggctggtctcaaactcctgacctcaggtgatccgcctgccttggcctcccaaagtgccgggattacaggtgtgagctgagccttaagacagcttttagaaagacagatctattgtactacattgcaatctaatttttcttactattccatttcttccctcccttcaggttggactagtactacaatagatggatatttttatttctagaactctgacatcatcatttgttaatatttaatgatttctggaactgccattccaaagaagaataaaagcacaactcaagtgaaattgaagtagtcgataatcagaaaagatgacaaaagtccacatgtgacatttgtacgtttctagctagaatgttaaacttcatcctttttttactgttgacctatttgtgggagggatgaaaggctacaaagagcacattcttgtaattttcaaatttttgcctgtctcttgaagaggtattttttcacccttagaaaagggactgtttttctatggactaagtagaagttacagagtcatgtaagaaaatctttgctattgtgtggagagaaattgctgcatttctgtttcttaagtgatggtacatttgtccatgtaacagaacaaaagatccatttggaaattttttttactggtatcaccttacatggtatcactgggaacatttatggaatcaacacttctgtagctcagtgacaggtggtggttgtttaagtgcagagcaatattaaaatgtactggtgactagtacatgtatttctccataagcagagttgccgaatcaataaacatgcaagtttgtactttgatctttaccaggtcagtggattgcttcaaaagcagagttttgtgcaagcactcactgtgctctctgaaagagcctgaggccgggcgtggtggctcacgcctgtaatcccagcactttgggaggccaaggtgggcagatcatgaggtcaggagatcgagaccattctggccaacatagtgaaaccccatctctactaaaaatacaaaaattagccgggcgtggtggcgtgtgcctgtagtcccagctgcttgggaggctgaggcaggagaatcgcttgaacctgagaggtgaggttgcagtgagccgagatcgagccactgcactccagcctgggtgacagagcgtgagactccgtctcaaaaaaaaaaaaaaagaaagagcctgtacccgcgactaactagacttttctgctgttgtgcaaagttcagtttcttctcagcaacatcaaggatatatgaagaaaaggaaataaaaaactgtaaagtcaaaagagatgcctggtggaacttattcgtgctatcagggcattgatagtttgaatgtttttattacttatgcaaaattgcacatactcctctatgctgattttatcatgaaaactgtcatgtgtcatgctaatggaaaatgtcttatttgtaaataagtattcataattttgttactgatggtgtttttaatctagaatttgaaaaactttcatggcttacagatgtgtgtttatattgccaataatctgcgggaaaaataagatgctaaccgaggccacgtagcctggcctcaactcagataccacaaagtagatgccttggctgggtgtggtggctcacgcctgtaatcccagcactttgggaggccaaggcgggcgaaacatttgaggtcaggggttcgagaccagcctggccaacatggtgaaaccccat

SEQ ID NO: 4649 - DNA, 2300 bp, Homo sapien
aaacacaggtactgaagctaatccatcagcttgcatctgcacctgggcccatttctggcaatagaactaccgtttcaaaaacatatttgtatttagctatctatcacaaacacgtttctatccctgcataaacagggctcaggttcagattcctatgcaatttcctttcctctctttaaaaaaaaaaatattctagactcgaacattcgatacttgcagccgccactgaagtattcacggcaaagataaaaacaacttgcaaatgggagatgcacatagtcagcttttctttttcttcatttgttaatattttataatgaattagaggtcagtcaaaagtccctttctataataaatcttaaagtagacaagtagaatgcaaatgatttacactttcaatgatcaatcatttcaagaatctctctacgaactgagtaaaccatctgtgactcaggcctccctatcatgttttttaagctgacccacttctccatcactcaccatggttcgaaaaatctcacttctaagggtgtagcaagaaccgctctgtgccagcgcatagtttgaatccaatagggtaaaagggtaatgtaaacagcactttaaaaggacaccagtttttatttaaaatgacccactgcctctaaaaagagagcatcaacaccggccttcacctgaagcaatccttttctccaacagaagagcaaatcaagtctgcagggttcgggggcaaagggaaaggattaagaaatccgatcaagtgtgaaaatgcgtggtgcatcgagttttggagatcaaataccagctttgcaaacaggatacggccaggtcagcgggagcccggttcaggggatcggccctgctctgaagagctctagggacaggcgaggcggtgcaaagcccagtatccccagcaggggccgggcccgggaccccctcggcgccagaactttgcgcagttcgccgcctgcggccccgacaccatcggggcacctccacgccgctccacccacgtctttgcccattcttttcgggtggcggctgcggagagggagtctgaagggacttaacaaggatggcagggagcagaggagggcgacctcctaccccaggctgcggccgccacaaagggaagggcgtagcgcctctcctcggcgcccaccggagccacccgcgggcgagggcaacaggcgcctcctgggccaggccgccggcggggatgggcgaggctggccgggggcgcgcggcaagtgacagtagcgtctccccgcccgggccccagcctccccgcccaccccgggcctcgcctccccgcgcactgcactctcccgcgagccgcgcgccccggacctcaccatgggctccgcgccacggagaagccatcgcggggcggagcggccgaagaacccccagtcctgggagccacccccgaacgggagaccgtggcgcgcgcggtccccgccctgtcgcgcccggtgcgccagcgcgccgcccctaccctttggcgtgctccgtctcctcctcattgtccccgtctatcccgcacgtgtcctggtcgtccagttccaggctctgctggctggccgcagactcgctgtcctccgccatcgcggcggcgctggctggggaggcggtgctcggggccgggccggagcggccgcagctccctctagtgcctcccgccgtactgcttggagtcggagcccgggcgctacgccccgccccgccccgcccgcgccccgtcccgccctccgtcccgccccctccccgccctccgtcccgccccgccctccatccccgcccctcaccgtccgcgcccagcccgccggccccgccctgcccgccggccccgccctgccccacgggcttgaaccccgcccacctcttcgtccctccccaccaagccccgcctctccccgtcccgccggcttcaatccagctctctaaccccgcccgcctctgagacccctcccctccagccccgcctttccccaccctgccggcttcaaacccgccctctaaccccgcccaccgccgcagcccctcccagatggccccgcccctccccgccccgccagctccaaccctgctcaccctggccagccctgcacagggccgagtcctgtacatccaggcctgcgcggtgcctctgcctggggctcggctctcaaagctgcaaacgtgcagacttgacatcctgagtggcggcatttttggaacacaggccatgcgattttacttctggacgaattagggagcgctcccagcccgtgcaggggtttttcccactcaggagtagg

SEQ ID NO: 4650 - DNA, 2300 bp, Homo sapien
ttaagccagggaaataagtaaaaatatttagaaacatagtgtttctatacgggacagtaggatttaggaagccccagggtcatctgtaaacttttccttccttccaaagattaatgctgtaaaacatttgtattatataatacttcaatccagtactgtaccgatgtacttcaatccagtactgtaccaacttgtttccattctggggaacagatgttccctgtttgtcattgttttctagtgtttcactggtttttgatgccctcattttatttttccaggattatttgttttcttattcttttttagagcagttcttagtcaaaacttcttgaaaattcagataaatatatgactgctgagtttcctttgccttaagttttaaaaactcttttagagaacccttctggcaggttagagtggatgatttgattgataggcttgctcctggccagtttcctgttggttacccgagcgggctgcgggttctccaacaatccatgttcacagagatgagctgcaggaacctcactcatctgtatttgcttctatcctaaagtttcacagaggtgacatgtgacattttgcctcagaaatagttgccgttgttaaaggcaatattgtatttccttttgtgttttgaccccatttgcccttcttacagaattttagttgtctcaatgccaaacagctgacgggctttgaaatcgctctgcagttttcatcttttgatacttctagctcattgcgttttaaaaacatagtctcccttggggaaaaaagccataaaatgctcctagtatcttctgcaaaaaaaggacccacaccaaaaaattcaggtggctctttaaagtctcattttcctcactgagcgggttctgatgattatctttgcaaaaccactgcggagacttccggtggcctagcagcacatttgaacaagatcatctcagcaaagcaaaggacaggactgctctgtacagaatgcagtagcaaataagagaggctgaacttcaccggtcttctatttggcagtactacagaatgcctcccttccctcttctgagagagacagcggacaatttcagcacagaaggccgtgcacgtttgcttggaaatctaggtcatgaccttgactttgggaaagccagggtagcctacctgaaactgtccaatcccccagcatcgtggacacgtccccaagtccctcaagatgtctgttctggtctgagccgtccgtagtagtgtccagggaaagcaggggtagctcaaaaatttctgtcaagagttttagtgctgcaagcctggttgggacagggcggtggagggctggaaatactgtttttgactttgaatttgattttataatgtattagatggatagatagatgcgaaatggaattgttaacatgtatgtggaggggcgggaagagtttctggaaagccccatccctgagtgcctactcctgagtgggaaaaacccctgcacgggctgggagcgctccctaattcgtccagaagtaaaatcgcatggcctgtgttccaaaaatgccgccactcaggatgtcaagtctgcacgtttgcagctttgagagccgagccccaggcagaggcaccgcgcaggcctggatgtacaggactcggccctgtgcagggctggccagggtgagcagggttggagctggcggggcggggaggggcggggccatctgggaggggctgcggcggtgggcggggttagagggcgggtttgaagccggcagggtggggaaaggcggggctggaggggaggggtctcagaggcgggcggggttagagagctggattgaagccggcgggacggggagaggcggggcttggtggggagggacgaagaggtgggcggggttcaagcccgtggggcagggcggggccggcgggcagggcggggccggcgggctgggcgcggacggtgaggggcggggatggagggcggggcgggacggagggcggggagggggcgggacggagggcgggacggggcgcgggcggggcggggcggggcgtagcgcccgggctccgactccaagcagtacggcgggaggcactagagggagctgcggccgctccggcccggccccgagcaccgcctccccagccagcgccgccgcgatggcggaggacagcgagtctgcggccagccagcagagcctggaactggacgaccaggacacgtgcgggatagacggggacaatgaggaggagacggagcacgccaaagggtaggggcggcgcgctggcgcaccgggcgcgacagggcg

SEQ ID NO: 4651 - DNA, 2300 bp, Homo sapien
gggacatttataatttaagtgcattcatttccagagagctggctgtttaagccgtgcaccactgtttctagctgggtgacctcaattacttaaccactaagcctcaacttcagtgcaaaacaaagaagaataaacattccttccttgaaagattttgaggattgaatgcaatgattgtttccaatacattgtttccaggtagagactccaggaacctcagtccccttctctccacccacctcaccttggggagagacccagtggcagattcacccctgtgcacgcccacccctactttcccagagtggccctgtgtgtctggactaaaccgttacaggtggggaaaactcaccactagggggcgggagcaagatgcctttgatggctgtcgtccttcagaccacgtaactgatttggaatactgtgacatattcacccttccaccctccgtggggagagagaggataaatgtgtaaagtctgtggccacggtgctgcattcagagaatcccactctagtgatcagcgttggcatcctgagaaaatgagaaccactgagccccagttaggacaactgttaaaatgtgataaaaatcttcagccgacccagttgcccttctgcaaacccacctgcttgttgtcctcggcacacggcatgctgtgactgctgctggctgcttaatacatcggggcccatccaggtgagtctcacctaaggaggagtcagcaaagcagtcttctccacccccatcttcctgccagatctctcaggatcagcgcttacagttaatgtgctacccgactttcccaggtaacatgcattaaatgaggctcttctagaaactgacgttttaaggaggtgattccattggcggcaaccttagagccgcaaaggactggggtcaatgacagcagagaggtcttccgggacttcctccctcgtccctcctcatctaggtctggccctggattttcctggaggagcaacttccttattcttttcaggggagctgaccaacgccttctccctggagtcttagccaggtctgcaaggatgcccctgccacttactggtgagatgtccactcccgcgcaaagggcgtctcactccttaggcccccaggctcccatctggctagctgtcccactgtcaaggacttgctcaactattttcccccttaaaagccaaacaggcaacaccaccacttgagaatgaaaatcatcaaaaccactgtgattagttctttgcctgcatggaattcacaaatactgattttgttgactgtaaacatagctggcttaatttatttctgccagttatgtcccaacacctccattaatgattttattttgatgaatagttttatacatctgggaggattctggtcattctaatgatatcttcttgaagctcttccaagatggatcaatactgaccataaaacatcagattcttgttaagtgcagacatccctctttacctgaaacacatcaaaatgttatttggtgttcttgaacaaaactacagacaaaggtggatttttatagattttaaccctagaggaaattcctaggtgtctaggtggtgggtctccaaatacaagtctgacaactgcgttgcagactgccaccaaggaaacaatgacaaagactttttttttttttttttttttttttttttttttttttgagacaggatctgctctcttacccaggttggagtgcagcagtaccatcctcccacctcagcctctcaagtagtggggactacaggcatgagccactataaccaggtaattaaaaaaatttttttcacagagatgggctgaagtgatcctgagctcaagtgatcctcctcctttggcctcccaaagtgctgggattacaggtgtgagtcaccatgcttggcctgacaaagtcttaataacaactttgaaacagataatgactcagaatgaattcaaatgaccacaaagacagttttccttttcttcagagtttattttgaattttcatttttggataaccaagcagctctttaagaagaatgcacagaagagtcattctggcacttttggatagtacataagattttcttttttttttttaaattttttttaatagtcacattcagctcgcttgctcaaaccagactcccacattgggtgagcaagatgagcccataggattccagagttaatacgtaaccgtatatacaaacagccaaaaaaccataatggtgccacagggatggagcagggaagggcatctctaacgtgtcctctagtctatcttcgctaa

SEQ ID NO: 4652 - DNA, 2300 bp, Homo sapien
aaaacccatatgggcttctgtacgtcctagtttttctcatgtctcacagtcatttgtcttttataagccaactgggcaagtgccatccttcattctttttttggtacggtgcctgccatgtctaaatgctcaattaatgaaattacagtaataaccctccttctggcctggtgttctggaagcagtgtggggtggatgatgggtctggagtggattttcctaggtccccagtggaagtcggaaggtcaccgcagtgctagttggaagagaaggtggagagggacaagtggaggtgaaggttgtgtggaaggcataccgacaggagtgggttgagagaaagaaaagttgaggttggaatggagggggtccctaggctcaaggaaagtctagaggtttggttttgttttgtgtgtggtttttttggtggttttattttttgatttttttttttttttttttttgagacggggtctcagtctgtcatccaggctggagtgcagtggcacgatcttggctcactgcaacctccccactcccaggttcaagcgatcctcccacctcagcctcctgagtagttgggaccacaggcatgggccactatgcctggttaatttttttgtatttttggtagagacagggtttcaccatgttggcccagctggtctcttaactcctgaactcaggccatccacctacctcagcctcccaaagtgttgggattataggcatgaaccatcacacccagccaagtctggaggtttttgtgaagagtttcaattttggggtcagactgactgttttattagaattttggctctgccactgaccaggtatgcacttttggacaaattccttaaccctctttagcctcttttctcatctgtgaatgggggggataatgctaactacctcttagatcatgtattgtgaagatggacaaagagtctctgcttgaccgaactacagtcaggctccggaaccttcttctaggctcagttgtgcccttccttgtaaaatctgctttcaggaagaaccctgctaagtcagtttaccaagaaccctccaccctggatatctgatcagcttccccatccgccctgtcctgcccagccctgccaggggatgtctgactttcaagaatcccccttccccctgatgtttcctcttataatttttcattccctgcatcccaccctggtcctcggttataaatccccacttgttcctgctgtattcagagttgaacccaacctttctccccgactgcagaatcccatggtagggcttatacctattgcgatggttccaaagagggtcttctttgctgtgctttcacacgtgtcatggaatagtcttttttctttaataggacagaaagttttaaagcacctagggcctcaaaagatgtggatttcctccccaccctaacccctagaaccatccaagtaccattcctcctgaagctgtccacccgccaacacgtaggtactgcaggcctactgcagtctatactggcttggggagtgtttttgcggatctttaacactgggtgtgaaatctacgttgggggacacaactacattaggatggcacctggtgggggggtcacacccagatacaatgtctcctgcggccccttgggtgacctggtgtgatgaaaagggctccgccctgaaaggcaggtctggctcttctgcggggctgcggggatggggcgcgccggggcagtgtcgccgggggtcgggctgggggcgcgacgcagcggcgccgggcgggggcgccctcggcgccgcagccgccaggtggcaccacgggcccggggcctgggcgcgggcagcggcggcggcggcgggcgaggcaggaaggggttaaggagctggcggagcagcagcagccgccgccgccgccgccgccgcggctcttcggggaaacccggcgcggggcgcgggagggagcggccggggcggcggggccgggccaatcgggcggcgggcccggcgcgcggagccagcgacatggaggggggcgcggcgcccggccgcccgtgacgcgccgccgcccggcccgctctcggcgagcccgagccgccgccggccccgcggcggagatgagcaggtccgcgacgctgctgctgtgcctgctgggctgccacgtctggaaggcggtgaccaagacgctgcgggagcccggcgccggagcccaaggtcagtgggcggcggcggggccgggggctttgtgtcgcgccgggcctggcgcggaggcggcggcggcggcggcggcggcgggagggtcccgggccg

SEQ ID NO: 4653 - DNA, 2300 bp, Homo sapien
attacaggcgtgagccactgtgcccagcctgtcccttttctttagcatttgtggccctcccctcccttctgttaaccagcttgaggtcctcgcctcccagtgcatctaggcaacacctactttgctttcccttccttccaacaactaccccccactccccacccctaaacttttggagccccagaaggtatgtcccgtctctgctctagaactggctccctttgcctcaataaatgttattgttattaagatcctcttcctgaagatccagtcaaccctatttcccaccacttcctaacccaccccttttattccaatcccatgcacaaccatttaatctctgtcttttctaagtattaataccttccctcaacttctccccccacagtgcccaaatgtaagccccgtattcaaaatcctacgtaaatgtacatctgccaccaaatcctcttacatgcttcagaaaaaacttagctcttctgtctctaaacttcatatctgtttaacctcggctccttccggtttcatgctgacctgttttgtttaatgttaacgaatgaccatatgttatgtaaagggatctatactcctttctcttctctgtcctcccctactcaagcctcacgtcctctccgacacaggagacatgggaagagattgacaacacccacggatcagaaccgaaatctgaactcctgtagactgtgaactacaccttctacccccgcagaaagtaaactgtaaattccaacattcttaactgcgccaaacttcatcacaattacacaggatggagatttactactaagtcatttaatatgcccaagatgcctttaagaaagatttaaataaaatctcaagggctgggcaaggcggcttaccctgaaatcccagcactgtgggaggcttaggtgggaggatcgcttgagtccaggagttcaagaccatgttgaacaacatggtgagacccccatctccttaaaaaaaaaaaaaaaaaaaaaaagaagaagaagaagaaggagaaagaaagagaaacaaagaaagaaaagaaattttaaaagtcaactcgaggtggcaggacggcttgaggccaggagatcgagaccagcctaggccacatgagcagactcagtgtcaacaaaaaaaaattagaaaattaaccaggtgtgatgtgtcatctgcagtaccagctaatcaggaggctgaggcaggaggatcgctcgagcccaggagtttgagatttcattgatctatgatagcaccattgcactccagcttgggcgagagagagaccctatctctaaaaagaaaaaaaaaataaataaaacaaagcaaaccaaccaaacaaacaaaaacaaaaaattcacacatgcacacacacaggcgcgcgcgcacacacacacacacacacagacacccaacaacaaaaacaaaaaaaaaccctcgaggctttcttgtatatgagttagctctgccaggaggtggggtggacttaggggaggagagggttgttgcatttcaactttaactctcatcacagacgtgcaaagccgtgaacgctgaggtcaggctgcagaggtgatgaagagataattgctttgcccctcctggtggtggggttggttttcacattctccatccaagctgcgcctttgacacaactggagcaagctctcgctccacctggggcattgcttctaaagcaataaatagcttgaggtgacagagacgaaactgattgtccttgagatgggactgcaatagaaatccgggcagcccgaagaggcacccagcgctccagccaccagctgggccgcccgggagtccctggctctagaccagccgcgaggaggcgccgcgagagagctggtccctgcccgcggccggaggagggctagagcccctgggccagccccccgagccggctgggcgggcgggcgggtgggagcagacgccgggcactgtcaccacgggtgcgccgagcgcaccgacccgggacacgggcagctggggaccgccagattccaccagccccccttgccccgcaggggtcctcggctcgcgctcctgggtagcagccacccaccggggcggagggagatgtcgcccggggccagccgcggtccccggggaagccaggcgccgctgatcgcgcccctctgctgcgccgcggccgcgctggggatgttgctgtggtcccccgcctgtcaggcgttcaacctggacgtggaaaagctcacagtgtacagcggccccaagggcagctacttcggctacgccgtggacttccacatacccga

SEQ ID NO: 4654 - DNA, 2300 bp, Homo sapien
aaactaagaaaaatcatagatcaaaaaatttctcgtttaaaaaaatacagtttgaaagtacaattttttgttttttcataacaaagtaatcaaacttataactactatctatattaatgtaaaggaaacaaatgtagtgttatatacactacaccattaatatttacatacattaatggagaaagtcaaatgtggaaacacttctgaacttagaagtctgccagttatgagctctatgtacatagacccttctgtgtctttcaggaagtggaagaattacgtaaattgtaatcagcatgcgaatattagatatttaactggagcagtcagtactacttccccgatctctcacttgctgagagataatgaattctttatttccagtaaaggcaagttttgttccttggaatcgtaattattgagatccagtgatgttcaaggccccatgctagaattatgaataggcagctctttgcttccataaatttatatcccaagagaaaagcaaataactctttgcaaatacaatgatgataggaattgtcataagcaagttacacataaggtactatgaagcctcagaaattataattattactttcaattgtaatgactggagaaagtttggcatgcacactctgacatgaaggataggtaagatttgatttgcaaaaacaaggcaagggatattctaaagggaataaagatcaaaaggaatgctatggctctactacaggcactttgggcaagtccctgtaattacagtaaagggtactgaagaaataaaattaaattaattaaaataaaattagaaataacgtataaataggaaaaaatagctagtaataaagcataaattaacaaaaccttatttgcaatctaaaagattttaaattaagggttaattttaattagccaaatgcaagggtattctacaatgaaactgcatgtttttgaaattagagaacataacgtattatactaaaatacaactggctagaatttatgggtaaaaaagtcagaactactgttgcatcaaattcccacaaaatggcttcttgaggtaaaaaaaatacccactgttgcataaatgccttccatgtgctaggaagtacaccaaatcctttgtatgtgttactttttccatttattccttacaatatatgaaatgtatgcaatctcccttttagaaagaaaaaagcctaggtagatagtaggtaacttgctagtaagtgcaaaaggtaggaatatgggccagtatgacccacagcttggcctcttaactattgcattactgcatcccaaagtaatatggtttccaaggagtacagaaaccttacagaaccaaaataaaagcatgtatttttttttaaatcagattttgccctttcgttttaaattcaaagctcgggcaatacaagccctctttttttaagcagcacaaacataagttttcacatgaactcaatttaactgctagttaatgagtaaaacctaaactttagtccaggtgttgcccacacactctgcagtgtcaaaaactggagatgaaaatgctgtaacatttacaaacaggttgctctgaatttgtttccctacaaataccttgtaattctgcgttgcagctggtggaagcatttctaatgcacattatgccacattctttgccatgtttttaggtaatagttggtctgactttgatttattgaagtacagaggcggacagcctccagcttatgagaagcgccctacaaaggcacggatgttaccgcactgtgactcaactattgccttatagttctagttttgcaaaattaatattgaaaaatacaagcaatgggcatatgttctaattcctagtgcctgggcctcagagcctccagcttagcccagagcagtgcgtagaggaagaaggtattcctggagtttagaaacacgccgacgccccttcccaatacaaaaactaccaccccaccaaagggtcccagacagttcagaaaggtcagaagctacttccaccgctttccgtgcctgtttccgcctccaatttcacttccggggaggggacttccgggccctcagccttaaggggcgggagttaaagaggagtcggaagtggcaccagcacttccggtacggaaaactcgctgctgccccaacctggcttgacaggcttggtctctgcaagtggctctcagccccttcttctttcctgcctcaccttccaattcgtttgccgccgccgtcccgcagctgctgtttccggagttgccccttccccatgttccggggcaggagtc

SEQ ID NO: 4655 - DNA, 2300 bp, Homo sapien
gcctgtaatcccagctactcaggaggctgaggcaggagaatcccttgaaaccaggaggtggaggctgcagtgaggtgagattgcaccactgcactccagcctgggcaacagagcaagactctgtctcaaaaacaaacaaacaaacaaaccaaaaaaattccccattctttactaagaaggcaagtgtagtgactgatatcaactaatctgggtccctagtcctatccttgaacaaggtgcttgcctaagtttgttttcttgtctgtaattggagggaaatagctcctgccacatgcaggttgctcaaaatcttaaacaaaataacatacacccattacaaaacctggtagagttggccccgataaacatcatctattaatattattattaaaactctactttcctttgaaatgacatctgtagcttctgcccatctgcatacctattctcttttttctcagaattcaggataaaattaattgactaggccttgtgctgtggcttatgcatgtagtcctaacactttgggaggctgaggtgggaggatcctttgagcttaggagtttgagaccaggctgggcatcatagcgagacctccatctctacaaaaattacaaatattagctgagtgtggtggtgcacacctgtagtcccagctgctcaggaggctgaggcaggaggatcccttgagcccaggagttcaaggctgcagtgagctatgactgcaccactgaaatccatcctgggcaacagagccatttcaaaataataataataataattgatgacagtgtaatatggttggggttcagaaaatgataccccaaaatgaaggccttagaagcagctctctctaacctcatgtcctcctgcctctggcccctcattctagaaactggaatccctcttccccaaggtgattcacagaagccagaacccctcatccccaaagccaagcataaaacctaaaagtttgactctgcgtgtcccctgcctttctgtgtcaaaactggcggtaaagaaattctctgccctgctttgtttgactgtaggtcataagacccccattccagaaaggatcctgctctatacccagaaggaaggaacactgcacagaaaagccaaaaagaatctaaacagacagggcttgctcacttagtctattggcattagctcagaccctttttatgccatcgtagtatctcttaggttggtgcagaagtaattgcggtttttgccattaaaaaccgcaattacttttgcaccagctgaatacatggcggtccatactttattgaacctaagcgaaaaaatggaccgtttcccctgcatctttgggttttcattctgaaggctcccggatcacataaagttacgatctagtatatttgtatgccttttctactgtgaaactgtcttttgtcagttgattttcagcaaactttcagaggacgaaggagaggtttgcccttggccccctacaatacctaaaggtatgactctttactgtggcagctgctccaagcatcatgttttgccaacagactcacacatactaagtttatttcagtcacagcaagtaccagggccagttcaagtgctctagcacggcactctaattctaaagagaaggaaacgcggcaccggggcaggaaacagtgacaagtgggaacacaaaaaccaaagttctccgtatgcagcatgaggatccagaacccactgtgacatcaaattgccagagcaccacctccgatttattcttggggaaaaccaaaagagctacggaatgctcccttgttccagactgttctatggagaactgggatctggggaaaatgcaacagtttctttccgtttggggatctagccccgaatttttttcattcagccaaactaccgacagtcagacagcgcctgcaggagggtgtggccaggcaaaaacgcggggaacggccccggaccagggtggggcgtggcaagggtttgaagggcgtgtcctacgaagaggtagggcttggcaaggacccacggggcgtgtcctaggactcggtgagggcgtgacctcgggccaggggcggggagagaaccagagggcgaagtgggagggcacaggggagactaaaaaggccagggaagttggcctgccggaagttcccagggagaaggcagcgcgttgtacccgaggtaaggcttcttggagtcagagcaggagccggaactgtgggcccagtaggaagagtggggcccgacggcggaggccgcgcggccagggttcgctgcagagctccacgcgagggtcc

SEQ ID NO: 4656 - DNA, 2300 bp, Homo sapien
atatccatattgtgtagaggggagtacagcagcaagctcattgaatggcattgatcctcctggaagctctctgtttcggtctcatcatctgcatgaacagagagtccatttcaactcttaatattttataagcattgatgagcattttatgagcatttgactccaatatatcttaagcgttagtcaatgggaaaactccacatagcttgaggttttgatgagaacttctctatacatctctaccttttaaaaactccttttgtgtcacctacagaactcttcatagcaatagagaggccttatgaaatttgataatctggtgcatcagagttttattaatatcctacccccccagtgctggcagcaaacctcaccattttgtcctccaaaaggaaggtgacttttaagaagcaatccagaaggtgtgttaggaaagtaagtattatggccaggagacaacttattatgtgtttgctccttaaaaatatgaaaataaggcagctcatgtgaacaaaaatattatggaactatgtgtataattatgcccaagcaataggcgcgcatttataaaaccactaccctaaaataaaagttaagggcttgagaagtgggaagccctattttccaataccaggagcagtgtggctctctcagtagccaggaggtggagacccccaccccgctgagccacacagcacagcttttagggttgattctcccagccaaggcctgaaggagctactgacatttctcttaaaagaatcattcagtctttgtttccttctgtctgctcgtttgaccttattttgttttgaaacagagaagaaagaaagaaagaaagaactaaattggtggggtggactggagtaggctggggggcggggagattgaggcacagggaggaaaggagaagtccatgctgtgacacccgcagacaagatcacaggctgctgatcgtcacccaggatgttactgtttgcttgctgtagtcttatttgttcctgcttttctcatttcagattctcaccctgatgtaataagtcaccgtcttcccagccatcatcctcgtattgacaagcaaatgtcacccacgtttgattgacatctgttgctcctgaatgcaaaagtatgatttaggattcaattctacttatttatttaaagccattcttgtgtgtcttatgtatttgttggtggggtaacttgcctgatatctaccctggaggccttccagtaatatgataaaccatgctgttccttctgcagctcacccactgagaatgggggctcttctttcttgtatttctcctacttctcccctccctcaatgtatattcgggaaatctgctatggagcttatagaactctttccatatgctaggaaaagaccttgcccagcacttgtgcaaaagcttcttgcttgatcttttgacgccattttgacaagtggttatttcttgtacatttagcgactttaagtaaacgcaacttcagggccattggcggtatcccccgaaagactgctagaactgtaagactgtaagcacagtacgtatgtatgcactcaccacggtgcagcatttgtaaaaaggaccaaccccctcctcccccagaggcggtggacatgttcatttaaaatcattcacaaatgttctttggcttttcaacatacctcactgttcttggggcaacatcttattcatttacaaggcagaggaggaaaaccatcaggttaaaagaaaatcacatctaccatctggaaaattctaaaaggccctccttctgttaacagtggcattttgaaaacacctgaagcactgattgtagaggagctagcaaagaaactgtcaactcagccaccctcctttcaaccttcacctccaccctccaactggggctgctggcagtggggaaatcggggatttaggtgtgacccttgagctctgaaagctgtcgcacagctgtctcccttccccaggtgggtccagcaggacctgccatcgcttggttcagcaagggagtattcagaatctcactgttcatccatgtgcagagagagaaaaaaagagaggccgaaaaaaaaaaaaaaatcccacattgtcagagtaatgccaaactctctctgagtgggatgagcagagcagatgctgcaatgagatgccaaagcggctccccttcctctgtgccttgggtgcctataaattgctccggcgcgcgtttgtcagcctcctcttctcctggcaggtggtacccaggcagaattctgccttcagtctctctctcgctccgctcccggccgt

SEQ ID NO: 4657 - DNA, 2300 bp, Homo sapien
tcaaaagaacaaccaagaatcaatcaccagagaggggaagaatctttcttttctagggaaaagactagataaatacacgtaagaatggacccttgaagaaacataattgagtgaacagaagagaggtttaaaaactattatcctcggtgatacctgagaagagagtacattcatgaaacaaatgcagggtgttattataggccggcagtccaataggactggtgtccttagaagaagagacaccaagggtgtgactgcatagagaaaatgccctggagggacaccaagagaagacagtcgtccacgaggcaggggagaggccacaggataaatcaaatctgctggcaccttgatctagaacttccaggattgtgagaaatttctgttgtttaagccatccaggctgtggtatattgttacgacagccctagccgactaacacaggtactgtatgtcttcagcctacctaggcaagattcactattagaaattgatagaataagaaaaattctgattgcttcaaaacaggacttttgctttaaaagagttaatgattcaagaaataaatgtattaggagattacctactaatacgtattgatgaaattatgaagttagaaaatcatcagtggatgctaaaacttgtgggtaaaaattagatgaggaatggggtgtaatcaagtagcacctccccccagcattatttttaatcataaagaaaaaaatagtaactttatggtgaagaaacctggcagacactaccttatttaagtgaacatcacctatactgggagaaaccgatgccatctgtaccttgatatcatgcactggaaaagacacatcgctttagtggtgtttctccaaaaattcataacctgaaagggaacatcaaacttactttgaaggatattccacacaatacctggtctgtattcttaaataatgtctagttcaataaacataaaagccaaggacggttccagatcaaagaagactaatggaggaataactctttcatctggaatgttttttaagcaagaaatacctgctttcgaatttaagagtgcagatcctttttttatccaattggttcggagatataattacattattttaccacatctccttaaggctttgatccctgctacaatctacaatatataaatgcatatgtgtggcatccgtcttatcatcaatttaggtgaccagtagaagaaaagtgcctggtgccaatttttattccatagtataaaatagtctctcaggacagggtttttggtgagagaagcacaggatgttgctgggtgactgagactgggtcaggaaatagggaggcagagggcaacagtttctctagaatttaaaatttggttgcttttggaagagaaagcaagagattcctggaagccagaacgtcatgtttcacaaatgtaaaagtcctagttgggaaagacacatcgctttagtggtgttttcaaatgacttttaaaatagtagggttttacttgtaggttctagctacaagtaaaaaggctaaaagccagccttagaaacctgtcaaaaaagatttccagcagggcgctggggaaacgcagaccgcgccggaatccccgcctggagaagctcttaatagggcgggaaactgcgtgccccacaaggtccctcagaggcacattgtggagacgggctcagggtagcaacttctggcgagtggagcggctattacacaagcgaaacattcggaagcaatttacttccagctttcgcaacacccaccctgagccaccaccctcccttacacagtcacgccacaaacttccccacttccgcccacagccctctgggcttcgacccatcaactgagcttgcgccaagtctactgcgcacgcgccaacttcggcccaatcagcgtcccaaaccgtggggtggacgccaccgggataaactatcctcagcgtggggcggggtctcgaagccgaataacgaacgtgattagccagcctcttccacagacttttaagggcggagcctggccctggagacacgtctggagagctgttctcctaatatgggtagggtcgggcgtggagctggcagcggcgctgtgtgcgcctgcgcggggcgccgagacagggcgtgttcgctgttcagtgccggtgttgcagggagtgagggcagctggagtgcgttctgccgaagcttgtggttgcacgcccatcgtcttaggggctaccttccgtggtgagtgtgtgcggtgttgcacttggggttgcttctcgctgcgtggccgcagcggggctg

SEQ ID NO: 4658 - DNA, 2300 bp, Homo sapien
ccattgttcatgtttactgccaaggtccaagtacaaaatcttagcaccccctaatgttgaaagcagtcttttcaccgtgagcagaaaatggaatgagaaaaatagactgaaggccaatcccagcgaagtttaactttggaactagccatgacctatatttgtgtagaatacaagctttatagacattaatttcagcaccagtttaatccctgttcctactagggctattttgagcttatttcaccatttctttcaaaattgtcaataaattgttcatccctttatgctcttcttaaatcatttctgagctgtctgcttaggccatggagtagacaaaactaaatcttatgttctgaggattgtttttttgtattcttttatggtagaccgtttaatcatcttgagattattctttatctctcctttgtatttttattctgaattataaaatttttatctgaaagaaggcctttttcttctataaagattttttcctttagcttctcatgttttggaaaagaaaaagttaaatatagagtgtggctgaatataaactggactgcagtgttaaatgcctctcagcctctttctatcacactgtgtaaataaaagatttgttggcagcaattttcttggtttgttgggtaaattcttcataaattcagttttcagtctgacagtgttcatgaaagcggaacataaaagtaaaacatatgcacattttccaccagctttattatgcaaagtacttgattttgtataaaactggatttttcaaggccaggaaaatcttcaataaatcacatcagcaatcccaaaaacgtctgtagaaccctatgtgttttcccacttctttcagcaactccgtgaataagaaggagacacctgaaggctctgctatggaagcaaagagcgagggaggcaaagatagagtgaggaagggaaagatagactgagggaggcaaagatagagtgagggagggaaagatagagggagggagggagggaaagatagagggagggatggaaagatagagtgagggagggaaagatggagggagggaaagatagagtgagggaggcaaagatagagggagggagggaaagatagagggagggagggaaagatggagggagggatggaaagatggagggagggaaagatagagtgaggaagggaaagatggagggagggagggaaagatagagggagggatggaaagatggagggagggaaagatagagtgaggaagggaaagatagagggagggagggagggaaagatagagggagggagggaaagatagagtgagggagggaaagatggagggagggaaagatggagggagggagggaaagatagagggagggagggaaagatgatggagggagggaaagatggagggagggaaagatagagggagggagggaaagatagagtgagggaggcaaagatagagggagggagggaaagatagagggagggagggaaagattgagggagggaaagatggagggagggaaagatagagggagggagggaaagatagagtcagggagggaaagatggagggagggaaagatagagggagagagggaaagagagtgagggagggaaagacagagtgagggagggaaatatagagggagggagggaaagatggagggagagagggaaagagagtgagggagggaaagacagagtgagggagggaaagatagagggagggagggaaagatggagggaaggaaagatagagggagggagggaaagatagagtgagggagggaaagatagagggagggaaggagggagagatggggcgggtggggggaaggaagaaagaaaagaaaagagggagggaggaaaggagggagcccaggagggaatgatctgatcatgttctcagagtgtgacagaaaatggaaactatgttctttttaaaaaccctccatgtacaatgtaaggtcggttctgtttggtctgcatagtgatgtctttgttttaatgcagggcctcagcaaggatgtggtggttatctgacaggctcgaataatacctttgcctctcctgattctgattcgaatggaatgtatgacaagaatttaaactgtgtatggatcataattgcacctgtaaacaaagtaattcacctcaccttcaatacatttgctctggaggcagcaagtactaggcaaagatgcctttatgattatgtaaaggtaaggctgttttatttttttaacagagtctattcatcccagactctaatatagtgtattccagtttatatcgttac

SEQ ID NO: 4659 - DNA, 2300 bp, Homo sapien
tgaattcatcacttccccatctgccctaccagtgacgatttctgtgaactcttttatgtgagtcagctcctgttctctaatccccaacatctttcttttctcatagctattttgggtggtttctctggaaaaaaatgttgattccctttgcctctgacaaagagttagagtaacaatttgagcacattccacatgccaggcctcatagcaaaccttttacgtggtttatctcatttgctgttggcaacaatattatgagataagtaccattatggtgccagatttatagataaagacattttagcttgaagaagttcaataattttcacaaaattgtgttctctaaattttagagctgggctatgaacacagagcctggctctggccacattgacattagtcaagtacattctacaataaaattgctttcctgcttgtgattgaaatataatcttctattagtgacactcacttcaaaatgccactctataaactgattgagtatagttctcaaaaattgaacgatcatcttttcattgagtagaatttttattctatagaaagaataggggattctctactacacccaaaatttctcctcacagcagatgaattatttcaattacatattaagctctaaagaatagaggttttatggaatttgcaaagatttataattggaaatggaccaaattattctccagaagtttctccatgttttaatgatatcatcctaaagaaactcttgagttgctttttctacatgaactatatttaattaattcttaaaattgatctcctataaaaaagaattttcttccagaagaccttccaggaaataaaagaaacaacatttacaaacagtatgaattagatgtcaatctaaaacagaaagggctgagttttaattgtcactcactgtgattctaaaatgagtttggggctgggcatggtggctcgcacttgtaatctcagctctttgggaagccgaggtgggcagattgcttgagcccaggagttcgagaccagcctgggcaacatggcgaaactctgtctctacaaaaaatacaaaaaaagtagctgggcatggtactgcatgcctgtagtttcagccatcaggaggcttaggcaggaggattgcttgagcctgggagggtgaggctacagttaaccttattgcaccactgcactccagcctgtgcaacagagcaagatcctgtctcaaacaaacaaaaaaatagttaagaaaaaaagttaatctctacatcccaagctcatatatataagataattacttgtaattttaatttattacagttttaaatttttagccatgaaacaatttagcaagcaaggcacttgaaagacatatttttgttcttggagatcctgcagttcataaagttgatttctactgaggggacaggtggggtgtctgggtctctgctcacttagaacttgactttcagtgactcctaagtaccctcaatcttacaaaaaaattggatctctatcagtgattgaccacacgtggtgtctttagtgttatatcctcccctttgttatgggtccttcctatttagaagtccacggatcacttcctattgcaactggagtctgaattcactaatggtattgtaaagtatgtgccaaattatcaaacccgcacaaaggaagtagaaactggtaagtatggctaaggcaagagatttccttcctctctgagtgtgtcaagaggagttgagatatttgggggtagggtgggggtggggggacctaagccacgaaaatcctaaatgaataatctctttaagagaataacaaaagatttcacagaggaaggttttgtaatatacacatctccgcatctgaagatatatttaatggccaatttgaaaatgtaagcattattttagtaatttagaaaaatacccctaaacacagttatagaaattagatctgcatattcaaggtgagaatcgcaatctttcttagtttttactagtttcctttctgtaactcaattagaacttcaagtattgttcactctgagtagatcttcaggctctctaaaagcagggccactccagcttgcttgtcagtagttgcaatgagtcacagctggaacgtcctgtggttaacattctgctctgaaaacagaatcagaatcagtgagacggctttccatggtaacctgtatttgtatactttgaaaaatgactgttcctttttgtgtggttttgggtggtcaatttgcgcgggaatgaattgtagaggtgacgttacccatctgtgtgaat

SEQ ID NO: 4660 - DNA, 2300 bp, Homo sapien
atgacttgccacaggttggcagaaaaatatttgcaaaatacgtatttgaaaattcttgtatctagaatatatgagctcttacaatcaataaaagacaaacaacaaaattttaaaaaataggcaaaatatctaaacagacagttcaccgaagaagataaacaaatggcaaatatacataaaaagatgcccaacatctttggtcattagggaaatataaattaaaattgtaatgagatacctatgttgacacaaagacctgttcacaaatgttcataacagctttatttataatagtcccaaactggaaataactcaagtgtttatcaactgatgagtagagaagcaaactgtgggatagccatatgatgaaatactactcaataataaaagggaaccaattaatgatatacactacagcacagatgaattacaaaagcattatgttgagtgaaagaagcagatacaagagacatatagaagaaattgggaaggtttaaaaaaaatttttaaaagcagtgactatttgagtatcacaagtaaagtttttttttgttttgttttgtttttgagacggcatctcgctctgtcccccaggctggagtgcagtggcatgatctcagctcactgcaagctccgcctcccgggttcacgccattctcctgcctcagcctcccgagtagctgggactacaggcgcccgccactaagcccggctaattttttgtatttgtagtagagacggggtttcaccacgttagccaggatgttctcgatctcctgacctcgtgatccgcccgcctcggcctcccaaagtgctgggattacaggcgtgagccaccgcgcccggcataagtaaagaattataagctatggtacataatgatcctctcctcaaagagcctacataagtaagacacaaaataagtaaaacacaaacaggcttgtcctgaaagagcctgcatgggtattaaccaatgcaatggtaattacctagagatttttcttagaagtgaaatttttacagctctccctcaaattcagttttgtctgtgtgctcatggaaagtctgagtgcatcaatagttgattttacaatcgaaatgtagaatattttcatcactctcagtggtttctgtagtcccagcacagagtgagtggggacatcagtgctccatgtcctcaaaccatatatccagctggaagggtgtatagcgcagtgtggaaagtgggaatggattccacagccgtccataggtcccacagggatgataaaaagtaaaaagtacaaattctttgtacattctggatattaacccattttcatatatatatgatttgcaaatattttcttccattctgggagttgctttttcactctgttgatgtattttttgatgcacaaacgtttttaattttgatgtattccaatttatatcttttggttgtctgtgtgtttttctttttttgcccatgcttttggtatcatactcaagaaatcattgccaaatccaaaatccaaggtcatgaatttttgtcctattcttctgagttttatgttatagtttcagattttttgaaccattgtgagttaattttatagttttagctcttagatttagatctttgaacttttttgagttaatttttgcatatggtatgaggtaagcctccaacttcttttgcatgtggatatctagttttcctagcgctgggtaaaggtggaactcctctgcaagggaggtgaggaaggaggggaacagagaaaggtgtagataatgaccagtttacttttgttgaaacctagttacttcttaagcaaagattgtttaagtggatgttttcaaagctgcttgttactgtttcaaaggtcaaatagataatgattaagttgcgcatcacttaaggtagattttgacctctcacaagttgaagagtactgaagatctaagatcatttacatccctctggaagaaaaaataacatagccttctagggcaaagaagaaaaaactcaacagttacaggatattccatggttcaaagtacacctgcctggtttgctgttctccaaaatcccatgctcagttggttggagtggcctcactcttacctgccaacctgggaggttgatgatgaacatgtctttaccttttctttggagtttgcttaccttattaatatttgctgaagtaaatggcgaagctggagaacttgagctgcagagacaaaaaagaagcatcaatctccaacagtaagtaaacacatgggtcattcctgctcagggactaggctaattcctcacc

SEQ ID NO: 4661 - DNA, 2300 bp, Homo sapien
ttttttctaatttgaattcagccatgaattcatttcttggaactaaaacaccctcaacaatccatctctttctgttcccttctgctttatcttacagatgaggaaaccagggtcatctcaaagtcacacaatcagttaactggcaacgccagggctaaagctgagttatctggtatctttctaccatacacctcttcttatctgaaagtgactaacaaaaagcaaagcacgtggccaatgcacatgtacaatttaaaaagttaatttcatagaccacatcaaaaggaaccagtgaatgttataatttggatgcagtggttatacttttatttgttaacagcattacattagcaggcatgcaacatttctaacaaatcagttattgttattacaagtggtacccccaagttccccctaacaaaaacctgtggcagtgttgggaacaaagagaaaaacacttcacaacgggaacattttctatcctccatatgggtacattatttttatttataattgactgtaaacaccgctccccccacaaaatttctaagctccccccaactgactgattgaacacctccaccaagcggattccaaagaaacttgaaaaactagttcaggccatgctgggaaagggaagtcagacatgcctcattatactttcctctctttggagttcaggcacaactgaccagtattattattaaaacaagagatcttcataccgacataacagactcttcttagcaataagataccaaaattccaacatgactctagtatagcatcacatgaaagatagcaggccctaaatcaaagcattttaccctaaaataaatttctttgacactttttgaaatggccctacacagccatctcttgtggggaaaatctacattctatagagactccctttccctttccaggtcttttcctgatccaagagatatttaactaagagtctggcatctttttacacatgataagagacatttgccaattattctctctgaagcctgttacgtatgagacttcgtctacataataagaaccttggtctccaccttatcttaacccagacacattcctttctattgattccaggtctttaggtcacaacttaactctttcaaccaactgccaatcagaaaatctttgaatccacctgtaacctggaatccttcccctttttgagttgtcccatctttatggaccaaactaagtacaccttccatataccagttaatgtccttatgtctccctaaaaccatataatcccaagctgtagcccaaccaccttgggtacatgttgtcaggaccctgtggggttgtgtcatgggtcacggtcctcaccttgtgctcagaataaacctcttcaaacattttacggagtttggcttttttcgtcaacatgagcctctaacagttggttactggatcatcctgaggaatcaaggccatagcacttaaagacccataaataatcctacatgatattcactgtgtattctatgtaggtgtaatttccaagctaaaacataattaaccccactaatagacacaacaaacatcctctgtattatcagcacgcacacagggctttctctgctgcgagtggacttgtgtccttacttataattctggaatcttctctaggggagaggctggtctaatttctctctattgacccagggcaggcaggaaacaaggcacactgtggaaagaatgtttgaatgttcaggcttctaagtgacagaaaagcagcttgtctgaaaaatgatttttttctggcttctaaccagtgttaattcacttggaaaccaaggcagttttctcccctttactgaactctggatttcttttccaatcaaggcccctgacaccaaagaaggaaatggagcgtaaatcaggctacagagtggctgccattcattcgggaagccttattgttttccgtcctttgttcccctctagacccttgccaatccccaggccgcgaggccctctgaagccctgagcctggagcggtaggagacgggggaactgaaacgccgcggaaccagaggctgagggagcggcgcgatggagggaggaggagcgacggaccggcaggcctagctccggggctgcggcggctgaggcgcggggatggagcccctgcgggtgctggagctatacagcggcgtgggcggcatgcaccacgcgctgagaggtgagagtccatctagcacccctctctctattcgctcacgggggctggttggagcacccgcgccgggaaggggcggagcggcgagacg

SEQ ID NO: 4662 - DNA, 2300 bp, Homo sapien
tctgcaactttcacttctcttgcagcccaccaaaaacaatggcattttctaataggaaaaacacattgaacgctgtatatgtgcgtatgtatatgtgtgtgtagtacatacatatactttattttgagacaggttctcactctgttgcacagggtggagtgcagtggtgtgcacagcctactgcagcctcaatttcccaggctcaagcaatccccctgccttagtctcccaagtagctgggaccacaggtgtgcaccatcacgcctggctttttttggtttcatatatatatgttgcctaagctggtctcaaactcctgatctcaagcaatcctcctgctttggcctcccaaagtgctgggactacagaacacctacacttttatacattctatatgcatcaaacaaacatatgtctgtgacaagagagcagcctatcacagcccagagacttcagaatggggacaggttggaaggaggagctacctatccctgagatgatgaagaggaccagtgcccattccaggagacatcaccgcagccctgaggaatcggctatgggcaccagcagggcacagtgccacacctcgccaatgccttgtcctccttttccatagtgagtcagtcagcaagcgtcgcattgccctgggatcggcactgcacgtagaagtgagttccacactctcttcctcccatagggagatcacttttctcattctaagggttccaggcacactcacaatggtggcatttgctgagcagtggcttgaataaagggctctcagaaagcaagatgtaactcagagcataggcttgtcctccagggcacccagccccaggaatgctcttggggaatgacctgcagcctcccagtgaaagagagaataaaagaaagccccagcaggcgagctgggcagtagagagtcctgtaattccaccttggcaagcaccatttgcaagaacgaactgggataaggtaaacaaaatattgcctaaaagaggcttgtccaaagaagtcagaatacgctcttcatttacctctaaattatgtttcttaaataccaagtaacctgcagtaccccctgccgccaccaaaaaaaaagagagaaatacttttttttctcctatccactgcagaatcaattttacagtggttctgcagttaatcctttcagtacaccataaatctaaatactcaaaaaaacctgtgccttttcaattgctactaaatcacgagaagactgatttacatagtctccttttatctcccttggcgggtaagtactcagctctgctcgttactaatattgaaacaacagcccttgaattgagtgatttccctagaaaggttaaggtgaccgaatctgaacactccctccatgtcttggacacgaagttttttgctgcgtagacagttttatccccctcaccccaaggtcaattgcacgaattcttttggaaaacaggacctatggcatttcccagacaaatcaccgtgaaccctgtactgtgcattgctgtcctaaaattaacacataaatctattgccgccaaagattctgtcatttgtgttacataattgcctttcatttgaactcattaatcaaattggggtttttaagcaacacctaattaattctttaactggctcatattatacctttaatgacttccaccagggtaaaaaccactgatcactgagttctattttgaaactacggacgtcgagtttcctctttcacccagaattttcagatcttgtttaaaaagttgggtgtggtttcatggggggagggggaagagcgagaggagaccagagggacgggggcggggactctgcaagaaaaaccttcccggtgcaatcgtgatctgggaggcccacgtatggcgcctctccaaaggctgcagaagtttcttgctaacaaaaagtccgcacattcgagcaaagacaggctttagcgagttattaaaaacttaggggcgctcttgtcccccacagggcccgaccgcacacagcaaggcgatggcccagctgtaagttggtagcactgagaactagcagcgcgcgcggagcccgctgagacttgaatcaatctggtctaacggtttcccctaaaccgctaggagccctcaatcggcgggacagcagggcgcggtgagtcaccgccggtgactaagcgaccccacccctctccctcgggctttcctctgccaccgccgtctcgcaactcccgccgtccgaagctggactgagcccgttaggtccctcgacagaacctcccctccccccaacatctctcc

SEQ ID NO: 4663 - DNA, 2300 bp, Homo sapien
taggcttgtcctccagggcacccagccccaggaatgctcttggggaatgacctgcagcctcccagtgaaagagagaataaaagaaagccccagcaggcgagctgggcagtagagagtcctgtaattccaccttggcaagcaccatttgcaagaacgaactgggataaggtaaacaaaatattgcctaaaagaggcttgtccaaagaagtcagaatacgctcttcatttacctctaaattatgtttcttaaataccaagtaacctgcagtaccccctgccgccaccaaaaaaaaagagagaaatacttttttttctcctatccactgcagaatcaattttacagtggttctgcagttaatcctttcagtacaccataaatctaaatactcaaaaaaacctgtgccttttcaattgctactaaatcacgagaagactgatttacatagtctccttttatctcccttggcgggtaagtactcagctctgctcgttactaatattgaaacaacagcccttgaattgagtgatttccctagaaaggttaaggtgaccgaatctgaacactccctccatgtcttggacacgaagttttttgctgcgtagacagttttatccccctcaccccaaggtcaattgcacgaattcttttggaaaacaggacctatggcatttcccagacaaatcaccgtgaaccctgtactgtgcattgctgtcctaaaattaacacataaatctattgccgccaaagattctgtcatttgtgttacataattgcctttcatttgaactcattaatcaaattggggtttttaagcaacacctaattaattctttaactggctcatattatacctttaatgacttccaccagggtaaaaaccactgatcactgagttctattttgaaactacggacgtcgagtttcctctttcacccagaattttcagatcttgtttaaaaagttgggtgtggtttcatggggggagggggaagagcgagaggagaccagagggacgggggcggggactctgcaagaaaaaccttcccggtgcaatcgtgatctgggaggcccacgtatggcgcctctccaaaggctgcagaagtttcttgctaacaaaaagtccgcacattcgagcaaagacaggctttagcgagttattaaaaacttaggggcgctcttgtcccccacagggcccgaccgcacacagcaaggcgatggcccagctgtaagttggtagcactgagaactagcagcgcgcgcggagcccgctgagacttgaatcaatctggtctaacggtttcccctaaaccgctaggagccctcaatcggcgggacagcagggcgcggtgagtcaccgccggtgactaagcgaccccacccctctccctcgggctttcctctgccaccgccgtctcgcaactcccgccgtccgaagctggactgagcccgttaggtccctcgacagaacctcccctccccccaacatctctccgccaaggcaagtcgatggacagaggcgcgggccggagcagcccccctttccaagcgggcggcgcgcgaggctgcggcgaggcctgagccctgcgttcctgcgctgtgcgcgcccccaccccgcgttccaatctcaggcgctctttgtttctttctccgcgacttcagatctgagggattccttactctttcctcttcccgctcctttgcccgcgggtctccccgcctgaccgcagccccgagaccgccgcgcacctcctcccacgcccctttggcgtggtgccaccggacccctctggttcagtcccaggcggacccccccctcaccgcgcgaccccgcctttttcagcaccccagggtgagcccagctcagactatcatccggaaagcccccaaaagtcccagcccagcgctgaagtaacgggaccatgcccagtcccaggccccggagcaggaaggctcgagggcgcccccaccccacccgcccaccctccccgcttctcgctaggtccctattggctggcgcgctccgcggctgggatggcagtgggaggggaccctctttcctaacggggttataaaaacagcgccctcggcggggtccagtcctctgccactctcgctccgaggtccccgcgccagagacgcagccgcgctcccaccacccacacccaccgcgccctcgttcgcctcttctccgggagccagtccgcgccaccgccgccgcccaggccatcgccaccctccgcagccatgtccaccaggtccgtgtcctcgtcctcctaccgcaggatgttcggcggcccgg

SEQ ID NO: 4664 - DNA, 2300 bp, Homo sapien
cataaatctattgccgccaaagattctgtcatttgtgttacataattgcctttcatttgaactcattaatcaaattggggtttttaagcaacacctaattaattctttaactggctcatattatacctttaatgacttccaccagggtaaaaaccactgatcactgagttctattttgaaactacggacgtcgagtttcctctttcacccagaattttcagatcttgtttaaaaagttgggtgtggtttcatggggggagggggaagagcgagaggagaccagagggacgggggcggggactctgcaagaaaaaccttcccggtgcaatcgtgatctgggaggcccacgtatggcgcctctccaaaggctgcagaagtttcttgctaacaaaaagtccgcacattcgagcaaagacaggctttagcgagttattaaaaacttaggggcgctcttgtcccccacagggcccgaccgcacacagcaaggcgatggcccagctgtaagttggtagcactgagaactagcagcgcgcgcggagcccgctgagacttgaatcaatctggtctaacggtttcccctaaaccgctaggagccctcaatcggcgggacagcagggcgcggtgagtcaccgccggtgactaagcgaccccacccctctccctcgggctttcctctgccaccgccgtctcgcaactcccgccgtccgaagctggactgagcccgttaggtccctcgacagaacctcccctccccccaacatctctccgccaaggcaagtcgatggacagaggcgcgggccggagcagcccccctttccaagcgggcggcgcgcgaggctgcggcgaggcctgagccctgcgttcctgcgctgtgcgcgcccccaccccgcgttccaatctcaggcgctctttgtttctttctccgcgacttcagatctgagggattccttactctttcctcttcccgctcctttgcccgcgggtctccccgcctgaccgcagccccgagaccgccgcgcacctcctcccacgcccctttggcgtggtgccaccggacccctctggttcagtcccaggcggacccccccctcaccgcgcgaccccgcctttttcagcaccccagggtgagcccagctcagactatcatccggaaagcccccaaaagtcccagcccagcgctgaagtaacgggaccatgcccagtcccaggccccggagcaggaaggctcgagggcgcccccaccccacccgcccaccctccccgcttctcgctaggtccctattggctggcgcgctccgcggctgggatggcagtgggaggggaccctctttcctaacggggttataaaaacagcgccctcggcggggtccagtcctctgccactctcgctccgaggtccccgcgccagagacgcagccgcgctcccaccacccacacccaccgcgccctcgttcgcctcttctccgggagccagtccgcgccaccgccgccgcccaggccatcgccaccctccgcagccatgtccaccaggtccgtgtcctcgtcctcctaccgcaggatgttcggcggcccgggcaccgcgagccggccgagctccagccggagctacgtgactacgtccacccgcacctacagcctgggcagcgcgctgcgccccagcaccagccgcagcctctacgcctcgtccccgggcggcgtgtatgccacgcgctcctctgccgtgcgcctgcggagcagcgtgcccggggtgcggctcctgcaggactcggtggacttctcgctggccgacgccatcaacaccgagttcaagaacacccgcaccaacgagaaggtggagctgcaggagctgaatgaccgcttcgccaactacatcgacaaggtgcgcttcctggagcagcagaataagatcctgctggccgagctcgagcagctcaagggccaaggcaagtcgcgcctgggggacctctacgaggaggagatgcgggagctgcgccggcaggtggaccagctaaccaacgacaaagcccgcgtcgaggtggagcgcgacaacctggccgaggacatcatgcgcctccgggagaagtaaggctgcgcccatgcaagtagctgggcctcgggagggggctggagggagaggggaacgcccccccggcccccgcgagagctgccacgcccttggggatgtggccggggggaggcctgccagggagacagcggagagcggggctgtggctgtggtggcgcagccccgcccagaacccagaccttgcagttcgcatttcctcctctgtccccacaca

SEQ ID NO: 4665 - DNA, 2300 bp, Homo sapien
gatcttttgtattgatgttgttttatgttaactcactacactgcagaaaacatgacaggtatgataatcaaaaatgctcaaggactaaaatgaaccacacacattgctgtggttaaattaatttggtaaatgtatttcagtttcaaaatgttatactacactattcatctgagagtgctttgcagttaatcccagtaaatattccagggaatacaactataaactataatggggatcttctggcttttggattccaattttaagttaaaaattctgtaagtccatctaattttggtgaaaaaaaaaaaaaacacgcacaaaaaccctttagttaaaattcagtttttcagccttgggtttattactgttattattttttatggcaagagtgctaaagaacacaagaacccaatcaagaaaggacttttaaaatgtgaggtatgcttgtagctttaaaaactttttacattacctacttctcaagtctgggccagatattagataacggatgttagcaaatacttgtgtccaattagaaccgtgcttacatcattacatattcagtaagaatgtagcctgttgcaaagcttccctgggaatacaaagactcctattatttctgtccagagccaccacatttgccagaatgtctgtatctacattccatagtgaagcccatagaaaccattaataccccttagccaaggggacagatggctccttttcacccttattagatcacaaaatagttgtgcatagtgatacttccatcgaactttaatgacacaatagaatttgcaaagaagaaaagaaacttgctggctccattccagttggaaactaagttttcttatcttccaacacgttttccattttaaactgcagggcataattgcgctttttgtggccttgtaaaaattaagcaacttgactttggcaaaccacaatctaaaattgtaaccgttcgaaaccagaaggtcaatgtgttgcaaaactgtgcaacatttgggaaacaaagtaaaaagttaaaagatttttctttatgtcccaaggaactgcttagaaatcattcaaggatcgcttgaacccgggaggcggaggatgcagtgagccaagatctcgccactgcactccagcctgggcgacagagtaagactccgtctcaaaaaaaaaaaaaaaatcgctcaaggggttttattaatatttttctaatcatgagaagctccaacctgtggtcttcccgccactagagggctttacgcgcagccctgaagttttgcactttttagacgtgagttaagcaacttttagaattgctcgtgggttgtgttgggtggggtcaggcggctgcgagtgggaagagagtctacaaacctgtctgaaagattgcagggtgttttcggcttcctctctctgaagcatctcctcctgcaatctgaaacagttgcgcattaaccaaaggggaacgaggaaaccgccaggggcggggcggccacacccaaacaccacgtattcgctctgcgcctccagagcagctgcgccacctccgcgcaactagcgcctgcagctttcagacctgctgccctcggcaggtttcagcgggacttcgggcaccgcgcagaggggcaatcacggtggccgcacagacctacaggacagccccgccatccccgcccccgagggaccatccctttgtctcgctccctccaccgccttcccctccttccttctcccgcccggtgattggcagcctgccagaaggggcaggaaactttctgaaagtttggaggactggctctcattgtgcccaagggccttcaactgcacacaaagtggtagttttaagaaatctgtaacttgaaacggagcgtccttgggcaatgtgtggggacagaggaggaaatgcgaactgcaaggtctgggttctgggcggggctgcgccaccacagccacagccccgctctccgctgtctccctggcaggcctccccccggccacatccccaagggcgtggcagctctcgcgggggccgggggggcgttcccctctccctccagccccctcccgaggcccagctacttgcatgggcgcagccttacttctcccggaggcgcatgatgtcctcggccaggttgtcgcgctccacctcgacgcgggctttgtcgttggttagctggtccacctgccggcgcagctcccgcatctcctcctcgtagaggtcccccaggcgcgacttgccttggcccttgagctgctcgagctcggccagcaggatcttattctgctgctccaggaagcgc

SEQ ID NO: 4666 - DNA, 2300 bp, Homo sapien
attgttcttttgtttgtagctttttcccccttcctccccctaattttcttttcacaggacaggagacttcacaacctgctaaaatgaactttcgggacctacccatctaggagtaaaccatcctagcaatgaaagatcagatgaaatctgaaaccagagagtctgttttgttttttgtttgtttgtttgtttttttgtaaaatcatttctccaaaagattttaaaaaagaaaaagggtgaaatgtgaaaggaaaatatcttgggcctccaaaatcactaagggaaactccagctggaaactgctcagggcaaacctgcctcccattctattccaagttatccctcccctcactaagatagatgcgtatctgatggccttccttcgaaaagctcatcagaaactcaaaagaatgcaaccatttgtgtctcacctatttgtgacctggaagttccccccacacttcgagtcttcctgcctttgcttcaagttgtcaccccctttccagactaaaccaattacttcttacatataatgattgatgttgtcacggtgtctgtgtgaagagaccaccaaacaggctttgtgtgagcaataaagctttttaatcgcctgggtgcaggcggagtgagtcggaaaaaggagtcagcaaagggagataggggtgggggcagttttataggatttaggtaggtagtggaaaatgacagttaaagggggttattctcttgcaggtgggggcaggggtcacaaggtgcttggtggggagagctggagacatattgtccaggagaaggaatgtcacaaggtaatgtcatcagtaaaggtaggaactggctattttcacttctttttgtggttcttcagttgcctcaggccatctggatgtataagtgcaggcttgggctcagaagcctgacagaggtctcatacctccctaaaatgtataaaaccaggctgtgccccagctacttaggggaaatgttgtcaggacttcctgaggctgtgtcacgggcgcattctcaaccttggcaaaataaactttctaaattaactgagacctgtctcagattttctgggttcaagtgcctgtaaacacaacactttgggaggccaaggcaggaggatcacttgcacccagggttttgagaccaacctgggcaacaaagaaagaccccatctctacaaaaaatagaaattagccagccatggtggcacgcacctgtcttcctggctattcaggaagctgaggcaggaggatcgcttgaatacagcaggtcaaggctgcagtgagctgtgttcgtgccactgcactccagtctcggcgacggagtgagactgtcacacacacacacacacacacacacatacacacaggccgggcgcggtggctcgcacctgtaatcccagcactttgggaggctgagtcgggcagatcacaaggtcaggagttcgatcacaaggtcaggagctcgatcacaaggtcaggagctcgatcacaaggtcaggagcctggccaatatggtgaaaccctgcctctactaataacacaaaaattagccgggcgtggtggcacgcgcctgtagtcccagctactggggagactgaggcaggagaatcacttgaacccgggaggtggaggttgcagtgagtcgacatcgcaccactgcactccagcctgggtgacggtgagactgtctccaagaaaaaagaaagaaaagcatgtagttaacctgcaacgacatcaaacacagagtttcttctccttcctcctgcaaggctcttgtattggttcgaaccctgagagaacgccaacaaacaacacaaggcagtgtggagcaacaggcagttttaatgaatgcctgaaggcagaccttcaggccatttcaggccgaggcctaaaatggcatcagccccaaatgaggacgggcaggggttttacagtctcccgtaaacaggaagtgtttcagtctgtgtatctactgctacgtgatacccggtaggcctctctctgggtcttcagaacagctctctccccgcttctgctatcttgctgacgcacgctgatgacgtaagccgccttgcgccttgggactgggcctgagaagggaggagttattcaggcctccgccagcttctaggccctggggatggtctttcacctccctctttctgatctctttttcatgctcctccttgctccaaagaaaagccggatggcaaaagagcccagaacctattggtgagttccacgtacgtcagcctccctgggaaaagtcaggcagagatgaaactggagggt

SEQ ID NO: 4667 - DNA, 2300 bp, Homo sapien
gctgtctggcctggttgctcccaaatggctctcacttgggcctctttcaggtgaagaccatatgcttctaggagatgtcagttgaaatatcatatttttgttgcttgggaaagttaactcatgaaagccttttcaaaattgaagtcatttcaaaagatcttatcaaggtactcccaagatggtggaatccaagggttgcatttggaaaaatctcgaaactatacaaaagtaagagtgaataattttataagcctgcatataaccacaatggaattaaaacctagggaagtggctaagtgggggcttgggcagtcaggatagtttagggcatagagagttgagacccacttttaaaaaaatagagagccagtctgtttcatagtgtcattggatcactctcctgcaacagatgagatactcgtaaatgagatactaaccaatatgatctagaccgtggtttagttctggctgccataagaaggataccataggctgggtgaccgaaagaacagaaatttatttttcacagttctggagggtaagaaacccaagatcagtgtgccagcatggtcaggttctggtgagggtcctcttcctgcttggcagaaagctgccctcgtgctgtgtctttacactgcacagagcagagagagaggaggcaaattccccgctgcctgctcttatgagggaactaattccaccaggaagcctccaccccatgaactaatcaggtatgaaaggccccacctccagataccaccacattagattggggatttgggtttcaacatatgaattttgtagagacacaaacattcagcccatagcagtgttaaaagaaaaacatcagacaaattaaatttagcacagtttattcgagcaaagggttcatgaattgggcagcactcacaaccagaggaggtccagtgaggtccaccccatggtgtgagcagcaaagcctgataggccaaactcagaagcacagtggagaaactgattggctatagctatgcaggctgccttgtggggcctggtataatgagttggttgcccatgattggccagtagccccctgttcattacagcctaatgtaggtttccattgttaggtgggaactcaacgtacagagacagcctcaagctaatggcctcttgcttatttaagagcagtatgcaaacttttcctggaaagtttcaaatggtaaatattttaggccctgtgggctatgccacctctgtcatcactactcaattctgcccttgcagccctagatcatacagccatatgcagtcactgataatacaaagccatgggcatggaggttttccaataaaactatttgcaaatacaggcaggggctaaacgggtctccaggtagtaatgtgctcatgcctaaaggtctcctagcccctcataccagttcgctgtccctctgaatctgggttgaagtaagcacaggttactgcttctgttcagtgtcatgatccacccagcaattccccagtccccagctttcttcatgcgtgggaggatccagccaagcgactgcacagttttgaaagtttttgaagcggcccctttttctcctctcctctctccgcaggcagagttgtggtgtggctgggtggtctgcgtgggcgtccgggggattcgcgggcactcgggacgaggcgagggcgcagaaaacttggagcccaatcagcacggagttgagcttccgcgccccaaccttcaggtgaccccgcgcggcggcggcggcagcagcagtggcagcggcgaccggagcccgcagcagctccgagcgcctccgggaggacaggcggcgagctcggcgaatcgtcatctgccagccgatcgcggcgctccgcgggccggggccgggagcccggggcgagcccgaacgcggcttcttctccgcccgccgcggagactctgccgggtgggctgcgggcgcccctcgctgccgcctgtgaacgctgtgggtgcgcggggctgcggccacggcggcggtggcggcggcggcgggagccgcgagtcggggccgcccgggctgtgcttcgccccggcagcagcggtggcggcggcgcctgtggctcaggatgcggccggggggcgcactgctcgccctgctcgccagcctgctgctgctgctgctgctgcgcctgctctggtgcccggcagacgcgcccggccgcgccaggtaacccacccacccgccggccgcgccccgcgccgcgcgccccgcctggcgcccccggacccccaagccgcccatcgcttcccctcgggcgcggagact

SEQ ID NO: 4668 - DNA, 2300 bp, Homo sapien
atattattttaccttacttaatggagttgggaaacatatttagatggctgggatttttaagatctttttgacatgaaacataattatttatgattatgatcaactgacaaagtattatgtaacatatgatttcaaagctgaaagactgtataacttgtttaacattaaggcaatggataaacactttcttcttttgagacagagtcacgctgtgtcaccaagctggagtgcagtggtgtgatctcagatcactgcaacctccacctcctagttcaagcaattctcctgcctcggcctcccaagtagctgggattacaggcacatgtggctaattttttaattttttagtagagatggggtttcaccatgttggccaggctgatctggaactcctgacctcaagtgatccgcccaccttggcctcccaaagtgttgggattacaggcatgagccaccacgcccagcctgcaatggataaacactttctaaacagcaaatttaaacatacgatggcagagtttttatcttttccagacactcaagacatgcaaatgcattccaaaagacagacacacaaagccatcaagtctaatgtgccaacctcaggaaaatatgcaatgtacattctgctatcctcttcagacaaattttgtaaattcagcacatgaaaagagactatatggtaagttagtattttcaaaggtgccagaggtccagaacattgtcatgcgaaatgatattgatgtgttctaggattagagtccagctacattcaaaactgccaacctttaaaaagctcagtcactaaaggtaaacacattttcatgtacagtaagattaaaaccaaccaaatccatataaatggtagtacaaccttcttatgacagacaagacacttaagctcaaattataatttcaaagtatctcatcatatacaaagtggtaagccgcaagtgtctaaaaaagagctagagaatattaaaaagtcacaaagagtatataacatggccaggcgcagtggctcacacctgtaatcctagcacttagggaggccgaggtgggtggatcacttgagctcaggtgttcgagaccagcctgggcaacatggtaaaaccccatctctacaaaaaatacaaaaattagccaggtgtggtggcctgcacctgtactcccagctacttgggaggctgaggcaggagaatcgcttgagcccaggtggtggatattgaagtgagccgagatcgtgccactatcctccagcctgggtgacagaatgagaccctgtctcaaaaaaaaaaaaaaaaaaaagagaaaaaaacccataaaacacaattaacagtggttatccttggttagagagattataagtaatttaaaagtggttttccttctttttggtttatatattctcatttattatatttgaacatgtataatacttgggattaaaaaatagtaattgaccaggcatggtggctcacacctataatcccagcatttatcaccacctgacatatcacatattattagtttatgttttgtcttcatcataagacagagaatttgttttgttcatacctacatctcaggcatgcagtaggcacacaccatttgtcattgttattgctaccataaagtacaatacaaagaataaaatgaacaagtctatactgatttgtgacttgttctccaaagagcagttttgcttttataataactttctaaaacgtcaattgctcaaagaattcaaacttcaagaagaacagatatcttttcctttaaaaactgttgctttaggatatatttggagcccttcaaatataaattttatccacattccaaataatacaattttaagtaagtgtgacttttaaaaatgtctctgcaacttaaagcaaagaaaaaaaccaatcgcattgtgtaaatggtataaattgtggctgctagattgactattaaaataatttacatcacagacaaaaaaaaaacatatttttggtactgcttatgtaagctaattccaaaaatgtatattgtgctttccaaaaaaaaatgaatgactaattctgaggttaaggataccacaatttgtctcacattgatttcactcaaaatatttattaatacgattcctctctcatcattaagcttttagaatacaaatcataacttgtataattattagttataccagttatacctcctataacagcattctggcatcgtggggctgaaacacgaattttaattctctggcgttagcacacaaaataagcatgcacaggacaaggagaaactaa

SEQ ID NO: 4669 - DNA, 2300 bp, Homo sapien
aaaaatctgctgggatttggagagaattgacatttaacagtatggagtcttccaattcatgaacaggcaacagctatttatttagatctttcatttctctcagcagagatttatagttttgagcaatgatttataattttcagtgtatacgtctcacacatattttgtgaaatttatgcctatatagttcatgtttttggatgctgattaacgttgtatggtttattttaaatttcattttccagttgttccgtgtacacatgtagaaaaacaattgatttttgttatgttgatcttgtagttccaggaggttttttttttttaggattcctcgagattcctgggattttctaggaaacacattgctctcatttgcaaacagttttacttctttcttccctttattttatttttattctttttcgaaaagaagtctcgctctgtcacccaggctggagtgcaatggggcgatctcaaatcactgcaacctgtgcctcctgggttcaagcgattctcctgcctcaactcctgagtagctgggattacaggcgcccgccaccatgccccgctaatttttgtatttttagtagagacggggtttcaccatgttagtcaggctggcctcaaactcctgacctcaagtgatctgcctacctcggcctcccaaagtgctaggattacaggggtgagccaccacacccagccttcctttccttttttttttatttttttgagacagagtctcactctgtcgtccaggctggagtgcaacgggcgatctctgctcacgatttttaaaaattatttccactaaggaaactgaggcatggataggttacgttgtccaagttcacacagctaataaaatgggaggattcaggaatttgggggttgtatttcagtaggtgcaaggaatttcaaaaggtaatgtcatcagttaaggcaggaaccggccacacttctttagtgattcttcagttactttaggccatctggatgtatacgtgcaggtcacaggggatataatggcttagcttgggctcagaggcctgacacttggtaaatagacacacacacagacacacagacacacagacacacacacacacacacacacacgctccggtaaaattcacacaagtgaggccgggtgcggtggctcacgcctgtaatcccagcactttgggaagccaaggcgggtggatcacttgaggccaggagttcgggaccagcctggcaaacgtggtgaaaccgtctctactaaaaataacaaaaattagccgggcgtggtggtgcatgactgtagttccagctactcgggaggctgaggcaggagaatctcttgaatcagggaggcggaggttgcagtgagccgagatcacaacactgcactccagactgtaaaaaaaaaaaaaaataagaaatgaaaaaggaaaaaaaaatcactcaagtgggacggtcttctcactgttggaagacctgttggactcgctagtaaacgggaaacagggcgaaataggcgtttcttccccagaagctcttaagaatgaatgaatgtttggcccagcgctgtggctcaggcttgtaatcacagaactttggaaggcagaggtgggaagattgcttgagctcacgaaattgcagtgagctatgttcacgtcactgccctccagcctaggagacagactgagaccgcatctctaaaaagaaaagaatgagtggcgggaagatcccgctccctgcctgcgtattgagaaactgccttacaaaaggccaggcagggcagagccacgccaagttcaggtgcgttccctgtgtccccactaaatgcactcgcagggtgcgcatcgccagggcgcaaggcgtctgggcgtctctctatgaagaggcgcccgcagctagcgaggcgggtgcactttcctcgggagcggaaactacagcgccgcctggaaagcgtgccggggctcgcgggtcctggatccccagtgccagggccaggcgttctggcccccgagtggcgcgcgctcccaaggggcggggcggggcgggggcgtgacgggcggtggccgggggcgtccgctcctccccctcgcggtcggtagagctggctgcgccgagccccctgcgcgctgcacatggggcgcctgacggaagcggcggcagcgggcagcggctctcgggctgcaggctgggcagggtcccctcccacgctcctgccgctgtctcccacgtcccccaggtgcgcggccaccatggcgtccagcgacgaggacggcaccaacggcggcgcctcggaggcc

SEQ ID NO: 4670 - DNA, 2300 bp, Homo sapien
caagcacgcttttggtattggcccttcaaaacattaagaaactggtggtaccaacataccatttttgacattgttgtattttaacattttttctgcttttgaaaggaatacacgctcatcattaaaatattttgaataataaaatgcacaaagaacaaaaacattgtctagaatcttgccactcagagacaatcatgtcataatattctcatgtatttcctttcagatttttaaaattgtgggcatttgtaattttataaggtttgtaacttccttctgaaaacttgtgtattcagatgtctatgtaaatatgaatctgtattatgcaccttaaatggctgtgtagttttcacatcttatgtactatgatttaactgaccagtgtaaattacagtgatcagttacacttatttagtgcttactctatgccaggcactgtaataagcgttttgcttgtactaattcatttgatcctcacaaccctattattcctgtttcttacacatgaggaaactgagacaccaagaggtgaagcaatttgtccaatcactcaatgtgggacatttaatggctggcaatgctttgatcctttagacaatgttgccatgtatacctttgttcatgttttaaaagaatgtctttaggattaatttgccgaaatggaattgctgggtcctaaggttttaaaaatttttttacatgcttccaaatatttcccttaggaagattatacagtatttacacttcatccaacagtatgtgagtgtctgactcctcacatccctgattctttgcaatttttttctttttttgagacggagtttcgctcccgggttcaaacgattcccagcctcagcctcccgaatagctgggattacaagcgcgcaccaccacgcccggctaattttttgtacttttagtagagacggggtttcaccatggccaggctggtcttgaactcctgacctcaggtgatctgccggcctcggcctcccagagtgctgggattacaggcgtgagccaccgcgcccggccgattctttgtaatttttacctaaatgacaaaacattatctaactgctactttaatttgcacatttcacttttagaggtgggacttcatttttaatgaatttttaagcactctttgattactatgtattaatcctgtgttgacatgtcaatattagtttccacgctacatttggagatgccgtaatttgcgggataatttccatttacgtacaagatgtgcttactaagtttgttccaagtgggacgcaacatctctagtagatgctccttaaaacttctccatcacacagagaataatttttattggttaactaaacttataagtaaaataaataaaccaacattttgggttgctaggaatcactcactgatcaacttttagctccagtttttttctgttttcttttttttgctcagtctagggaggctatcttgggctgtgaaagacatgtcaccaaccatcacagctgctgagtgattgcacggttagtcagtaggtgccaacgccctgctagaagagctgtctgcagattccaaagccgggcgttcagggactcccgggaaggagccagcgttacctcagcctctccgagggacacgcgcgccctgaacactcccctcttgggattcaggccaattcgttcagctcccatgacttcatccgagcaagtttgtcacctcacgcagctaattaaactgtttacctagaagatgatccaaaggaatttccatttccttccagagggaatacaaggttatgataaccgagagagcgagaggaaaaaaggcgcacagctcgacccgaactcaacctgctttctttctcctggctctcccagtcactcctggggttgttagtaggcttcagcacgcctgaaggaccccgtcctacggagactcctagccaagggaaaagcagaaaacacaagaactaattccactcttatgtgtgactaattaaaagaggagtcaggcagaggggactccctgttcagcctttaccgatggggcaggctcggggcagctttgagacaggcagcgccaaggtcgcccagattcccgacaagctccgcgcgggggcttcctcggctccttgctgttgccgccgccgcagctgctgccgcggttggtggggttgggtgagaggaggagctgtcgcggaccctgtagagtcggtctctgttgctctttttgcctgaggagtcttccatcctacgtcgagctctgactcccgtgctgtcgagagggagtccccggggacacct

SEQ ID NO: 4671 - DNA, 2300 bp, Homo sapien
ttttcactgccggctacacacccccaccaaatccttaatgggacacgccattcttacctcaacctattttgttgttgttgttttgagatagggtctcgctctgttgctcaggctggagtgctgtggcacgatcacagatcactgcagcctcaacctcccaggctcaagcaatcctcccacctcagcctctggagtaactgagaccacaggcaagcgacaccgtgcctggctaatttttgtattttttgtaaagaagaggtttcaccatgttgcccaggctggtctcaaactcctggcctcctcaagctatcaacccaccttgacctcctaaagtgctggggttacaggtatgagccaccccacctggcccccaaactatttttctaacattgcctcctcctgtttcctgctgtgccacaccagattttcactaacccctgcagcctccttggctgtgtctgaaatgtcaccgacaccacagtgcccccgtccatcctgaccgtgcttatgtgcccatcctcttcccacaaccccaaggtgaagcaaggtgaagttcacctgtgtccctgtagcacttcatttacactcttctggccttggttttttgttgtggttcctcattttatctcctccattggacctcaagcactttcagaacaggaactgctgtcattcattcatcttcacaccctaacacatactaaaatgctcattgtaagtgctctagtatgtttttcttttcttttttttttttttttttttgagaaggtgtcttgctctgttgcctaggctggagtgcagtggcatgatctcagctcactgcaacctcagcctccttggttgaagtgattcttctgccttagcctcccaagtagctggattacaggcatgtgccaccacgcccctctaatttttgctttttttttttttttttgagacggagtttcgctcttgttgcccaggctagattgtaatggtgcaatctcggttcactgcaacctccgcacctcccagattcaagcgattctcgtgcctcagcctcccaagtagctgggattacaggcatgcaccaccacacccgtctaattttgtatttttttcgttttttgtgcagatggggtttcaccatgttggtcaggctgatcttgaactcctgacctcaggtgatctgcctgcttcagcctcccaaagtgctgggattacgggtgtgggccaccgtgcctggccttaatttttgtattttttagtagagacgaggtttcaccatgttggccaggctggtctcgaactcctgacctcaggtgatctgcccgcttcagcctcccaaagtgctgggattacaggtgtgagccaccatgcccggtctcaagtatgtttttcaaaggaaggatattcatggagacaattgtcattctttaaacatttgatatgcatttgagctagtcacagatagctgttaatgtgtaaatcttgataacaggcttctaatgtcaccatttcagtttcctgtgcagcaaaacaaaaataacattaatttgtgttatatggcaactaatgcacaataatgaataaatatcttaagtattagggagaatcctggttagagagttgataaagtgaatacaaactcccttttcaagcacttgaaagggagggatggttttccaagatgaagacttaggtttgagtatctccctttgcctgaatttgcttttatgtaaaaatagagggttggattctatctattcccctttaactctaaaattatattattccagcagttttacttaacaagaattgactatcacacaaatggttttgtgctaacgttagcaataaacacctttttaaaaccctgcttttacccatgctcccgggcatgctctaaagttcatttgacttctaataatggatgtgcaaatatgttgagtgatcacttccacaatggtcctgttcctttaagagaccacggttgttaagttaggagatcattgaaccatatgagggtcaataaaagaataaaaagtcactggttagcgattcgaggacaaggaacttgatcccagttcagtgtctgtgggtccatatgctgcccacagtcaaagagggagtcccaggttcttggcagcttgcttttcctcaggatggcttctggaaggctcattaagttcgtggtttttgagctcctagagtttgccgctttctccatccccacactcgtgatcacagaacagtttgccaccgcctaccaaggaacaagggctagatctgacaacacacactactggctgatcatctcc

SEQ ID NO: 4672 - DNA, 2300 bp, Homo sapien
cctgcacatgtatcctggaacttaaaataaaattaaattaaattaagtgaaaaacaaaagaatatggagaattccacctttaaatggaattttaaatttgaataacatttgagctaaaatggatacattttaaaaactaaaatgtaaataaatctgttaattgcaggtagtgaaaatggacacatccattcaacctctttgcaacacataaaaactgtgacggagcaagtgaggcaaagtccagaaaacgctgcatctccccaggcaaccaacagcacccaggtgtcgcagccatcaggagccatgacacggagccaggagtctgtgttcatgggaccccaggagccctcctgtgactccggaatcctgagaatgatgtcccggcgagatgtccgggcagagttattcttatggagctttctcctgtggtctgacacgatagaaatggtgcgtgtggctggtcaccccaacgtgtacaagtcaagctggctatacccagtctacatattcagttttatttctctccttcgaattacattcactccccaaaaccctcttctcaattccctgagcgtcctgctgcaagatttaccattcgtttttgttagacttggtttaatcattgccctggggactatcacacccgtactgggcctgtgtaaaaatatcctcgtgactctctcttacatttacttcaattacctaaccagaatcaggattttttctgcctttgaaatgtctccattttaaaaaggaaatgggatctagtaaggcctctttgtgatacctgtgtgcacatttgtaatccttctttttttcttggggcgtaggtgtttgcactataaaggaaatgactagattgtagagaataagccatttttactaactctagcatatcagtttttttttttacatatacaaatggtgctaaatttaagtaaagtaatattcttataagttggctctcaggtatttctagaaaatgttagcagctaattttagttagttatgtatactgaggtccccaacccctggaccatggtcccagtactggtccgtgatctgttagcaagcagaccgcacagcacgtggtgaacctcaaactgagcgttcccgcctgcattccgcctcctgtcagatcagcagcagcattagatcctcataggagcccaaaccctattgtgaactgcgtatgcaagggatctagctttcgctctttaagaaaatctaatacctgatgatctgaggtgggacagtttcatcccagaacccaaccccacccccaaccctggctgtggaaaaattgtcttccacaaaactagtccctggtgccaaaaaggttggggaccactgatgtataccacgctttttctaagaatactcttcaacggagccctttaaaaaactaagaaccttttccatcaagttagcccaagaataagatttttatcttttatatagatagcattatatgaattgattgattaaatttagttttaaaaaacacacttgaaattattgaataatttttaggttatacttttttttttttttttgagacgatgtctcgctcttgtcccctaggctggagtgcgatggcgcgttctcagctcactgcaacctgtatctcccgggttcaagcgattctcctgcctcagcctcccaagtagctgggaatacaggcacctgccaccacgctggctaatttttgtatttttagtagagacgaggtttcaccatgttggccaggctggtctcaaactcctgacctcaggtgatctgcccacctcggccttccaaagtgctgggattacaggtgtgagccaccacgcccggctggattatactttttaaaaatttgaaaattgtagttttaggggttccttcaaaggtggaattatattctttattccattgtggcaagggacttttattcaataaattgatttcagcataaaaagcaattcactttaacagatatttggctcagtttaaggcttagctgtattgccagtactgaagtactaatatgagtgttgtttagtataatgaagtcaaggtacatcagtaataccaagataaagtttcataataaaaagccataaagtgaagacagagatttcaaagtaaaagaatattttatttgtggaatttgatactttgataaataatcaaagtacaagccctgtttaaaattaaaagttcggcttacaaatataatagccaatgtatcagtgtcttatgtgatactatatcatggatatattgatgttataaaataattagatacagagtcatgc

SEQ ID NO: 4673 - DNA, 2300 bp, Homo sapien
aacaaaccctgggccaggtatggtggcacacgtctgtaatcccagcactttcagaggccaaggcgggcggatcacttgaggtcaggggtttgagaccagcctggccaacatggtgaaaccccgtctatactaaaaatgcaaaaaatagctgggcatcatggcacgcgcctgtaatcccagccacttgggaggctgaggtaggagaatcgcttgaacccgggaggtggaggttgcagtgagcccagattgcaccactgcactccagcctgggcgacagagcaagactctgtctcaaagaaacaaaccaaccctgaatgtgattatatacataattcaattaaatgtatttgcttctgaaatatatataaatgtaaattaggcagtcacttttgtatatgatttatttatatttgaaagccacaaatgacccatttaaactattattttcataagccagtgaaacaatgtctgagaaacatttttgttttgtctgttctgttctataaccatcattttttttttcagtcatgtacagccttagtgacaaagaaactttggtcctctgtcctacattttcactatctttttccctccggtcaggataatctcaaatttacatgttaaaaacaatcagtaagagaactacatcacatttctaataggatggaaacttttcaactttatcacaaagacaacgaatgtggaggctttccgtttgaagataaaactattcatttaaaaaattttaaaaattacaatgtttccagtagcttctttttgaattactaacatattccacactctagtaacggtttggccagctaatcgttagtttctgctttaaaatgttctaaattcctgttctacttttgaaaaatgacaacataaatgtttggagggttattttctgcttaatgaaagatctagaaacatattttattctaagaaagaattccacttgcctttaaataaagatataccttttgaccaaacaatcagattttctttttcttttttttcttttcttttttttttttgagatggagtttcgcgtctgtcgcccaggctggagtgtagtggtgcgatcctgactcactgtaacttccacttcccaggttcaaacgattctgttgcctcagcctcctgagtagctgggcttacaggtgtgcatgatcacacccggctaacttttgtatttttagtagagacgggtttttgccatgttgaccaggctggtttcaaactcctgacctcgggtgatctgactgcctcggcctcccaaactgctgggattgcaggcgtgagccattgtgcctggccagattttctttttctagcaaggggacccacttaaacttgaagaggaccgggatggttgaggctgggcagcaaggctttactgcaaatcctttaccactgttttttctggctttctagagaacgttctagcaaaaggtttctagaactttctccttcctggcctgactgacattccctcttaggtgtagcctccttttcacttttcttctgcctggaggaaatgaagctccacggaactttctgttgaaactttccaagaaaaaaaagaaaggctctaagcactgaatgtggaaactgaaggggatgagcttcaactctgaagtgtttccagcgtaaaactgtcctttccagggcccgtgtggctgtcacttcagagtggaggttgtctgctgagggacccctgactcagctgcttcccaggggaagctccgtcttccggcacaggtaatggcctgcagcttgatctccacccagccccatctgagcaggccgggagctcccaggctgtttcacttctctccttcctgactcctcaccatcaccatcgccctctctcctccccaccccgccactcctctcccacacgtgtccctttctccccttcctctgcgtctgctcttctcagaagttagcttacgaagcaaagttgttactttgaattcctgtttttccagccaccctcatgtgacaggatgtctcctcagtagaggctttccctaaattcaggagccctttaaaagggagggcttcctctgtagttcttttcagctgggcagctctgggaacttggattaggtggagaggcagttggggggcctcgttgttttgcgtcttagttccgccctcctgtccatcaggagaaggaaaggataaaccctgggccatgaggctacccctgctcctggtttttgcctctgtcattccgggtgctgttctcctactgggtaagtctgctctgaggcaggggatctctgacctgg

SEQ ID NO: 4674 - DNA, 2300 bp, Homo sapien
tcctgaggttgtggagctcccatccatttgtgagaaatatttcattgcagtcagttccttgtattccataatagactaaggttggcaaagactagggaagaggcagaaaactaagaatgctgatagagttgccaaattattcctaaaatgagtcttctctgatgcctagtcatgcatctgtcctccctctattcatccttctagctagccaaccagcaagcttcctagtagaagtagatatgacagtcagcaattaagatataagaagtatcaaagagaggcatatagaaagtgtcatgagaagagagaaaagggaccagttgggctagtggggaggaccaagaaggttcctcagaaaaagccaaagtttatagatatagtctaggatggtagaacataaggaaggaatatcaagaagacaaaaaaaaaaaaggagataaactggagagtagatgagtgtcagatgttatggagcttccaaggccatgatgcagagatagaaatttacaatttatacaatgagtatttcctaagtagggaagtgtgtatttaaaagtaagtagtttcagaatgatttctgtgattaaatttaggcaagacatttttacgtcgctgttgactaagtttttataattaagtcatttgataagtcatttgttttcttctcacagacatgttcacgattctcttatgagtttaaagtaagcttttatttttagaaagattaaatagtttttcattgtggcaatatttatgactacaacagtattattatcttccttatttctatagagttaatgattatacaagcattatttgattaaatatggtataatactacaaaattctaatttgagataacatacttctaatttttgtcactggatttttggcaattggcttcgtaaattaaataatgcagtcaaaagggtgataattgcttgaatctttgaaaaattcagctacctctgattaatattatatatcatctattcttaaacaatacctgtaaaatctctattagactgttaaaaggatattattgataaataatattttgatgtttatcaatattttgtatgtgatcataaatttgtttcactaaatttaataagaaattaactgtgcaggccaggcacggtggctcacgcctgtaaccccagcagtttgggaggctgaggcaggcagatcacctgaggtcaggagttcaagaccagcctggcaaacatggtgaaaacccgtctctactaaaaaatacaaaaattagccgggcatggtggcagtgccttaatcccagctacttgggaggcagaggcaggagaatcatttgaacccgggaggtggaggttgcagtgagcctagatcgagccattgcactcaagcctgggggacaagagcgagacttctctcaaaaaaaaaaaaaaaaaaaagaaagaaattgactgtgcaagtagactaaaatgactggctttttacatcatatatatgtgatgtcatatggccgaaagaccacctcactagaatatagctgaaagactgcctcactagaaatcaagagactaaggcttctctcttccatacccttacctctcttccatacctctcttccatgaccttagctaagccgtttaccattggtgctgtttcaacaacagaataatgagaagatatgaagagatgagcatttctctcaggtgtccatgaatttaatgaaaattacttaatttttattataatttcaataataatataagaaatatcttatttgttatgaagataaaacttctcttttgccctgaaaacctgcaaacaaggagagtttcacggaataagagataaatttttttttattagtgttttttgaaataacttccaaggatgtattcctggggatctctaagaaataactgtttctaagaaaggctgcatgtactgaatttgagttgacagaaatgatttatagtgttctttttattctcaaatgttccaggttctatgtcaaatcatggtcttaaatatactttgtattcttgaattggttcttttagtattttctaaatgaagcaaggctgcatgttaatgcttgtttttgtcgttgcagactgataatcaatacacttggactgataagtggagggtgaggtacactaactgggctgctgatgagcccaaattgaaatcagcatgtgtttatctggatcttgatggctactggaagacagcacattgcaatgaaagtttttactttctctgtaaaagatcagatggtaattgaatatataaaaacagtcaggggatct

SEQ ID NO: 4675 - DNA, 2300 bp, Homo sapien
ttttcactgccggctacacacccccaccaaatccttaatgggacacgccattcttacctcaacctattttgttgttgttgttttgagatagggtctcgctctgttgctcaggctggagtgctgtggcacgatcacagatcactgcagcctcaacctcccaggctcaagcaatcctcccacctcagcctctggagtaactgagaccacaggcaagcgacaccgtgcctggctaatttttgtattttttgtaaagaagaggtttcaccatgttgcccaggctggtctcaaactcctggcctcctcaagctatcaacccaccttgacctcctaaagtgctggggttacaggtatgagccaccccacctggccccccaactatttttctaacattgcctcctcctgtttcctgctgtgccacaccagattttcactaacccctgcagcctccttggctgtgtctgaaatgtcaccgacaccacagtgcccccgtccatcctgaccgtgcttatgtgcccatcctcttcccacaaccccaaggtgaagcaaggtgaagttcacctgtgtccctgtagcacttcatttacactcttctggccttggttttttgttgtggttcctcattttatctcctccattggacctcaagcactttcagaacaggaactgctgtcattcattcatcttcacaccctaacacatactaaaatgctcattgtaagtgctctagtatgtttttcttttctttttttttttttttttttttgagaaggtgtcttgctctgttgcctaggctggagtgcagtggcatgatctcagctcactgcaacctcagcctccttggttgaagtgattcttctgccttagcctcccaagtagctggattacaggcatgtgccaccacgcccctctaatttttgcttttttttttttttttgagacggagtttcgctcttgttgcccaggctagattgtaatggtgcaatctcggttcactgcaacctccgcacctcccagattcaagcgattctcgtgcctcagcctcccaagtagctgggattacaggcatgcaccaccacacccgtctaattttgtatttttttcgttttttgtgcagatggggtttcaccacgttggtcaggctgatcttgaactcctgacctcaggtgatctgcctgcttcagcctcccaaagtgctgggattacgggtgtgggccaccgtgcctggccttaatttttgtattttttagtagagacgaggtttcaccatgttggccaggctggtctcgaactcctgacctcaggtgatctgcccgcttcagcctcccaaagtgctgggattacaggtgtgagccaccatgcccggtctcaagtatgtttttcaaaggaaggatattcatggagacaattgtcattctttaaacatttgatatgcatttgagctagtcacagatagctgttaatgtgtaaatcttgataacaggcttctaatgtcaccatttcagtttcctgtgcagcaaaacaaaaataacattaatttgtgttatatggcaactaatgcacaataatgaataaatatcttaagtattagggagaatcctggttagaaagttgataaagtgaattcaaactcccttttcaagcacttgaaagggagggatggttttccaagatgaagacttaggtttgagtatctccctttgcctgaatttgcttttatgtaaaaatagagggttggattctatctattcccctttaactctaaaattatattattccagcagttttacttaacaagaattgactatcacacaaatggttttgtgctaacgttagcaataaacacctttttaaaaccctgcttttacccatgctcccgggcatgctctaaagttcatttgacttctaataatggatgtgcaaatatgttgagtgatcacttccacaatggtcctgttcctttaagagaccacggttgttaagttaggagatcattgaaccatatgagggtcaataaaagaataaaaagtcactggttagcgattcgaggacaaggaacttgatcccagttcagtgtctgtgggtccatatgctgcccacagtcaaagagggagtcccaggttcttggcagcttgcttttcctcaggatggcttctggaaggctcattaagttcgtggtttttgagctcctagagtttgccgctttctccatccccacactcgtgatcacagaacagtttgccaccgcctaccaaggaacaagggctagatctgacaacacacactactggctgatcatctcc

SEQ ID NO: 4676 - DNA, 2300 bp, Homo sapien
aacaaaccctgggccaggtatggtggcacacgtctgtaatcccagcactttcagaggccaaggcgggcggatcacttgaggtcaggggtttgagaccagcctggccaacatggtgaaaccccgtctatactaaaaatgcaaaaaatagctgggcatcatggcacgcgcctgtaatcccagccacttgggaggctgaggtaggagaatcgcttgaacccgggaggtggaggttgcagtgagcccagattgcaccactgcactccagcctgggcgacagagcaagactctgtctcaaagaaacaaaccaaccctgaatgtgattatatacataattcaattaaatgtatttgcttctgaaatatatataaatgtaaattaggcagtcacttttgtatatgatttatttatatttgaaagccacaaatgacccatttaaactatttttttcataagccagtgaaacaatgtctgagaaacatttttgttttgtctgttctgttctataaccatcattttttttttcagtcatgtacagccttagtgacaaagaaactttggtcctctgtcctacattttcactatctttttccctccggtcaggataatctcaaatttacatgttaaaaacaatcagtaagagaactacatcacatttctaataggatggaaacttttcaactttatcacaaagacaacgaatgtggaggctttccgtttgaagataaaactattcatttaaaaaattttaaaaattacaatgtttccagtagcttctttttgaattactaacatattccacactctagtaacggtttggccagctaatcgttagtttctgctttaaaatgttctaaattcctgttctacttttgaaaaatgacaacataaatgtttggagggttattttctgcttaatgaaagatctagaaacatattttattctaagaaagaattccacttgcctttaaataaagatataccttttgaccaaacaatcagattttctttttcttttttttcttttcttttttttttttgagatggagtttcgcgtctgtcgcccaggctggagtgtagtggtgcgatcctgactcactgtaacttccacttcccaggttcaaacgattctgttgcctcagcctcctgagtagctgggcttacaggtgtgcatgatcacacccggctaacttttgtatttttagtagagacgggtttttgccatgttgaccaggctggtttcaaactcctgacctcgggtgatctgcctgcctcggcctcccaaactgctgggattgcaggcgtgagccattgtgcctggccagattttctttttctagcaaggggacccacttaaacttgaagaggaccgggatggttgaggctgggcagcaaggctttactgcaaatcctttaccactgttttttctggctttctagagaacgttctagcaaaaggtttctagaactttctccttcctggcctgactgacattccctcttaggtgtagcctccttttcacttttcttctgcctggaggaaatgaagctccacggaactttctgttgaaactttccaagaaaaaaaagaaaggctctaagcactgaatgtggaaactgaaggggatgagcttcaactctgaagtgtttccagcgtaaaactgtcctttccagggcccgtgtggctgtcacttcagagtggaggttgtctgctgagggacccctgactcagctgcttcccaggggaagctccgtcttccggcacaggtaatggcctgcagcttgatctccacccagccccatctgagcaggccgggagctcccaggctgtttcacttctctccttcctgactcctcaccatcaccatcgccctctctcctccccaccccgccactcctctcccacacgtgtccctttctccccttcctctgcgtctgctcttctcagaagttagcttacgaagcaaagttgttactttgaattcctgtttttccagccaccctcatgtgacaggatgtctcctcagtagaggctttccctaaattcaggagccctttaaaagggagggcttcctctgtagttcttttcagctgggcagctctgggaacttggattaggtggagaggcagttggggggcctcgttgttttgcgtcttagttccgccctcctgtccatcaggagaaggaaaggataaaccctgggccatgaggctacccctgctcctggtttttgcctctgtcattccgggtgctgttctcctactgggtaagtctgctctgaggcaggggatctctgacctgg

SEQ ID NO: 4677 - DNA, 2300 bp, Homo sapien
ggtcctgaggttgtggagctcccatccatttgtgagaaatatttcattgcagtcagttccttgtattccataatagactaaggttggcaaagactagggaagaggcagaaaactaagaatgctgatagagttgccaaattattcctaaaatgagtcttctctgatgcctagtcatgcatctgtcctccctctattcatccttctagctagccaaccagcaagcttcctagtagaagtagatatgacagtcagcaattaagatataagaagtatcaaagagaggcatatagaaagtgtcatgagaagagagaaaagggaccagttgggctagtggggaggaccaagaaggttcctcagaaaaagccaaagtttatagatatagtctaggatggtagaacataaggaaggaatatcaagaagacaaaaaaaaaaaggagataaactggagagtagatgagtgtcagatgttatgaagcttccaaggccatgatgcagagatagaaatttacaatttatacaatgagtatttcctaagtagggaagtgtgtatttaaaagtaagtagtttcagaatgatttctgtgattaaatttaggcaagacatttttacgtcgctgttgactaagtttttataattaagtcatttgataagtcatttgttttcttctcacagacatgttcacgattctcttatgagtttaaagtaagcttttatttttagaaagattaaatagtttttcattgtggcaatatttatgactacaacagtattattatcttccttatttctatagagttaatgattatacaagcattatttgattaaatatggtataatactacaaaattctaatttgagataacatacttctaatttttgtcactggatttttggcaattggcttcgtaaattaaataatgcagtcaaaagggtgataattgcttgaatctttgaaaaattcagctacctctgattaatattatatatcatctattcttaaacaatacctgtaaaatctctattagactgttaaaaggatattattgataaataatattttgatgtttatcaatattttgtatgtgatcataaatttgtttcactaaatttaataagaaattaactgtgcaggccaggcacggtggctcacgcctgtaaccccagcagtttgggaggctgaggcaggcagatcacctgaggtcaggagttcaagaccagcctggcaaacatggtgaaaacccgtctctactaaaaaatacaaaaattagccgggcatggtggcagtgccttaatcccagctacttgggaggcagaggcaggagaatcatttgaacccgggaggtggaggttgcagtgagcctagatcgagccattgcactcaagcctgggggacaagagcgagacttctctcaaaaaaaaaaaaaaaaaaagaaagaaattgactgtgcaagtagactaaaatgactggctttttacatcatatatatgtgatgtcatatggccgaaagaccacctcactagaatatagctgaaagactgcctcactagaaatcaagagactaaggcttctctcttccatacccttacctctcttccatacctctcttccatgaccttagctaagccgtttaccattggtgctgtttcaacaacagaataatgagaagatatgaagagatgagcatttctctcaggtgtccatgaatttaatgaaaattacttaatttttattataatttcaataataatataagaaatatcttatttgttatgaagataaaacttctcttttgccctgaaaacctgcaaacaaggggagtttcacggaataagagataaatttttttttattagtgttttttgaaataacttccaaggatgtattcctggggatctctaagaaataactgtttctaagaaaggctgcatgtactgaatttgagttgacagaaatgatttatagtgttctttttattctcaaatgttccaggttctatgtcaaatcatggtcttaaatatactttgtattcttgaattggttcttttagtattttctaaatgaagcaaggctgcatgttaatgcttgtttttgtcgttgcagactgataatcaatacacttggactgataagtggagggtgaggtacactaactgggctgctgatgagcccaaattgaaatcagcatgtgtttatctggatcttgatggctactggaagacagcacattgcaatgaaagtttttactttctctgtaaaagatcagatggtaattgaatatataaaaacagtcaggggatct

SEQ ID NO: 4678 - DNA, 2300 bp, Homo sapien
tgctggcacttgcctgtaatcccagctattcaggaagctgaggcaggagaatcacttgaacccaggtggtggaggttgcagtgagccaagatcatgccactgcactcatgcctgggtgacagagtgagactccatctaaaaaaaaaaaagcctgaaattttctaggaatatttgcctttcgtatttccatccgtgttactgtgtccggaattggtgggttcttggtctcactgacttcaagaatgaagccatggacccttgcggtgagtgttacagttcttaaagatcgtgtgtctgcagtttgttccttcagatgttcagatatgtccggagtttcttccttctggtgggttcgtggtctcgctgacttcaggagtgaagctgcagaccttcgcggtgagtgttatagctcttaaaggcagcacgtctggagttgtttgttccttctggtgggttcatggtcttgctggcttcaggagtgaagctgcagaccttcccggtgagtgtgacagctcataaaggtggcatggacccaaagagtgagcagcagcaagatttattgcgaggagtgaaagaacaaagcttccacagcatagaaagggacctgagctggttgccgctgctggctggggtggcctgcttttcttcccttatctggccccacccacgtcctgctgattggtccattttacagagagctgattggtcattttgacaaagtgctgattggtgcgtttacaaacctttagctacacacagagtgctgattggtgtgcttacaatcctttagctagacacaaacgttctccaagtccccaccagattagctagacacagagcgctgattggtgcttttacaatcctttagctagacagaaaagttctccaagtccccaccatcccagaagcccagctggcttcacctctcactggcactagccacgggactttgtggcacctatccggagcacctagcccgggcactccagcagcctagagggagctcgtcccagacaatcaagagcaaaagacgggaagcaagaaagagatggagacccgccatcgtggccaacgttctggtccacgcacgggattcagcctctgatcaagccccagttcccgcccacgcctctccctccacacctcccggcaagcagagggagccggctccggcctcggccagccccagagagggtcccccacagcgcagcggcgggctgaagggctccttgaagacggagagagctgaagctgaggctgaggaggcgccaagagcgagccagggctgctagcaagttgtcatctctcattactagcattctctcaggaatatcctaccgcagggttcccgtgtttcatatacaattagtgatgaggctaatcatcctgatctcaaatttcctctacctgcccaccagctgacttaaacccctatactgtgggcatgcattctgcccactctgaaatcttaggatttaacttctcttgcttcctagaaaatgaaccactttgttcctttagtcatttattcactaataatttgttgagaggttttgttttgaggagcatgaaggatctgatgtaagaactaccaccggtgctggtgatcacaatatatgcagctgattaaagttcctcatttatgctacctacatccctggtaagaatttcattccttcaaccaatacttttcatttgaaagcatctcattacgaaagacttcaatcttttaggcttctgcatcttgcaaaacaaatatggttccaaagagcctatcttttcaacaaatctttggtttgagcctggatgaaacagttattacagaatcaactggagaggaaaaaatcttcatctaacactgaagtctttctattctgcgaggtgaaatcctttgacctagattctgtcccttgaaaggcaagtgacagtaggtgagcctaagaaaattggttaattcttgatctaaaaagttaaattcatgaaccacactgatttgattaccttgaaaatctaccagacagaaagttctcccttttatccaccttcattgttaccttcagagcagctctctccatagcaactgaaaacttttctgggctgaaataatcctctctagctcccagtgcacagtcaaagaattttaaaaacagggaactttgtaactgtgaaatactctccaggatttaaaaggctgtggagctccagataaagaatcgtttatctttcttctgaaggtaagcactggggttagaaatgcttgcatcatcctctgtcacttttaaattgctaacataacaacc

SEQ ID NO: 4679 - DNA, 2300 bp, Homo sapien
gtgatgaggctaatcatcctgatctcaaatttcctctacctgcccaccagctgacttaaacccctatactgtgggcatgcattctgcccactctgaaatcttaggatttaacttctcttgcttcctagaaaatgaaccactttgttcctttagtcatttattcactaataatttgttgagaggttttgttttgaggagcatgaaggatctgatgtaagaactaccaccggtgctggtgatcacaatatatgcagctgattaaagttcctcatttatgctacctacatccctggtaagaatttcattccttcaaccaatacttttcatttgaaagcatctcattacgaaagacttcaatcttttaggcttctgcatcttgcaaaacaaatatggttccaaagagcctatcttttcaacaaatctttggtttgagcctggatgaaacagttattacagaatcaactggagaggaaaaaatcttcatctaacactgaagtctttctattctgcgaggtgaaatcctttgacctagattctgtcccttgaaaggcaagtgacagtaggtgagcctaagaaaattggttaattcttgatctaaaaagttaaattcatgaaccacactgatttgattaccttgaaaatctaccagacagaaagttctcccttttatccaccttcattgttaccttcagagcagctctctccatagcaactgaaaacttttctgggctgaaataatcctctctagctcccagtgcacagtcaaagaattttaaaaacagggaactttgtaactgtgaaatactctccaggatttaaaaggctgtggagctccagataaagaatcgtttatctttcttctgaaggtaagcactggggttagaaatgcttgcatcatcctctgtcacttttaaattgctaacataacaaccttaaagtgttgttgttgtttttaactcataaaagtaatcccagtacctttgttactagcccacagtcatttaccagctcatctctgggccaggatcggacatgagatgctgttaacattttacatgccttaagccatcaacagaaagataatttttttttccaggaagttgattggctctaaagtcatcccccactcctttagtcaccactgagtgagtgtgtgtgtgtgtgtgtgtcatgttcttgaggtctcgaaattctgtttttctaagatgcttcctgctctagaatcttgattcttagtaaactaaaaaaaagacctgtgttttctgaacattactattttcttctagtgcttttccttgtctaaaactctttttttttcttttttcttttttcttttttttttttttgagatggagtcttgttctgtcgcccaggctggagtgcagtggcacgatcttggctcactgcaacccccgcctcccgggttcaagcaattcttctgcctcagcctcccatgtaactgggactacaggcacgtgccaccatacctggctaatttttgtattttcagtagagacgggggtgtcaccatattggccaggctggtctcaaactcctgacctcgtgatctgcctgcttcagcctcccaaagtgctgggattactggtgtgagctaccgcgcctggcctaaaacttttaaactcaacatgatgttggtcatttagtagaatttattttctctttttcatgaggaccatgaatcacttggagttctttataatgggataaacataaggtgtttcccaacctgggtcctataacttgtaccacctgttggtaaatggagaaacttacgtgacgctatgtttagtttagggagagagaatctagcaagctttttggctgctgtgcagtttgaaagtctacagccatggtgctttcctgccatttggggttagaaattacctacagacccccgctgtgtagaaacagcttgtcattgcaaatcagcttagccacccaattaatgaatcctttcaaacatgttgcaggcacaataattgaaggctttatttttcccctttaccacagaaattcctttggttacaagtttaccccataaacggcaacacactcacctccatccaagacagactcaaggtggaggaagcgtggaaatgtgcttccggacaaagctctcagtatcctgggtgccattgtttcttctactcagccgtgttttttctactgagacagacaaaccctcagcccaggatagcagaagccgtgggagttcaggccaaccggcagacctgctacaggttctctctgctggtgaccacccaccccacaaccactca

SEQ ID NO: 4680 - DNA, 2300 bp, Homo sapien
cctcttgacctcgtgatccgcctgtctctgcctcccaaagtgctgggattacaggcgcgagccaccgcacccagccaccctttcaatagtctgcagggttttctacttctaatttctttgtgatggtttgctgtaaacaagacggagggaagtctggagtgtctttcttttaatgaaccttgctgaccctctgactggaccttggtggagatggttacatatgcacagagatgagcttttatcagccacagagtcttaaaaaggccctccaggatttccctttctacaacattctggagaataaaaatcttctctggaatgtttgcttacaaatatatcaattcttgcttttaacaatcttctgagggtttaattcagataaaagtttggttatggctatcttgtgcttttcctttttttcatggaattcatttttttggttgtcctttttgacatcaatcaaaagagggatgttagaatatgttctattttagaatcatatttgattagtaagagtagaatcctcaacactctgttgactcaagaatctcctgaaatcaggcggtttgttcccactgttttgaatttaggtctttttcaactagtatttatgttcaataaacaacttaacatagctgttttaaccttccttgttattcaagaaagcaaagaccacagctctcaacttatatgggatagccaacccggaggctattctcaaggttgttttaaaatcttcagctttaaaaattttatttgctgaataattcaaatacagaatcttatatgtctatcacttcccagtgggatcttctcaaggcaattcatgaagcagtttgcagaagataaattacatttttttgaaaactgtgagttataagataaagagcacatcactgtcacacgcaattaggagagactaagatgttacctgctttaaacttgtatttaacaattctcttctcctttttttccttaggggaagtgattcagttagacaaattcttagtcgtaaagctcagcaaagacagatgtcagccagctttagttcagttgaacaatgtgggggttaggatgctgatccctgcacagttgaaaattcatgtataacttttgactctcccaaaacttaacgacttatagcctactgctggccagaagcctaaccaataacacaattaacacatattttatatgctctgtgtattatatacagtattcttacaataaagtaagctagagaaaagaaaatgttattaagaaagtcataagggggatgagtgcagtggctcatgcctgtaatcccagcattttgggaagctgaggcaggtggatcacttgaggccaggagttccagaccagcctggccaacatggcgaaaccccatctctactaaaagcataaaaataagcgggcatgggggcacatgtttgcaatcccagctactccagaggctgaggcaggataattgcttgaacctgggaggcagaggctgcagtaagttgagatcgcgccactgcactccagcctgagcgacagagtgagactctgtctcaaaaaaagaaaggaaggaaggaaggaagggaggaaatacctggagggggcgcctgggctttgtattattttgttttgggaaagaaaagaaagaagaaaagagaaacgaaatgaaaagaaaataaaatcataaagaggagaaatacatttactattagttaagtagaagtggacaatcatataggtcttcatcctcatcttcacattgaagggacggaggaggaggaggaacggttggtcttgctgtctcagaggtggcagaggtggaagaaaatctgagtataagtgaacccatgcagttcaaacccatgttgttctagggccaactgcatttttaaaataactgctttggaagatctgtgtgtatgtgtgtgtatgatctgagaaattagttagaagaaaagaggaacgaggagtagaaaaataccagcatttctgatggtcagtttcttttaattatagagagaattcagcgttcaccaaagttggcttaattactcattttctcagtagaaaatttctaagtgtggggtttgactgatttttacagaaagagaatagaagtctttcaaatttgtgggtaagaatgattcacccttcttgcttttgttaagaaataattgtgaatgttaaattacattaattttgctgcctgaattgagttttgaatgcttgctatttctttctcagccaaaggatatttaaaatgatgccaatggaactcattgattttaactacaatattt

SEQ ID NO: 4681 - DNA, 2300 bp, Homo sapien
actccagcctgggtgacaaggtgagactacgtctcaaaaaaaaaaaaaaaaaaaagggcttaaatcctgcaaaaatggatttgtttgtggttgttaacgaagcgtgaggacatgagagctgagtttatgctcagggactttgagatctaaacaaaactcagaatttcatgttttttagtggaaagtaatgacaatgaatctttaccaggcagcaagtgacatctcttattatcacataggttcttagatctaacctaaatggtgctttattaaaaatattgtaatattataatctttatattataataagctaaaaagctaaacaatgatattacaataagttaaaaagataagtagttaataagcatattacagtaagctaaatatatcacaataagctaaaaatctaaacagttaaagcaaactaagaattttaaagctttagctatcatgtttgggtctgatccattttaagttaatttttatatatggtattaggtaaacatccaactttatttattattattattattattattattattattattattagagacagagtcttgctgtgttgcccaggctgcagaacagtggcatgatcatagcttactgtaggcttgatctcctaggatcaagtgattctcctacctcagcctcccaagtagctgggactacaggcacctgccaccatgcccagctaattttaaaaaatgttttttgtacatatggcatgtcactatgttgcccaggcttgtcttgaactcttggcttcaagtgatcctcttgcctcagcctcccaaagtgttgagattacagtatgagccaccatgttcagcctgttcttttgaatgtgtatatccagtttccccagcaccatctcttgaaaggactctcctttgaccattgaatggttttggcacccttgttgaaaatcaattgatcacgtgtgcaagactttgtttctgggttctccattctcttctcttggtctatatggctgtctgtagccagtaccacactcatctgattattctagttttgtagtaagttttgaaatcaggaaatctaagatctccaaatttattctttttcaagattgttttggctatttgaggatcctttgagatttcatatgaattttagggttaatttttctattttttaaaaaaagtgattgggattttggtagagattacgtttagtctgtactttaagtagtattgatatcttaataatactaaattttccaatccatgaacgtgagatgtctttccatttattttgtttttaatttctttcagcaatgttttatagttttcagtacacaagtctttcacttttttggttaattttatttctaggtattttcttctttttgatgatattgtaaatacatttgttttcgtttcttttttggattgttcattgtttgtgtttataaatgcaactaattttgtgtgtttattttgtctttcaactttgctaaatttatatatttggattttgttttaacatcttgggagtgaaaaaatatacacctactgcttaacaaattattatttaacagaaaggtgtattctacaagcagtattttttaaaatataatgctgtagtgcataaaaatatgtacattaaagacacatttacaagtcaaaaagatcctacaacaatcacataagccctttcctcttgttttgtttttgaaacccactggaaacagaaatcaaaatttagctcattcagtgtctgtttttcccttcttcaattttaagttgtatgaatagagaaatatgcatttatgacaataaataaaggaaatctctattgtctttcaatgttagaagggatcatgtcttttgaagtccttgtgctgtatgacaaaattaatccttgcatgaatttttttcttgttcactagagcaacttttctggtatttccttaaagtttgtgatagtgaatgccaggtacaaactgccttgcttgttaggactaacacaggtttacaaatctgatgcatctacagtttgagtgtcataatgatcacagctgtgaagggacaacctatgtatggtttcatgtttctaactatctgcaagaaaagtaaaaaagtagtgtgattgacttcatggtaaagcactacaacaactagcaagatggctagatgatgtatgggagaagaaagatgaactaaggcagttcatgcactttttggatttgtaaaggccaaacggtcttcctaatttatcaatttttcagcaagttgtgatctcatagatgagtttttcagtaaattttc

SEQ ID NO: 4682 - DNA, 2300 bp, Homo sapien
ttaactgtatcaagacccattctttaagcctggcgcaaatcagtgctatggtggagatgataggtttaaaatgtctatgcttatctttgaggagaaaagtactgtatctcatgtaatttaatatatcatagtaaactatagaaggcagttgaagcctattatagtaaatttttgcatgtgtatttcaatataccaaactttcagtttgttgttacaaaataacatataaataggtttctggagctggatgggcacggtggctcacacctgtaatcccagcactttgggaggccaaggtgggcggatcatgaggtcaggagtttgcgaccagcctggccaacatggcgaaaccctgtctctactaaaaaatacaaaaattaggctggatgcagtggctcaaatctgtaatcccagcactttgggaggcagaggcgggcagatcacctgaggtcaggagttcgagaccagcctgggcaacgtggtgaaaccccatctctactaaaaatacaaaaaaattagccggctgtggtggcgtgcacctgtaatcccagctactcgggaggctgaggcaggagaatggattgaacccaggaggcgaaggttgcagtgagccaagatcgtgccactgtattcctgcctgggtgacaagagtgaaattctgtctcaaaaaaaaaaaaaaaaaaatgcctggaaaactcattacagaagtttccactgtagtaaaatttgttgaaataagttgcactcaatcatgtaaaaatgtggctccttgggactatctgaacggaatgttgtaagtgaaacaccctcaccatagtcactatcctgttatcaagaattctggatcttaaggaagtgcttgttttgtcaaaaatgtgacactaagacttttcacccctatagaaaaacctcaaccctggcctggcgtggtgtcccacccctgtgatcccagcactttgggaggccgaggccggtggattacttgaggtcaggagttcaagaccagcccgggcaacatggtgaaaccccgtctgcactaaaaacacaaaaattatctgggcttggtggcctgtggctgtaatcccagctattcgtgaggctgaggctagagaatcgcttgaacccaggaggcggaggttgcagtgagctgagatcgcgccattgcactccagcctgggcgacagagtgagactccgtctaaaacaacaacaagcaacaacaacaacaaacttcaattatgtttggaaagaagtgctaatttaatttggcaaagatgaagacagcagtcataaagcaaaacattcggtctcaggttgggtggattcccacctagttgacgaggccagctgcagattcaggtgggatcacctgatgatctttatcaatgccatttctttctctggatccttattactgacattagcaagggctttcagctgcccagaagatgttctttgcagacatttgctctcccgggctgccagcaggctttacaaatttaaaactttcagtgtaggaacccagcctccgtcgtccttcccctccaaagttaagagatctgctctaagggttcctgaggggtggtctggggccatgggaacaggatcaaggccccctgagcgccgggcctggcttctgtggcttcgcaaacttttcagcctgtgtgccacggcgacgcgcagcggctgagtcggagcccacgcggcgcgcgcctcccgcgaggaacttttcggcttgtaggctgcttgtcactctcgctttccgacgcgcctccccctggctcgcgctcccggagttccctcccctcctggcgaggacctttcccggcgcccgcggctccgatccccgccgcgctgcgcccgctctcccggccccggctgccccgctgagggctcccctctcccaggcaccgcagccgcgcccccgcgtcccgcctcccgagcggctcgcttcgcccgatgccccggccccgtcccgcgcactgagcgcctggcagcagggcgccgagtcccggggcgctgcggggcgctgcgccgagaacggccgggcctgagccctgggcggcccccagagccgatcagagcgcggggaggcgggggcgaggaggaggggacccgccgccgggggctggctgcttcgctccgagccgacttttcgccaatggtccaaagggacatgtccaagtcgcctcccacagcggcggcggcggtggcgcaggagatccagatggaactgctagagaacgtggctcccgcgggggcgctcggagccgccgcacaggtagcgagagcgcggcgcct

SEQ ID NO: 4683 - DNA, 2300 bp, Homo sapien
aatacaaaaaaattagccggctgtggtggcgtgcacctgtaatcccagctactcgggaggctgaggcaggagaatggattgaacccaggaggcgaaggttgcagtgagccaagatcgtgccactgtattcctgcctgggtgacaagagtgaaattctgtctcaaaaaaaaaaaaaaaaaaatgcctggaaaactcattacagaagtttccactgtagtaaaatttgttgaaataagttgcactcaatcatgtaaaaatgtggctccttgggactatctgaacggaatgttgtaagtgaaacaccctcaccatagtcactatcctgttatcaagaattctggatcttaaggaagtgcttgttttgtcaaaaatgtgacactaagacttttcacccctatagaaaaacctcaaccctggcctggcgtggtgtcccacccctgtgatcccagcactttgggaggccgaggccggtggattacttgaggtcaggagttcaagaccagcccgggcaacatggtgaaaccccgtctgcactaaaaacacaaaaattatctgggcttggtggcctgtggctgtaatcccagctattcgtgaggctgaggctagagaatcgcttgaacccaggaggcggaggttgcagtgagctgagatcgcgccattgcactccagcctgggcgacagagtgagactccgtctaaaacaacaacaagcaacaacaacaacaaacttcaattatgtttggaaagaagtgctaatttaatttggcaaagatgaagacagcagtcataaagcaaaacattcggtctcaggttgggtggattcccacctagttgacgaggccagctgcagattcaggtgggatcacctgatgatctttatcaatgccatttctttctctggatccttattactgacattagcaagggctttcagctgcccagaagatgttctttgcagacatttgctctcccgggctgccagcaggctttacaaatttaaaactttcagtgtaggaacccagcctccgtcgtccttcccctccaaagttaagagatctgctctaagggttcctgaggggtggtctggggccatgggaacaggatcaaggccccctgagcgccgggcctggcttctgtggcttcgcaaacttttcagcctgtgtgccacggcgacgcgcagcggctgagtcggagcccacgcggcgcgcgcctcccgcgaggaacttttcggcttgtaggctgcttgtcactctcgctttccgacgcgcctccccctggctcgcgctcccggagttccctcccctcctggcgaggacctttcccggcgcccgcggctccgatccccgccgcgctgcgcccgctctcccggccccggctgccccgctgagggctcccctctcccaggcaccgcagccgcgcccccgcgtcccgcctcccgagcggctcgcttcgcccgatgccccggccccgtcccgcgcactgagcgcctggcagcagggcgccgagtcccggggcgctgcggggcgctgcgccgagaacggccgggcctgagccctgggcggcccccagagccgatcagagcgcggggaggcgggggcgaggaggaggggacccgccgccgggggctggctgcttcgctccgagccgacttttcgccaatggtccaaagggacatgtccaagtcgcctcccacagcggcggcggcggtggcgcaggagatccagatggaactgctagagaacgtggctcccgcgggggcgctcggagccgccgcacaggtagcgagagcgcggcgccttctccttcctttgtgagccgccgggcagggcaccgacctcgggttctcccggcgcctccactgcagggatctctagcctcgcacctcctcccctcgtcgcctgcccaccctctgctcctctcctggcgccggggaccctgcccctttgcgccttttcctggctctgcctcggcttccatttttctctgcttccgaaaagccagtggggaagggcgggggagacctgccagtcctcccagacttctcccgggttgctccagctggccctcctcgccccttcccgggagaggcacatggagagacatgaatcaggggagtggactggacctgctgaagatcgtgagtccgggtgggcgggagggggcccgcttcccgcagcgctttctacgatgccgactctcctggccacgctccgagccggggtgggcgtgggtgtgaggatgatggggtgcaggtgggcaggaggggagcgaatatgggggtgccctgccggatccccccag

SEQ ID NO: 4684 - DNA, 2300 bp, Homo sapien
tgagctgagatcatgccactgcactcgagcctgggtgacaagagcgaaactctgtgtcaaaaacaaacaaacaagcaaacaaaaaacaaaaaaaaacttgaatttgaattatgtgttcttttatattacttagtgttcctctcactgaagtttctttaaaaaatcaaattgaagtcctacctacttggaatatatcatgtatggttcagaaaatggtgagggatttttttttttttccaggatgtacttcaagagccaatttacagtgtaattcagaaattttgttttactctaggtttctgatttaatcactaaagtgtccttattttctgtctatagactatgttattttccttttggaccttcaaatccacaaaggtttaactagtatatgataggaccatagaattttcacagactatgtagattatataagtttcagagtttaaattatgctattgcttatattactgataaacaaaacatggaatcattttgggacccagtttgtcagttaaataaggagattaaggcagaatttttttgtcacctctatcaacctcttagactattaataataatataaaagtgttgctttaaatcatagactttaaaggccaggcatggtgactcacacttgtaatcctagcactttgggaggctggggcaggagaatggcctggagccaggagtttgagaccagcctgggcaacaaagtgagacccctgtctctataaaaaaatttttaaaattaggctgggcactgtggcttacacctgtaatctcaacactttgggaggccaagcttggcagatcacttgagtccaagagttcaagaccagcctggccaacatggtgaaactccatctctactgaaaaaaaaacaaaaaacaaacaaaaaaaaaaagtaaaagtagccaggcatggtggtgcacacctgtagtcccagctactcaggagtctgaggcaggagaattgcttgagccctggaggtggaggttgcagtgagctgaggttgtgccactgcactccagtctgggtgacagagtgagactctgtctcagaaaaaaaaaaaaaaaaaaaaattaagcaggtgtggtggcatgcacctacaattctagctacttgggagtcggaggtgggaggactgcctgagcaaggcaatcaagagttcaaggctgcagtgagccatgattgcaccactgcacttcagcttgggcagtagagtaagaccctatctcaaaaaagccttgagaaaatactggtaaagtgttgagaattaattgtcttttatttttccaggagcctaaaggatgtagtggtggttaatctgtgacatgaaatcattaacataccttcttaggtctcaacagaatatggaatgacttgggcatgggtgcaaatttggatcaatatctgtgacacactaaagatattgcgtattagaatggctgatatcataccaatgaacagctgaatctccacatgtcttaatgattcatctttttaggtgtgacatttacatggtctttagggagaatattaggatcagctcagtccctgaaaactgggtctttagggaaagatctaaataatagcttacaaagaatattgacttgggagctctcacacttggaaggcagccttatgtagtttattatatctaaatcataggtggtatgagatctaatgaattaatgaggtctgagtcggatcaaattcgccttccagagttatgtttatttaacatgctttaacccagaaaatgaacatttgccagcgagcaccaaacaactgtgcgccgcagtgcttgagcgagtcaggtcctgaggccactctggcgatcctccttacaattcatgtgaaatacctactgcaggacaaagcatctgacggtttggaggatgtttctgtagtcctaggaatccacagtgaattcgagtctagactcagtcatttttcagggtcaggggaggagggagaagtagcaaatcagatatgcccaaaacgttacagaggtaacagtgaatccaggatgctgctgtcagcctgtgcattgtgaagaaggcaatcataggcgagcagccgcgggagcaggaacagcagcgtgctaagaagcagtcacataaacagcagcaggagtaggcctcctgcttttcaaaagcagagtactgcagggtcgcgaaatgcaagacactcagatgtttgaaaatctcccgagttgagaatggctactgtaaaagcgtcaccaagaaactctgacgatctggacagtcctaactctgtgttagcaatactta

SEQ ID NO: 4685 - DNA, 2300 bp, Homo sapien
ctccttccttccttccttccttccttcctgacttcctgccttcctgccttctttccttctttccttttttttttttttttttttgaaagagggtcttggctccacccaggctgcagtgcagtggtatgatcatagctcattgcagcctctacctctcaggttcaaatgatcctcccaactcagcctcccaagtagctgggaccacaggcacatgccaccatgcctagctaatttttaaatttttttgcagagacggggtcttcctttgttgcccaggctggtttcaaactcctgggctcaaatgatcctcccacctcggcttcccaaagtgctggaattataggcgtgagctaccatgcccagcctgtttcccgttttttactacagcccctcggtgtagctagggacatttcattcatgcacctccctgtgtactcatgtgagggtatccctgggtatgtactgaggggtgggatgccaagcctgagtacttgtgcatcaacagtttcattatatcctgctaaatatctaatgtgactgtaccagtttatactcccaccaacaggctgggcacagtggctcatgcatgtaatcccagcactttgggaggccaaggcaggcagatcgcttgaggtcaggagttcgagactagcctggccaatatgctgaaaccccgtaactactaaaaatacaaaaattagccagctgtgatggcactggcctataatcccagctactcaggaggctgaggcaggagaatggcttgaacctgagaggcagaggttgcagtgagccgagatcgcgccactgcactacagcccgggcaacacagcaagactccatctctaaataaataactaagatattctcccaccaacagtatgtgaaagtctagttgctctgcatcacaggcttacaaaccttttctgtaaagggccacgtaggacatatttaaggctttgtgagttacatggtctctgttgcaatgactgctcttgtaaagagcacaaaagcagccatggagcatacgtaaatgaacaagcccgtatgttccaataaacatttatttaagaacattgatttgaatttcaggtaattgtcatgtgccacaaaataccattctgttttttattttttccccagtaatttaaaaatgtaaaacacattcttagtttgtaggttatacaaaacaggtggctgactgagcttgactgtgggccatagcttgccatccccttcttgacattttcaccaagatctgagattttcagattttttaaaaatatttccaccatgatggatgcaaaatggtaaactgtgatttcagtttgtatttcctgattagaaaggaagtcctgtgtattgaccactagaattttatctcctatgatttatctattcacgtcttgttttccatgttcttttagttgtgggtcttttggttgtgagccttttgatttataggagttctatttcctggatagtaatacctatatatatacatatatgtgtgtgttgcaagcatgctctcagaatattgtgtttattatttcaatgtttaatgctgtcttttaatataaagaagtttttaatttacaaaaggtaaatgtctccaagtgatactcatttgactgtgaaaaaaattagattttccatacacactgagaacttgaaaggcaacgaaaaaagaaagatatcactttcttgtgtgcaaaagagaaaatatttcttcagtgggtgggagtagaaaaatatttttacttttattgcagactttcaagacagtagtttctttgaatgctaacagcttatccagttatgcaacctgttgttctgttctgaagaaaggattctcgagcagggctggagtcctggctgcctggagggacctgtcgcatctgatactaatgaagtgttactgtactttgacaagtttgcaggcgtctgtcttccaagccagctgacgtaattcagaggagaataagaccctcccacttgcgtttgttaattgactttgatgagctcctctgctctgcctaagtggttctggaacagagagctgttgtgatccgacgaactttagaaagtcacactaactaagactacacaccccaagccagcaagaaaaaggaaagcagttgctatgctgttcagcaaagcaagacttggctgccttttagctagtcctgaattcttgctcctgtgaagaaaattcctgctggagtgctgggcgcacttggaattggtctagcatgcttgacagacgccttatagctcctcaaactaaatacattattcct

SEQ ID NO: 4686 - DNA, 2300 bp, Homo sapien
agctccatctgaatattagcaaaggactttttatatcttattttaaaataatgaatgagaccgggaatgcgaccgcgggaatgagaccgcacaaaattatgtgtgggtgttatgcggccctctctttatgtacttcctgtcattgctgggttcttactgatagaagctttgtcttttcattgaggtgtgacttgaacctgtagcggggtgattgggtctaacatggcaagactggtgacagtggggacaggggccccttatggggtataattatgcttcctggtaattttctactgtgctgctactactataagaagccctctaggaagatcaggaatcccctaccaggtgtgtatgtgttgacacactcatttctcccttgtaaatttgcttgaacgaagagtttgcagtgcatttttatcccccatgcattttacagtcacatcataacaataggtgatctattaatttacgtcaagataccacaattgaggtacaactgatcactaactttcattctgaaacccctattctacgtattttctagtatttgggtcttgaagattatattagtgcagagtgccaggtggggagggaggaagggtagaagggaggaggagggaggaagactttttgagatagggtctcactatgttgcccaggctggtctcgaactcatgggctcaagcaatcctcccactttggcctcccagagtcctagggttacggtcgtgagccactgcagccagctgtggttcttaagtattcttaagaacacttttttttttcatttttatttgtacaaaatattctcccaccacactcaaacaaatgcagtttagactacaatgagagcattttgtttatgtcaagaaaacaaagtgtatatttcttaataagtaaacttttaaaatgtaatttcattagtacaggaaattaataactttagtgtctttccttcttcagcctcactcacctcatctacaagcagagttgggactcaattattctgtgaattttaactccaactaataaattaaccaagctttgaaatttccttgtaagtatggttataacaattcacactgctgtttatgccagtggctttatttcaaatggtagtttctcagttggagaagcagttcgaagtcattttgagctcctttaaactcaacgctttataaagcggtgattactttcgtgtcctaattaaatggccacgtcactctcttgcatcttgtttggaaagtcacaagcaataaagaactgtgctatattatgactgatgagcattatttgatttttgctatgcaatattgcatatgatatttactacctgtgaacctccttgtggtataggacacacttagtggagcaggtaatggaaagggattattaaaggaaacgatctcatgctttgtttttgagagaaggtttcatctgaaacagaaacagacacacataccacgagcccgattactatagaaccgaagagacctttccagctgtttacacttcggatgtaaaatggcaatttgacatagactaacagtgtgatgtgagcatctgcgtaaaaaggcgacatatggagcatgcccagtgtgggagtgcgtcctcctccctccgcctcccccctccccctcgagatctccaaagataaggcttgaactttgcacttgcaaatgtcactgcatacgtttttgcactagtttttttttttttttttctgcgattcttttacaactaatttcttttaacaatttgagcgcagggaagagaatgtttagggttatgagatgcattaagtttagaacgagttgatgctcggcttttgaatgcacttgtcttctttatttttaaagcaatataaagcactcgagtgtgtgttttcagcccctcctggaatgggaaaataagaatctccctggatgggagtcctctggggcagggagtgaaagccccggaggcagaaagggacggagaacaggggcttgcccagagcatggataggaaaggagctggggttctccggggctcagcgcgcactgagaacctgtgcccggggctgcagctgcggacgataaaggcgctgtctggctcatgaaggccacctggatcaggcttctgaaaagagccaagggaggaaggctgaagaattctgatatctgtgtaagcgcaagggctttcgtttgtggggagaggttattttgtctctgcttttctgttgttgcagtgagtgcaggtagagagggtggtttgatttggttaatcggatcatgattgcaggagagggaagctag

SEQ ID NO: 4687 - DNA, 2300 bp, Homo sapien
tggagctggaatggacaatggaatgaaatggagaatggaatggaatggagaatggaatggagaaaggaagggaagggaatggaatggaatcgagaatgcagaatgaaatagaatggataatagaatggaatgcggaatggaatggagaatgaactggaatggaaaaaggaatggaatggagaatggtatggagtggaacagagaatggtagagaatgaaatggataatggacgggaatggaatggtgaattttgtggaatggagaatggaatagaatggataatggaatggagaatggaatggcatgagaaatgtaatgtaatgcagaatggaatggaatggagcatggagtgcaatgaaatagagaatggaatggaatggaacggaaaatggagaatggagaatagaatgcaatggagaatagaatggcatgcagtggtgaatagaaaggaatggagaatggaatggaatggggaatggaatggagaaaggaatagaatatggaatggaatggagaatggaatggaaaatggaatggaatgcagtggtgaatagaatggaatggaggatggtatggagaatggaatagaatggaaaatggaatggagtagagaatggaatgtaaaggaatggaatggagaatggaatgaagaatgtagaatgcaatggaatggagaatggaatgaaatggagaaaggaatggaatgaaatgcagaatggaatggaggatggaatgcaatggagaatagaatggaaggagaatggaatggaatgcggaatggaatgcaatgaggaatggaatggaatggagaatggaatagagaatggaatggaatagagaatggaatggagaatggaatgctatggagaatggaatggaacggaatggagaatggaagagaatggaatggagaacggaatgggatgcagtggtgaatagaatggaatggagaatggaatggaatggaggatggtatggagaatggaatggaatggagcatggaatggaatggagcatggaatgaaatggagcatgaaatgcaatgatggagaatggtatggaatggaatggaaaatggaatatggaatggaatggagaatagaatggaatggaatggaatgcattggtgaatagaatggaatggaggatggtatagaaaatggaatggaatggagaatggaatagaatggagaaaggaatagaatatggaatggaatggagaatagaagggaatggaatacagtgatgaataggctggaagggagaatggaatagaatgaaatgtaatggaggatgtaatggagaatggaatggaatgcagtggtgaatagaatggaatgaaatggaggatggtatggaaaatggaatggaatggagaatggaatagaatggagaaaggaatagaatatggaatggaatggagaatggaatggagagtagaatggaatggaatgcagtggtgaatagaatggaatggagaatggaatagaatgaaatataatggaggctggaatggagaatggagtggaatggagaatagaatggacaatggaaaggaatggagaatggaatgaatggaatggagaatgggaaagagtggaatggaatggagaatggaatggaatgaaaaatggtatggaatggagaattgaagggaatgggtaatggaatggaatgcagaatcgaatggagcatcgaatggaatggagcatggaatggaatgaaatggagaatggagtggagaatggtgtggaatggaacagaaaatggagcattcaatggaatggagaatagaatggaatgggaaatggaatggaatagaatggagaatggaagggactggagaatggaatggaatggagagtagaatgcaatagaatggaatggaatggagaatggaatggattggacaggaatgtagaatggagtggaatagaatggagaatggaatggaatggagaatggaatggaatggagaatggaatggaatgcagaatggaatggattgctgaacggaatggattgtggaatggaatagaatgaagaagaatggagaatggaatggagaatggaatggaatgtggagtggaatggattgcggaatggaatggattgtggaatggaatagaatgaaaaagaatggagaatggaatagaatgggatggagaatggaatggaatggagaacggaatggaatgtggaatggaatggattgcggaatggaatggattacagaatggaatagaatgaagaatggagaatggaatagaatggaatggagaatggaatggaatggaga

SEQ ID NO: 4688 - DNA, 2300 bp, Homo sapien
gaatggaatggaaaatggaatgggaatggaatggagaaaagagaacatggaatgtagaatgtaattgaatgtagaatggaatggaatggagaatggaatggaatggagaatgctatggaatgcagtggagaatggaagagaatggaatagagaatgggatggaatgcagtggtgaatagagtggaatggaggatggtatggagaatggaatggaagggagcatggaatggaatggagaatggaatggagaatggaatgaaatggagtggagaatggaatggaatagagaatggaatggaatggagcatgaaatggaatggagaatagaatggaatggaatggatgatggtatggagaatggaatggaatggagaatggaatggaatggacagtggaatggaatggagaatggaatggacactggattggaatggagaatggaaaagagcggaatggaatggaggatggaatggagaatggaatggaaaggaggatggaatggaatggaaagtggaacgaaatggattggagaatggaatggaatggagaatggaatggaatggagaatggaatggagaatggaagggaatggaatggaatatggtatggaatggaggattaaatagaatggataatggaattgaatatggaatggagcatggaatagaatgaaatgaagaatggaatggagaatggtgtggaatggaagggaaaatggagaatggaatggaatcgagaattgaatggaatggaatggagaatagaatgcaatggaatgggatggacatgaatggagaatggaatgaaatagaatggagaatggagtggaatggaatggagaatggaatggaatgcgaaatggaatggaatgaagaatggagaatggaatagaatagaatgggcagtggaatggaatggagaatggaatggaatgcaaatagaatggaatggagaatggaatagaatggaatgaatagtggaatgcaatggagaatggaatggaattgagaatggaatggggaatgtaatggaatggggagtagtatggagtgcaatagagaaaggaaaggaatggaatggagaatggaaggaaatagaagggagaatggaatggaatggagaatggaatggaatgcggaatgggatggaatggagaatggaatggtatggagaatggaatagagaatggaatggaatggagaatggaatgaaatgcagtggtgaatagaatgaaatggagaatgggatgtaatggaatggaggatggtgtggagaatggaatagaatggagagtggaatggagaaaggaatagaatatggaattgaatgcagtagtgaatataatggaatggagaatggaatgtaatggaatggaggttggtaaggagaatggaatggtgtggagaatggaatggacaatagaatggaagggagaatggaaaggacttgaaaatggaaaagaatggaatggaatggaggatggaatggaatggatagtggaatgaaatggaatggaggatggaaaggaatggaatggaggttggtaaggagaatggaatggaattgagaatggaatgggcaatggaatggaagggagaatggaatggaaaatggaagagaatggaatggagaatgcaatggaatggaaaatggaatgaaatgcaatggtgaatacaatggagtggagaatggaatggaatggaggatggtatggagaatggaatggacttggaaatggaggagaatggaatggaacggagagtggaatgaaatggagaatggaatgcagaatggaatggaatggagaatggaatggaatggaatagagaatggaatggagaatgcagtggaatggggaatggaatggagaatgtaacggatggagaatggaatggaatgtggaattgaatggaatggagaatggaatgaaatggagaattgattggaatggaattgaatagagaatgtaatggaagggagaatataatggaaaggaatggggaagggaatggaatggagaatggaatagaatggagaatggattggaatggaatggagaaccaaatggagaatggaatggaatggagagtagaatggattggaatggaacagaatggagagtggagaatagaaaggaattgaatgtagaatggaatagagaatggaatggaatggagaacggaatggaatgtggaatggaatgaagaatgttagggagactgcaatggaatgtgaaatgtattggaatatggaatgcaatggagaatgaaatggaatggacagtggagtggagaatggaa

SEQ ID NO: 4689 - DNA, 2300 bp, Homo sapien
taaatattttagacagcctattggagacatttctgtgtaatcaacttggatactttggactgaacttaagcccagattcctttacctgagaggtaatctttttatagtttcttagttttcttatatactaagcaactatttataacctgtttggccagggtataaattcctatacaaccataaactctgagaattatgtcacacatggcctggggcccccaattggtcccttgatgtagttagggtaagacgtccctcataaggggtttagacaacatttctctctggtctggcaatatccattttcattctgaattctctttagcgcctatttttattagtttttcctttttgatggaagagaaaatggggattacagtaggaggagggagatggggagttaagtgaaaaatatgcatttcagaagatacaacagactgcttggctacctgatctgctgggttatttcctcgactttcaaaagaaaggcttttctggtgtccggaaacatggacaatagttgtttcctctggcaactgaagattattcagtactcgggtgattagctccttgtgaacaaggtcttgatctttaatattaatgagacctcattcactccgaattttcccaaatgtatgagccactccagaggcatacctggaattggtatagatggttccttcctggttctgtaagtactgtaaggcttggctgagtgcaaacagctcacacgtttgagcagaccagctgttgggcaagtttcctgactcaatttctacaagagtttctctatcaatcactgaatgcccattgtgtctttttccctcagtcacctgggaggaagcatctatgaataagtgccatccagtctggaagggagtttcttctaggtctggtcaaacctttgtatgataataaattaaatctaacgtgtgttccctccttagatttggatttcctgttaggaaacctgctgggttgagtgaattttcggtggtctatgttaaatcattcttttctaacataatggcttcatactttaagattctcgagtcagtaagccatctccctgctctctggttaacgtagttctaacttggtgaggcgtgcttgctctcagttttcctccaaaggttaactttctgctttcttcgactaataactgtggtagccgtgttggactggatgcattgaggccatccacaagtgactgggtctaagacatttgataggaaggccacagtctgctggcagcctccgtgttcttgagtcagcactcctaaagctactccactgtccacattaacaaaaaggtggaatggcttttctggggagagtaaggctaaaacaggggcagttatgagcctttccttcagctcctcgacttgattaacttcctcagaagtccacaggatatggttaggcttctcctgggcaaattttcgatataacagtttactgtgcagtgcatatgagtcaatccataagtggcagtatccaactaagcctaaaaatttcccgagttcttgtttagtttgaggcaagggtagggacgtgattccctcgatttgttcacaccttattcttcacttgcctgcacctactaagtggcctaaatatttaactttgggctttacatactgaagctttctttttgagactcgtagcaaccctcaaactgcagatggttaagaatatgtgtagagaagtcagttaccttccctatatcttcatcagatttgagaaggtcatccacgtactggagaaggcatatttgttctgggatgacaactttttctagaacttgttgtaaaatttggccaaaaagactgtgggagaagggaatggagaatggagaacggaatggaatggaacgtagaatggtatggagaatgcaatggaatggagaatggaatggaatatggaatggaatggagaatggaatggaaaggaaaatggaaccgatggaatggaagggagaatggaatggaatggagaatggaaaggaattggaaattgaatgaggaatggaaaggaatgggtaatggaatggaatggagaatggaatggaatggagaatggaatgggatggagtatgcagaatggaatgcaatggacaatggaaaatggaatggagaatgaaatgaaacggagcatgcaatggagtggagaatggagtggaatggagaatgcagtggaatggacagtggaatggaatggaatgaaatggagagtggaacggaatggacgatggaatggaatggagtgtaacggaggatggaatggaatggagtggaacg

SEQ ID NO: 4690 - DNA, 2300 bp, Homo sapien
tcaacattaactgtcattactataacatctagtcaagaatagtctaaatggctgggtgtggtggctcacgcctgtaatcccagcactttgggaggctgaagtgggtggatcactttgagctgaggagttcgagaccagcctgagcaacatggtgaaaccccatctctactaaaaatacaaaaattagccgggcgtggtggtgggcacctatgatcccagctactggggaggctgaggcaggagaatcacttgaacctgggaggcagaggttgcagtgagctgagatagcaccactgcactccagcctgagcgacagaatgagactccatctcaaacaaacaaaaaagtctaaatgtcctcaattctgtccgtgtgtggcactagtgaagtaatttctggcaaatgctttatcagcattttctttccatagtttatagagatgttcatccatcttttcatttagtcattcagtaagtatttgagtgcccattatggattaggcttgggtacatagtggtgtgataaagtctctatccttgtggagtttaaaatgtagttcaacttgtttctcctcctttatcgctaaaatacagattctagccatcagtggtgctatggtcaccatgaaattcaggctacagaaattcctttggaaatgtctgatttagacatttatcactttcagatgttttagccatgaaagaatctcatggatttattgaagaaatatgctatggtcaaggacaaggtattggctctagaagccaaattactagtctttatcctggctttttatttgtgagaacatggagagttgtttcaaccctaggaaccttgatttactctttaaaacagagaaaatgggctgggcgtggtggctcacgcctgtaatcccagcactttgggaggctagagagtcagatcagttgaagtcaggagtttgagaccagcctggccagcatggtgaaaccccgtctctattaaaattacaaagattagctgggcctggtggcacatgcctgtaattttagctactcgggaggccaaggcaggagaatctcttgaaccaggaggtggaggttgcagtgagtcgagatcccaccattccactccagtctgggcgacagagactcaaaaaaaaaaaaaaaaaaagagcagagaaaatgataaacaacttgcaggttgttgtgtggtataatggtcattcattattttctactctttctggtaaagagttggtgtgtcatggaaagtacctgttctatgtgtgtgtgtctgtgtgtataattcggtgtgaaaattaaagagaaaaaaacaataaaaaaccctttcctatacttatgtgtaaattaccatggtgtgctgcaaaaaacatatgtcaaggtgatagaattattttgactttcctgtacagttataaaatgactcagtgagtttggttagatatcctcgttctttgaatctatatccttgtctgcttatgatgaaaaaaaagaaaaaaaaataatggcgagggtcttccaaactctaaagaatatgtcaactatgatacaagtagcagttagccttataactaactgtaaacactgtctgtgggttttaagttttacctgagcattggatattaacagaccattagcccaactttcaaaaatatgaaccctatgaacttcacaactgaagtcagatctgtatgcctgagagaggtaaaatcatgtcatgaaatcaaacggtggctgatgcgcccaaattctggcctcatcctctaactggaggacatctggcaggacagcaactgggctgtgccttttttcagtccagcaacatcttccactcaacccacgccatttggctgtttccccattgcccctggcacctagccctccggtaccgggaactaaatatctttgaccatcccgcccgcggggtctgcctacttaacctgaggcaggtgaaagagcctcacgcagggttaggaacctccgggggcgtggcgtagcgtaacgcagtgttggggaaacttgcggctgtggattgggggaccggaaagggaggggtgggccgcaggcgccggacgtgacgtaagccggaagcgactttccgccgagaaatagggggcgcgtgtttggaaattgatagaaaagataaagggaccgagctgctgtcagcctggcttactgatctgcgtccgtttcaccacggattcagttactaagcatttttttctttttttggttctttgcaacgtgagtggcattggctcagtgatttccatgagcatctctaccagaaaacattgc

SEQ ID NO: 4691 - DNA, 2300 bp, Homo sapien
cacggtggctcatgcctgtgatgctagcagtttgggaggccaaggcaggtggattacttgagcccaggaattttagatcaacccagacaacatggagaaatcctgtctctccaaaaaaatacaaaagttagctggacatggtggtgcacatgtgtagtcccgactaatgaggtggctgaggcaagaggctcatttgagccaaggaggtcaagactgcagtgggctaagatcgtgcatctggactccagcctgggtgacagtgagaccctgtctgaaccaaaaaaaaaaaaaaaaaaaaaaaaaaggattgtaactaattttcttaagtgttcattggaaataacttcctttaattaaattggaatcccagtaaaatctctatccagttcaacaaaatattttaaagagttcaaggaagaaaaatgtcaaacaactcgggaattcaaaaaataaaactataagatgtttttaaaaggaactattacaaactaacttcagataatacttggaagagctagctgtagctgtaattgaattcaatttattacttatacaactctgatcaatttgtccattgctttttttaaacggagtctcactctgtcacctaggctggagtgcagttgtgtgatctcagctcactgcaacctctgcctcccgggttcaagcagttctcctgcctcagtctcttgagtagctgggattacaggcatgcaccaccatgcccagttaatttttgtatttttagtagagatggggtttcaccatgttggtcaggctggtcttgaactcctgacctcgtgatccacctgccttggcctcccaaagtgctggaagccaccattttttaactttcctcaacctttaaggtaatgcccattgtgattttagtttagttgatcagtctccagattaggtgtgactgatagatttcccgtcagaaaattctacctgccatatggtctgaaatcaatatgatcgccttctgtaaatatctattgagagaccaacaatttttgatgctgtaagtaatataaaagaaactcacgtctcgctcctatcattacgaaaagtgtattgataaaatgttgataaatttctgacaaagttgctttatgtttacaaagagaagccataatatcctgagtttcaaaatatctactagatcaaactagccgtaggtctatgactttggtcataattcaatcaatgagaattgacatctcttctgtagtttagggctcaatgtcaccagccttcctacatttgataaatgctccttccaacaggtacttcaaagcttgtatcatcaacacatgtagtcctttaggggctcggctgctcagtgtggcagtcatggtggcttataaattacccatttatagtaggtttttggcttttgaagctgactcaatttcttgaagcttctggtcctgtcttctctggaaacagctttgcccctctttactacagtcccattccttcgggtggagcctcttacatttcctaaacacctgaaatcttcactcctcccttagatagaaaagttgactctcttgacatgtcagaatttaggtcactttagttctttcctcacaaatgacgtttcactatcctatagccattccttcagtacatgtatattaatactatgtaacatttacagaggactttgttctagtaccatttaaagcactctacctaatttgtttggtttatagtaaaattgtgaagcaggagctattatctgtatttcacagatgaagaaactgaagtgaaaagaactttaatacttgactgaggttgcaagaactggaatctgcaccctagtagcttgacaccagaggtgtcaaagatatagattgcccaggaaccctgctaaacttcagtcatatgttaataccattttctttgtaagaatctatgttgtttgttcctttcttaggtgggaaggatacgagcaagataaagcagcgagggatttaagtctggcaacagttggactgctggattttcagagaagtgttccccaaagcaaattatagtgctaatttccaatgttccataagcgtggcaagaaaaatgggaagttctcggtaaggtatatagtattatttctagaaataaagatgaaccaatccaagattgattttttgtttgtttaatcctggcagtattcttaactaaattgtattcattcttccctttactttccagactttttaattttatttatttttttattttttgagacagagtcttgcccaggctggagtgcagtgccacaatcttggctcact

SEQ ID NO: 4692 - DNA, 2300 bp, Homo sapien
ccaaatcagcaaacaaaacttttaaatatgaaaaaatatttttaaaatattagaacagtctcattgtcaggtaaattgttcataagaaaggtgttaaaagtaagttaaaagtaaattttaacgaactgaaaacttcaacactaaagttttctgaaatttcaaagaaacaaaaccaataaaaatatcaagagccatgttcaaataaatacattcattccacttagttaaaagtagaagtataattcaaacttactgtctctaaaatatcataaaaatgtttaagaaatctatagttttttttgcttcaaatctctgcattttctttattttatttttatttttatttttttagacggagtctcactctgtcgccaggctgaagtgccctggtgtgatctctgctccctgcaacctctgcctcccaggttcaagcaattctcctgcctcagcctcctgagtagctaggattacaggcgcgtgccaccacacccggctaatttttgtatttttagtagagacagggtttcaccatgttggccaggatggtctccatctcttgacttcgtgatccacccgcctcagcctcccaaagtgctgggattacaagcatgagccccagcgcccagccaaatgtctgcatcttcatacaaaaatgctttgttcttttcagaaatggtttcttagaaatccgaaagccagaaaaaaaaaaaaaaagcagaatgtggtttacatccatgtctaacaattgaagaagctgttacggaatctaaagtttgttttgtgataatgaagctaggactaaaaatgtccttttaagccattacttacacaaacacaaaattattcacatttatggtccaactgatagtcatgaaagttaagtttgcatagggtcagtacattctttttcctctacataggaggttgaaacttgcctttaatgttgtaacgttggagcatattatcctgcatctaagtcttaaagggtctttaaaccatagcactgggaggacgtaagtcatacattctccttgtacaggttaactcaagagtttggcatgttaaaaggccacgttgccaaggttaaaatccaaccatctgactgaagtcagagtctaaaaaaattttaagcttgctcctccgtcaactggtttcaaggacattcagtttcgtttcatgccaggctgtgaagcttttcttttcaatgctagaacctaaccatggaaagtggaattgaaaacaattacacagcgaattggcttatgcgtggacttcgatctgggatccacgaacatacctaatgcttggcaaaatggagaggggtgctatgtgttattattatgtgttattattaatcacataactgaactctgtggctccaggccttccatggctcgtctcccaatcaattcttttcagaactaagaatcacgacaggggccgggcgcggtggctgagcctgcaatcccaccactttgggaagtcgaggcaggaagatcgcttgagcccaggaaattgagtccccctgggcaacacagcccgacctcgtctgcaatcgatcaatcaatcaatgagtacataaatgcataagccaatgaatgaatacgtgaatgaatagattaataaatgaatgaagaagaatcacggcagaactcctaacccctagcacgcctgcctaggggaacaggaataagtcaggaaagaaacactcttcacttctgtgagttttctaagagcagcaaacggcggctgctcacttagagaacctatggtctttcctggttttagaggtcagggaagcagctgctagcagcagagactcaaatcaaaggggagtcccacaaacgttttgaaggctgacatcagaaggagcacgcaccaagggaaatttcccacccccccgcgataccgcaaattcccagccgctggccgtttgggactctcctaccggaagtgaaaccgaagaaaacgccacgtcgaaggcgtgggttgccgtaagtgcgccgtcgtcacgcgcctagcttccggcgatgggtggtcctgggatccggaggggaggcggggtggaggcggggcttggggctgtggagaggctgtggtaggtaggtgggtacagaccgaggggactacgggtcggcgttgggctcagtgggctcgaaacaaagggctgtccggtggggattcgtcgcggcgccttctgagtggtcgggtcgaggcttctcggcctagcagtgccctcgctgcgcgatctcaggcgggttctcctcggctccgcgcagcccgcgccgcggtgggggacc

SEQ ID NO: 4693 - DNA, 2300 bp, Homo sapien
agtaaatcataccagcactaaaaataagacaattggaatatattttagcatcagtttacaaacaactttattatcaacagaaattttagctcttttctttgcaagatatatcacagctgctttgggcagtagctgaagccgaagtatgaacagtccattttgtttcttaaaatttgaagtcgtgtctgtcatagcatttttactaccagcagtatgttacttaaaaaactacatggctttccttgaatttatttgacggtattatgtaatagacttgaaacaattgccatctttgtagttatgccttgggttctaaaatgttataggaaactgctgaattgaatcctagcttttagaatattaataggagactcaaagttaatattcttaacaacttaaaattaaaaaaagtcataatctatcaaaagtttatttattggatggcattaaaacatttttgaggcagttgtctaatatgaacaataatctaaacaatatattccttaaattaagaggaaagacaagtgtcgtatttcgatcctgtttattcaaatgtgtgattttgctgaaatgaaagggataaaatgaatacttagagaataatacttcatttttgcagtactttttaattttgataaaaaagatacaaagttcataatatcaaaatatgtgttcaaaattggtattttaattttaatatttttgtaagttgatttaaattttgctcttttttcaggtgtgcttggtttattatatttagtcaagttaatttagtcgaatgtggtaacatttttctgatttatctttagttggagcacacccttgaactgaacagtggccaaaggaaagctttctgggctttggaaagtagttgtttaactttgttttaagccgttttcttagtgattctgtatcaagtagaggataagtgtagtttaacttagtttttaatataacccataatcaagaacatgagcgaaaagcagacataaatcgatatggatggtttgtggtgtgtgtgggatgtgggggaattaagaaaatgccatttacctaagcacagtttgcctgaatttctgcttggttgtgttgtttaccgtaagtactgagggtagtttccctaagtctgtcctgagaaaaagcatacttagtactcctgtatttgttcttatgaaatgactatctgccttcttgtatctagtaagattggctggctcaattttcttctgtcaaattatatggttattttttatattaccacatcagcattatattaaaagtgtttttaatagttgattgtattttgccaactactagtatagactcaaatttgctatttaatttttaaaatacaatttattttgtaaatcctttaaaaaatatttggttagttttggattagaaatgatttatgttagccatgtgttgaagatgaaattggcatcagtgtagacggtgctgattgggaaaagttcatgattaggaaattcatgtaagactttttaagagtattttttaggttttcactcaatctttcctgtcacagtaacgtgaaaactgattattctttactccaagagaatgttttaacccaagcaagtatctaatactagagcattggttctgacattcattgtaaatcagtgaactgtaagatactgtctaaaaaatgtacatttgtaattagtgcctttattcatattttgaaataagttcttagttttatattatacctgttctttagaagtcatgttagcagctaattatttcagtgatgaaataatttgtgttttatatcccccttcacctccatgtattggttagcacagtttatagtaagtgaaaagcaagggacccacctacattaccttcaggagactgttctaccttttaatttgaaaacaaggaaattaaattttaacagaaatcttttaagtatgttataaccaaagtgttcaattatccttgcaagttcaaatacagcatttttcttaattttgagcgtgtcatgtccttcatctttaaacccatcattcttattgaagcccatttgagaactcttagaattaatagaaccttttataagggaatatatggaatattttttattgttaatgtaacttaattccttaaaacctggaatattaatatatataatctattaaaagctgaagattaaatatgtaatttttgcttttagtttcttgtgttagtatgcttaaaggtatcaatacttttattctatattcattagaagaaaggtaataaatttaagtttcattgctgaaaaattttaaatg

SEQ ID NO: 4694 - DNA, 2300 bp, Homo sapien
attttcaggttattgtttgttagaaacttttgagagacatgttgtctagccagcacacttattttcatgaatgtattaccataagtaaagtttgttttttattttttattttttgcaggacaccaaggcaaccacattcaggaaagcaaatgtaatttgaactctgagtgtttagatccaaataaactcaggcaaataaaagaaattgcaaaagttagtcttaatgttgatttcttaaaatattactcagtgcaaagtgtccaacattagaaagaacaatgtaatatgaagctgtactagtgataaagaaaggccatcttgaagtcctttacactgcacagtgccaaaccactacatcctgaagactgttttccatgacagtatctgtcataaagatctgtagcacatgagtcatagtctttaacattttaatcagcaaatttaaatacaactgttttgaaaagttctttagggtagtgtttcatgaaactcaaaaacagcaagcccttggtaatatcacatattggactacatgtgcataattcactataattaactgggctccatatgattattttccttttatactttacttaagaattaatagacttataggccgggcgtggtggctcacgcctgtaatcccagcacttcgggaggccgaggcgggcggatcacgaggtcaggagatcgagaccatcctggctaacacggtgaaaccccgtctctactgaaaatacaaaaaaattagccgggcgtggtggcgggcgcctgtagtcccagctacttgggaggctgaggcaggagaatggcgtgaacccgggaggcggagcttgcagtgagccgagatcgcgccactgcactccagcctgggccacagagcgagactccgtctcaaaaaaaaaaaaaaaaaaaaaaaaaaaaaaaaagaattaatagacttattagaagacacgcagccctggactacttggtgacaactgatgaagaaaaaatgtccatcgtaggaacaaaaaaaagtaaccaagaactaaatacacacacacacacacacacacgaaaggatcctatacacacatgtgtacacacacacacacataagaaaggatcctatacatgcatgtgtacacacacacacacacacaatggagaatggaagaccaattccaggatgattgttttaagagcttaatgacacgagtaacaaatatataatgtatgataattgtataacacaatgtataatgtatgtataatgtatattttttgcctattcaggatacagtgaaaattaatgtttgtcagtaatataattctaaatcccaaaataaaatgtagcaagaagggggctcttactgatttgatttctgaaaacaaattgccataggcataactgcctattgtcatctaccaaaccacatggtccttttcaaagaaactgcagcatcagtgagcctaacagtctaatctagctaattatgtttggctggcaatacattgtccctgtggattcagtgtcttttaagcttcctgatctccactggcttaaatatacaatagattaaatgtttcaccctcaccgcgggtacattttgcttattgatgaatagggccatatgcatctattttgtgggttattattgaaaaaagtctgaattgagtcaacaaatatctgttaattccttaagcactaattgaatgcttattagttgctctgattaatttgagtaagttgtgtttgactctttgcctttactttattcaagactagtctatgttaaattctcggagtagtaatctcagtacatagcatggttagtgcatgaactgagccagggatgatcttggagttgagattgggtagggagtgaagtgtagttttgaaatgcatcaaaataccaaagcaggaaaaattggacatggaagtagggatgatcaaaacataatagaaattaggaactaagtaaagataagacagacactgacaccaagagctcagaaaaattaagaggctgaaatcaggcatgaaatcaggaagcaggaggaaacccaaaccacagggctagacaggacagatggtcaaagcctgagcatacaaccaggagctgaagggaccagcttggccgtcagttgcaagggtgtgaggcagaagcaacacaaaagatcttgatatgaagcaattatttttggtcttaaactgctgggactccagatgacccagaccacggtcagcaggcagaagccaggtaaatttatataattctcagctctgttaattcaattattgaagctacttgtct

SEQ ID NO: 4695 - DNA, 2300 bp, Homo sapien
aaagtaagctagagaaaagaaaatgttaagaaaatcataaggaagataaatatacttactgtttattaagtggaagtggatcatcagaaaggctttcatcctcatcgtcttcacattgagtgggctgaagcggaggaagaggaggggttagtcttgctctgttaggggtggcagaggaggaagaaaatccatgcaaaagcggatcctcgcagttcaaacccctgttgttcaagggtcaaccgcacaatcaggttttgatgagaagactcagttttcaaacttgattttaagcaggtatatatccgggtactcaaattcggatgtaatattacatagaacttaaacactcctagttaagcagaaatagaaaaacccagttacctaagtagaaatcaacctatgggaggaaagctcaggaaagagccagggtcctggcataataaagagtataggcatgatatatgtttgtgtttatacgtgtatatctgttgtttggaaataaagagcaaattgagtattggattaagggaaacctttcttgtttcccatgagagagccgtcctttgagcatcacatttgcaaaggtagattgattatccggatccacttccagtgggttttgtggcaagccgagacatctattgacagcatccatagactcttcagagcttggagtggaaaggaccttgaacttagaacacatgcacatttattatgtgattgaagtcgtcttctctcacttttgcttcagtaaacacttaaacaaagccatgtactttgcggtaggcaatgttctatatttattaaatatacagttaactcatccaatccattgcaaccaccttataagggcgttactctaattctctccatttgatggatggataactgaggctaggagataaactgctcattgcgggggaggtgaaattccagcccaggctgtccgggctctagatcctgtacttttaaccaatagcgctttgcttcttttccttgtatttatccctttcaaaaatgattaactgtatgcaaaataagatatcaactaacgagagggccggcaagggttaacgcggaaacagatccccgagctgaaaaaacaaaaacaaactggggagccagagcccctgaaagctccggtaggaaattcaatgggcctcctgttcctttaaactctcgctttcgcccccgctgacactttgcaaagccgcggcggcagcggcggggaccacgctgcggtgcaccaccttccgccaccctcccgcgctgggctggggtcgagggggcttcgcagagtcggtaaccgaaccggctctggtttgctttctccactccctagccactaccagaaccagcctccgcgaaggggcgagctgtggttaaccctttcgtgcccagggagaccccgccagggtcggggcggggcgcgatcgccccccgcagtcgggcgcgaaggcggcccgggagccaggtgggtgtggggcgcagttggcggagctgcccagggcgtgcgagcaggctgcgaggatggcgccccggcggcgcggaggtaccgccccgcgctcccccgatagctccccggcctgtcccctctccccgcgctctggggcagccggctgcctggggcgcacggggctggagtggccctctccctccccttcgctaggctcccccggcttaatctgttggccgcgactcctcagccagccccgaggaaagtgcagccattggacaggtctgtgcgggctgccggtttcagggaggaaggtgggagaagcctggaggagcgaaggggagggcggagggaggagggaggagggtgcggcggcagatctggcaaattgcgagctgccttccctcctcaaagtgtggagaaggagcgcgggggagcgtggcgacggcagcgcctcctccgccaccaaactcctggggctccgcgggggcttggggccacctcctcctgagcccggaggaaccctctcccgataggttccagcgtgactccctcccactccacccttttcctttcttcttcctcttttttttttttttttttaaacacatttttttcctggcttcggacctcagactgctgcagccctaaccttcccagggctcagctctttggagctgcccattcctccggctgcgagaaaggacgcgcgccctgcgtcgggcgaagaaaagaagcaaaacttgtcgggagggtttcgtcatcaacctccttcccgcaaacctaaacctcctgccggggccatccctagacagaggaaagttcctgcagagccgaccagccc

SEQ ID NO: 4696 - DNA, 2300 bp, Homo sapien
gtaagtttgaagtgtctgaaatcatcaatgctcttacattttgcaacagtgtatttctagggattgctgctgttcttcttacaaagttgtcttggagaatggattttgtatttatttaaaattatcttccttccttgaataactgccctccatcctccaagttaagcagtttcttctatttgtacttggagaatataaagaagaaaaataacctacttggagctattttctctgaaataacactttcagagtctaattcaaacatttctcttcagagatggtatctatagaatttttgtattcattctaatgataaattataaatgcatgctggagaggataggagaaaaaatagagaccctggaaaagagttactcttcatatttataatgttaaggatgtaatattgcactttgaatattaggagtatgactctgaaaatctagaaggaaatataataaaagcaatgaccaaatcaccataatatgtttaatatgcttgagctgtgtgaaattacaaatgtacaaaattctgcttaaagcatcaggtatttgttttgaaagatagtgcttggcaaataagaaacaaggagtcacataagaaacaaaaagtcatgatgataaaagtacacattgaagatttttacagttaaaaatttttttagatgaatagctagagttcaattatgcttttgatgaaaagttaaaaggtattcaaaggaaagaagatattgccaaaaagagagaaattaatttctaagtaaataactacaggtttaattctgcaataacttacctagacatcacaattttgaatttgaaacaatgaagactgcaatctgccaatgaaatatttattcagaccataaaatgagtgatcaaagtttaacattttttgagctttaaatattattatcttattaattcctgtgaaagtagaaaaatgatttatattagtgtcgggtatctaattaactgatgactgcccaaacattacaattgcattgtcacaaataatttgccttgcattttatttgtgtgtgtgcatttgcatgtgtaatctcaattgtgtatttcttagattaatattaaaattagttagcaatccctgagctgactctcctttcagacagctaaagaccttgaaagcaagaagccagcacaggattaacaatttgtcatggataatccacaaagtaaataaacctagtgtgaataattgaaagtgggttagacatgtaacataggagctattgaaagttaattcaaagccaaagttctccataataaattccctctcattatccaactgctagaatagactggcattgattaaatctctaaatagagaggcatttgtgcattgtcaatgttttaccaccttacctgcaaacatatagactttatcttcttgacagtgtgctgataatatagaggcttgagcaaaccaacaatttgaaaacgtcaccatgggtgtttagccccctttcaactttcaagaaaaaaaaaaagaatcaaaacattttctgcattttaccagatgtcgtttctaaaattcctatgctgagatggtagcttacataaataccatgaaaatgaattcactaattaaaaggacttgtgtggtaagctattgttaaaataacaagggattaataatagcaaattgaatatttgaattacttataatactgtattagcatttttagcctaataatctcatccagataatggtcactttccccccaattaaaattgtacatgttatagatttcggatttgcaaggttctaccaaattatacaagaatttgttacttaatccagaccaagtattgttaattagatactaagatattaaatatgttcctttttttccagctaccatgacattttattttcataatatgactgtaattgagttggaagtattttaatcataattttatatgggcttctttttctgaatatgtttcctatttttctaattctaggtttcatatacactggagaagtcgtacatcgaatgctaacagccacacagtacatagcacctttaatggcaaatttcgatcccagtgtatccagaaattcaactgtcagatattttgataatggtatgtgttgagtagcctattttttgctgcatgtatatttttaaacctcaagcatcagattcatgttaatgtttttgtaaactgtttattttttggtgtgtaaactgcttgatgcaaatggtctgagaggacaaatattatactgctaagatttataaagtacacaaatggcattcattcattcaa

SEQ ID NO: 4697 - DNA, 2300 bp, Homo sapien
tctctagttaggttctgatcctagtgcttcattgaatggctttgtaaatgagacacataatttttcatagccttcattttgtcatctgtgaaagagagggctttaggtgtattgatttcttaaggatccctttggcttgaaattctgattctagaatctcaaatggaaaatttgtgttcacattgcacgtggtgtttggtttttgttttcaaaagtttgtgcattaaatctcaacagcttattttcttgcagcacagtgaagagtccctaagaacatattacgtgatgggaaatgagaaataactgcactgcaagcctgatgaaggtaattcaccttggggaataggtgtcaccctgagtaacaccagtactgtctcctcaaatatgagccaaaaggtgtgtctcaggcagttttggcaagattttctccctacactcctagaaatttgcaagacaagtttacagaaattactcctccctatttccaaataaagataatgtaatagatctatagaatattagaatagtcttctggccagcagaggacttgagggaaataattggaatgcacacattctttccttttacggaacaaataaaatatacaaggaatgtccttgtggaatccactacactgggccagcatgatatggctgtaatcttagagttgtggtttccaagttcagcatgcttgaggcaatttctttttggtattttgttggtgaacaggatatgtgataccattaatttagcctgtatcaaaaactagttcaagaccaacagctccttctagaacacaacattttaggagaatagagcaatgtttccctaagcagtcggtcatatttcacagaggagtgttagttttctggggtagtgggtatgattaaaaaaaagataggtagataggtaggtaggtagattagattaaattggattagatttgatgagataaacaggtttgtgttcaggggaacacgaggttaagcaagcctaagcaggttttttggttgaaggtcttctcagaacttctagtatgtcaatatgccttgtagatctctaagtggcagggacagagactggggtacagatttcccaaacatatttgtttaagaaacctgcttttttcccccagaatcttttgtggaacttttgcctcatggaacacaatttcagaaataatttatacgtgatgactgtgtagaatgtttttcttgtcaggattttcagtttaggtaaggccaaggcattttttttttacagtacattgaaaactagatatgatatcaagagaaaaaattatgcttggctacttagaatgacatactatttttaataaatttgtattttgtatcatcagtattactattcagtgtagggtattttttatgcccaatgctaatgtgctatgacttggtaaaattaatttaccctaggatttacataaccagattaataaattgtgagttgtagggagtcttggaattgcctgaattgacattaaaatatttgttttgagaaatttttttttaaccttggttttacgtaaccaaggacatacactacattataaatattgtgatggtttatttttccaaacttttctgaatgtggggtgcccattgagtaataatgcaaatcaccaatgactttgtaaaaattgacatgatgagtagaactgcagaattcaaagatgatgatgatgatttttgaaacgatgtttccagaattgttaaattatgtatcaacatatgttaactgcaacttctcatgtttaatgatgtttacaattaatacaataccatactcgccagtataatactaacagtcataattaactcagaatagattctttgaagtggttcaaagggcttttcataataaataagtagcctctaatcagctaatataaagtgggtattttttaggatgtgagaagtactggtatgtctgataaaacatataatttaggttgacaaaatgagtttgaatgatccagattcactaccccaagtcagaaggaagtctgacattccagtgaaagctttatttagacagagacaaggaatctttgagataacaggctttggactgtgctatcttgagtgttagagctgagtagttttcccagaatctctaagtcctttttatgctcttttatgaatgaatagaattagtaaaagataaataaattttttcttttggatttcttaaccagtggaaaaaatgttgactttaaaagttcataaaatcaaattttgcttaagaatatgttatttccacttgtgaggccagcctgg

SEQ ID NO: 4698 - DNA, 2300 bp, Homo sapien
gtcattttgctagatattgccaaattctcctccactggggttgaaccagttatgtttccaacagtaatatatgacagggcctgtttttccacagtccaacagaatacgttgttaaactttggagtttttgctaatttgaaaggtataaaatgtcatgttcttttaatttatatttctcttatcaccagtaagaagcttgggcgtcctctcttacactaaggaccatttgtatctgttttctgtgaactattcatcttttgtccatattgggttgttgattttttttctcaatttttagatacttcttttatattaggactcttagcccttcatgatgcaatttccccctgctaccttgcttttgcttgcagtggtggttttctttttctgtgtacattttagattattattcatttttattttcatgtagtcaaacttatttttatgtagttgttatttttcctgtaggttccggattttgagttaggaatggtttcccactcccaggttgtaaagcaattcccctatgttttgttccacggtttcatattctgcatttggatctcatttggaatttatcttggtgtgaggcatgagaaatggatccaattatatgcttttcctgtgttgttgtaacattatttattaaggggttgtccttttctcccttttcttggatgacgtttgtcctgtggacatgggtctatctctggactgtttatctcattctatcggttaatgtttcaggagcacacagctctaataatggaaattttctttataaaatggattaaaagtactttaaaagtcaccatgacatgattcccatgattatagaaacataaagtttgaaatggtagaatttttagagataccctatgaatgggctacccttattcttccaatgtgcatagaagggaagtgaggcttacagaggttgcacaaacctatccagtatctcccagttagtcagcagtgggactggaacctatgttctcaaccagtacgttgcataattttctaaaaagtatataattttctcggaaatcatgagagactaatctcccagcaaagacttaactatagctcagatgccttctcttgccacaaaatattttttttagttttgaatttttaggatagcacataatttagcttatttttaattatcatattgcatcttaaggcatttggaatctttctgaaatgagtaatagtaataccaaaggaaaaaatattccagaattctactactgacctccagaattgtgttacttgggtcaattccttccagaattttcctatgcataatgtttcgctttattatgatcatgttaagtgggaacgattttaagagaatgacagtaatattatttatttatttatttatttaatttatttttttgaggcggagtctcgctctgtcacccaggctggagtgcagtggtgcaatctcggctcactgcaagctctacctcccgggtttacaccattcttctgcctcagcctcccgagtagctgggactataggcgcccgccaccacgcctgtatagtttttttttttatttttagtagagactgggtttcaccgccttcgccaggatggtctcgatctcctgaccttgatctgcccccgtcggcctcccaaagtgctgggattacaggcatgagccagccgtgcccggccccaatattatgcatttattatgtacttacttaagtgcactgattcaagtgctctaagtatattatcctatttaattatcacaaaactcatctgaagatgcaatctttattatttcactactactgatgagtaatgattggctctgagaaattaaataactttcccaaactcacaaactcggtgaacagtggagcttggattcttttttttgagacagagtcttgctctgttacccaggctggagtgcagtggctcaatctcagctcactgcaatctctgccttctgggttcaagcgattctcctgcctcagcctcctgagtagctgggattacaagcgcttgtcaccatgtccagctaatttttgtattttagtagcgacagggtttcagcatgttggccaggctggtctttaactcctgacctcaagtgatctgcccgccttggcctcccaaagtgctgggattacaggcatgagtcactgcacctggcctggagcttggattctaactcctgtgtgttttctccaaaaactgtatttcagccactattttcattgtgtcatgcatatatcattttggatcctgttattttattagtattttaccagaaat

SEQ ID NO: 4699 - DNA, 2300 bp, Homo sapien
agctgagatcacgccactgcactccagcccggcaacagagtgagactctgtctaaaaaacaaaaacaaaaacaaaaacaaaacaacaacgacaacaaaaaaggagggcaggataaaactctgcctgagaggttctgttttctgaggcctaaagaatcccaacattctaccacagggctgtctttcaccttcatcactgatgctattccaaagctgctttgggaaccacggaccaaagtccacatactttaacagaagagatacttattgtttcagtcacttaggaaataacaagcgtcctgggagtgatgagccatgaacgtggatggaaaccaatgtacatgtttcataatatcacaggagtatactggataaatcatttgagaagaagctgggacatttgcacgtgttattccctttctggaactttctcccaccacacatctttgtcttgttgatgactttttgtcctttaggcctcaactgtcaacagggatggtctggctagtgctctctactgtaaattcttctagccttgtatagttcttcttagcactcattttatatttatttgagtaattcttcatcctgtgaactccataagataacgaagagttccgttattttttctggacattattgtatcatcactgcctaaagacaatgcttggcatggtgataaatatctgtgattgataaatatttgtttcatgaaggaacctgtgagtgaattgaatttggttggcgacaggaaggccagtacaaagattcctgcctgcagcctcaagtccgaatgctgaaggggctgggtagctaaggtaaatgggtgaagcagactgtgaggaacatgagttgctctgggcaaccagatagaatgttctggacaggtgctcgcttggtggatgttctcttgttccttccgtggaggcggattcttcttactcagggatgtaggcttgaaccgtggtaaatatcaaggactccctgggaagaaaggacttatggagtagagaagactgaggaaacttacactactcttcattgaagtctttctggaatccacagcaatggtgactgaaagaggaaatcaggaggtaaagttagcctgcagtgggttgaggactgagtgggaagtgagaagggaaagccagtgaagggaggctcctcctttgagaggtttgtctaaaaaaaaaaaaaaaaaaaccggaggagaaacagggtcagagaagaattccagaaagatacaagggaggagagggactttctctgctgatgaggaccccttcttctgagaaactgggcgaaggttcctagtttttgaggtgaaaatggctaacgtgcaatgagaccttgttgagaggcaggaggaggtcccaggctcagagaggggagtgtgtgtggggttggggttttgctttggggaagatgtgcgtggatgtagtcctaaacgcatctccatttctactttttatcacagattttattaataggtgctgaagaaatattattggaaagatggaggcaaagctttccttggtttttgcttctgacttgaagagtcactagaagcctcaggcccttcagaaatcttgagtgggaagaggcgttatggcagggaggaccttgtgaacccgtggaaatcaagaagccattgattttctgtgcagaattctgcattgactaaaaccctaaggcctatctcccagagcttcgacagctgtttagtcagataattgtgtccgaattgattatgaaaataatagaccagccataaagcagcataaaatattatgaaactattccagaagttcagtaatatctttgggacctgctcatagcccaagttttgtgaatacttttgtagttaaaaaaaatttttactttaccagggcattgcaattcttttccatcagtgaatttcattctacagacttttcagagcatctcataatcagtcaacaaatctatttcaaatgtgtttgttactaagcaacggttgctaagagcttctgtaattaagatgaaagttccaaggtaacaatgcccaaacacagcaccattttcaccattttctgataatgcaggagtaggatggctaaaagtgaaagaagaatctactctatggaaagcatggcacctgaaatttctgaagatattggctgtcctctagcttatatgagagagagtgtttgtgctttactaatcaaccagtcatttttttcttgtgtggctgaaatgtacattccagacatgaacaggtagagtatgtgttgggggcaggtttatactgcatgggtgtgc

SEQ ID NO: 4700 - DNA, 2300 bp, Homo sapien
cacatgcctgtaatcctagcactttgggaggctgaggtgggaggatcgcttgagcccaggagtttgagaccagcatgggcaacaccgcaagatcccatctctacaaaaaatacaaaaattagcagggcatagtggcatatgcctgtggtcgcaggtactcaggagactgagacgggaggatcacctgagcctgggaggtcgaggctgccactcactgaggcagtgagtcatgactgtgccacagcactccagcctgggtgacagagttagaccctgtctcagaaaaaaaaaaaaagattaaacataacttaaagttcaaaggttagatgtaatcagctataatgtcacatatcaccaacattcttgctctgaattttgtgcttacaatttgaaaaagagaataagatattcaaactatatttcatgatctacagttatgaaaatgtaaatgtttaaaaaaaaactactgcctttcaggcgatcacatactttttttcccctcgtcatacatttctaatgagctctgaaatatttttaaaagacagctgatcctctctgacagcaaattctcattttatttgcttttgaggtggacttgtgaacatggcagtgagtgagtggctcaggggctgttgaatttggtgaatcctttaaagaagttacatcttctggaaagtcaaacagtacagcattattatgaatatgtccatcagtgcagctgtttaagaggcccagaaaccaatggttttcttttgtcatgaaaagctgcagccatgatatttttttgaaatgacagaaatatttgtcagagcagtggcagttggtatgtggcattattgagtcttaatctgtgcgctagcaacggaatgtgttcgcttctttgttataaccaatttataataatcctagctgactcttccgtggagcttcccttgagccaggccgattgaagcagttcggaactgctgactcatttaatcctcacagcaggagagtagaagctgttcggtagctgcgtccttattcccattttgtagattaaagaattgaggcatagagcgactaagaatttgcagaaggtcacatcattagatggcggggtcaggctttgaacccaggctgtgttcgattcattttgctgcctctcatcaagtgagtccaataacctgacatcttattaaaaggaagaaacgattcctgttccctttggtttcatcctaccctgagccttctacttgattttctggctcttctggtttggactacgagtttgtaattgctttccttaatgcaggtgaagaacttttcccagatctttgcggtgttgaattgcaaaacaatacaacgtatacatccacgcacacttaaaacaaaacgagccatattcatttattaatcaagagaggctcgactcgggcctaaaatgaccagtcgctctgcaaggacaggtattaaaaagcgcggggtctgggagccggtgagagaaggctctttctcatccaggatccgaggacttcccgcggacacgagggagaagcgtcctctcggaagaggcccgtgggagcgggcgcggtgcaaccctcggcccctctgggacgcaggtctccgggttccccgcggatctcccggcccttgggcctgggtgcgtcgctgcgcgcagcagagacggcctccgccctggggctgggtgccgctgtcccgggtttcactggctggaggaggagggagggcgcaccctggccccgcactccccgcgacatttgggtgccagggacgtcagtcagcctgggatgagggtgcccccggctggggaagagaagagggagggaagggagtacgcgggtttgagcactctccccaccggtgtttgtcacctcccccgcctggatccctccctccccagccgccgcccacctgggctccccggcctgcagcggcggtggcgcgaggctcactccccaggccgcacagtcgcacccacggcggtctgcggagctttccgggtctctgcccgccccctcccccgctgcgccctccctcccagggtgcccgacgtgcacgttccctgccacttcggtccgggcgcgccggtgggtttggcctgcgcggcggcggcggcgaggcgggggagcgagtgagcgcgaggggcgggcgcgagtgactgtgtgagtcacccgtacctggagtgcgagcgacgcagagccagcggcgcggagccggagccggagccgagacccagcgcctgcgagcccgagagcgcggccggccccaggcgccaggccccgtcgccctccccgtgc

SEQ ID NO: 4701 - DNA, 2300 bp, Homo sapien
tattttcagtcttttgaggaactgacatactgttttccataatggctgtaccaatttacagtctcaccaacagagatgaggagatccctgggattttgtccccaaattctgtacacttgcagttgcacattctgttctctttaatgtacatatccatacgttgtgtgaattattcggtcctggacaagtcgttattgagaacccactaagatagtaggaagtatgaggtataaaaaagagttgaacgacttgtcctcaaggagttcatgacctgctggggtgagataagatctatataccaaacaatttaaaaattatgggctgggcgcggtggctcacacctgtaatcccaacacttcgggaggccaaggtgggcagaccacttgaggtcaggatttcgagaccagcctggccaacatggtgaaaccccatctctactaaaaatgcaaaaaattagctgagtgtggtggcgcacacctgtaatcccagctacatgggaggctgaggcaggagaatcacttgaactcaggaggtggaagttgcagtgagccaagatcacatcattgcactgcagcctgggtgacagagtgagactctgtctcaaaaaaaaaaaaaaaatatggaaaatagtctcagactctatcagattataagagttttatgacagtctaggagggctataccaatttggagatgtgcagcttaattgaagatgcttaatagaagaaacttctgtggtttacgataatttctgagtaatttagcacaattaagaaattaatatttctcacagagggatgacagaaactgtaggggagttgcagtatcatttatgtccaccagatgatgccaccattcagtggaattccagagttttgctttggggatacaagtacagttgtggttaaattcaagatgatgtctagaaagatattttaacctgtttcagacataaataattttcttactgcaattttacatggagttcatgcacagaagcaatagagaatttgaaaacaaacaaagaactcctcaaatttctttcaggttaattccgtacattgacccattttcctagctgggtcttaaccacttttttgtatttgctctaagtcaagtgacaatgagattaatagaaggtggcagagagctgtgcctggagacccagtctggtagggaagaccaccaccttagaggtaaacttcttcctctattaggcatttactctcactatatatgcaaatatattccctacagcaaatctccataaacaacagattcagcccagtggaaaagccagtatggacagcctgatgcaattatattcagcattaatgaactgtgggcttcatcctaatgtgttgatatttagtaatctttgataatgaaagagggtgtagcctttgaagtcaaagtgtctgatgctgctgcatagttctaaccacgaacgttcattattttgtttgacaaattggcctgctttggaatattaaacactcagtctttagagtgcgaagaagataaaagcaactctgtttgttgtgctcatcgagactatttcccaagaagcccaaagctcttataaggttttatctgggagatcccatctctacgaatctgccttcatctctctggaggtggctgtgacaggcatgttcatttgcactctcatttagggggaggagggcccaatttctttggcccaggctgcctcggccagcccttggagttcagcatctgctgttgttgtacacaaccaacccctcttagaggactcagaaggcccctgggtaccagagggccaagacacttaggaatgccctcatggaaagccacaatgggagaagatgggacaagtgtcttccattgctctgttgtgcccagcaggaaatggggatccccacagtgcttctttggcattcttgtgagacactctgctctggcggtggtcaaaccacaatggagatgcgatgatcagtcaataatgattatgattaaagtacctaagctaagatcccttaggtacttatgctctagggattatacacactgctctggatgttttattttaactcatacgatcaccttatgagttgtatgccaattgtaatccaccctatcttcttgtttccaaagtctcttaaatttttttaaatttttttggccaggtgcagtggctcatgcctgtaatcccagcactttgggaggccgaggcgggtggatcacttgaggtcagaagttcgagaccagcctggccaacatggtgaaactctgtctctattgaaaaatacagaatttaa

SEQ ID NO: 4702 - DNA, 2300 bp, Homo sapien
cactttatgctttgcggaaaccccttaacagtatctcccaaagaaagatcaagacactttgtgaattttccccagataatgcctcatattccgaatgactgatcagagaactccggtattgttaaataaaatgagaggaaggcgagtgacgtgggagtcgaacaatggcatttctgaatctgtttgcttgattgacatttgggagcttcatgaccccagagaataggactcattacggtgaatacaccaaaacatcaaccaagattagaactctagatgctgttttaatcccattccagtccaaattatagtgggaaaatataaaatccaagtgcagagaatcactccgttatatattgacctaaagttttaattgtactaagggggaaataaaagtggaaaccctctatactttccagaattttagatagagcactgacagggaaaatgcatggatttggtagcggaggtactaagaatatttgtgtggtatacaacatgtcatacttgggagacactttattggaaaaataagtagagagttttttgtatgtatgagaaaaatatcataaccatttccacttaaaaagtgaagatcattctgatgccccaaaataactgaggctaagaaataattagataccttaaagctacagtctaaatttccatgactgtttggaagacttctctccaacgcgggaggggaatttgttttttaatgtcaaaggttgtgttagcatgtacatttaacccaggaaattgtgagaactctcttcaactcaagttggaaaaagggaatgtgtttgagcaaagtctatttttaacaacagaaaagtgtgagttaaagtggactgtgtgttaggttgggaatataatccatggcaacttcactatacaagtatttttgattcttcagtggaactcatcctcaaattttagtaacttgaaaaattgaagtcttaagtattgtgtattaaactgaaccaagagatcacagaaagacaaagctatggtaaaagatgttatagttatattctcatagatttagtaggaaaatcacagcaaaggaaatgcaccaggaagatatgaaatagaggaaatatgttacaaataatgaaatagaaggagttgctgcacaatatagcttcacaatcttatattttgaggggtaggttttaatgagaagcctctgcattgcatgggaactgggagtcgtaagaattatttatgcagtaagaaggaaaaaaattaattattaggagctcaataatcaccaaataaactctgagcttggaggttaaaaatagacggctatcttcatgttcaattatacagtatcaattactaatacaactgatgtttcagtgtctcagcgagaacagataccatcttctatggagatatcttggtattaattaatgactgctttattctcattattcacaaggaaaaataggggtcgtgtcacattaaaattaagattatcttagtttatctgggctcttaaacaaagatcattcaaagtaattatactttgaattaatcgaggtaggcaatttatctcgttatttttttttgttcaaagacaggaaaataaagatcagaaataagcaaagtttcattttgaagatagaaagaaccaaacaaacatgtcttgacttttgcagtatttcccttgctaaagggggaatgagggaactgtaaaagacgtgactttgcaaagtcaagtcctttttaaaagactcggatcgaaattcttgctatgcaacaaggattcaagtttgattaattttctgcaagcgacgtgacagcggtgttttaaaagattaattaaaattgaagtgatacggagcaggaattcaacctgcagaggcgtccctggcgccttggggggctttgtaagcgagtcccaagcccgaactgcgggctttcccgagcctgggacgcaactccccgtctcctggagaggaacgcggaatttggcagggcgcccgcctggccgcctggcatcctgagctggccgccagctctcggggggtggggactgggtgtgtcctggggaacccgctgccgagagagcagctagcgcagctcgcgacgagccattgaggaccagggtcgcgccgagaggccggagggggctccaggcagcctggagctgacggcgccgggctgcgtcctcttcacctgggggtggggggtgggggcacgtactttgtgaccaggatggtgccgagccccctctacggcgggagcttgcaggggtgcgggggtgtgactggcgctccgcggactcgtgt

SEQ ID NO: 4703 - DNA, 2300 bp, Homo sapien
taggggctgaggccatccagatctaactgaaacatttatagacaaaaggaaaatttcaaagggaataggaactaaaaggttaaggaaaaacaaaaacaatagactgaatttccatgagaaatagtgacttaaattcacacagtaaacatttcattggtgttttgttttgttttgtgatttatgatctatagatgcaacttcttagattcaagatagcaaggatctgagatacataatttgtcagactaaaggaggtgggccagaaattattagattcaactttcattaaaaaaatcactgatctctgcttcactttcttaagcctgaaacttttcctacttgatgtgtaacaagtttgtaaagttttgttcttgcttggaaagaaatccaccagtgttctgcacagaacctgactggcctcgtcacatagtattacaacaaaacactacacccaataaatgcatttctttcaggcaaaaacattacaagtgaaaatgtcaacaaaaccattcaatcctgttaaccgttcttcaatctggaataagtagaaatgtatggaaccaggaattttaaacagtgtttttaattgaaaataaagctaaagcatgcttttcaacagtgcaaatttccataattttgatttactgcttccatcatcacaacacagtacaccagcatggcccttacccagggctagaccctagcatttgcatgttgaactactttgattttaagtgcaaatatagatagtcacctctgattgtcacttgcagtagaaactctcctgctctatacacaggatggtctgaaaacacaagttttagagagatgcagaaaaagtataaggtcataaaatccaagtgcctgagttctggtaccaaaaagccctgaaaaaactgttatttttcatttggggtattgcaactctgacccctcattttctttttcttggttgtatttactgatttgtcactatcaagagttcggccatgaaatattctgctattacgagaaatatttcagcccgggcatggtggatcacacctttaatcccagcactttgggaggccgagacaggcggatcacctgaggtcaggagttcgggaccagcctggtcaacatggtgaaaccccgtctctactaaaaatacaaaaattagccggacatggtggcacgcgcccgtaatcccagctactcaggaggctgaggcagcagaatcgtttgaacccaggaggtggaggttgcagtgagccaagattgtgccactgcactccagcctgggcgacacagcgagactctctccaaaaaaaaaaaaaaaaaaaaaaagaaatatttcaattgttttgggagtttgaagagtcatgttcagaccacaagataagcaggacaatagtaagagtcaccttatttaaaacctttgggtgagaacacaaaacagacttttcctgttgcaaaggagtggctttaaaagtaaaatcacaccctttacaaaaaaaatacaattccgtatttattttactcagtatgtatgaggcagcttttactagcatttaatcaggactcacaccccaatctttccactaaaaaaaaaaaaaaaaagttaagtgcaactactcttggagagggaataaggggagtcaaaagaaaaagataccccacaaacaagagctccagaaaataacattttgggctcacagaaacttcttgctacctcacctcacctcactgtgtaaccatgtaacctaacaaactttcactgaattaacagttacactttcagctctgaaatctagtgcataaacttaatggctcattgtaatatttattattcaaccttttgacatttatttgtagcagttgaattgaggtaccgggtgcattattagcatcgaaacagtaaagtgttccagctctaccgtaataactgagttttacttgagtctttagcctgaagtagtctgtggaatgtaaaccaacccttctcccaccccgcccccaccctactccagaaaaaaaaaaaaaaacccgcaacggaaaaaaagtaatccgatttctgtcttcaaaatgcgataaaccaggactccaaagggggtgtaacacattaatggacttgtacaaaccatcctgtgcagtttacaacaaaaggaaggtaatatggttcaagaaaatatcttccaaaacatttttatgaattaaatttcctgaatttgtgactaggtggaagaggtattgcagaaccgcccagctgccatttccatataggatgggccttgtgaggagtttgagaatccttagtggtg

SEQ ID NO: 4704 - DNA, 2300 bp, Homo sapien
tctcatttggcaatattttggatatccttgaaaacgacaccaaaatttgccttaatttgactaagaagaggttaaaccacattgattttcatccaaagtgattttgttaaagcagatgcttgactttgatggaaaaactgggagttgtggaagatttacctaaactaccaaccaaaagcatcacaaaccactgaaacagtctgcatcgtacatcagcactttcttttcattgttattacgtaaaacctctggaagcaccttgggcgtttgacagtttcttttctttgctgcagaaggaagcaatctgctccctggaattctgacctgtggtgaacaggaccctggcaaaggctttgctggggactcttggacgatcccgcctccaatccagtacggttaattgtggaaaagtgtacacatttctggcttatctatgctttgttatgggtctgacgtgaaactacctcctccccaccccaccccccagcagagaaccgaaatccagttgaattgttacagtgtttcggagctggagccttgaactgcttccttggtcaaataactttgtttctggttgtaaaaaggcatttcaggaaaaaaaaaaaaaaaaaaggaaaatcgagagaaattccaaacgtaagtccgcactggggtggttcacggggcgggtttaactttggagctcccagccggtctccttccccactcctgtaagggaaataccaggctattctgcacattttcccttaagctccattttccaaaaggaaaagggggtggggtatctctctttcggcttgataatgttttttaaatgcttttctttgaaatgataatagctgtatcggtaaaatgcaaataaacgaaaaaaataggcagtatttctttaaaggcgaatatacggtgcggtttttttttttttctcccttaagcgtacacacactgcttctgatgaagtctgtgagtcaggctgtttctgagctccgatagtttaatggaaagatttatataccgactgtattatttactttgggaggggaggtggcagtataagggtatgctaattagtgggagattttggggggaaggggtggaatatcaatttttattgcatcacctgtcaggagtgtccaatcagcgctggctttaggggaattaattgatgaaggtgtctccggacgagctcacttcactctgtcattttatttgtagctaaagcagcggcgggaatagcagctgcatttcttttctctttctcccttcacattccattatcatagtgctccaatggagaaggaaggaatagaggggcccaggtactgatctgcatcggggactcagaccaacacactggcagatcagaaaccggatggttttttccctcttttttaaaaaaacgaaaacaacaacaacaaaaaagcaagaatcaagtcagtgtaatttcatggggtttccccccccccaataatttcgcctagagtttggcacttccttcgccgggaataacagtctttgttattttattagcaggatgccttgagacacacgcagcatctggctgaggattaacatacatacatgtgtatgtatgcgtcacgtatatatttactgcaaatggtggggatcatttagtgcccgagatgggagacctgaagtcaggttttgaagaggtggatggcgtgaggctcggctacctcatcattaaagggaagcaaatgtttgccctctcccaagtcttcacagatctgctgaaaaacatcccgaggacgaccgtgcacaagcgcatggatcatctgaaagtgaagaagcaccactgcgatctggaggagttgcggaaactcaaggcaattaacagcatcgccttccacgccgccaaatgcacgctcatctcccgggaagacgtggaagcgctctacacctcctgcaaaaccgagcgcgtcctcaagaccaagcgcaggcgggtcggccgggccctggccacaaaggcgccgccgccagagcgcgccgctgccgccagcccccgcccgggattttggaaggacaagcaccaactttggcggggcctgagcggagccgcgcggcccctgccaatcagcgcgcagtcccagcgcccgggcgccgccgccgcgcgccccgccgcccatctacctcagatttttagcaaataccccggctcgcactacccggagatcgtgcgctcgccgtgcaaaccccctctaaactatgaaactgccccgctccagggaaactacgtcgccttcccctcggaccctgcttattttcggagcctgctgtgcagc

SEQ ID NO: 4705 - DNA, 2300 bp, Homo sapien
cttttccgaattcctttgaacctttttttaaatggatttttgaatccatacttttcaagatatttcaaatattatataatctactgtaactttccggatccagaataataactgcccacgggtgtctcttatctatttatcactttataaacatatctatgttgctttccctttttctcataacgtgtgcgttgcaggctcgcccggcttccttcaatttcgcagcacgctgtaaaggctccttcctccgaggtcttcagctgggaacccctcgctggctgagtctgaccatcaaaacttgccgcgccggcccgacccgacccggccggagctcaggagcccggggaggcgccgacgggggtcgggttggcccgcggggcccctccctcggtcaggacgtgctcggctaacagcggtgctagggcagaacaatgggggcggcccggcgggcgcgaggagccaggtcccgcttcctccggcgcgccggccccgcgcccggcccccgccccccgaggccttccccgcctgcctcttcgcgctcgccagtcccgccgcgccttcctccagctgcccggcccggcgcacgccccgccgcccgcacgccttcttccccgcccggacctagcgggccctccttcccccgattccaacccactgcgcttcctcccaagactccagcttcttcccctcagccgccgccttcgcgcccttttctgaatgtatttttacaatttcccccttcatttccaaaagtggctgagaagtctcgcttccatcttaatgttgatttgctatttccctccggaaaagatttcctcaggaaaccccaaatctagaaggaaatacagcaaaccctagaacgcttttaacccttaagacatcttgtattaaaagaaaaaaaaagcatgtatgtcttaaaaccggccaaagaaccatctcctcgctctttatttcctcctgtaaatgctattattttaaactctccattttaaactcgtccttcggacgagagggcagagaatgtgcccggcagcacgcagcaaatcagaggttttatcttacgcctcctgggactgggaaaaaaagtggaacgtggccgagggagcttccagggcagaaaagcgacacaattcgctggggacgccgctgggccaggccaggcgggggaggcgcggcgggggcgtcgagggctctcgggctccgggccggggcgccgctgcgaggaggggaggcggttttaagtcatgggggctgggagggcggcggcgggtcgggcgtgacgagactttcggaggcaggatggggcggcggtggagttgcctgggctttctcagcaccccccccaacacacccaaataaaaaaaggaaagttagaaggaggcggagaggaggacagccatccccatttcctccccgcgacgccgcggaagggctggggccgctgcgagcagagagagggcgcgggatgaggcgggccaatcgcagtcaacaggtccaggcctcagtggggcagctgagccgggaggccggcgccccctcccctcggctccccgtccctcccctccctcgcaggcccggcgcggtaggggaggcccggcccggccctccccgccccgcgcggactcgctgcggccgactccgccggggcagtcggggtgggggtggggcgggggttccccgccggagaatcctcccccggggctggcggcgggggcggggagcgagagccgggaatggaggattaggaaggactccagctcggcacgagcgcggcccgcgcgagggatcctgggtaaaaagtggccgcgcggcaccggagagcgcggagaggagccggggtcaggggtcacggccctggagccccgcgtgcagagccccccacgtgaacgcagcgagcaggaggaacctttttgttttcgaccgcgccagcatgctcccctattgaccgagctgcttttcctgggctgctggggagaggagctccattgcggagctcttaaccccacccccaccttccaccgccaacacacttcccaactcaacccttcctctcaactctcatcccagccccccgtcctgagcttgcaataacgcagtaaatttgctttaacaacaagtgggggtggttgaatttactcctccctctcctctctcctccccttcctcttgctgcggttcttgacactactacaaaccaggactataaacataaacatgtgtcactgtaacagggcaggtaatatacggattttgaggcggggtggggtggagcggggcttggtcgccgcttggagggcagt

SEQ ID NO: 4706 - DNA, 2300 bp, Homo sapien
attttgtgaacacttatgtatacatctttaacaaaatttgtttcagatactattgtttatatacaggctgttatgaaataatacattttccctatttttaaaaatttctgaaacctcttacaaatgatacattttttttgttttgtttaggaaatagcaagtgtttacttacatttgttttaagtgttaaagaatagggcaaggtacccatccttctttacatacaaattaattccttcacaagaactaagctccaatgcattaaaaataaaacaaatgtgtttttaaataatttaatgcattaaggcttggctgcagtgtttgggaggggaagtttcacactgatttttaactcagaattgctctatagtaagagtctgaacaggacttggatattgagctggtatcctttgtataagggtgaagataaaatatatggttaagatacacaagacagtatagttttgtttgaagcccgttttagtttcataaatttttaaggtagttaaaaaatataattattatatatccagaaatgtattaattgttgtcacatcccaaaaaagaattcatattatgtagtcttgtagtcaccttttctaaatgcactatgtgaattctcattgttttagtgtatattttaattgccattactttgtatatctcagcttttaaaacatctgaatttgctatatatgctctcattgtgctgtatacctattatcactcttacacagatttctagcaattaatttgaaatagaaaaacagccatgataccttttctaacccccctttatcagaagaacatttagaaggcttttaaagcccaaaccattatattatcttttggcgaccgactaggagaacttgggttctctatgctttagcactgtgaaagtgcatcttccagatcagcacatttataatgcgaattgctgataaagaaccattttgtacctgcaaggtattaatcaaaagtcatgaattcgccttttaactgggcttgtcatttaaacaatctatgcataattctgatttcatgcgaaacttttctaattagacattttttgcttaaacatcaatattgggctttacggatgcataaggaataggcagacagtggaagattttagtttaaaagtgctcagcatccagctaattaatctatgcagataggcctaatccattttccatttgtttgtgaggtgggagctctcatctttctgccacttttaaatgacctcacatttccaagtataaatttggagaaaagacccggatcagaggaatcctccatcaaaactggacgccactgtctgatggcgttaattatgttttagcgactgactaggagggctagagttccttcttccttttggtgtaatacaactgcattttccggatcatcgtattatattgctaattccggataaaccaccatttgtcctgcacaccgagctgaggggcgccttggcgttccctctccgagtgcagccctaacacaggcttttgaccttcagcctggaatacactttcgtttgtcattggggcccacgtagtgcgaaaatgggcggcagatttggtaggacttccagcgggtgaactttgggaagagtccaggacgtgaatttaatgggtggagtggctgcggcagcactgtgaagttagcgcggccaactgcaggaagccatgcttcattacacccttcatggaagctggcacactcgccccaccctcgttttccacgggccagtcttggaggaaaaggccagcaggtaggttcccagggcacggagatgatgcccccggggactcccctctggcgattctgagaaaaccccttcccagccctgggcgtccacctcccccgccacctcccaggcctcttcccgacgctcacacgcggcccgcgccaccagcgctgcagagggcggccctaacgtccccgcccccgcgtgcgcgcccccgcgcccgttcattccggcctccgcgcgccgccggctcccctcgcgcccacccccagcacacctcggcggcggcgagcggcgcgggggagggggacggggccccggaggtaggccgggggcagccaacaggccgcggcagcgcgcacgcagggctagcctcgcccaggcctcctccctcacgccggccgcaggacgggcgcgcacgccaagtgacgctccgaggaggaagcgcagcccccttcccctccctcgctgcccctggcccagcgggagccccccctccccccagtgcgcctgtgcggaggccctcttgattatgtgtgccctctcc

SEQ ID NO: 4707 - DNA, 2300 bp, Homo sapien
aagagaaagaagaattctgaatggttggttagtgacttttactgagatgtgggagaacagaacccaaccaattttggagagaaaaataggtgtcatggacacactaagcttgaaatctctttagatgtacaagtcaaatggagataaggcagttgcacagtaggtgtctggagtcccaggcagagatgcagttagttagaaatctggggttagtgctgcacaggtgatgagagccatcagatttgatgcggactcctagagcatgaagactgagtcctggacaccctagaaaaggagaataagccagtaaagaaaggctattgagaaactgtggccagtgagccaagagaaggacagtgtggcatcttaggggcaaggtgaaggaaatgtttccagaaagggaggagtcaactgtgtaaaatgcttctgtggtagggtaagaaagaattgaccaaccgggcgtgctggtgcatgcctgtggttccagttaattgggaggctgaggtgggaggatcactggagcccaggaggttgagggtgcagtgacacctgcacctgacagggactgtttctttcttaaaggttgtctagaggctttttacagtttgggtgtgatgaaagtaaaaacctcattaaatggttcaaaaggaaatgggagggagaggaagtaaagatagcatatgggcacctcaagacatgtcactttggaaagcagaggaaggggaagcaggaggcagatgtggtgggcacacggggcagtttcgactcattttgaatgtgacagcgtgtgtgtatgttgatgggacattgctgggataggagagaagaaaggtgctagcagaggaggagatgagaacggtatttcactgccccagcaaggcaggcagagcaactggaggtgggttttatgtggagggttgaagcaatcccactttcagtgcttctgattttcttaattagaagtaaagtgatcagcagagggaaggagatgggtgttaacggttagataagaggggagatgggaaatagagaacttgtagaaggggagaaagtatggaccgagacccaagtgggattgtggctcaggtgcagggcaggcctggccctgtggacagtcgtggggcttcctccagacccatttccctagcactcttcattcagttgggctgcttggagaatgcattgcttaattaacatagaaattacaaaggctgacatcctttctaagtatatttatgtactattttgctgcagtcaaaaatatattgaaaatacttttgattctggatcattttcagtctgtttttagagtggtgttaaaggcacactgcatgtaagtgtatataaattcttaaatgctggccgggcgtggtggctcatgcctgtaatcccagcactttgggagacggaggtgggcggatcacgaggtcaggagttcgggacaagcctgaccaacgtggtgaaaccccgtctctactaaaaatacaaaaattagccgggtgtggtggcgcgtgtgtataatctcagctactcaggaggctgaggcaggagaatcgcttgaaccaggaggtgtaggttgcagtgagccgagagcacaccaccgcactccagcctggacaactagagcgagactcggtctcaaaaaaaaaaaatcttaaatgctgacactaagatgggatcttgttttttcttaccagttgcctcatcttaatatgagcactaaaactccatttatttgggtgtcttcctattaatcaagattttactctaataatagcatgtgtagctgtctcatttccagaacatggttaaggaattttcagcacaaattattgcttggagaccatgaggactaaaggactgtactttttccttcatctgccaatgtcgtgggctaaagtttgttcatttacagggatcaaacttaacgtaggtgaggattttttggaagcctccgcacagcttccgctcgacactcttgcttgactctgcttcccccagatgacttgcatgtttgctaaatccagtggtcccttctcattcttcatcttaacgtcacctggcaacggcattagacagagttgatcgcttttcctcctccttgaaacatttcctcctcttagcttccaggataccacatcatcttggtgtcttactacctaactggtcattcctttttagcatcctttcctgggtcctcctcttcagcctgagagtgcccaaggtggaattcagtgatctctcatcactgtctgtaaatagcatctctgtgctgatacttacatctccagccagacctc

SEQ ID NO: 4708 - DNA, 2300 bp, Homo sapien
gtcagaatgttcaggctgattataattacacattttcctcaacttatcgattgcatcctgataagcccatcataaggagaaaataccctaagttgcaaatacattaaatatacctaacctccggaaactcatagcttagcctagcctaccttaaacacgctcagaacacttacgtttagcccacagttgggtaaaataatctaatacaaagcctattttatttttaaaaagcgctgaatatcccatgtaatttactgaatactgtactgaaagaaaaaacaaacagaatgattatatagaccctggaagtatggtttctactgaatgcatatcactatctcaccatcataaaatggaaaagttgttctgttaaaccatcattaagttggggacatctgtaggacataagttgtaggattcttacattgagttagggctgaataaatggcttctacagtctcttctatctcttggaacaaatggaaaaaatagtttttaggctgtgcatctccttgaatattacagtctcagaccagaggaagacagtagcttctggttttctgttttatttttattactttttgtggatttagtcttattatagttctgtacagaaattttgactcttatcaaaatgtacaattttacagtttttctatatttttcattgtaattttattgcatattatatgtaattctgagattatagtataagtcaatgggagaacaaaacaatatagagcatttgattttgtgggcagattttcagaaatgtacttatggtattttcctacattgaaggttatttctaagcctcaaacgaaagagaagatttgggctatcaaacaatgaaaaagaaatagaacatcctctatattgtttctaggtatccttcctcatagctcttccacgttccttattcccatcaggacaggtggtatttccctccccctaccactgtaaatcaatgcctgccccgcctgcccgccttcccgccttcccgccttccttccttccttccttccttccttccttccttccttccttcctttctctctctttctttctctttttctctttctctttctttctccctctctccctctttctctcttccccccctctttctttctctctctcttctttgtctctttctctctctccatctctctctttctttcttccttttctttccttcctttccttcctcctctcctctcctctcctctcctctcctctcctctcctctcctctcctctccttcctttctttcctttcttttcttgttctgggctacatgtgcagaatttacaggtttgttacatagggaaacgtgtgccatggtggtttgcttaatacccatcacctaggtattaagccccatatgcattattagctatttatcctgaagctcaccctcttcccaccccaccacaggccctgatgtgtgttattccccttcttgtgtccacgtattctcatttttcagctcccacttatgagtgagaacatgcagtgtttggttttctgttagtttaatgcccttgtttcttaagcttttctttggattgcttaatatgttgatgtttatatggagagataaaagtgaaccaaaacattataaacagtgccaccttagcatgttctcttatcacttaatgaactatgtcaagaatgttaaagggtgtccgggtgcggtggctcacaccagcactttgggaggccaaggtgggcggatcaccagagatcaagagttcgagaccagcctggacaacattgtgaaacgccgtcttactaaaaatataaatattagccgagtgtggtggcaggcacctgtagtcccagctatttgggagactgaggcaggagaatcgcttgaacccagaaggtggaggttgcagtgagccgagatcttgcctctccactccagcctgggtgacagagcaagactccatctgaaaaagaaaaaaaaaaaaggtttaatgtaaggatattccctatctcacagcttactaatcttggaaatattgtatcttcaggcttaactaaattatcatcattatgaagccttccttcatcaggccaactgaaaaattctcattgtatgttctccatactaactttacagcatttactatttgtattaatcacggtagactgatagaccttagtctgtttctggcatatgcctcatgtctgtcactggttgataggaaagtgggcattctggtctacctaaccattcaggagctcagagcaatgatgtgttcaccaccttcttagctgtatccatctggaac

SEQ ID NO: 4709 - DNA, 2300 bp, Homo sapien
tttaattaaaatattttggtcaatgtgttgcaccaaattaggcctttcagtgaagatttaattctggaaatagtgtgattagaatatttaatgagttgtgttcaattaacaggttgtgtgtgttgaacacacagtgtttgtatgtgaccattttgagttttacagtcataaatgttactccttatttttaacctcaaagatatttgttcaatgattgtctgacaagtaaatttaaattgagttgaaaatttattttaaagtaacttttttatcctgatagtaccaagaaagctgatttaaaatgcatcagctttttaaaggactaggaaagcttttacttgttaatgttcttctcttccagcaaaagccaaaaatgaggaaattgccacttaattgtttacaaataaacagttttattgagaaatccaacataaacactggttgttaccacatctctttttaatttgggagttttttattttctaaaggaatatagcaatacaaaattaaaagacactcaattttataggcttttacctcattaaaaagctttgataaaatcatgtgtataaatacttcagccttgagccaccgtagtttaggggtagacataaaagcactgactagaaaatttattctgaatttgattcaattaatatgtaattcacggtaacaaacagctcttatcttgatctttctcctattgagatcctcctttttgttgctgacttcaatggtagagtctttactatagactagtagacaggtagactacacgtagctcctttagtttagatgtcactccaggagtcacatctttgggtgctgtaaaaacatgagatctggtatccacagtatattactggacacttttttgaagggtgtcagtgactagagctatctacagtgctttgaatttactcgatattataatgctgggaacgtacataaacattatctattttggataatttgttttctttttcctttttgtaatataggcacaaatagttttttttgtttttattttaaactccccgtgaaaaactgttatatttgtactgtaggtatgatgatattctgatcaatggacttccagattggcgacagcctgtattctactacaggcgggtgagaaaaatgagcaatgctgagctggcattactcttgttcattattctcacagtgggtcattatgctgtggtttggtcaatctacctggaaaaacaactggtaagtgttagtaataaatcaaatgaactagcctccttaattttatatggaattttggacatttatttttcaactgatgaaaatttctgtttctctctgtatacttctcattctaatagttttatactcaatgtttgacatatttctaagtcaagaagaacccatgaaataagaaaatattcttcttttaaaaaatgtggcacttaagtttgttataaaactttgtgaaagcccaaatatctagctgggaattagaaggtagagccatgttttcattatcaccttccaaatagaaatattttttatttaagactgattttagatttttttgtgtcacaggcctttatataatgaatgtttacttttaaaatgttttaggtaaataaataaaattggaaatgaatataatattctaacttcaattggttaaaaaaattattacacttttcttggtttaatatgctactctatagtttattctttgggtttttatttatatgttaaagataatcaaacatatttatcagtattcatgaattagcatctgtttactcattccttttgaagtgacattattaaagttggatgaatgagaaaaagtgagttgaatgctttctcttcttagaaaactttgattgctatggagatgcacatgactgacagtcctgaacttcatgtgtgtttaaggcctggataccatggcaacagttattgtgaaagattgatgattttacttaatcatgttggaccctacatacatttgcataaatgttcctctataatgtttacccttcacagaagagcctagataacatttgaagtgtacatgttaatgataacctgtaaccataattctttccacattaaggatgaactactaagtagaaaaaagagagaaaagaaaaaaaagactggcagcaagagtgtggatgtatcaaaactcggtgcttcagaaaaaaatgaaaggtgagagcatataaaaatactttataatttgaagctgttttaaaatacatctttaatatgattcaacttcatatgtatgtctatttacatgtgctctcatt

SEQ ID NO: 4710 - DNA, 2300 bp, Homo sapien
attcttagctatgagttcagctgttttctcttctgctatagtttagttatacccaaagcaaatttaatacttaagagtgctattagggaattgtctccattttcttagatgttctttatcaataactatactttttacctgaagttatttcatgggagaggtttgctgaaaatgatgatttctatattcaccttttttctccctcaacaaatctgaagtagaatgtggattgagaatagattcaggacttaaggttgattggacttcatttgaatgttgtaatcttatgttagagcacttgaaacctttttacctatacattttctcatttaaaatgaatcagtatttataagatagatttaaacataaatttttgataacatgaatgatagtttttatgaagtcatattattatatcttgatgttaatattcaagaatttcgataaacattgaaaaagaatagcaccaaatttttctggtgtagctactgccaaaccatacattactttgtagactcttgtatattacacaatttgctttttaagagtttagtactaattaatgtcctttgctttcaacattggttattccaatttgatgatattgttattaataacctaagttgatcagaaggtcaggttttctagatttgctaataaaatatattttacatttatatctgatgtttttctactgaaaaaagaagttgcctgtaataaatcctctgctttatttttttagcatatctccaaggtatcaatttaataactatcaaagtagctactgcagttgttgcatttaaattgatttacatgtcaagactggcagtttagcagctgcgctattattcctagatcggtcaatttacttgagaaaaacctactaccgagttctactgacctgcctgacaatataggccctatttctattcctgtaattaggcctgcgactaactcagaatatttttaattaaaatattttggtcaatgtgttgcaccaaattaggcctttcagtgaagatttaattctggaaatagtgtgattagaatatttaatgagttgtgttcaattaacaggttgtgtgtgttgaacacacagtgtttgtatgtgaccattttgagttttacagtcataaatgttactccttatttttaacctcaaagatatttgttcaatgattgtctgacaagtaaatttaaattgagttgaaaatttattttaaagtaacttttttatcctgatagtaccaagaaagctgatttaaaatgcatcagctttttaaaggactaggaaagcttttacttgttaatgttcttctcttccagcaaaagccaaaaatgaggaaattgccacttaattgtttacaaataaacagttttattgagaaatccaacataaacactggttgttaccacatctctttttaatttgggagttttttattttctaaaggaatatagcaatacaaaattaaaagacactcaattttataggcttttacctcattaaaaagctttgataaaatcatgtgtataaatacttcagccttgagccaccgtagtttaggggtagacataaaagcactgactagaaaatttattctgaatttgattcaattaatatgtaattcacggtaacaaacagctcttatcttgatctttctcctattgagatcctcctttttgttgctgacttcaatggtagagtctttactatagactagtagacaggtagactacacgtagctcctttagtttagatgtcactccaggagtcacatctttgggtgctgtaaaaacatgagatctggtatccacagtatattactggacacttttttgaagggtgtcagtgactagagctatctacagtgctttgaatttactcgatattataatgctgggaacgtacataaacattatctattttggataatttgttttctttttcctttttgtaatataggcacaaatagttttttttgtttttattttaaactccccgtgaaaaactgttatatttgtactgtaggtatgatgatattctgatcaatggacttccagattggcgacagcctgtattctactacaggcgggtgagaaaaatgagcaatgctgagctggcattactcttgttcattattctcacagtgggtcattatgctgtggtttggtcaatctacctggaaaaacaactggtaagtgttagtaataaatcaaatgaactagcctccttaattttatatggaattttggacatttatttttcaactgatgaaaatttctgtttctctctgtat

SEQ ID NO: 4711 - DNA, 2300 bp, Homo sapien
tagctttctatgcagtagaatatggggtaattttactctgcctatcacgcccagctgctcagcctcctgcaccaccccagaactcagcgaatgtcctgtgggaaaactggctatatgtttggggctcctctatatttccaatccatttcacagctcacatgatggttaaacatctcactggtttctctttttctgtgtaaactccctctgcccaggccaagctggatgagtctatgcccagaattagtacatgtcaccagggaagaaaacagtggatactgtcactcccttagttcagacctcagcaaaagatttattcaattgcactgtaatttttgggacaatgactgaataggtaaagaggccaagctagaagtctaaatatgaatatcactgtggtctttgcaggaacctggacaagcaagaagatcatctcagggtggacaagtgtcattggagctgggcagcatgaatttttgagtaataccttatgtccatgagaagtattattaatagaatccaattctgtttcagcatggccttagaaagaggatgggctatctttagatggagtaagtccccgaggttctcagacaacataaaggtaaaactcaaaagggaaatactaggctgtctgctacaagatcggggtaagaatcccagatttgtggcaatatggcaccagtttcaaaggttttattgcacttaatctaatgatcaaattaggagaaaagatgaatgttactataatatgtaaaagtagtgcttaagatcattaatttcatcttatttcgatgttttgttcattgaataaacagtaacctaatttagggacttggtaaagatgacgttcactttaagaaaactgatataaccaaaaataaactaggctgggggtggtggctcatgcctgtaatcccagcagtttgggaggctgaggtgggtagatcacatcatgtgaggtcaggagtttgagaccaatctggcctacacggtgaaaccccgtctctactaaaaatacaaaaaattagccaggcatggtggcaggagtctgtaatcctagctactcgggaggctgagccaggagaattgcttgaacgtgggaggcagaggttgcagtgagccgagatggtgtcattgcactccagcctgtgcaacaagagcaaaactccgtctctaaataaataaataaataaactaaaaatctgtggtagggggaatggtggtagggaggtagtcacaggattcagttcaactaattgagtgctctcatgtgctatgcattgtgctaagcacacaataataaagtccacacaagagaattgtggtggagaaaataacttgaaaagagcttgaacagaagcaatgcaagactagaaggtgagacattgttatgggagaggaggtttttagcctgtcttttaaaacagaaacatctcaattgaggtctgttttcaaaggaaccccaactggaggtgggctaaggtggataaactacatttctcctccaactatgattgagtcaccattattaactgttaattctaccaggtcattttatggtattatgcctgtaaatcttaattcataattagaagtatactttttgttttggtttcaattccttttctgctctacctctctctacttactagatttgccccttttagaacctggttcaacttgtcctgtcttctttgctgatggactaattaaatgcatggaagccataatcaattaatcaggcttcaaatatgcttttagtgttcgatagctaggggagaggaagacagtagctatttcaggggaagtccacgtggggcgttccagatggacgcgagatggctataaccgtccctgtctctcagcccatgtgggcgcaggtacagctgctccgtgcgcgccagtgattgagaggcatttcacccaggcccagatctggggcgccaggcgtccaggcttccggccacgcccccttcccgcggttgctaggagacatgatgtcaccggaagcgaggcctgggataggctgaggcgaagggaagcctcacccactgtgcagcccaggcgccgggcgctgcctctacagctgtgtgtaggcctgggggcgagggtcttcggaacgtagcgctggctgcggccccgcccgcctacccacccgcccgtccggcagccggctcccgccgcctccgcgctctgtctggggccagccacctggcgggccgctccggtgcgcctgcccgcgcttttcactgacaggcgctgttccccacagccagcgccgcccgccacgtcccagc

SEQ ID NO: 4712 - DNA, 2300 bp, Homo sapien
aaatgcattgatctttatggctgtaaccaagagagtctacatctgggtagtcatgccttttgatgatcatacttccatgtatttcaatgacttgtcaaagacacacgtttgaaacactcgatcctgtgcctccttcaaaggaagtttaaataaatatacctgtagtaggaaaattccgtttttctagcattagaacacattatggtgaaaatttttgtgagcttaaaatgtgcccatcacttaggcctaacacatgaatatacttaggcctaagaggaggaaacattctaagagaaagtacttatacatgggcaacaaagtaatatgacagctattatggaaacaatccttctgaatttcctaactttcatgcccacaaattgacaaccacttgtgtttatttttcttttaaaataatattttaaaatctatgtccatgattaatactctcttttttgacactaaattgagtattagagttatcaactcaaattctattagagtattaataatcaacgttacactaggtcataaaatacatgtgtaataaacataataagcttgggtgttgttaatattgttgaacatttacacaactctgtcctgactattctctatgtaatcaggtatcatgaagtttttcaactgacattttactactaatgagaaacaaattaggaagatgagtgatgggaagaaaagatgaacatgattaataggtgcttgtttcataaagactctagggagacttttaaatccttcactgctactatattctcaccgagtgaggagccactgcacgtgccttttaaagctttcaaaggagggctgagtagttactcaatctgttactgatgcttactccatttgcatcctgttgtgaaatgaggtacactttatgtattggtgccaaggtaaatgtcaactgtatccatcaaaaatttttaaaacagacatctaagttagaaaaagaaaataatgtttcactttgggtctaatgttgcaaataatcgctcctgaagactaaaacatctttgttgttccgcatcccttccctccacccttcaagaacttgcattttttaacttttcaagtgcttttgattaaaaatacctaatctactttgcttcacgggttttttaaagaatcattcttgttctctaaaccaacttcgtagaaatagagaggaagttaaactttatacagtatttgaatctttaaaggtatgagcatcctaaacagtaactcacttctaataaagatcttgccattcctaactgtactttactaaggtagctgtttaataaaaacgtatttatgcagattctatagagcaactaaaacgggacccatagatgtggtgagtagcacaaaatgtgtatggcagttggctttatttgcagcggcatataaaattgttaataatcctgtcaaatctgttcatgaataatttattaatccgattgctggagtgcagtgcatacaggaactctatgtatgcgtgcatgtgtacacaccccccatgcaggaaggacactactgccgtattccagaaatgacaaaaaaaaaaaagtaaaaataagcaagaatcacataattagatgtcttacagtctcataaaagggcagtgctgcgaggttaagctggtgagctaaaaaacaaacaaaacaaacaaaaaaccacaaaagcaaaatccagttgcctgagatcggagcttcccgcaggattcgcgcagagcgaggagcggggaggacgccgtttgcgggaggcgggggccgggatcccgacaccgtccgcagtctccccggggtctctcagggaaccgagctggtggccgtccgaggtaagcgccgaaccaaggagaaagcgccgagcgcgtccacaaaacgcccgaggccgcccttctcgccaaggctcggcagctcccgcggcctgcgctggacaagcgagagctggacggaaacggtgggaggccgtaggcggcggctgggggcgcgggacccgcgcgcgggcgcggaggcgggcggggaggccccgcagcccgcgccgccgccagccgccccgagccgcgtgcgcgcgcggccgcatcagctgagcgcgcggcgcgtgtcacgtggtgtgcgtgtcgaaggtcacggcgcgctcacaatggagctctcggagtctgtgcagaaaggcttccagatgctggcggatccccgctccttcgactccaacgccttcacgcttctcctccgggcggcattccagagtctgctggacgcccaggcggacgaggccgtgttaggtaagccgctcgg

SEQ ID NO: 4713 - DNA, 2300 bp, Homo sapien
accatttgtcagcagataatgaagattggttaaggatttaatgggaaaggggcatcaaaagtagtattttaagataggcttcacttgaaattaagatgttattaatagagaattggtctgtatttgctgttcttgctgattgaaataaacttctgtagtgtttagtgtaaatttcttctattcatgatgagtttggtccaataagataaacaaaattaagagcatggctttgaaaatgtctttgctttcagaaattgaattaaactgtcaaaattggattttgaaactttttaaatgactttataaagggggaagtatacataacattctaaaactgtttatattgcccatttaagactgggaaaattcaaaactacatttattagtggatatgacaacgaatttatttcatagtttttaaaaaatgaagctcattactggaaatttaagtgaaattgaatttttcaaaggcatcttctgcagagtcgttttaatgtaactatgaatcaaactttcaactttcagaaaatgtgtatacagcataacctttgttagataacttgagaaaattcagatgtatctgggcggttaaggatccggttagaaatcatgtttcagtgtgagggcaaataaccgatttgaacatgaggtatttccgaggaaacgctttttttgcccgatagtagtttgtcaaaagttaaaatcttgttgaattttaaacttgtttggaaggtgtgtcctgattttttttcttgcatctttcttgagcttggatacttctttccatgttttatcctaaaaacgtggtattgtatacacgtcttttaggacttggtggggaaacttaaagatgcttcgaaaagcctggaaagagcaactcagttgtaacttggggaagttaacgatccgcccgagtgcagaggaaaaccagaaacgccttgccttcagctgaaccaccgtttgtgcgagctggatgtccttttcagtagaaaagaattttccttttgaatttataccattcatcaattttgacactttaaaaacgtgtgaaagggttaagagggaaagatactgcccaagtatttgaatcgtttagtagtaactgtccatttatcctattttgatctttttcaagtcttctgaaaggaagtagacagtattacaccctgaataaataaggtgttgttttccacaaagagtgatgatattttgtttggatctgagttcgtgtgttattactttgtgtgaagctagataggagtagtgtgaacttttaacgatagccttttctcaggattaaagttaaacacggaggaaacgatgcgatctcctgggtttgtcgcagacccctgcttcggggctccgggggcgggcgcgggcggctgcccggcccgttacctgcgcccgagggctcgcccacagcccgaccctcggccgcccggtcccggcccggcgcggagcccctgcccggagccagccgtcgcccgcgcgcgccccgcctcggccgcccgcgggcggggaagaggccggcgcggccgcgggctggcgggcaggggcgggcgctgttgtttccgcgagcccaacttgggcgcaggttccgcgccgcggcgccggagcctgggccgcagcccgcggggccggccggggggcggcggccgcgggacgtatgcgccccgggaggaggcgggcggccgggagaaagaaagaacggggggcggggtgggctgcgcggcgtgcggggccggagcggcggccgcgcggagcagggcggcgcgtgtggcgctgtggagaaatgtctccgccgccgcggcgcggagcgagggagggggccgggcgcgcggcgcggaggggagggggcggccacgggcctgactacaccgacactaattcccaggccgcccttaaggaatgaggggagcacgtgacccgctgggggggcggcggggggagggggcgggcggactccgagccattttggagccggtgtcagtttccactctgccttcagcggtgcatttttttccaccctcccctccccctcctcccctccccccgctcgcacgcacacacacggcgccccccgcccgcccgcctcccccacagcaactatgaaataatcgtagtatgagaggcagagatcggggcgagacaatggggatgtgggcgcgggagccccgttccggcttagcagcacctcccagccccgcagaataaaaccgatcgcgccccctccgcgcgcgccctcccccgagtgcggagcgggaggaggcggcggcggccgaggaggaggaggaggaggc

SEQ ID NO: 4714 - DNA, 2300 bp, Homo sapien
tgaattgttttctttttcattgcttaactgttagtttagaggtgtgtatgtgatcatgggacattcatttaactttagaaaacagaatagtattttgttttagagttagtacattgaaaaatgggtcagaaaatacagattggttttcttgtcagtaaaagtaatctgccatattttatgcttgaattactaataatttcacttatatgcatattgtaatcactctgtgttacatacatttctccatttagtttttaagatttttttaagaaggaacctaaaataaagagcaaagatcaagcttctttaatatgtccaatttcagatatgaagtaggcatcctatattatgttttatcaggaataatacaatttaactaaaagatattgttaataacagatactcagactctaaagtaatttacatagcttttgaacgtatgttttcaaagaacttagtagcatcccatactgtgttatgtttataggtttagacctctccccctctattgagctcttaacacttttaaaatggaaaacaaatagtaaagcagttgctaaaaatggcagttggagtagcttaagagtttgaattgtttgtttaaggactgaaaccaaatataaaaacttttaaggggattttttttcatcattcaacaaggaactgaaaattacaaggcttatttgcaatcttaattatttactcaatctgtttcctcccacgtctctaaatgggaacgcataactttaattttaaaggacatattcccatagggaaatatagatatcactgtaaaacttacgactttgaattaagtaaaaagattgtggccatcactggcttttgagctgcagaagcagaagacatgtacctgcccttcgggggtattagggacccgactaaacacacttattcttctctctgattgctggaccattccccaactatttggagctccacaaagtatcaggacttcatcaagagctcagtgaagggtgagatctcaaagataaatatagaggactcattccaaatatagaaccagttaagtttgcatgctcccttctgttgaagaaatatcaaggggtttcctgtcttggcactacttagcagcagctgcggctatgtatccacttgacatctggtgaaattgtagtttttgatggaggaacatttaaagttgacaactgtcattgaaacaactggtatatagttttcaaagacaagctagaaaccagtaatagactaagtacttcaattttgttaaaagaaactgggtaaagggttcaagttatataagatagggaagtctggttttccaggtaaaggttctctctctttttctgttggagatgtcattcatcaacataacgaagcctaaatttaaaagactaagacaaaatatttacaaatcacataaaagtgaggaaacagcaaaattagtagtcattaggagaaagccagggaagacaggacattcatcacatcctttcctcatctgctttcctcactgagtctctgagtgctcattaaatgctttcaatacagtgtaattaagtgtgtgaacatggttgtcatgctcctccaggaatcttgaaaccaggaatgccaggtatataacagcgggttacaaaagaaaacacggattcctaaatcagtgttttactgtcagtgcagtgttaaatgtcaatgcaacacttaagttgcattgacattcatgtgttgatcggattgtacaatgtgacgtgtgagatttctcgggaccgtcgaagctcagacaactccagggctgcaatttactcgtctggctgccctcgaaccaggctcccttggcgcgtggggctctcccggcgcttggtcccgacccgcgccgcagtcaggataccacggcaatctggggtcgctttgtaaggagctccgacctccgggcagtgcagggatactcgacggcgcgcgatgtcccggcggctccgcgagcctggcgcgctgagagccccagcagtccgagtcctcgagctcgggcgtcttcgcgccgccgccccgctcagtgcgcccaggcaccgcggccgtgacgtcacgcccgggactggccgttgcagcaagacggccgcgttccggttccggtaggttgcccgggagacgcgggtacacagagaagcggctcccgtcggaggccgagtcgtcgccacgatcgcccccttggtggactcgcaggccgagcggcttccccgcagagctcgaggagggcagacggcggcgggggcgccatgagtcagaggcaggtgctgcaaggtagggcc

SEQ ID NO: 4715 - DNA, 2300 bp, Homo sapien
cctcaccgcccccgagcacgtcagtaagcaagtgtgcctggtggcttccccccaacagaaatttttgagtactctttttaaacaaacatccgcaccaggtgcaccacccccattccgtcatttctgaggccagttcaggagggtgagggaggggtcttcagaagactccatggtcattctgatgctcacctctggttgaaaaccatggagtgtggcaaagagagaactggcgaggaatcctcgtttgacccttcccacttgtatgacctcaaggggacacttttggagctcctgttttttcacctcatacagaaatcctactgccttgctgatggggttttgccagagatacaagagttgtctggacaaatgctttgtaaatgtctgttcccatattatacatcctgtgaaattggagtgtatcctagccaatatggctccatgttcatctctcctatcctagccaatatggctccatgttcatctccccataagccacaagttcgcctccatagtgtgccacacggcataaaatcacaggtagtttgcaagaagaaaacattactgtcagcaaaggaacgctgtgttaagctgctgtgggggaccattctctctgcattcaagcctgggctcctccatgcagccgaggcctggaaatattacaagttccccggtgaacatgggtgtctaaaaacagcacatgctcacttagcaaaactccgtgcttgccctttgcagctcaggaaactggccagtgagtgactcccttgagtgtgctggcctgcaccctgcatctcatcatggaaaaatccctcaccgtgcttctgcagggggccaggcttgcttgctctctgcagggctcagaaaggggaacagtggcacccctgtgtgctgctgcagagggaagtcagctccttcccccgtgggcaagatggagccagcagtgttgtgcctcacctggttacggtgcagggaatgggctgggggcagctgtcccagaacctgtggctgctgctgttgcccctcatgtttgagcactgagctgggggcctctgtccagaaacgaaggggtcctgaagaaatcatgcggttttaagtcatcgtcattaaggtttccctttcgccaaatgttgatgtcattctcaaggtggctccagtctgccttcttgaaaagtataacataagtattgtttccgtgacttctgaacaattccactctttgatagtaacatcccaaacgtggcctgtttgatttttttgtgagttgcaacagccccggtgtgtgtggtagcatctggtgctcctgtcgccctttgtctcatttgcagacacagatttgtaagaaccttgcttattcaaccatgagcgccaagatattttgagtgatgtttttcagagcagagactgcatggatttgaaaattgcttgctgtatattcagttgccattggaaatagctgtagatattgagtaataatttggggaaatcataaacactatgtcaatatttccttttttaaaaactgcccaggctggcgcggagatctccaccgtgaacccagaacagtattcaaagcgctttttggactttattggccacatcttgacgtaacctcctgcgcagcctcggacagacatgaacattggatggacagaggtggcttcggtgtaggaaaaatgaaaaccaaactcagtgaagtactcatcttgcaggaagcaaacctccttgtttacatcttcaggccaagatgactgatttgggggctactcgctttacagctacctgattttcccagcatcgttctagctatttctgactttgtgtatatgtgtgtgtgtgtgtgttgggggggggtgagtgtgtgcgcgcgtgtgcattttaaaagtcataaattaattaaaacagatccacttcggtcagtatgtgtcccaacaaagaccctttgattccagctatggccgaatgaatgagtgagtgagtgagtgagtgaatgaacacacgtgtgggggaggggagaaggaagtgcatgatgtcaggcaccgtgttggcatcacacaacaaactgtggatcagttttttttttttttttttttttttggagttgaaagatgtgagacagtattcagaataatgaagataataatgatgattattataataatgatgatgattccaaggaaaaaacctacagcgaatgttccatttctaccccgcacgcagacactctccctaacactgataacctgagcccccagcactggacggaagaatgctggcgtctccgtgtgtactggttcagg

SEQ ID NO: 4716 - DNA, 2300 bp, Homo sapien
tgtgtaccaccatgcctggttaatttttgtatttatggtagagatggggtttcaccatattgctcaggctggtctccaactcctgggctcaagcagtccacctgcctcatgcctcccaaagtgctgggactacaggcatgaatcactgcccccttcctaaatggtcccagtttaagtgagtgtaggggtgtgtgtgtgtgtgtgtggtgtgtgtgtgtgtgtgtgtgtgtgtgtgtgtgtcttgcaacagaatggcatcctatccagggatggttcccaccttttgcccaagctgagcagctgggataaggctcccactatctgtgaccttgaactggaataaatgagttggaaaaatgaataaatccgtgaaacaaatgactgtaaaataaaaatatgtaagtgtacattaatcataaaaatgcacgacaataaatgagataggagtgcactcagctaccatatttgtgattgtttttgaatttcatggtagcagcaggtcctacaggcaacttttgctttgcaaacacttattccttgacttaacccagcaccacagcaaccatcgctcacttaatcactagaaatttggcaaaccattatcttgtttttatcaatctttaaaaaatgtaggtaggccaggtgcagtggctggtgcctgtattcccagcactttaggaggccaaggtgggcagattccttaagcccaggagttcgagaccaacctgggcagcatggtgaaaccccatctctaccaaaaatacaagaagtttatccaggcttggtggtgcgcgcctgtagtctcaactactggggagtctgaagtgggagaatcacctgagtctggggaagtagagcctgcagtgagctgtgattgcaccactgcacccccagcctggttgacacagcgagaccctatctcaagggaaaaaataaaaataaaaaagaggtatagctcacatttattttaatgtttaatattagaagtgttttgaatttttactttgaagttcggtgatgtttttgtaaccggaaataatgctgtaggaacttaactctttttttatatgtcagcctatggcaaatttggttttgttatatgttgttttgcttaaggtgacagtttccaagaacctactccgtgaggactggtgagctgggtcagagtaaatagcacaggatgacgactgcaaggacgatatgggggcagcagggttttagacatacttggaatggcagcttcctgaggtaggccaagtattctcagcataataagggctacatttaggtgtatctggaggaagacggtgaacagatttccacggacggtgagtgcactggaaaacaggcagggatggcaagtaccatagtgatggattggaagaaggtgcactttggggcatgattctactggttaagccaagggctctcgatgaggtccgaggttcctgccccgggcacggagtgggttggcagtgacagcccagcctattacgtgggagtctccctcttgaatggctccaggaggcccatatcgagggtctgaaaggccagacggttatccgcacaaaagtattaagttcatttcagggactgacccggcaatgtgcccgggtccttcccctcggtgctgggaagccctggtctccctgcagcatttcacacctggctgggtctcctgactcgtggcgtgggtgagtgcatgagcctccctccttcgcctgatcgacgcctgggggctcctctccccaacctcctcactctgcccactctgtcctctccctccttggggagcggcaggggacgcctagccggggtccccaggctcccgctcgcaacccacggcctcctccgcgggcagggagcgaacgcccggaggtcgcccgcgcacagggggcggcccggctgcagcggagccggggcgggaaggcgcagcctaacggtccagctgccgcgccccgcgccccgcacccagtgccccgcccgcggcgccgcagccgcctcccgcctgcccgcccgccccctgcgtcatgacgccggcgcccaacgcggaagccgctcgccgcgcgccgggtccagccgcgggctgagcgcggatccgcggcgggcgcaggatacgggccggggcgcgagccgagcgcagtctgccgggccgagcgggcggagcgagccgagtggggctgagcgcgccggcggcggcgggcggagcggagcgcggcgcgccggggccgccgccggggggatgcggctgcctccccgggccggggtgtagagagggcgggtccccggcctcgggagca

SEQ ID NO: 4717 - DNA, 2300 bp, Homo sapien
cagtaccggagtctgatgaggagctacatatgtgcaatagttgaagtcacaaatataaataagatcacctagaaaagcatatagtgtgaaaagagaacaagggacagatccctgggaaatttcaacatttaagattctgtaaaaaaaccacaatagggcatatatccctataaaatcccagctactcaggaggctgagtcaggaggattccttgaggccaggaattcaagacaagcctgggcaacatagatagaccctgttgtatagaaaagatcttaaatgatggtcataaaagaaagtaggaggaagatcaagagcaagtagtaccaaggaaaccaagaaaagagtttcaagaatgaggtgtcattgagtattatatacagcagcaatgtcaagcaagatgagggctaagaagcatccaatggatatggatagttttagtgctgggatgaaaacaggtcactatagtctgaagagtgaataggaagttaaaaatatgtaagtatctaatgctggctactttttttgaaaagtcatgaccaagaagagaaagaaaacaataggataatagttagaaggaacaacaacatcaaagggattttatttgtttttgctttttagatgaggcatgggaggggcttcaacataattatataccaacaggaaaaaacgtggaagacagggagaggctgaaaatacaggtgtatattattcaaggtccaatcatataacacttgatgacgcttatattcttgaaactccctccttagtttccttgatgctacttggtcttaatccttttcctactttcatgaccattacttaagatcttttctatacagaagtcacaccggatatttgaccatggaaaactgaatacaaataattgttataaagctgtttatcaggcaatttaaatggtgagaagagaacataagatatataaaagtagcaattataagaagcatctatcattcttaggactgggagaccaacaggggccggtaggagacggaatttgcaaagtctaagaggagagggagagactttttgctaaaggcaatcaaaaaatattttatgaagatggcatttgagctgggcttaattaagtggaaatgagagaatatttcaggtattgcacatgacctgggaaatagaagctactttataaatatttgttgaaaaatgaagtgatgaacagataagcaagaaaatctagagaaaagtgtggaaaatttcgggaacagtaagtttggctggagcttggatggtggagatcggttgaaaatgtggttgcacagatggagtagagatggagcagacggtcttaaattccaggccaatgtgttgaaaatttatcttaggaagccgctgacatttgagtagggaagtgacaagactggaacgatgatttctggatggccgatttgcctgtgatacgtagaaagaactgtaagcagagagcaactgaatttctcagccagaaggccaaaaaatgacgagctggattgaagtgacaataaggatatgagaaagggaacaagcaggaaacaaaatgtaagccgccaagaagtggctgaagtgatgactgtggttggggggcatgggaggaagaagggaaattgaagctccttctgagtctaggcaattggaagaatggcaggaagaggaaagaaagaggaagagaacggggctttgaagggccatgagaagttctgtggaaacggattggacatcctagtgcaaagagatgtggcagtgcaggtctgcagcttaacggagcctgggcaggaggtggctgatgtgggtttcatctgcatagagattccggctgacgcctctatttggaagaatgcaatagtatttgcgtatttgaacccacagccagtccttgggccagaaactgaggctgaactgcctcttgatttacagcttccacccccagtttccattctcccctaaagcactggattcaggtaatcgcggacgcacttggctcctcccgcactggccgctgccctcggcgggacaatgggcgccctagcagccccgagcgttcccagggcgcaggcgcggcgcggcgtggcgtcgcctagcaacgaggcacaacaagggactgggggttcgtctgctgggtttgcggagcagctagctactcggcgggatctcccggcaggtaaaggtaaccccgtggggtggggaggcccaaggcagaggcctgaggaaaacctgggaaaggagaaggtgccacgtgggcgcagactgcttgggtcagtgaggcaacaccttgctgggcgttg

SEQ ID NO: 4718 - DNA, 2300 bp, Homo sapien
aaaaaagaaggcaagagagtcagaattggagaagacatgatggtggacacagaggtcagaagggcgtgatttctggctttgaagacgaaaggggctcactagccaaggaatgctacctggaaaagaaaaggaaatggattctgccattgggtttagctcccaaggagcacagatagccctgccaacattttgaatttcacctactgagatatatatcagacttctgacttccaaaccataagataataaatttgtgttgttaaaccactagatttgttattacagcagcaataagaaaaaaatatatttttttaaaagaaaaaagaaaaaccatatgatcatcttaatacatgcaaaacaacctttttggcaaaatctgacatccactcctgataaaatatgtctgcaaagtaggaatagatataaactttctctccctaataaaagatatctacaaaaaaaacctatggcttacaacacacttaatggtaaaaaactgaatgcttttcccctaagatcaggagcaagagaaggatgtctgctatcatcacctttattcaacattgtatgggagattctagccaatgcaatcaggcaaggaaaagaaatagaaggcatccagaaaatttgtagttaaaaactttctcacagattagaaaaagggatagaactatctctatttgatttatagaagatgacataatctggctctgttcactcaccctaattattttgagattaattcatattgtagcatttctttttattgctaccattatatggatttaccacagtttgcctgggtcatatggtaggtgtacatcaacattttaagaaactgccaaaccattttccaaagtgatttgtactgttttatattctcaccagcaatttatgagggttccagtttctctctacactagctggcacttgatgctgtccatctttttgattacagcaatccttgtgggtgtgaagtggtatctcattgcggttttaatttgcatttccctaatgactaatgatggagagaaaaatgtactttattgtcattgtatatcctctttggtgatgtatctgttcaaatcatttgttcacatatattttaaaatttggttgttttcttattcagttttagaaattatatattctggatatacatcccttacttctgtatcagacatatatttgcagaatttttctcacaatttgtagaatatcttttaaaaaaattttctagactttttttctgtaagcaatgttatgtttatagaaaaatgaggccaggcacagtgtcttgtggagcctgtaattccagcactttgggaggctgaggcaggaggatcacttgagcccaggagtttgagaccagcctgggaaacatagtgagaccccatctctacaaaaaaattcgaaaaaaaaaaaaattagctaggcatgttggtggttgcctatagtcccagctactcagaagactgaggtgagagaatcgcttgagccgaggaggtcgagactgcagagagccatgatcacaccactgcaccccagcctgagtgacagagcaagaccctgtctcaagaaaaaaaaaaaaaagaaaaaagaaaagaaaaatgggaagtagagttcccataaacacccctcctcaatttgttttctctattattacagttatcttttgcattgtattagtcaggattctctagagaaagagaaccaataggacatatgtagatatatatgaaaagatttgtaatgggaattgactcacatgattgtggaggctgagaagtcccacgacaataccatgtgcaagctggagaataaggagagccaggggtgtaattcagtctgcgtcctaaggccagagaaccaaagctgatgtaaagtcctagagttccaaggcctgagaataggagctctgatgtcccagggcaagagaagatggaagtcccagctcaaaaagagagaggatttttcctttttacaccctctgttactcaagccctcaacagattggatattgcccactcacattggtgagctcacatctttactcagtttagagattcaaatgctaatctcttccaggaacacccttgcagacacacccagaaacgttttagtagctatttgtgcatcccttagctcagtcgctttggcacataaaattaatgtgatgacatctatagacaattctaacaaatccacaaaaaagggctagaactaattaattatgcaaggaagtatttgttgagtgtctgttacatgaccggcactgtcctaggcacccaaaggtatga

SEQ ID NO: 4719 - DNA, 2300 bp, Homo sapien
tctccctctttcataaaacctaatgaacgccatgccaattaataataggagagaagatgaaaagtgaaattatcttaagaatgcttattttatcccctaggaaaggaaattaaatgctgaccctcgggctattatagtgagtgatatagggcctttggatatttttgtagaggtcaattttggttacatgtcatctaaccaaattttaattttaagggacgtcatcctagagaaagaatgggagataccacagaagggttaaatgtacaaggactggagaatgagtagaaacgaagcaaggctctgcctttgtgggatgtggtgtgtttgatggactggtttatataagccagggtgggaggtggtcctgcgagggtgacaccaactgagcccttcattctccagagctgctgtccctcttcattacgttcctgcccagtcactgtggttcagtttctttcagagctggtgccccagtcacagcctgcttacacctatggctaccagtctctttatggagatttcatttacctcctctctgatggataattgtcataacttcttttcttgaggttgtgagtcctccttcacaataagcaaattgaagtgacagtaccaaattaaatttaattcatcaccatacaggatgatgggctgaatcatatagcttcagttgtttttttttttaattttggttattattatatagtcctaaatgaaaaaatgtgtcaaaaacttagatgttcatattattgacatctcaagtatttttcttgtcttgacttctattactatgatgatttaaatggattttgaaaacagaattttgggtctccctttaaaatcaggatgctctctttatcttattgcttggaacatctcctatttatagcaattccaaacattgaagaacataactaaagtatcttccactcattaaaatgctctaatttttatttttactacctatgagctttaaactgatttaaaaataaggacagctggtgtctggagcccttccaccctggcttcatcttggaagctaagcagggtggggactggctagaacttggatgggagactgcccgggaaaaccgggtgctcaaaaacaaggactattctgtgctcttaaaagaagatttaggctatctaattgtgaaaaaatgttagtatattaatggtaactgtagtcttttactagagacaggaaatttaataactgaatatgcctacattactaaaattatctatttatatacatatcatgactttgatctttaatgtttaatttgtaaaagcagtattcacatgcagaatgatttgctgctttcaaacctgttcatctttgcctacaattaacaacctaatttgaagaagaggaagacaggctaatgaattttaacttaaatcaggagttcccatgctcactcattcctactatttaaggcttttgttttcttaatagctaggaatattttatcttcaagaaaactttctaagaattttatggttcatgtatgaaatcacacaagagtttctttaaatagaatttcctggtcttacaagtaaataaaaataataataataatggttgtaccttttttttaagaagtagtagtcgtctatttctgaggtttctaaaaagtagtaatgatatatttttctataaccaaaagctgtacaagtagaaaaagaattatttaaattcattcatagctcaaaatttcccagactccatttaaatcactagcactcaattctgggttcattgcatggcaaattaatttatttctaaaatcgtatttctgtactcatttgttttagcagcttagttgcatgctccaaagataattttttgaattcagatgaatcacattcatttctctttcatttactcagcgctgctgctgaagctgatggtattgatccattaataaacctcctgtctagtaaacgagatggagccattgccaacgctgctacagtattaacaaacatggccatgcaggagcccctgcgcctgaacatacagaatcacgacatcatgcatgccatcatcagcccactgcgttctgcaaacacagtcgtgcagagcaaagctgctctcgctgtcaccgcaactgcgtgtgacgttgaagcccggactgaggtgagaattttaataacatgtgttctctcatttttctggttagtacctactggtggattcattggaaacatttttaagtgattgaacctacctgtcatttaagtccttcaaaaccggtaaaacagtggaaaacgaattggcattgtcttgt

SEQ ID NO: 4720 - DNA, 2300 bp, Homo sapien
ggtgttaaggaagacctaaataaatagataggcatatctttattcatgggtcaaaagattcaatattgttatgatattaatttcccccaaacttatggatagaatcaatgcaatcccaatcaaaacttaagtaagatcatgtgtagaaattgacagactgaatctaaaatttatgttgaaatacaaaagacctaaaatagcccaaacaaccttaaaaaagaacagaggtacagtaccaatgctagctggttgcaagtccagtcatcaggatattgtaatattgatgtaaaaatagacaaattaattaatgggacaaaataggaagtccagaaatagacacaacacattgataggaaactgatttttgacagattcaaaaacagttcagtggagaaagagtagtcttttaaaaattggtgctaggagccaggcctggtggctcacgcctgtaatcccagcactttgggaggccgaggcaggcagattacctgagatcaggagttcaagaccagactggccaacatggtgaaaccccgtctctactaaaaatacaaaaattagccagacgtggtggcacacgcctgtaatcccagctactcaggaggctgaggcagaagaattgcttgagcctggaagatggaagttgcagtgagccaagatcgtgccactgcactccagcctggccgacagagactctgtctcaatcaatcaatcaatcaatcaataaaaatggtgctggaacaactggatatagatatgcaaaaaacaaaacagataaacaaaacaaaacaaaaattttggccatatataaaaattctaaatcggtcagagacctaaatgtaaaacctagaactataaaaattttagaacaaaacataggagagaatctttgtgatcttggattaggcaaagatttcttaaatatgataccaaaaaaagaacaatccattaacaaattgataaattgggcttcatcaaaattaaaaactgctcttcccaagacaatattaggagacagaaaagacaaacaagagactgggaaaaaaaatctttgtaaagcatatgtttgataaaagatttgcatccaaaatatataaagtgttctaagctcaataatgaaacaactcaacattaaatgggcaaaagatctgaacggacacttcaccaaggaaaatacactcgctgcaaatacgcacatgaaaagatgcttaacatcattaacgattagagaatgcataataaagccacaatgagctaccactacacagaaccggaacatctacagttaaaatctctggactttcaagtgttggcaaggatgaagaacaactggaactcgcatagactgctagtgggaaggtaaagaaaaaaaccacttgggaaaacagtatagtagtttcttaaatggttacacctaccttacgacctgggcattccacttccaggtatttaccccagagaggaaaaaccgtatatgtctgtacaaagatttgcacagggatgttcctagcagctgtagttctaatcaggaaaaattgaaagcaggctaaatcaagtgctgactaaacacacggtggtatatccataaatggaatactgctcaggaagcaatgaatgattgttccatgcaaaaacacgcaggcatgtcaaagtaactatgttgagtgaaagaagccagacaaaatcaagtacatatgggatgattccatttatggacgactctagaaaatgcaaactaaaacagatcagtgtttgggctgcggatgagtggagttgggataggtggaggggggcagggcgagggaggagcaggagtgggaggagctgggagatgcagagatgggttggggagggtctcatggaagggaagggagagaggaagggggagaggaagggggaggaaaggcaaggggaaaaggagaggaagagggagggggagagagaggcagagtgggaggaaagaggggcggggacctgggagggcccagggcacatagtgggaggagcaggtgggaaggagggaaggagggaggggcaggggagggagaagagggggagggagacgaggggactggcggtgtgggcggagcgtggggagggaggccgactagcgcaggcggacgggagagaatgggggaggggtgggatgggagcaggggcagagacgggcagagggcagagggcggagcggcgccggagcgggcgtcatggcgcggctcctctggttgctccggggcctgaccctcggaactgcgcctcggcgggcggtgcggggccaagcgggcggcggcgggcccggc

SEQ ID NO: 4721 - DNA, 2300 bp, Homo sapien
caaatttaataacttgctcacatcctattgataaagtaaaactatttaccatgactgtgttctgctttctttcatttcttaattgaattcggatgcaatagactttttctcctaacacagatgtcagactccggagtggagtgattttgggggggttcgtctgtctggttttacataaagagctttgtttgcatttggagatgacagaggcttctgtcctttgcagtgtgaagctcatctaggtcacgtgtttcctgatggacctgggcccaatggtcagaggttttgcatcaacagtgtggctttgaagttcaaaccaaggaaacactgaccatcttcaagagtcccgttcccttgccaccccttcacgtgcaccctcaatttccacaattcacttgaatgacttgttttatttgcaataaaactgggctgaatttgctgctgtctccagcgagtcattgcttctcttaatttatttacctggaatcaacttaatcctgtgtgttaggctgttcttgtgttgctataaagaagtacctgatcaggatctgggagaatttgaaaaaaaaagaaaaactagaaaaataaacaaaattaaaaagaaaaaaaaatacctgagactgagtaacttataaagaaaagaggtttaattgactcacagttctgcagggtgtacagaaagcatggtgccagcatttgctcggattctggggagacctgagggagcttttactcatggcagaaggtgaagggggagccggcgtctcacatggcaaagcaggagcaagagagagtggtagggaggtgccacatacttttaaacagccagatctctcaagaactcactcactgtcaccaggacagcaccaagccatgagggatccaccctcatgacccagttacctcccggcagggcccacctccggcactaggaattatacttcaacataagatttggagagggaaaacatccaaaccatatcacccaactcccacttggagtagaacttcacaaaacgacagagggacagctgtttccatcaaacacttccacagcttcacctgagacgagggcatgactctgggaacatcaggaggctgatggactattaagccaaacaattcctacaaaaattccctgcaccttccactgcgtttcagtccttgacagacataagtaagggatcaagtgagaagaggaaggaaaatacaggatccaaggaatcaacaatgctagcactgaagagcaggattacggaggagctgtgctctgggagcatatatggtgatcaatcagatgcatgacttttttttcaaaattttaaatgtcttgagcatgctacttccaaccattctacccacaaataaactgcaataggacttggttagatttcaatgattatgaataaatgttcaccttcataccttctggttacaaagctaaactttaaaatgtccaaataaaatattcactaaaatttatgtttgctttttggctaagtcaatgaacatgctcttttataaaaaaaactctagccaggcgtggtggctcacacctgcaatcccagcactttgggaggccaaggcaggcggatcacctgaggtcaggagtttgagaccagcctgacaaacatggagaaactccatctctactaaaaataccaagttagccgggcatggtggcacatgcctgtaatcccagctacttgggaggctgaggcaggagaattgcttgaacccaggaggtggaggttgcagtgagccaagatcacaccattgcactccagcctgggcaacaagagcaaaactccatctcaaaaaaaaaaaaaaaaacaaaaacaaaaaccaaaaaacaaaaaacctctaaattaaaaatgacaaataagaattggctcacatggtagcaggcatttggttataccaagactaatagcaactcaagtatttcacaaatcaagagtcttgaataatttgttactgaaagtatataaatcattctctttgtgactttatgggcaaaaaggaaacttgtttatactttttttctctttatgaacttgttatatattattttacatttcttttagtagcaaccatggaaattacaacatgcttccttacttgttaccatcatatgtaaattattacttattttgagttctccaggaatgttagccttagaacactttattaacatcctctcacattttgttttactattctcatgtatttcatttcacacacactttaaagcccccaaaccattataataatatactaaaatatgtacgaatatatac

SEQ ID NO: 4722 - DNA, 2300 bp, Homo sapien
aagctgggtaatttgctactcttgcatgtcttcacattgacccacgggcacgggcatgtttccacttagttttagtctacgtgaggaaggggagggtgcacatcactagctggctagatctctggccttgatacacacacacacacacacacacacacacacacacacacaccccttcccttcctttgaggtcagaaagagaaatctaattgcagagaatcacagctcaggctctatcaccgggaaactgtccatatttgcctttaaggatatgcaaatagtgaacgactccttcactgtgaaggctgagaaactaacacaggaaaaaactactgaaaaccagtcagtccttgggttaaaattgtttggggttgttggcagttcaaggtaaggcaatctctggccttctaaccttatatatcttttggtttaactctttgttctcaattcagttaattacagtgcaatgtctaaaaccaagaagcgtatttaaatcactaatctgaagaggcatgacttggaatttgagaggcgtctgaatacccaacagaagcctctagtgagacaagtgcctgaaaaaggaagcggcccaggaggacgactcctttcagtcctctgtagagagaatacgcacgatggctgcgcttctgaactctcccggggtggaagctgcagcctggcttttaaccggaattgcccagaccttgaaagtgtttctttgttgctcttaaaaagaggaattcacgttgcatcgcagtctgtgataaagtctgtcttggggcagagctgcatacgttttgtgttttttttttttttcagaaaagaaaggtcgagaaagaaaaaaacaagtcattcagggatggtccctgtggccagtcggaaaggtgagagactcgggctttgaaaacgattcacattctgccctttaacttcaatgccttccctccggactgcgccggagcagacgattcaatggactccttttgtatccagtttattgctcagaatccctagggtctagatttgctctcagaagaaacgcgccccgctgagctgctctgggggctgcccctcccgtctccccattcctttctccgggccggggagggcaggggaggcagccactgagccgatgtcgctggggacccgcaccaggcaccacagccaggctccagagcggagtcccataggtgcgctcccagcccccgtgttgcgtctggaacgcagtgggagtgggcccggatcaccttccaatgacacccgcatatactctgcaaactgtgcaaaagcccttgaaaagtccagagatgggacagaagcccccagcagaacccaggccggagccccgcgcacctcggataagggggtggcggaatgcacccacctggtccctgagggcagcacccttagattgcccaggctgccgcggaggaggacgatcgccgcgcgggctccgctctcgccgtctgggccaccggcgcgcacccctaggaacttctctggccgcgtgtagacgcggcgcgcggctgccccagtcccagggcggaaggagccggcgctgctcagcgcgcgcgggtacgcagcgggcaccgcgggacgcaggtgcccctggagccgcacgcggggcaggtacagaatccagtatgcagaggcagaggagagggaagagagcggtgcgaggagccccgggccgcgcgaccccgccttttcctcgccccaggagctcccaaagggagcaaaacgccccccacccccgcccaccgccgcgcctccgggccccctcgccgccggcacaccgcgctctgattggctggcgcgatgggtccctggcacgcgcctatggatgttgttataagaatcctcgcgtgccggccctcagctccaggaagtccgccacagccctccccagcgcagcgcgagcgcgggccagagcgcagcggccgcgggcactccagggaggcccgggggcgggcagcccggcggccgcctagctgcccccagccagggccccgggagggaggggctcggacgggccttagaaactcaccaagaactaacacgcgcagcccggcagtcccgctgcccactgcggcggcgagcatggacgcggtgttgctggagcacttccccgggggcctagacgcctttccttcttcgtacttcgacgaggacgacttcttcaccgaccagtcttcacgggaccccctggaggacggcgatgagctgctggcggacgagcaggccgaggtggagttccttagccaccagctccacgagtactgctaccgcgacggggcgtg

SEQ ID NO: 4723 - DNA, 2300 bp, Homo sapien
ggctggagtgcagtggtgcagtctcggctcactgcaacctctgcctcccgggatcaggtgattctcatgcctcagtctcccaagtagctgggattacaggcgtgcattaccatgcacaggtaatttttgtatttttagtagagacagggtttcaccatgttagccaggctggtcttaaacttctgacctcaagtgatctgcctgcctccgcctcccaaagtgttgggattacaggcatgagccaccgaatccagccaaaacactgacatctttaaacaatgttttccctagtagtggtttaggaagaaggaatagagtccttcaaaggcctagttggtatttctcttgcagttgcctcatgcatgtgctgcgtgtttttctgctttatagattaccccaactttgagaaacattcattatccagtttttacttgtgagaaaatagaggctctgaaatgttaacttacttgcccaaaattctaaatcgagtaagtttcaaagcctgtatatatttaatatttactgcagagttcatgagctttccactaaagccatcaatgaatttagcatgtgataaaagaggcctggatttaatatgacaaatgttttgaccacatcaacgccagttactacaggtgagaatctgatctgaaataaacaattttataagccggaacacctgtgagataaaatacaggtaactgacaagaagagaagtattatgtagttaacggtttcaaaaacaatcatcatcatagcgtggtctcttagacactgaaatctgaaactccttgatatgctatagcaaggtttcaaacaaagatgttctgttcaatgcatgtttttgtgggatggcgtaactatgcagactatatcagtcaacaaatgctgtacagagctgaccaatgactcatgaaatcttctgtgcgatctctctcctcagtttcaaacgattcatttataattgcactaggaaaatagccaacagcttgtcacattctttacactgtcttggcccagctctaaacagataggttttgaaattttaacttaaaattttaatctttattttaaaacatgtatatacattgtggtaaaatatcacttaggaaaaagaaaagttattgtagatatataaatttctttcttttaaaataccttttgattatataataaaaattccccaaataaagtctgaagttagagtttgtaattaaaaacctccaaagagtaaaagtaactctttttctcttctctcttcatctcccccccaaaaaataagccttcacagaagatgattttggcattggttatgatgttttattggcatttggggcttttaatctttgtctttaaacataatagtagtgataatgctacagtgcttttcttttcctgttttgagcttctaaatccagctaagttattttcacttactgttacaagacagagaagaggccgggctctgtggctcacgcctgttatctagcactttgggaggccgaggggggcagattgcctgagctcaggagttagactagcctgcacaacgcggtgaaaccccgtctctactaaaaatacaaaaaattagcctggcttggtgctgtgtgcctgtagtcccagctgctcgggaggctgaagcaggagaattgcttgaacccgggaggcggaggttgcagtgagcccagatcgcgccactgcaccccagcctgggcgacagagcgagactccggctccaaaaaataataataataataataagagagaggagaaaaaacttatttttctgtagataatatattgaaatgcagatgtagtatagacagttctaaaccagacaatgacattttaaaaataaatttagccagtcgtttacagaaaaacaatgacatactgatattagaataggtgtctcctattagttgacaatgagtgatacataatttaaaactaaggatgacaacagtttcactattaactcttattattgtagaaacctggtaaaattgaattccacactagatggtatagtttaagacttaacgcctcacattctgacctcattaaatagaaatctgtttaatctctgcaaggaaatattttgtccaggaacgcctacgtttgtggcaggtggagacagcttattaggcagcctgctctcctcttatgatggccttggtccgggatcgcagggctcattatgtcatgagcatagttattagatgggttcactgcttttcctcctccttgagggggacctttggcacacgctgggaggccatgaaagccaaggccaccga

SEQ ID NO: 4724 - DNA, 2300 bp, Homo sapien
acaaatcagtgatgaaatccaaggatggtaatttcctttttctaattagccatgagagcttcaagctcccaatggggtagttaccagaatttgaaaagttagacagtcatttaccttcttctgagttaatttacataagcggctggagtgacctgagctgggaccctgccagtcatactgcccaaagataattaaaagccctggctagggtcaagggacctggatagtaatcttggcttcaccactgtctgacaaaccttggaaactcgctttccatctactcattcacttagtaaatattaattaggtccaattatgtgccaagcacggtgttaggggatggaaatataagagcaagacccaagtctctcaattcctggaattcacattccaccggaaaggtggggaccggagtacagcctacatcacctacaggttcagtctccctatctctaaaatgttaggacaacctctgggttcaattcgaatgtttaggccctgttaatttagcatttgatcacagctcagaatatagcaaaagtctcccactacctctggctttcccttacaaaggcgggtattacaaaaagactcggtagaagtattttctatagtctatcttgccccggaatgcaggtcacgactttctccaccgcttttgacctctggctagcattcacacctattctcaaagggccctaagtgatactgcatttggtattctgagaaagcttgtttataaaagcctaaaaggcttccttgctttcccccaagccagatatttgccaaatggcataggtcagaggtgcaaagttggttttgtcttagcaaggcaagagaatccactagcggactcacccttaccggtgagtccaaggaaatgcatagaaaagacacagtggtaaaactagctgggcacctgtaatccctgcccaaggcaaggctgaggaagggggatcacttgggccctggaggtcgaggtcgcagtgggacatgatggcgccactgcactcagcctggaaggcagagcaagaccttgcctcaaaaagaaaaagaaaaaaaaaaaaaggaaaagacgcggcggttccacgagtggtggctaggacccataatcccaacactttaggaggtcgaggcgggaaacagcttgaggccagtagttcgacaccagactgggcaactgtggtgagaccctcgccttaaaaaaaaagaaagaaagaaagaaagaaaattagccgggtgcggtggtgcacacctgtggtttccagttactctggaggttgaggcgggaggatcgcttgagcccgggaagtcaaggctgcagtgagctatggactgcgccactacactctagcttcggagacaggtaagacccccatctctaaaaagataaaagaaaagaggcagtagtgaatgcaagcagggatggtagcccatgaccagcagaggccaaacagactttaaggcagcattccgttctccacacccatgccggaagctttcctgccacgcaagctttccgagcatgctaactcgccccaagcagctcccatcccgcagcatccactgcagccgctgaggagagtggcgcagcgcagaaaccagtgcccagtgcccaggtgggggaagcggtccgtgggagtcacgtgggcgggaggcccagccaggatcccaggactgctcaggcctccgcgcccccggcctcgccccgcccgcgcgcgctcgcgcgccgagggccacgcccgtgacgtcggcggagcgcggtagggggcggggcgcgggccggagtgggcggggcgagcaggcgcgactgaatcgggcgccgcaaagagccgcgcattccagtgagtccacgtgacgcggccgcgaggcctgaggtaaacaaccgcggccccgcctcccgggcctccgcgcgcaccgcgctcctcctcgccggcgggacgcgctccaacggggcgggcggcttcctccgtgagtccccagcggccgccgcgggccgaagcagctgcagcgggcgcggcgccccgggtctgcgggccgagcgcaccggcaggggtcgagctcgcgtcccgtccccgcccccctgcgctgtggcgcagcaggaatttggccgggacccgggcgctattcgcggctgctgactcgcggcggccggctgcctttcgctcatctctattctggggccgttgggtcaccgcgctccgccggccccctcccccgggcccggagggtgtgtcccccgctccggggctcgccgcgcctataaggggccgagcggcgggcagggacatgcagctcta

SEQ ID NO: 4725 - DNA, 2300 bp, Homo sapien
ctgtggcatgttagccaggctgatacctgctaatatggcatcacttacttgctgcattgaacgcttggaacgaaaactgtgacccaacaaagaaggttcctgtgtaccagcatagctgcctcttgacaattttgttttcaaatcatgcctttaatttgtcaatgacttgcctattcccacactatcaatctgaattagcattttcaggaacagtgattcctactgaaaaattgctgcttttgaaagatgcagaacgaggaactagttatgtaattccttcatgatgtcagggtgctttcacatttgcacgttaaaaaataggacggttacagttgcaagaagccctcggggcaatgaatctacagccttctctagtactcctttgttctaattaggaacatgctgggctgtacgttacttattttaattattctatttattcgtgaaatctaatgcatcgttaaggatatccataattttgtctaattagctagaatttgaattttcaaatgcgggagtgtttaagatcattaaacctaagacagtagactaggatctcaggcttgcttctattctgttgagcttccatttgagaatcaagagtgttaatgaaactttctgctgcttcatccagatctgactctacttcagtaactttaaaaaggttgaaaaacagtgtatgtggatggagaatatttttgcctcttttacttgccacttcccactctctaccctttccattaaaaatattttaatgaataaaaagtcatcttggcgattaaacagtgtctggattcaggaagcaagacgctcgcagttaaaaaccgttgccactcgacggtggcaaaattgctggctgcactggagatcactgcagagcgctcctgatgcctcgatgctgacggcggatctggcgcgggctggggcgcattgcacattctgctccagccgggaggcggcgggcgggcaactccgggttggtcactcggcagccggcagaggtgcgcagaaggcgcacagaaccaggcactcagcctcaaggatgtctgggtctctgctaagggacaaacgctccaggaacaaggaacaacctctagccatcccagcaccacctaacgaaccttcgtttggctctctcgcagaaagtctcttctatttttggcccccaagacaatttcagagaaccagtaaagttgggtgacaacgtggatcgctttctagtgtaaggtcccggggaatggcaaaactcaaatgtagcctcactgatgagctcaaggaactctgcttggagttgtcacccctacgactgacctcagacccaggacccaagggcggggccctcttgcatctggaatccagcctcggccttgacccctttcgcttgttcggagtgctttcgcccagcttctggcggaggttcacgcagggaggggactcaggtggaaaaggctggcccctttgatctctttgcaggaacttagtagacaggggccccgggctggagatttgcttcgagtaggctagaggcgcccttggcgcaccgaagctggctgccttgctggaacctgccgcgggggtggaggttgaaaggactctgagctcttcttccccaagccgaactccctcctacaggagcgtggaaaccaactctcccacaccgtctatcccactcttcccccctaaacctctagcgcagctttttaaaggcatcctgtgcagcctccaactttggggaaagagaatgcccaactcccgctctccaactacccgtactgccttcttccttttcctgcggtcgcctccaaactctgcttccctggtatccccgccccgacctggaagcgagcgcccccggctgctcgcggcagcccctcggcgcccgtttgcagggagcgagctctggctcctcacaggatccagacgcggttcccatccgtccccagccctgcagggcacacgcgcgcgtgcacacgcacgcgcttacactccagctcacactcgcgcgtcctcactccctgcaccccaccctccgcgccgctcctccgcggggtggggggtggtgggggtgacgtcaggactgcagtccagaagagagcggctggagagggctgcgcgcttctcgccaagcaagcgggaggcgcactggggccgccgccgttcccgcgctcctccctctcctctgcacccactgtcacgctacccgcccgcgggggagcctcgagagcctccaggtgaattgaaagtcgtttccgggggaggacggagagggtgctgcagtcctggcatgccctgaaactgca

SEQ ID NO: 4726 - DNA, 2300 bp, Homo sapien
atgtctaggtttcatgatccttaatgattcatgttaattctcttcccccaatgcctttttctgttgtgcatatcacagagttttgtttcctggaatatcagcagagagggcagtgggcttggcccgtatgggggaggggagggtcctagcagctggaaagcaaggtcggctgaccaagggggttccttgggctgcctggaaaatggtagttcagacctggtgggagacatttccctatttttgtccatctaggggtcaacagaggcctgaaagactgctctgacaccttccaaacagcccccaggaaatcttaatcagcatctgccaatggatcttttctgcctgggttgagctagccaggagggccctggggcagggtgctgtttgtggctgccaacggctgtggcagccctctgctgcctccttcatcctggggtttttgcctttgtgctacaccaaatgacaggtaggagctgttaagcacgggctctctggacaccagagcaaggggattggggtcacaaccaaaggctgcgggacatctgatttgggctgctgcatctcctgctacagtgtttctctctctctctctcacacacacacacacacacacacacacacacacatacttttctcccaccctcctccccactcttcctagcattaatactttaaagacaaatacacaacagtatacaagaatcaggatgatctggacctgaaaggctgaacacagcagggccctccttcatgaacattttgcacctaaggaaataataaggttaaaactagattcatctggcctttgcccaggggccaccaggacagaaactgtgtaagattagttcctccttaaagcaagattgccaggtaattctgttgcaaagtcatagagaccttaagttatctgccctgcaaatcccactgcctctattcaggctgccgaggcactgctttaattttttgaaagattcaccgcgtcttcttggatttcaagaaaaatcccgttaagaattgaggggctctcttcttcccctcctgacgtgagtgtaactcacttcctggtatgtctcctttccttttggcctacatcctttgtctgttaggtgcttccacatccttatgtcttaaatggccaaaatacgtcacccccactgccaaaacacacaggtcactcgaggtcacaatctggaacataggctggccattgttcagcacacattcttgatctaaatcaatctcaaaccttgctggaatgccctgtaaactggggcaaagtatggtcaccagactaaccattgtccttttttacccctcctgtgacggggctactacaggttacaaaatcgcgctcttcctcctagctactgtgttactctgagatatctgacatcgcagagctaatgttgcctaaattattttcccatcctcttttttttttttttttcggacatcatgcctcctattttcactctctgggaactctgccagtttttcaaggactgggtaaagaacaaaataaatatttgtaggtggtttaaaaggagaagtatgttggttgtaactctgcctgtccaaagaaatgcattttcactgtctttcagatttttggagtcgttaactgggagagcttcagaagattgactttactagtttacctttcagatttgtgattaagggctgggtgtgtgtgtgtgtgtgtgtgtgtgtgtaagtgtgttgggggagggaggagtctgagaaagtgagcaagtacgtagaaacttttttttaaaaagtccagattaagtgattgaaatcgactgtgtgcaaatgacgctatacctcttcatagatgttaatcgggccctaaaaagttagtgccggaaagtgcttacttacaacactcagcatatactctttctttcaaattgtttgggatttttttttaagggagttcactgaaatttgggaggttcaacaggttgctgttttttaatatgtggatcacccgatttgggaggctcactctgcctctgagattaaagagatgagggcactggctcccagcgaaggctctcggccttaatcatgtgtgaaatgttttccttcctcggctgcagagcctcggtggtttgcagcagtggaaccaggcaggcccagttgtgggtaggagaggccgtcacctgttgaggcctcccccccacacccccgcatcgccctgccctggcagagcccagcccccagtccccggagagcgcgcctgaggacggacggacggacggacggacagacctagggacggagggccaggggcaggg

SEQ ID NO: 4727 - DNA, 2300 bp, Homo sapien
tgatttgattagtatgatgctaaggttgccatcaggcaaatcacaatgtcattaaggcttagtgagatgtttttctcattcagggatggtaggaaaaatcgtcactggactggccacctctaatcaactcttggcatttctgcccagccttcgtgtgttgtccttattgctgggatccttgttgccaaacactttcccagctctaagttgttcaagatctctctgtcttgatcataataatgtcaatgctggttacaaatttttctcttgggtttacctctgcctgtccactgaggaaacggttaatggagttgctttcccatctgaattctttctggactctctccatttgcctttacattctgactcttctcgctctcttttccaagcctgaattcaataagcaaaagctgagatactgtaatttcctaaataacccaaagggaagatctggcataatttataaccactctgactgctgaatcaacttgcacttgctcttctctctaatggaactttgaagaataactgtaattgaatagtgcctccaccccatcttcagatttgactgaatcaagcctagatctggttatatctggtttttgtttgtttcatgttgtgtttgtgccccactgagtataaagcccaagtgtgggcttcatctggatgtattttcatctcacagagacattaattgaatctctgacaatagtcttgcctccgaggagtgctccaactctggctgcggtattaaaccaaggtagttcttggttgccttcaaaggtaacctcccatctgttgacagtgaactacggcaatgcaacgcttacagaatcattggaggagaggatccaaagcgtttacaattccctgctatgcaaagagtcattctgagtttttttaacctatgattgctctctgtaaatacctgggtgcacccagcaaggtgtagaggttaatgtttgctctctgacctttgaagacagatgcactgaatatgttgcagtttgcaatgggatccgtggcaagttaacagcagactgctccttcagctactgctgtttccaaaactctgcagtgtcacatcttgctcgcggctgcctcctcagaagtgcttctcagcttccattcagctccctgctgagttcctctgaagaactttgtactgtggcatatgacagcgacctgataacattatgataaactcctatgggtttgaactcagtcctattcaaattttctggtgcctagtggtcagcagtcttagacctggggagtaagaggtgtgtctgcagtgaatttagaggtgagaagaaagagggctggactcagatattgagtatcttagagcctacggaccatttcccaaagcctagaatagatttcagcgtaattctggtaatttacataaactaggatagacatgcaaaatatctggatatgttaggaaggagttaaaaagttctccacaccttttcctaccacctctgcagccatagaagccgaggggaaatgcacacacacacacacatacacactctggcagggaacctgttttgcaagttttgctggtaaaaagttctaggaagggggctggtggagaacagagtggaaaagaagtatcaattgaaggtttttcaagacctgagttttcaaggtaactttatcctgcagagagagacacgcatggccgctgtaggtttttcttccaccaattaagtgcattgttagacagggaggggcagattaacgaacgcctataattttgatcattgttttttgcaaaacagctcaggctttgaaaatgaagccatcgttcccggctaagtttctgccaacagcacaaattatactgtgcagagatccaaagcccctaagaaggtttcattaatgaacaatttcagacgattgtttaagtcttcgcctgacaggtaatgttggcatgtcggcaggtggggttagggtttccatggagatttatgatgtcatgcttgaaagagcatgtcaagacagccgatttaacaagtagctactcaaaaagtcctataggctacaagtaggttttatgcaaatgacgagagtttcactgggaaaaactgcaaaagaaaacagcccagacatggaggggggttttacctgacagctccgaaggaagaccctggagtccgttccagacaaaaacttccagaagaattagattttctgctttaactgccgcctcacctgtggagctctgggtacaggtaaatatgcggggtttttttcttccaagtttttgccaaaaattatttggaaacatt

SEQ ID NO: 4728 - DNA, 2300 bp, Homo sapien
ggaatgtacagccaagtttatgggaagcatgaggatggtgagtccaaagtcaaggtaggtgatagcattggtggccccttgcagcaccgggagtctatatggcggtctaacttcgcaccccctatttgtcacttcatagcactcttcactttcactccgtttcacttgctcatgattaagcaacaaacgtggtaatggtgtttcctactctgagtttcactagatttagtaaacgcacatgatcatgctggtcccgtcgaagtgacgataggagtcctcggagctgtggtctccgccctggctggttgcacctgctctgtgctctgctcagatcatacaagatggagagagcagagaccccatcagagagaggcttctgttggctgcagtgtgacactgtagacttgccagaaagggctctctttggacctactacttgccactcagaagcaaatgggctgcagcctcatacgtttttggagtgaataagagaactaagattctgatggacccttggtgattttctctcttcaatattatgaatgttcatgaatgcccctcagaaggtcacagggatgtcagatctcattttctccccttccccttccccttccttttcctttccgagacaaggtctctctttatcactcaggctggagtgtagtggtacaatcatgtctcactgcagcctcaacctcccgggctcaagcaatcctcctgcctctgtctcccaagtagctgggactgcaggcatgtaccatcacaccaactaattttttttttttttcttttaggtagagccagggtctcactttgttacttaggctggtctcagactcctgggctcaaacaatcctcccactttagtctccccaaaagtttagatcaaaggtgtcaaccactgcacctggccaggtctcattttcatagcagtcactggtagtaaggtaaatgtgctgcagataatcgtttggcctgtgttttggagggacctttttgttttttaattgtctctttgaattttgcacaaagaagggttgcacgggctccgttcatctttaacttattatttgcatccttttttatgataagttttaagactactgaagaaagcagctccggtaaagagcctcacaaaggccaattttcaatttctcccttgtgggctgtgtgtgtgtttatgacggtcagaagaagacagactctcatttaaaactattctctcttcaaagcaattataaagtggccccatcatagataaacttgaccccttttaattgctggttagattgcttcttttttctctccctgttgtgaacaggactgcagtgaccatccttgtatctgtgcatgtgggaacgaatctgaaggacaaatttctagaatgtcaagttggattgctagttttggaaggtattgcccaaactttttctcaaaaacactcagtttattctgtcgatatgaatgttgcaggggatattatggtacgttcagagaatacagttcactacagtgatgccaatgtgtgaaatacacttgacatgtgggtaggaacacataaccaagttatatttagtaaacaatctaccgagcagtagagttaatatgatcccatttattattttattttctaacaattactagtgatactttagtttggttcttgcttttctaaactgttaaccgtgaacatgtaactatttaaaacttatgctgggtttgctgggtcatgtctgtaatcccatcttggaagccaaggcaggaggatcagttgaggccaggagtttgagaccagcctggccaacatggcgaaacccgatctctactaaaaatataaaaattagctgcacacggtggtgcgcatctgcaattccagctacttaggaggctgaggcaggagaatcactggaacccgatggcggaggctgcagtgaacggagatcacaccactgcactccagcctaggtgacagagcaaggctctgtctcaaaaaaaaaaacaaccatatattattcattaaatgcatgttcatgcttacttaaccaacagtatggccctttggcttagtctcatagtctatctgacccttattttcttttcttttttttttttttcaaatgcccctttcattatgaaactcttttttaacttttaatttaagttcaggggtatgtgtgcagatttgttacataggtaaacttgtgtcatggggctttgttgtacagattgtttcatcacccaggtattattttattttcattttagttttttaaatttctttttagaggcggggtctcact

SEQ ID NO: 4729 - DNA, 2300 bp, Homo sapien
tcacgctccctgtggctctctcggacaatgccctgccctgagtagattctcattaaatacctggatagaaaaagatacttacttcagcccttttctatcaccaactttcagttaattagtgccttatctactaagagcgatacagtgatttgtaaaggtacgtgtttgaggcttatagcacattacctaatgtatcccgctattggccactgacccaaatgagaaataagaatgtctgcctttcctcagtctatcagtataatttgatagaagttaattaccctgggctgagcgcggtggctcacacctgtaatcccagcactttgggaggctgaggcgggcagatcacgaggtcaagagatcaagaccatcctggccaagatggtgaaaccctatctctactaaaaatacaaaaattagctgggtgtggtggcgcgtgcctatagtcccagctactcaggaggctgaggcaggagaatcacttgaaccccggaggcagagattgcagtgagccaagatcacaccactgtactccagcctggtgacagagtgagtctccacctcaaaaaaaaagaagttaataaccctgaagtttaagaataacaataaagaaaaaatctgctttgtcagattaaaataagtgttcatcagaaatacacagttatctaacctttttttgcgtggggggggctggagttttcaggagttgaattcacctgtggtagaacgtaaactaaatccctagacaacaaatctaaataagatagatctgattttgctgtgtttataattcactaggagaaatcttgcttttattttgctttatttttattttattttgaaggcagggtcttgctctgtcacccagtttggaatgcagtggcacaatcatggctcactgcagcctcagcctccctggctcaagtgatcctctgccccagcctcctgattagctggaactactggcacacaccacaatacttggctaattttctgaattctttgtagagacacagtctccctatgttgcccaggctggctttgaactcctaggctccagggatcctccctccatgccttccaaagtgctgggattacaggcatgagccactgtgcctggccccttgcttttagattgagtcgatagtcagtatttcaaatatctctaaacttacaccgtaagggtgatgatttttgaacagttaacctaacttcattactgtaagcgtttactgattcactcaatcagccatagtgagtcagatccttcctctggtctcagctctcatgcaagatcctgaagatatattggcaaaaagcaataatgatacagacaataatcaattaactcaataatcaataatgatacagacatctataatttttcacataagttcaggctcatgaaatccttgcctgtgttctataatttgctggagttaacactatggaactcatttatgagtgatatacataatgatatcttttttatattgtgcttttctgggaggcaaaaagatgtttctgttatgattgataaggaaggactcttacagaaatgattagctaggcaaacacatttgaatacagtggctgtccagaacatgggagatattttcttgttccttctctgcttccagttataaagtcttattttttagaagcaagaaaaggtaatatatgcacatctgatatgcaacttccaagtgatacaaatctcatctttcctgctgcgtggctgcttgcttttccttgtactatttttttttttattttttgtcattgagaggttatgacaacatgagccatattgtatttataaacatcacgtgtttccttgatatggcttgcagtttctgccagacagaacacatggaagaaacatttctcgttagttcagcattggttttagttatgctgatttccgggacaggaaaaatgccttcctactcagaattaactttcatagagtagaaacaaaacctctgaatgtccgtgaaatagttttaacaagagtggatactgctcctttaaaccacatattttgactaaaagcttccttctgtaaaaaacccaaggcttgcatttagtcaccatgaagacaggcaaagctgaaagcattggagagaggggtggtttcgaggtctctgcaagtctagaaagtttcttctagaaaagaaaggctcacggaaaatgtaaggtaagaactgtgcctttatgataggatattatctttagaatcttttttcatgctctggcacgtttatctttcattaacttgtcttctgtattcaagttca

SEQ ID NO: 4730 - DNA, 2300 bp, Homo sapien
aacagaagccacctctctctagcgtaatggacatggtttcttgtggttttaccctttgttgcttttttttggagccagggtctcactctgtcacccaggctggagcgcaatggtgtgatcttggctcactgtagcctctcaacctctcaggctcaagtgatcctcccacctcagcctcccaagtagctgggaacacaggcatgcaccagcatgcccagctaagtttttactttttgtataggctgggcctccctatgttgcccaagctggtctcaaactcctgggctcaggggatcctcctgcttccacatcccaaagtgctaggattacaggcgtgagccacatagcacctagcccatagcagatatgggataacatgtcgaacatggcatgacttgcttagccaagcagcagagagacagagagttcactgtttgtttcctgggggacagcctggccccagacccttcacatacagtcactgggacaagcaaccctgcccataataagcaggtaaagaagaattataagagccatgtctgttagcacacctcacgccataagacagggtctttggaggatgtgataggggcggcatcgtggcctaatcagacaagggggaccactcctccatcccccttcctggaaagtacgtgcttgactgaagacacaaaacaaaacctgcctaatgtataccagattcatcagaagctgatagtgtgtgcctcccatactctggtgagaaataacaaacccttgctgattagattaaaagtcaagagcttccacattccttctactgttttccgacctcttaggtggcatctgttacaaccacttcatccaaatatttttcctagtgagacatcttaggagggtggcaatgtcacgtgctccatttgcccccttctttaataaccacaaagtgatttgatggcagtaaacagtttttttagaaagcctgcaaaggactggatttgaacttgaaagacgtcatggaattcttttggtcagcaagaacaacctctaaaagccttaaaatgttttaaaaatgcacaggctgcccagagcgtggtagttgggtgtggcgtgaagccagtggggcttccagcccagtgagtggagttccttgtcaccgtattcccacttggatagctttcggttccacccagtccccaagggctcagaaaacatgatggtaatcagagcctgcctgggagcgcaggagatgcttcctttctcccccaccttttgctagcaatgcattaatgccagtcctccgctgagagctgcacaagtcacttcgtgttgtggacacgcaccttcttgtacctgttcccctggaagataccagctgtgctgacagcggttgtagccagaggtctctggggatcgcctaccttctcgtccttcatcttgtttagggtggggcagaagggctctggtttcctttccagaatcccctctgcacagccctggtttgccctctctatctttccttctcgtttcagatgtattttccagggtgattgcagttccttgcccggcgctatgtaggactgattaatggctgctacccaaagttcagcgtggtaaaacagggctggttaattaatagacagcctccttatctccctcatgttttccctctggtgttaaaccaggagaagaggcttacgtttccttcagctgccaattcccagacttcaaaagtctggcagcaaagtgggtattgggtgctggtctaggtttttgcagtagcacctttaagtcaacagaaaactgatctgaaagttggctcctctggattgagtatgttgggttttttgacagtttcatttctcggtggctggttgtttgccctttctaatgatcctgtttgccttcagcgaaatatattttgtaatatttcctttgctgttaacccatttacctaggccgtttaaagttccttcattggtgttttccctgtaagcagttgttgaaggactgagtcacccgtgaggtagcctgtggttggatgtgggctgaggttattcagtgactaatttccaaggggaggagaaattgacttatcacggggaaggttactttttatccatgccagtgtcagcttctctccgaaaactgggtaatacgaaatggtctttattggttgtgaacactcgagctgagaaacattttaggatctttgtgtcttttgtgatgattttgtttctgaagaggaagctgtctaaaatattcaagtgtgcaaccaaggatttagatgaagccagcaaacaaaggaatcatgtaatcag

SEQ ID NO: 4731 - DNA, 2300 bp, Homo sapien
gcctcctgagttcaagcaattctcctacctcggcctcctgagtagctgggattataggtgtgtgccaccacgcctggctaatttttgtatttttagtagagacagggtttcaccatgttggtcaggctggtctcgaactcctgacctcatgatccacccacctccacctcccaaagtgctgggattacaggtgtgagccaccatgcctggcctgaaacgtttaatgatgggaatggcacaggccatgaccaaccaacagacaccagccctaacctccagtaaatagacccccagaacatctgccacgtgtgtgtctttagatcacatgccaaatccatccacgattcagggggcaaattctcatttgggtcctagcatgatatgctgactccatatttggagttgtaaccttaggctgaaaccttttttttaaattcatttacatatatatatacatatattttgagacagaaccttgctctgtcgcccgggaggctggagggcagtggcacgatctcagctcattgcaacttctgcctcccaggttcaagcgattctcctgcctcagcctcccacgtagctgatattacaggcacccgccaccgtgcccagctaatttttatattttcagtagagatgggatttcaccgtgatgaccaggtcggtctcaaatttctgacctcaagtgatccacccaccttagcctcccaaagttctgggattacaggcatgagccactacacatagcctatttttattttttatttttgcgtatatgtgatggagtctttgccatgttgcccaggctgttctcgaactcctagactcaagcaatcctcctgcctcagcctcccgagtagctgggattacaggaagctcaattatttttcttctttaaaaccttttacttgacgtattcattgtttcatattttaaatttaaaatcccacaaaagaagccatgtggctccgctgcagcagccgaatcatggcacttgtttgggggcttcctggggagcaagcagaagtaaaacaggaggtatttggtggctcgtgtaccttgtactttgcacagtatttgcgtgtgattaattctgactgcgttgtttgtgtgtcattcctcaggcgtgtatgaacagtctttccattcttaagtaaggtcataggggttgctctgggttgactttggctgggcccgggtgtttgtgctttgtgttgtcattgctttaaccaagcagccttcatgggaattgtgctccatcctgctataatcaatcacctcagcatgaagaaagggcagcagtgccttggaaccgacaaggcatcactagtgttagtgttatgtcagggcctgaggctactgatacaccttgggaaaggccaggcctccaggtgaagcgccttgaatacctgggtcctcaccactggatccttcactcctgaatcttggtgagaccctaagacatgtatcttcagtctacactggaaaatatagagaatgaaagctgagtcgtgacgtcaccgtcaccaatgtaacctcaaatatctgctttgtgaatgtttaggttctattgtaacagcatgatggatatgaaccaaggttctattgtaacagcatgatggatatgaattgaggttatattgtaacagcatgatcactctgaatttggatttggtcatcgtggctatgaggagtgtgaaggttattttggcacttcgacacctgcagtacaaactgcatttcaatctgtcatttgatcaggggaaaataatgttttttcgtccccaaatgccaaacccaaccaaggcagatgtctttataggataatctccataacagaagcagagggaggactgaaataatgagctgtaaggggaactaaaattcccctgggctggttcctaagtttataggcaagaaaactgaggccaaagaagtaaagtgacttatctaaagtaacacagtttagtggcagatcttgattaggatcaaaactttctgtcagcccatacattgtgcttttcacaattcttcaggttttaaattctgctaagctcacaatctgatgttgaaaagaggacatgttagtaatgactctgtccctttattttcttcaccactcccctacaaaattttaaattcttgaaatcttttgctaattgagattttcatcttgtgcaaacacagggcatttttggcagttggagaacaaagcaatccaaggtaaacagctgtaggctttggattggtgtgtaagaaatatgcgtggcccgcatgtcttagaaatgtaattaaaggaa

SEQ ID NO: 4732 - DNA, 2300 bp, Homo sapien
ggcacccgccaccgtgcccagctaatttttatattttcagtagagatgggatttcaccgtgatgaccaggtcggtctcaaatttctgacctcaagtgatccacccaccttagcctcccaaagttctgggattacaggcatgagccactacacatagcctatttttattttttatttttgcgtatatgtgatggagtctttgccatgttgcccaggctgttctcgaactcctagactcaagcaatcctcctgcctcagcctcccgagtagctgggattacaggaagctcaattatttttcttctttaaaaccttttacttgacgtattcattgtttcatattttaaatttaaaatcccacaaaagaagccatgtggctccgctgcagcagccgaatcatggcacttgtttgggggcttcctggggagcaagcagaagtaaaacaggaggtatttggtggctcgtgtaccttgtactttgcacagtatttgcgtgtgattaattctgactgcgttgtttgtgtgtcattcctcaggcgtgtatgaacagtctttccattcttaagtaaggtcataggggttgctctgggttgactttggctgggcccgggtgtttgtgctttgtgttgtcattgctttaaccaagcagccttcatgggaattgtgctccatcctgctataatcaatcacctcagcatgaagaaagggcagcagtgccttggaaccgacaaggcatcactagtgttagtgttatgtcagggcctgaggctactgatacaccttgggaaaggccaggcctccaggtgaagcgccttgaatacctgggtcctcaccactggatccttcactcctgaatcttggtgagaccctaagacatgtatcttcagtctacactggaaaatatagagaatgaaagctgagtcgtgacgtcaccgtcaccaatgtaacctcaaatatctgctttgtgaatgtttaggttctattgtaacagcatgatggatatgaaccaaggttctattgtaacagcatgatggatatgaattgaggttatattgtaacagcatgatcactctgaatttggatttggtcatcgtggctatgaggagtgtgaaggttattttggcacttcgacacctgcagtacaaactgcatttcaatctgtcatttgatcaggggaaaataatgttttttcgtccccaaatgccaaacccaaccaaggcagatgtctttataggataatctccataacagaagcagagggaggactgaaataatgagctgtaaggggaactaaaattcccctgggctggttcctaagtttataggcaagaaaactgaggccaaagaagtaaagtgacttatctaaagtaacacagtttagtggcagatcttgattaggatcaaaactttctgtcagcccatacattgtgcttttcacaattcttcaggttttaaattctgctaagctcacaatctgatgttgaaaagaggacatgttagtaatgactctgtccctttattttcttcaccactcccctacaaaattttaaattcttgaaatcttttgctaattgagattttcatcttgtgcaaacacagggcatttttggcagttggagaacaaagcaatccaaggtaaacagctgtaggctttggattggtgtgtaagaaatatgcgtggcccgcatgtcttagaaatgtaattaaaggaacgatttagttatagtccacttttttggggggatgtggttttgtggagtaacatgtcctacactattctaccagaatttggaatttttccatgaagatgtacggaaatctgatgttgaatatgaaaatggcccccaaatggaattccaaaaggtgagttcaccagatctgggttccgaccaataccatgcacattaagtacctgcctctgcagatccattgctgattaacgtgtgtggtttccctcctccgttctccctctcaggttaccacaggggctgtaagacctagtgaccctcctaagtgggaaagaggaatggagaatagtatttctgatgcatcaagaacatcagaatataaaactgagatcataatgaaggaaaattccatatccaatatgagtttactcagagacagtagaaactattcccaggaaactgtgcctaaggccagtttcggtttctctggcattagtccattagaagatgaaataaacaaagggtctaaaatctcaggcctgcaatactctatacctgacaccgagaaccagacgctgaattacggaaagacaaaggagatggaaaagcaaaata

SEQ ID NO: 4733 - DNA, 2300 bp, Homo sapien
gtcattcctcaggcgtgtatgaacagtctttccattcttaagtaaggtcataggggttgctctgggttgactttggctgggcccgggtgtttgtgctttgtgttgtcattgctttaaccaagcagccttcatgggaattgtgctccatcctgctataatcaatcacctcagcatgaagaaagggcagcagtgccttggaaccgacaaggcatcactagtgttagtgttatgtcagggcctgaggctactgatacaccttgggaaaggccaggcctccaggtgaagcgccttgaatacctgggtcctcaccactggatccttcactcctgaatcttggtgagaccctaagacatgtatcttcagtctacactggaaaatatagagaatgaaagctgagtcgtgacgtcaccgtcaccaatgtaacctcaaatatctgctttgtgaatgtttaggttctattgtaacagcatgatggatatgaaccaaggttctattgtaacagcatgatggatatgaattgaggttatattgtaacagcatgatcactctgaatttggatttggtcatcgtggctatgaggagtgtgaaggttattttggcacttcgacacctgcagtacaaactgcatttcaatctgtcatttgatcaggggaaaataatgttttttcgtccccaaatgccaaacccaaccaaggcagatgtctttataggataatctccataacagaagcagagggaggactgaaataatgagctgtaaggggaactaaaattcccctgggctggttcctaagtttataggcaagaaaactgaggccaaagaagtaaagtgacttatctaaagtaacacagtttagtggcagatcttgattaggatcaaaactttctgtcagcccatacattgtgcttttcacaattcttcaggttttaaattctgctaagctcacaatctgatgttgaaaagaggacatgttagtaatgactctgtccctttattttcttcaccactcccctacaaaattttaaattcttgaaatcttttgctaattgagattttcatcttgtgcaaacacagggcatttttggcagttggagaacaaagcaatccaaggtaaacagctgtaggctttggattggtgtgtaagaaatatgcgtggcccgcatgtcttagaaatgtaattaaaggaacgatttagttatagtccacttttttggggggatgtggttttgtggagtaacatgtcctacactattctaccagaatttggaatttttccatgaagatgtacggaaatctgatgttgaatatgaaaatggcccccaaatggaattccaaaaggtgagttcaccagatctgggttccgaccaataccatgcacattaagtacctgcctctgcagatccattgctgattaacgtgtgtggtttccctcctccgttctccctctcaggttaccacaggggctgtaagacctagtgaccctcctaagtgggaaagaggaatggagaatagtatttctgatgcatcaagaacatcagaatataaaactgagatcataatgaaggaaaattccatatccaatatgagtttactcagagacagtagaaactattcccaggaaactgtgcctaaggccagtttcggtttctctggcattagtccattagaagatgaaataaacaaagggtctaaaatctcaggcctgcaatactctatacctgacaccgagaaccagacgctgaattacggaaagacaaaggagatggaaaagcaaaatacggataagtgtcacgtttcctctcacactagactaacagaatcaagcgtgcatgattttaaaacagaagatcaagaggttatcacgacagattttggccaagttgttctaagacccaaggaggcaaggcatgctaacgtgaaccctaatgaggatggagaatcaagttcaagttctcccactgaagaaaatgcagccactgacaatattgccttcatgattaccgaaaccactgtccaggttctttccagtggggaggtgcatgatattgttagccaaaagggagaagacatacagacggttaatatcgatgccagaaaagagatgaccccccgacaagaagggactgacaatgaggatccagtcgtgtgcctggacaagaaaccagtgatcatcattttcgatgagcccatggacatccggtctgcctataagagactttcaactatctttgaggaatgtgatgaggaattagagagaatgatgatggaggaaaagatagaggaggaggaagaggaggaa

SEQ ID NO: 4734 - DNA, 2300 bp, Homo sapien
agtcatgttttgtagagatttgtaataagccaatctattaaaaactgttcacttttgcttagagaaatccctctatcgtgttaatcttactaatttgcagaatacgtttgtgatagatggtttgccatccttattttttatttttatgtttggttttcttttgtatcctgtacataactgatgctacagcgtaatatttatctgcatcagtatatatatatatatatatatatatatatatatatatatatatatatatatatgttttttaagtatctcaccctcttcctgtcactactactttgctgttacgtttgtggctgcacttgagctttgcaagctgtcgaatgcaaagagcaggatgtgatgatagtcttgagttaagcttgttttgattaggggaagatgtgttaccacatctgtctcagatgctgaacatagtccctgtgttgcactgatgagctctgttttgtaaagtctctatagttgatttctgttattcttaaggctttaaaaatattgctgaataattttacaaatagttgataaaaaactatttaggctgcatgcctgcctgttagtaatagagaaatgtctccttataataagtaaaggagaccaaataaatttgtatgatatacttttgcattagcttaaaataaaaatataaattatatacagaacgatgagttaccttttttcatgtttttctgcctttattatatgtgctttatttcttaaacttgcatattatcttactttaaatattaaaatacttagcatggctgctgaaggtcttaatttgtcaaaatggattattcttagggactctgtaatggttaattgacaagatgcttcaaataaattagacttaatttattatagtagtagtacttaaaatgcatttaagatttttaatattttcaccttttctctggcaaaatacatgaatcttcctttgctgggatttatttggcagccatttaacctgtcaactgctgaaactcagaaggcttgaatggggagaattttagaagtaatgtgggtacatctaattggttgggtagaaatttgatgagtttcacatgttttgagcaaagaggtgattgtaatttgtatgtgttgcagattctacagtttatttgatttctgagagactagctctttctagatttgtagagtacccttatgttgtgtttgcatgcatgctatagtgaatgtcactcaggaacgaggtaggacatagataaaatagtgcactgtaaaaatggaaattattattctttttatgaatttccagtgacaccttcctctcatttctatacaggcatattctcaagatgcctacctgaaaggcaacgaagcttatagcggcaatgcccgcaatatacctgaacctccaccaatctgctatccctggctgccatctgccccatcagccatggcacagccagttgaaatatctcctcctgactcatcattgagcaaacagcaaaccagtacaccagtactgacacaacctggtagggcctatagaatggaaatacaagtgcctccatcaccaacagatgttgcaaaatcaaacacagcagtgtgtgtttgcaatgaaagtgtaaggactgtcattgtgccttctgagaaggttgtagatttgttatccaatagaaacaaccatacaggtccttcacatagaactgaagaagtgaggtatggcgtgagtgagcagacctctttaaaaacagtgtcaagaaccacatcaccaccattatcaattcccaccactcatctaattcatcagcctgcaggctccagatcactggaaccttctggaattttacttaagtctggaaattacagtggacattctgatggaatctcaagcagcagatctcaagctgtggaggctccctctgtatctgttaatcactattcgccaaattcccatcagcacatagactggaaaaactataaaacttacaaagagtatattgataacagacgattgcacataggttgtcggacaatacaagaaagattagatagtttaagagcagcatctcaaagcacgacagattataaccaggtcgtccccaaccgcactactttgcagggacgacgtcgaagcacctctcatgatcgagtgccccagtctgtccagatacggcaacgcagtgtgtcccaagaaagactggaagattctgtgctaatgaagtattgtccaagaagtgcatctcaaggagcactgacgtctccatctgttagttttagtaatcatagaactcgttcatgggattatattg

SEQ ID NO: 4735 - DNA, 2300 bp, Homo sapien
agggcttgtaggtcccgcgacccacggggagggggcaggcgagcaccccgctccggcctccggctaatcccccttctccagcgtcggttccccggtcccgtgttattcaagacagaaaatattcagccccagagcctcccctggggaggggaggggaaggaggtggagtgggaggaggtggatccagggaggaagaagcgagaaatccgcccccgggaaacagctccgcgcggccacggagcgaggcgcttctgtcacttggcgttcgcgggcgccggagctgggccccggcccggcccggcgaggcgaggggagagtccggcggccgccgccccgccccacgccctcctgcggcggccgagagcccggggccggccggggcaggtcgcggcggtgcctgggagcggccggccgggggcggcggcctcggagcgcggcggcggcggcggcggcggcggcgggcagcgcgggatcgtccggctgcggggtccggctcacgccgggcgggcgggcggggcgcgctgtcccggagccggccagccccgtgcggatccactcgtcccgcttcctctggtgcgtgtctggtttcttttccgtctcagccgagagggcgctgcgctcgcgggccgtggagtgcccggcttgccgcgggctctctcccttcccgccacaggccacccggccgggcgctggctcggggccggagggagcccgcggcgggcgcccggcgggggcggaggggccgcgcccgcgtgtgcggagcaagggcgggcggcggggcggagggaagggcacaaaggccggcggtgggcgctggggtccggccggccagccttggaggaggggcgcctggggccgctcatgaatattaaccgagcctgcggcctagcgcgtcccggccgggcccggcgcccggccagcgtctccgcttcagctcgccgccgcgcttcggccgccgggcccgagcgggcgggaagggtaaggcccccggttttgtctcgccccggggctcctagcacctttgagaaagtccatattggggccgctctcctcgggagctcgaggtccccgacccgcctcaggaaggggcgggggaatcgtggggaggtgggtggtggtttgctttttctcgttttttccccctaggtggccacaggggaagggaagccgtgtcgagtggtagttgggggaaaagccgcgacttcagagttgctcgggtgtagctccagaatcatgccctggagcgggagcggcgccggcgtcccacccgcggccgcgcacgcctccccggccgtccccacccagccccgccgcgggccaaggaaaacagccgcctcctcggggacgccggccggggcggaggggcggaggggcggcgcccgagtcacccggagacgccgccgagcccacgccggccccagccaggctggctttgtgcttgcgtttttggggggcggaggggagcgaagagggggcttggaaagtgtgatcccatttcagcctcgtgggggagaaaacttcaccgaagtgtccctgtctgggtgatgcagaaaacaacatgcacagccctctgctctacccaggaaagacatgaattaaaatgcacttgaatggggaacattttttcttgaaggctgcataacagccaggtgtgtttgacgcaaccgctgggcagtttcgagatttctcttttttaaacaccccctcgaatttataggctttttgtttgtttacgttaaaatttttttttgtttgttttgctcgggaggaaacgcgaacttggtgtggacatgtgggcaagacagtgataggcgcctggagaaagttcatgacctttaacttctcgttttcctaggatctctctaggagctgacactcgaaccttcacgacccattcggatttttccaggactcaggagtggcactgggaagaaggggaccgctttctgcaattggcctcgacactggctgccaagaagacctgtcgcctttgtttttaagtctccagaaatggaagaagaaggcgaagtcagttgaagtcacgagaaatcagcgaggcatttgaaggcgcttcctgaaaacctttattccctggcacgttgtctgtttcaacagccctgcccctcctcggagcctgcttgtggaattcttccccttcgggtgtgtggtggcattccccgccacgtccaatgtggactccaaaggatttgtcccttctttgtcatttgaaatgaaatgatggccacgcgtcggactggtctgtctgagggagatggtgacaagctcaaggcctgcgaggt

SEQ ID NO: 4736 - DNA, 2300 bp, Homo sapien
ttaacccaaaagtcctcagctgttaggtacgccgttcatgccatgcatgcacatttgcatgtgcaaggagttgttttgtgctgtaagttgtttttcctttctggacatattctataagcccacaagcggtgagctacttgaaccctgaatttctattcacttcttgttaatttactcaattgtatctagcactggatactgctacagccactgggctatttagtaaattaccatctgactgaaatacagtccttgtattttattctatttttcttttcttgattattagctgacttgtttggtgacaggctgtcaagaacacgcaaatttcatggccatataaaaatgatctcgtcaacgtcttccctcgaattgaagcggaggatttagttgtagatttggtttggcaccttccactttaaggaagatgtaaaaactaaggcgcaggtactccagctgcagggagtgttttttgtccccgctcccctgtcccccataaagaaacaggacctcaggtggtgggcgggcggggaaggagaagggatgtttctaagtctacaggggagagtgtagaaagaaagaaggaaaaggtaagaggactccacagtttctaggttttgttcttctttttttccctctggacagcggtggcagctgatcagacacaatagctggcagtccccggccgcagtgaggataaaaatgaccctcaacagcaccagcaggagcaccgagaaggggaggggagtgtgtatgggagggggcgaggatgagggtgacaaggtgacaaacgctgcctctgactgcgagcaactccccctccagccccgcgaggctcggagccggggagccacctccccggagcggggcggggtgggaaggagaggccgagggggcggtggccttcacccgggggcggggaagagggcggagggaagcctgatttaccagcccctgattggttcgcgttctctcgtcgcgtctcccgattgggtaatttgcagcgggagatgttgtgaggcacggcggggcggagcgagctgccggggtctgtgacaaggcccgggaattgggtggggagggtggcggttgtgccgcggctccggagccgctgtgacctggagtgtggcggacagagaagcgcagccgcctctccacagttccgctagccgcgccaaattcgctcagccgctctgcagaatttataaaagggaaagaactgaatgagcaacgcttggctaacttcccccttcccaccacaggaagagatttttgctgtgaggcgtgaggggacactcccttatctggaagtcccacgtctcgtcgcagcttcattgccttcccgctgcaaaaaaggggtgggggcacaatttgccaagccctgtcccccaatctaggacctttgatccctggagtctgcagatgtcgctgttataggcttgtccccctctccaccccagacgtctaccaccaggtctcctttcccgggagcaagcccatccctggacgctgccgttcagcgcttgggagactgcaggggcggggagcgttgtgtgcctggttttggggtgctggggggcgagggcttgtaggtcccgcgacccacggggagggggcaggcgagcaccccgctccggcctccggctaatcccccttctccagcgtcggttccccggtcccgtgttattcaagacagaaaatattcagccccagagcctcccctggggaggggaggggaaggaggtggagtgggaggaggtggatccagggaggaagaagcgagaaatccgcccccgggaaacagctccgcgcggccacggagcgaggcgcttctgtcacttggcgttcgcgggcgccggagctgggccccggcccggcccggcgaggcgaggggagagtccggcggccgccgccccgccccacgccctcctgcggcggccgagagcccggggccggccggggcaggtcgcggcggtgcctgggagcggccggccgggggcggcggcctcggagcgcggcggcggcggcggcggcggcggcgggcagcgcgggatcgtccggctgcggggtccggctcacgccgggcgggcgggcggggcgcgctgtcccggagccggccagccccgtgcggatccactcgtcccgcttcctctggtgcgtgtctggtttcttttccgtctcagccgagagggcgctgcgctcgcgggccgtggagtgcccggcttgccgcgggctctctcccttcccgccacaggccacccggccgggcgctggctcggggccggagggagcccgcggcg

SEQ ID NO: 4737 - DNA, 2300 bp, Homo sapien
ctcatcattctgtgccctttataggatgacctatataagtctatgtaggatgttcttgagcacacattcataagattcctgttgtctttcaagcaagttacatttttcactgtgaacttgttggattttacgtttaaactaatagcctttctaagggaagaagatttatctaccatttcccttacatcttccgcagtgtctaggctggaaccaaagttgatgctttttgacttctgtatggcaactactcctgtgacatattttgaagttcctggtaccccccaatctggccctgcacccacactgagcctcatggctaagttttgatatccaagcagtaagatggtctagtggaatcccctaaagcatgggtcatgagccacccacatcacacccatctggtgtctctcagcaggtacaggattctaggtgcttccacagatcttccccacccagtgaagctgcattaaccagctccccaggagagtcttgtgaactctaaagtttgatcatcatcctaatgatagcacttttctgctcctggaaattttaatgatgttgcttgtgaatatggttcctgggcctggtctttgaaaatgaaaataaaagatggtgcttgactttggggaaaagaagtgagatgcagactacaaaaatggctcaaaacaacgccctctcacaattactaggagaaaatgtttacccgtgtgctgagaaacaacaccccccatttctgtaaggcagttgccaagcagatgcctgatttcagggatctctggagctgcaccctccaaggcgctggcgcttagaaacgacatgaagagccagccctgctgagcaggaccagggcgccaagtctgaatgactaatatttttccaacctagaacgtcattaaccgattgataactatttcccctttaaactaggcaaaatcagcattcctctcccctctgtgtgccagaattcgaagatgaacaaaagacgcctgcatcaggaaaactgtgttaagttctcttggattcagggcttcgacccgaattgggctgagtgaatgaagacgctggtgagatgtcagggacctggggaatgaagacacacccagaaaaagcaggaacctacaggagtggacaaagaaccggagcataggcatgtgagaggggttgaaatgaacaacagactcatacaagaaggatttctaatcagaaaagagcgattgctttagtaaagctgcaacctggaacaattacaatctgaccagatgttcttgcaaaactggtaaagcagagaatgtgtaaaaatctctccccctcctcccctgaatgcagttgacgaaaggccgaaaggctggatcctcaaagcccagatctgatcactgcagatccgggccaccctaaaagcaatcgggtgtaatctttccagctccaggccctgggatgagggaggtgggggaaggtggagaaaggtggaggaagatggagggaggtgaggggaggtggagggaggtgaggggaggtggagggagatgagcggaggtggagagaggtgggtggcggctccaaggtttgaaaacacatccaggacacttcccatcctccaagagcacgctggctcacaggctctttcacgcttctgcttgggacaatcgcgtgcatgaaatctggcagggaggagtcaaggagattgttagcccgagggctgggacggtggatctgggaatcaggggcctgggggacacgttctcttcctgccgcgggcttcctgctccagagtccccgcggggcttggcggcggggccgggggctgcacgcgaccatccggcagggggcggcggcgacagcggcggccgcaagggacgcgtccggggcccgcgctcagggggagcggtagcggcttggcagctgctccccgcgcccccgcggcctagccaggggagggggcgcagcgccggggccatggatccgcgtcaggccgctgcttcccgccggcgggcccggggcggggcggacccgtccccgtccccgtccccgtccccgtccccgtccccatccccacgtcccatcccccacgcagccttcgccctccctgctccttcccgcgccgtcttcccttcccgcgttccccgggagaaacatggccgggagcagcgaggaggcgccagactacgggcgaggcgtcgtggtaaatgcaaactccctattttggggctcggcccgctcccctccctccctggcaccctgcttgtagattaaatgcttgccgtgcgtcgggggagagagagggccaccgctttgttctccct

SEQ ID NO: 4738 - DNA, 2300 bp, Homo sapien
ctttttaatttgccaaagaacagaatacctacctaataaaataactctcaaattcaatattctatagaaatacaatctaccaatctgttatagaggagttttatctcatgtaatatgcaggaatttgaaaccaaaagttggtgcaacaatagaaaatttgaaaataaattctgcaactgtgccataacttactttacattcctctttccagtctctagatgttgatatgctaatggagatgtaatacagttactgctctaatttaaaccagatacttaaaattgaagaagctgcctacttgttgaagctattaccctaatactagtaaaaataattgaccattagatctaaaaggggccttggatattatctggtacatttatctcacagatcagtaaacaaatgaaactttattctaaagttcacaaagacaattaattgctaggcccgatttttagtccagtccttttcaaatgtggttttgacttgcatacggacaaggatgatggtaaaagacaggaaacatttcaagtcctaggagaaatgagattttctccactactttctttgctccccacagatttaagtaagttctaagaagtccctacagatgggagtaactgaagtgcttcctttgcacgtttttgagatttggagaatttaagaggttctaagacctatgtaaaatttcaactcaattacatattttttggttcattatctatccaccaattcttccttccatttaaaccattagatctgaaaaagtccttagaaactgcctaatagtggtagatatttcgtttcactgatcaaaaacctgaggctcaaaagcaaatgtaaatttatatttcataaaaatcttgggggaaaagtcctatcctatcccattagagagggagtagtgcagttagaaatacaacaccgaactcctgaaaccaaacatcaagtatccttaaacaagataatagaattgtgatttttttcttttcaacatgaaacttcatactatgctgtatatcacatataattaaattacacaataatcacataccgtattaataagaggttaagtgtaatataataaaatggtcatctcacagcgccagactgccctctctgtaaaactgtgagatgctgaatacctagatatttcgaccttttctctaacaagttatcctccaaggctacttcatcgaggcaaaaatacattttatttattattaaaaattccagtatatgtatgcttaattaatactgagtattccccattcttgtttcaagtgatagtctttgcttatccacatacctaggaggctggggaggctccttcaagtcactgggtatgaggttataaatgcactcagaagagcacgttggatccatggccaccaaatgactccttaaaagctactctccacaacttttttctccctgtcccagtatctccgtccctttcttcactgcttcccctttctttcttcttcgccttctgaaggaccacaggttctctccttcacatcgtccccctttaaccccctcttagcagtcctctctcgggaagaaaacaccctatttctctccggattgctaagcgtcgttgactgtgcggttgccgtggaaaccgttactaggcaacgaggaagtggcaggcagcaccgcaaactaggtctcccctcttccctctttctgcagcgccttctgctagagaagctcatttggaagccactgtttttacgtgcctttgaaagttaacggggtgaaaatgatgtccccttaaaaactgtgctcttttctatttctgtgtatctggggaaaaaagaaaaatcctagtagagacggcaaagcgcagctggtgcgcaggcgtcacccaataaggtttttgtgagcaggccccaatcgcggtgtgggcggagcgagcggctgagaccacgaggacgcaaggccagcgccgccagggagacgagggaggggaggagcctgaggagatcggagtgctcggataggctacagtgagaaaggagagtcacgtgccctgcgcgaggccgctcggggaagggcgtggagcggaggcacgctggccgccgcaggcacaggcgcagagtccactgcgcgggggcgggaccggggagctagctgcaggtacggtgctccgtctcctgtggaggctttagcggctcgtggacactgctcccccatttcctttcatttcccccgtcttctcagtgagatttccttggtgagttattggaggagaaaggaaggaaaactagaagccagcccgctcccatcgcatgcct

SEQ ID NO: 4739 - DNA, 2300 bp, Homo sapien
aaaaggcaaggagaattgcagatcaaatgtctaagaaaaaagaaaagtttttttccaaatgatttaacaacctgctcatggctgtaaactaactataccacagtgaggtcttgcacaaattgtttagcattttttaaagcataataaatatacagacatcagtgaaattattttatttcagtaaccccagaacatcaaggctaccaaaggccagttggtgctaactgcagaaatcatgttttgcccttacttgctatttcaggaactgattaacacaaatagtctcaaggtgttccttctaattagaaaattcataagctttagccagtgactatccacttggctaatggcgttatcattccatgagtccttggttcgaatcttcgtacatacaggaggtttcccgccaaattttttctctatacttgctaaacagaaatcccaaacataaaatactcaagggcgaaaagaaaggggcaaagtgatatagatttggatctagatctaaatatagatctacagatccatctatctaaaatgttttggaagacaatctgatgtgaagaaatctggagaattttccctaagcgtctgggacaaaaattaaaatcaactgtatacaaaaaaaaaaaaaagaaaaacttaacgtattcttatgtagtgaaattcagtaagagcccaaagtaaggacctacacattcagtaaagcctttttatacaggaactaaaaggttcaccaggccattgtgttgttttaatcactccgccagccaaccaggcagtgagaaacccagactcaagtgtgttttctctcctctccgggaagctttatttccttcgggcagagtggcctctgtaccggtggttcagaggcatccatcttcctccccaaatcctattaccaaaatgtcttttaaacactcgggtaaaagcgtctaaatgactttcctacggcaggcccatgtgcatagatttacgggtgaccaggtggaacaaaaaggaataaaaccgcttctcagaagacaattttccaacaagggacaccaaaaactggacaaaaacgtaaaggcccacttaaaaggcttctcctcttagtttaggctgctcatttacaaagagcaggtccactggttcctggagaacgacctagaggaagagtcccgacccggggaagagcaggcgcagagccgacccggaggaccgcccaaggggcggtcccgggagcaggggcgggagggcgagcgcagcaggcggaggaggccgcgggccccgtgcgcgcactcacacacgtggcgggcagggctgcgcggcgttccgaggagcctcgaccagaagcagcaggaaaaatgcgcgcagagttgagatgaccagcgagtagcggaaaggggaagggacggtacggggaaaggcatgcgatgggagcgggctggcttctagttttccttcctttctcctccaataactcaccaaggaaatctcactgagaagacgggggaaatgaaaggaaatgggggagcagtgtccacgagccgctaaagcctccacaggagacggagcaccgtacctgcagctagctccccggtcccgcccccgcgcagtggactctgcgcctgtgcctgcggcggccagcgtgcctccgctccacgcccttccccgagcggcctcgcgcagggcacgtgactctcctttctcactgtagcctatccgagcactccgatctcctcaggctcctcccctccctcgtctccctggcggcgctggccttgcgtcctcgtggtctcagccgctcgctccgcccacaccgcgattggggcctgctcacaaaaaccttattgggtgacgcctgcgcaccagctgcgctttgccgtctctactaggatttttcttttttccccagatacacagaaatagaaaagagcacagtttttaaggggacatcattttcaccccgttaactttcaaaggcacgtaaaaacagtggcttccaaatgagcttctctagcagaaggcgctgcagaaagagggaagaggggagacctagtttgcggtgctgcctgccacttcctcgttgcctagtaacggtttccacggcaaccgcacagtcaacgacgcttagcaatccggagagaaatagggtgttttcttcccgagagaggactgctaagagggggttaaagggggacgatgtgaaggagagaacctgtggtccttcagaaggcgaagaagaaagaaaggggaagcagtgaagaaagggacggagatactgggacagggagaaaaaagttgtggagagtagcttt

SEQ ID NO: 4740 - DNA, 2300 bp, Homo sapien
ttcaaaaaaacttaaaaataaagtgttcttaactgcaagtactgattttcagtcaagctgtttcgaacatgaacaagttcatatagaaagagccagggaaatgacaagcaggaatttctttatttgaaaacattgagtgattctccccttgccaccacaggtctaccattggtgattcacatgttctcatttcagccatgttctcttttggacgaggctttgtggtctacaggagtggagtctatgtcttctaccccttttgaatcctccacttcatttcttataaagctgagcactgagacaggtactttataaaatcttattgacacacgcacggtggctgaggaaatcagctactctttcaatggcggtgtacccttcaaacaataatcagtgttcttgaaggccggtgacaagaccactccaaccaccaaatatatggcaagaatctttctgggaagagcaaatagattttgagggggcttgaagatggaaaacactccagagttacagactttgctctcaaaccatctgcgcacgtccgacctattgagccggtgtcacttgtcccttgcagagtgtgcctgcctcattccacaatctgcccatgaacatttagtgagtgtctgttattggcagctcctggttaggtaaagtgggaacaaagatggacacgggagagccccggtcctcaagtagtccaaatctgctggcaactgggacacatcagagcaactatgactcaatttagtaattgtctacagagtgtggttttgcacaaagggcttctcaattgcaagggggaacaggagaaagtctcaaaggggagaaaatatttgaatggggctttgatgcacaaggaagactaaaccaatacagatttgagggaggagcattataagcacagggaatgacaagtaaaaacacaggagccaggcatgctggctcacacctgtgatcccattgctgtgggaggctgagatgggaggatggcttgaagtcaggagtttgagaccagcctaggcaacatagtgagaccgcatctctacaaaaaattttttaagtacttagtcaggcatggtgaacacacctgtagttccagctattcaggaggctgaggcaagaggatttcttgagtccaggagtttgagactgcagtgagctatgatgatgccactacactccagcctgggcagcagagtgagactcttaaaaaaaaaaaagaccagacacagtggctcatgcctgtaatcccagcactttgggaggctgaggcaggaagatcacaaggtcaggagatcgagaccattctggccaacgtggtgaaacccatctctactaaaatacaaaaaaaatagccaggtgtggtggcgcacatctgtagtcccagctccttgggaggctgagccaggagaatagcttgaacccgggaggcggaggttgcagtgagccaagattgcgccactgcactccagcctgggcaacagagcaagactccatctgaaaaaaaaaaaaaacaaaaaaaaaaaccacaaaaaaacacagaggagtgagaagcaagtgcctgtggtgcaggggtggagcatgcagtgggaaggggagggaggtgatgtgcagggggatttcctttcctggccctgcctttcctgtcattttcgggcagcccaggtgaccaggccctcttccaccactgtgtgagtcaccacctatctcctccacccaggcctgagtgtggctgatcaaggtacgtgctgttactaacacgttcctccgaacacagcgtcaacaattagtaatgaatgaggccagacccgctgtgtcaccagctgccggaaagccagctccagaggtgccatcagcccagctcatggccagggcttccttcccagccatgcctgcagacaggctcctgctccaggaaataggaccacattcttaggagggacacacagaggggaaaaacagaaagaaaaactgcaggaggaggctgacccgaggctgcccagacagggagtggctgtgaaaaagtccaaggttttcctcaaacattccacaatcgtctatagacactgaaaagcaggcatgtttaactttttctctcccttaagagaggaacactggtggaaaagtgacaagagagcaacaagtcctacttgctcaagaagagaatgactcaatacgcaggattaggcttataggtaagcaaggaaggagtcgctccaaacaatgtcatgtgtggggttccagggaaatttctgtacaaaaccacattaaatatgaggtcatcaagctgttagaaa

SEQ ID NO: 4741 - DNA, 2300 bp, Homo sapien
ccatgttggccaggctgttctcaaactcctgacctcaagtgaccctcctgctttggcctctcgaagtcctgggattactggtgtgagccactgcgcccagcctggttgttcttttttaattttgtttccattttcatctacagtcaggttagaattggtaagaaccaactagaaaaatggccagtggaggagagatgctgaccaccaatacttctaaatctaagggccagtgtgttctaaaaaaattcaggctgggtgtggtggctcacacctctaatcccagcactttcggaggccaaggtatttggatcatttcaggtcaggagttgaagactagcctgaccaacatggtgaaaccctgtctctactaaaatacaaatattagccaggtgtggtggtgggcacctgtaatcctggctactcgggaggcagaggcaagagaatggcttgaacccaggaggcagaggttgcagtgagcccagattgccccactgctcttcagcctaggtgatagagcgagactccgtctcaataaaattaaaataaaattcaaaactattactccacatcaggaattttatcagttattgtaaaagagggcagacgagtggattttctggctctctcatgtcacttccctatttgagagcctttgctcatgggcttctagtccaacagtgcagcccagcctgaaagggctgatctgactcctcctctcctctcaatcccatctcatcctgcttctctctctctttctctcttttttctttttttttttttttttgaaacaaggactttctctgtccctcaggctggagtacagtggcacaatcatagcttactgtagcctcgaactcccagcctcaagcaatcctcccacctcaccctccaagcagctgggactacaaatgtgagccaacatgaccagctaattaaaaaaaaatattttggagacggggatctcgctacattggccaggttagtcttgaactcctgggcttcagcgatcctcctgccttagcctcccaaagtgctgggattctaggcgtgagtcactgtacacagctcatcctgtttctcactgcaaccaacactcaccgtgcttgcagagcatcccttgctgcctcccacatctttgcctttgttcacaatatttcttctgttcacccttctcttcccctttctatccatggatttcctgactcttccttcccctcttggcctccctattttatccaccacacaataccctcttcagatttctgtctgaggactgataacacttcctcacagatatttgtttagatcatgagcttaccctgtgactctctgaactcctatgatggattgcgtgaactcctcagtgctgggcccgtttgacacagtcttttggaaagacacttaacaacttcctgccttagtttcttcatctgtgaaatggggataacaaaaggattgtggaggagataaaggaagtgatatgtctaataatgcataataataataaacataataattactgatatccatgacatataacaacaactttcctaataactaacacaacattcacaatgtatcaggttctactccaggggttttacaaatttaactcatttagtcctctgggtaagcctatcaggtaatttctcttattacccctgtttacagattagaaacctgaggcacagagaagttaaggagttttcccaaggtcacacagcttgtaagtgataaagatgagggttgattctgagtagtctgggcgccagagcctatgctcttagtcaccaagcaacactccttcaaatgatcggtgtttgttaattaccattaagtataaattgtctaaaatctacgatcaagctaagcctggaaattaaagaccaatgagccaatccacatggaataccactcaggggctgccttaaagatatgagccagccctgagggtttccctcctgtccccttactgacaggtggaccaaaagaaagggaaagaaaaccacattccatcttcacagaggttccagttagttcctaggcaaacaagaaatcaaaagcatccacagatgttgtgtctaccaccctgatgcagaaagagcttaaggagaagctctgacaagggatagacagtttacttatggaaacaagcagaaaattaaatctggtctctgcccagcaagcatctcacctcccaccatagcgtctggcagagaagtgagccaaggtggcccctggcgcagcaaatgtttggcacatccatttgcacaggagggggaagaaggcgcattctcaaa

SEQ ID NO: 4742 - DNA, 2300 bp, Homo sapien
gatctacgaatacaattatgtcttcttttaagttagatactagaggattttaaagaattgttaataagttatataggttttctaaaaggatcaatgaatgaggaaattatacttcggactttagatggttaagtaaatggaataccatagtttatactttgatacattaaataagcagaaactctttctgttattattgccacccatactgtggcagagcactaaaccgggatgacctttacttagcataggagcatacattgcaaagaaaaatttaaacaaaaagtcggaaatgaacatgaaatctacttgtaagtaaatataaatctaataaccactctttgcataactataaaaactcatttggagaccaaccactgcggtttgaaaaactggttgctgtgtcttcttccaaaaaccctcatcactggtgtgtcaggcagacttctcttcttgggtgaggagattgatttttaagttagcttcatcatcatgatcttcccattcattcactaatttagcaactatttagccagagcctactatgtgccaggtagtgttctgggtgctcaaggtacctcagtgaccaatgcagacaaagatttttgctcttttggagcttacattccagtccttaagtattttctcaataggaaggatgacatgaaatagtacagtgaatctaagcagtgcctgcttagaatgccatgagggacatttttgttagttgggaattaaagtaagttggatattttctatttgtgtctttcttggggaatttgaaaatagaggtgcatatggaaagtggagctagctgtgcaaaacactacttttctggtaccagtctacttttggagtgtcagaagacacttaaattctctaataagcgtcaaaacatcaattagattgtgttaagaaatttaccaataatttgggggacttggcatacttgctcagttcttctttcttctgctgggatatcccaacctttagctaaatagaagtcttagttcttatctctcaattccaggaactcccagtcaggatgatttcccttctcactcaacacaggctccttctcattctcccagagctcatgagtcctcccccttgctctctcccttacacatctttacttgcatacatttttacacgttcccctccattctggcccccaagcagagattccttaaatatgacttttttttctctccttaaagcacagctggtagatttctccattactccctcagctaagatgagcctagacaagtatgttttaatcatttctttaactgacaacaagaaagatgatttgataatttgcctaaaatgagcagatgctcaggaggacacgtctccatcctatgtcccttctgtctaatttcacctagaaatgaaaactactcccttctccctcttttccaggcaaaaggctgatttaactaagcatgcaagacgccaacaccctccccctcagtacgtccaagtttccttcgctctgagccaccgaatctctgcttctcccccctctgccgcccaccctacgccacccacgcaggtttccgagtcatccggaacgcgagtgggtgcgaggactcggcaggctgcctcccgcgcccccgccgcccgcgggccgcctcgggttcagcactggacagctccctccccggccccacaaatggcagtcggctgattgacagaggagccgaccaaacagggaacaagacgacttgcagccgccctacaagggtttggttgcggccaagctgcctctttaaactggctttcctcccccgaggagggagcagggagagagggtggagtgtggtttgcggccaaacctaaaggctgcaattaaccagccgcccggccttcgctactccggacagacgaacgtcttaaaggacgtcttcgctcctcgggagtcgcggctgcgctcgcggtgcgggtctgggcgcgcgccccgcgcctccgggcgaagcggtcgaggaggagccagtgccgggaggcgggaacgacctgcggcgggtgagactatggagcagcgtcttcggcggccgcggcggcagcagcagcagcagcttctgaacgcgcctcaatgagagcggcggtggcggcagccgggccgagagacggactcgggctgactccagccgctgggagcgcgaggccatgtaacccgctcggctccaggctgcgaggtgcgtaatccccagccggcccctcgcgcagcgggcacggccagcgctgccacaggtgacttgatttctgcgacggtagcttagccacccggggcc

SEQ ID NO: 4743 - DNA, 2300 bp, Homo sapien
ccttgaaaatacatatattttacacagtacctacattgtttatagcaacccctaggacaccttcatagaacagagtttggaatggtggtacatatgatatgaagtatgaagtgggcttaaatcctggatctgctattttactgctgtgcaatcttaggcaagaagctgaacccctctgggcttcagattccttttctgtaaaatagagaaaataataaaacctaactcataaggttgttgtaagggctaatcaagacaacgcatgcaaagcagttagcacagagcctgacataaagcgaatgttagatgaaaaagacagataaatcctgggacttggggctccctaaaaagactcatttaaaggctacagtttgctggcagtgaatagcatctgctggtctttcctcttctgagcaaacagtatggcaaagattcaaagctgggctcagctcttactaataggatcctgcaggaattaggaggaaatgagattatcttgaaagtagaaaagagttagtctggtttaagacaagacctttaaaagagatagaaacacaggcaaagacacacacacatgcacttaatatggtcatacagaatcagacaaaggggtttattatcctttatgcctttgcaagtgttgccaacattaaaagctacaaaacttgataactggatggctccctagagactgtctagttcaactccctcactggacagataagtagctgaggcccagagaggttaagcaacttggttgaggtcattcagcagtaaatggcagtaccaagacaaacaagccttctgacctttcccacttgcccacccagtacttgatctggcatctttcagcaggtcagcatcctgaccttgctgtgacagggtatttaaaaaataataaataatccacacacaaaggtttctcagtcctgcccaggttcccaaaaagtacaaaagcaacctcagcccccaagaccctctttccagagccttccctcatgggactaagggaagatctcagttcatcttgggccctctcctaagccctctttggtgtaactactctttcagttccttcctcacatctactcttaaaggttgcttctagaaattccccgcctcaaaggtcaggcacttcccaggcagaagttaaaacctgttaatttgcaaattctctgcttccctcaaatgctatagtttgagacaggaagtacagactcccttaagtttcctccagcctccttgagtgaattcagtcacaactgatgcctccctcccgaatataactaggtccttttataaatcatgtgagtgtgtgaagggctggagaacccttaagtatgcctaagacagggaagaggaggaaaaggccaccgaggaaggaaagatcaattgcggggagaggggagaccggtagaaggagcaccctgaccaagctgcaaagtctggatcccagagacagctagctgctgggactgactcactgctgaggggccggaactgcgaggagatggcacagttttaattataagctctgactaacaacagaccggtgcccccaactgcacacgtaggaagcaggcagaggctaccccaaagtggcagaaacaaggaactctctgttcctcctgctcccttttcgcctctcatctgaggcttgccactccgcggacacacccggcgctcgccaagttgtcgcatcgccccccggtggggaacgcccctccctgctctccggacaattggagggaagcacagagcagcgggggtgtctccgtcctgccaagggctgcctgtccctcgcccagtgcggggaaactggtccgagagaatgaatggctttcgccgagcgccggaagctgacgggcgtggggcgcttcttgcccccaagcacccgcgcccgcgtggggtgtccctcagcccgggtctctactctgagggtgagaagcgttcgcgtcacagccaagggttccttcctcacacgtgcacccacccacaagaccggaaggaaagcttcgcttttgccttcccccctgccccccggccctccctacctgaattccgggaccaggttaggctgcaacccgtagatggcagaggaaagagtaaccagccacccgggcttgtaactcccgttctcgcactccagataaggcggagaccacttgaagtggctcttgtccccgccgagcccgtccttgcgccgccagctgtggcccaggccccggggcccctgattggggccgcggcggtgtaagtggggcctccacttgcgccggaggccgtggaaccactcggtc

SEQ ID NO: 4744 - DNA, 2300 bp, Homo sapien
tagatcgaagactcttcatggccatcgagaaacctggaatctgctgaatggagtgtagaagtcactctctaatctccaccttctatgcgttctctgtgggttagcaagtagaatggaaacttaacccttggtgaaaagctgctttgtgcattcttctagactctatctgtgtttttggcccacgaggataggcatggtactggggtaaaacattgtggtgacaactaaggctaagtgttgactgatacagccattacctactgcagtgtacatgcctccaatttacatttgtttgaaaattcctatataaagaaactaagtaaacaaagcacaggtcttgataaattcacagttgtgtgtctatactgccttcatatccagttgaaaaatggtcaacacatcataaatgatttcatgctggacacagtagctcatgtccataatcccagcacttagggaggctgaggtgggacgattacttgaagccaggtgtttaagatcatcctgggcaatagaggctgatctctgtctgtacaaaaaataaaaaattagctgagcatggtggtgcacacctacagtcccagctcttgggagggtgaagcaggaggatctctagaacccaggagtcgaaggctgcagtgagctatgattgtgctactacactgcagcctgggcaacagagctaggctctgtctctaaaaataaaaaaataaaataaatttaaaaagaaaggaagaagaagaaaaagaaaaaatgatgtagcagaattttccctgccaaatccaccagttaataacctattgttatatcttgaaagttatgttgggattatttccttctgaaatggacttccttccattccaccttctatccctgtgtatttttgttcaccaagactcttatgagaaaattctactacaaatatgccattgttggggagagaaaagctttcacctcagactctctaaaacaccggcttatgtctgcccacccctctgagaagtaaacatgatttgtaaataaaagccaccctggggctcacatgagatcaaaatttatctccacagttttcatgttatgttattatcctaatgttgccttaagactctcaaaaataacactttaaaagatccacatttctcatatctaaaggaagtttgttattcctttgtttgcaccctaccttgttagaaaaaggattggaggaagctttctgtgatacaaaagatagaaagaaagaagggaagaaagaaagaaagaaagaaagaaagaaagaaagaaagaaagaaagaaagaaagaaagaaagaaagagaaggaaggaaggaaagaaagagaaagggaaagagagagagggagagagagagaaagaaaaaggaaggaagggagagagagaaagaaagaaaaaaggaaggagggaaggaaagaaagaaagaaagaaagaaagaaagaaagaaagaaagaaagaaagaaagagagagagaaagaaagaaagaaaaagaaagaaagaaagaaaagaaaagaaagaaaaagaaagaaagaaagagaaaaaggatcagatcaggtcagagaaaaaacaatggttaaaaaaataacttgtcactagggtaagaataacatgcataatgcattttttaatgtcctgataaactgagctgtatatttgtttcataactccccagcttccacagcaaaaatagagaactgataattatcactatttttattctttatggttgctcagggggaaaatttttaaaggggacattactggaataaggttacccttctgtcactcacatttgattactcatagacttttctatttgaagacgcattaaggaaaattttccttgcaaacaaatgttgtcaaatgaattgaccaacatgcatacctgccaagtgcccagcatcctcaagtacctataggacattaactccagtagcctgtgtagcaaagtagaataaaaataaagttactgggaattcaggattgataatatctctgatttgtatatttctgcagcagtcagtctctttcaaaatatgggaacagcaagttaaaataaactgtcttattggcagaacagagtgtgatcatgagatactattcagcttttatgctgattcatcagctcacagtgaaacgagcttgcatgagagcatcccaggaccactgaacattcagaggtatgtcctcgcatcttaatttttttaaggtaaaatgagattttcatagaataaggatacagctgataaatagcaagtctaaaattacatatacactagcctacatttaaga

SEQ ID NO: 4745 - DNA, 2300 bp, Homo sapien
taggtctaaaagttctctcttttaaaagtgcaaactttcttttagtgcattatttcattttatatgcataatgtccctctttaatggaaatacctgtaaggtaggtgtctctatttactaataaggaaactgaagggaggaatcaatgatttctcaaaggccaccatcttagtaatcacctctttatcacactaaattccaaaagttaccacctctgtaaatgctcaaattagagtttgattctcacagagctatcaaggatgaaaacatgatgcttcaaatgatctaaaccccactgaactagcttcccagtgatgggccaagaatgggcttcggccttcctgtgtcctaaggactttcttaggactttctctcttttctgtatccacattgaattcccactcccttttatacttactgaaccattataatcttagttgtgatatgcttgactgttcttttcctaggaaaatgcatttgccggagttagtatgatggatatagtagaccacttttaaggaatccatccctccatttcttattcattactcaattaatatttactgggtacttctaggtgctgcaactgttctaggcattgaatttgaaacccgtctttgccacatataactataaaatgtttggaaaattgccttctatatgtgctgatactccaagatggaagattaccaatataagtgatattcagttaaaacctacacattctttcactactaaccttatctaaatcatctgatcatttgcattattaactttttagaacacgtggctcaggtgttttcttgattattattttgggcacttttagctggttgtgcctttattgtcagttttgcggctatcaggacctcaaaacatttacatatacatactactcattcaaatacatcaaaatgatcatcttacatctattcaggcaggagtccaagatttgacttacatagttgttagtaaaatattccacattttaagatcttattggtggcctctacttgatgtttctctattaattttgaacttttgtcattgttttgctgttatgttactgtgtgggagggaggaattgtataatttcactatataatttaactgaaatgtgcacttttgtcaagtgtatgcaaactgtttcatatagcacctactgcataggctttattttcctactgatctgtacatttcgggcagtgctacaatgaatagaatggaagaataggtctcatttgctgtagagtgaatttgtgtttttgctatttatttcttaccttgacctaaattcatttattatcagatacttccattgaatctcatgattgacacaataacatttcaaataattgttattagaatgtaaatatttggtttggattcttaactggaaataaagctgcagattaaaagtagtttcattctaaaaggtgtgttttccaagaaaacttaatgaagaccataaataagacaagtttataatccacacattttggggatagagagaagggacaagcattgagaaaacacagtagggtgtaaaacctctttaaggctgggagcagtgtctcacgccagtaatcccagcactttgggaggctgagacaagcggattgtttgagctcagaagtttgagaccagcctgggcaacatggcgaaaccccatctccagcaaaaaatacaaaaaattagccaggcatggtggtgcatgcctgtagtcccagctactcagaggctgaggtggcaggataacttgagcctgctagttgcagtgagccaagatcatgccactacactccagtcttggtgacagagtgagactcttatctaaaaaaaaaaaaaaaaaaaaaaacctctttaaaaagtaaagtggatgtgggccgggtgcggtggctcacgcctgtaatcccagcactttgggaagctgaggcgggtggatcacgaggtcaggagttcgagatcagcctgaccaacatggtgaaaccccatctctactaaaaatacaaaaattagccaggtgtggtggcacacacctgtaatcccagctactcgggaggctggggcaggagaatcgcttgaacccaggaggcagaggttgcagtgagccaagattgtgccattgcactccagcctgggtgacagagcgagacttcgtctcagaaaaaaaaaaaaaagtaaggtggatatgtgcagtggctcaggctagccagcctgcaggaccacctttgggaggccagagcaggaagatcccttgaggccaggagtttgagaccagcctgggcaatatagcgaga

SEQ ID NO: 4746 - DNA, 2300 bp, Homo sapien
cattacatgttaacatgaatagcatatttttaagtgaaaaatacctgtattttccaaaaccaaaaaagtttaatggtaagaatggcattattttatattcttgcacatttctttaatgtctggcataacagaagacgttacctgtttctgcattcaatctgttgtgatatcacatattatggagccactggaaaacttcatcataaattcatttaaaaaatgggagagaaaaaggagtggaaaaaagtcttattattaaagtaattttggtcctgtgaacctcccgaaatggtttcagagaccgccccctgacccccaacaaatttcccctagaccacactctgagaaccactggacttagctcttctagcttctgtagttttcatatgaattctagaatatatttgtctcttaatttgggaggtagtaattatgtgtttaacatcttgtcttctaacttaggattccagtgtctttccaattataaatagtctgtcaacaatcctgcatttttaaattttttcccacttttctcctatatttctcattttttatcattcttagttatttcatgttctttcatgcttctattgtgaatgggatctatttttctattgtattttaattgggtgttgtttgtctctattgagattgtgactttattttgcatgtgagcactcagttgctctaattcttaaaatctcccaggtatgtccaaatggccataattatgttgaataatatatttgctgtgatctgtttttgatgagataacttcttgatttgaagctgttcatatatgttaggcttttgattcaatataatccctattacaagtccactattcaatttctaatttttttttttttttttttcgagacggagtctcgctctatcgcccaggctggagtgcagtgacgtgatctcggctccgtcactgcaaactctgccttctgggttcacgccattcacctgcctcagcctcccaagtagctgggactacaggggcctgccaccatgcccggctaatttttttgtattttttagtagagacggggtttcactgtgttagccaggatggtctcgatctcctgaccttgtgatccggccgcctcggcctcccaaagtgctgggattacaggcgtgagccaccgcgcccggcccaatttctaaattttaaagctactttaagaggaagggtcttgaatatactgaatgaccttttgaaacagatttttaacatcacattttttccttaagatatgcattgattaggattagatgacctctctttggtctcttctataattctcatttagataacatgaacgacagacccattgagataattaacagaatcaaaggatgttttggttgtagttctcacctgttcaatggatgaaggtatagcaatacccaatatgtccctagagactgttcaagagaatctggccatcagggtccccccaggtgagccctgtgtgacaggagaccacagaaggtctggaaaggattgcaaaggaccaagtagagggttggtgactaacgggctgcctcccgagggtagaagttcttgcctttaacttcagccccagccccaaactccttagcagtctgcaaaagggaactggaccctgggagcgatctcattagccactcactatccctcttggacctgaaacccattacattttccgggtccgagaccctcgtagtgtggggaatttcctgggaggaagatactacgcggggccgggagcagaatttgctccaggcactgggccagtccatgagggctccaggatccaggggccccactcccttctcgccgggctccgggccaaggaagcgcggccggagtcccgggaagcccctcggcagccagccaagggccctgcgaggatgtggatggcgcggatggcgcggcctccacctgcgggcagtggagagagcggcgagaggaagaatattccccgcgagccgggataaggggccccttcggctcggttgacccaggtcagatcctcccgccgaccttcggcccgccctctacaggcggcccagttcttcccctgctcggctgcccctgcccgcccctcgagggagcgcccgtagccagcgcccccgtaaagaaataaggaggcgcccggcttcccgcccaggtacgtgtcgggacagcgcaggggactggcttggggcggcggtgggtagcggcgcccgcgcggcgctggaaacggccccgcttccttggaccccggggcttgcagggcgggcccggggctctctgagcgcgaggctgc

SEQ ID NO: 4747 - DNA, 2300 bp, Homo sapien
gtagggagaatttatggagggaggcaacagactccctccctaaatttttcctgcaccaatgttttaagtgagaatagaaaagagaatggcaaaggcttggtgaatgcttggttgcaatatttttgtgttcttccgtggttgtttcctctttttctttccatcttcccttctttctctgtcctttgacatttaagcacgggaaggacacaggaaaatgtgtgccagacactcttctttgggtcagcctgagacccatatgttggtaaaccagacacctaaggaaactgtccctacaagtcggaggattgggtctctcgcccctcatctgaggaagggccttccaaagcggccgccttcccttcccattcactggctgcctcctttgtgaactaatgactgtaattattacctcccagagctcttttgttatctccaaccccaagccccggagagggggaatgggctctttagtgaaatgaaagtcattacaaagcaaattaccgtctagggagggacagccttcaggaaagacaaatcagatctccatctgcatctgaagtagggtgtgtttaaataaaaaatgtaaatatcaccattagatccaaagtactccagagctgtgggatttaatggagtttaaacggtagcacttgaagccattgctttaccaaaaagaaaaaaaaatcagttaaattcaggtgttttaatccgtttcttctttgggggttttgtgtgatttaaacgcttgcttttaagaacctttatgttttcaaccactcatccatagtagaaaagttctgcaaccctagactgctggcttgaaggaaaacctttgcaggatttgatatggatttcaacaaagaaccagcctctgcgaggctggagagagctgcggagctgccatgcctgaagtgcagatggctgaaccacaagtctttaggtttccggagttgttattgtggtgacctagagtgtcagagccaggagagcaagaaagaggagccaaactgagccctgagttttcgaccacccgggctcccacagcctggaacagacttcacctagcacgctcagtgccagccttcggcaggacgctatcaacgcccgactggtttcctgctctcatcctggcgcctgggcccagttgccatagtgtggatcccatgactcctcagggaacccctggactcaggcacgcgagaagaagacagcgctttgtggagagaattgaccagggacagttatgctcgagcacacaggacttgggcctgtatgcgtccagcatgggccccaggatgtcccttctaagcgagggtcgaggggtgctcgcccagacgggatccccgggtctctgctttgttagcagctttggtggctggttcaggaggtcagagaaataaaacgacttgtgaacacaatggaaatgacaggcgctctggccaggcgcggggaaggcagccgcctcgggaagccgacctcagccctttcctctctctccctccctccgtctcccccagagccccggagctccgaggtgcacttgaagttcatctccactgccaggagaacgcagcgcaaactgtcaaagggctcccaatccttagggcgtcctccctgtctgcaatagctttttgtagaaaggaaatcatcagaacgattctgactttctcctcctttctttattagaaaaagagaaaccgcctcctaatacgcctcagagagaaccaatctcgcgcttccgggtcacccgctaccgcgaagattctctgggggcgagggggggcattggtttgaagccccttaaaacgagggccctgcaggcgatgccttctttcctactcggatttgtaaagccgagattgcttagttggaaaccctgttctcccctcccaggcgcacacagatcccccttacacgcaagcagcgggcgcttccacgcctccgcgggccaaggtcaccaaatgccctgattccatcccccacccgccatcaatcctgccgactctggccgctctgcctcattctcttccaagaagtttccattcgttttatttttttttccccagcccgaggtcctcagtagactccagcgtggattttaattgcctcaatcagcagtcattctccccagccgtcactcagagcctggacggtgggtcccgcgatctagcccttggctacgcaggaacggtgcgcccccgggtacggcgcggttcagcaggcaggcgtcaggttctaccaaggcgctgaaatgagcccatcagcgggtaggagcccttcccccgccgtcccctccccag

SEQ ID NO: 4748 - DNA, 2300 bp, Homo sapien
ctctttcagaacattccaggcacactggcctgccttcttttgaactttctatgttcctatctcagcccctcttcttgttcttccttctcttggaatcctttcccaagtttctgaatggctgccccttctcattactttgtaaagaggtgatccttgaccactttccctgccccaagaaagtcactctcattgtttgattttatattttatgtagcacttacaactctgctcagaaccttccactggctttccatctcactcacatcaaattctcttccacagctcccaaatagcacacaatctgggcaccatttccttttgatcccatctcatgtctgtccctcccatctcactctgctcagccgtactaatttccttggtgtttttccaatatcttaagtgctctcctaactcagggtctttgaatgtgctgttccttttgcctggaatattcccatctaaaaacccagtgtggattaatctctcatgccatttagatctagctcaagtgtcacttatcagacagaaataccagtttcaggtgtttctgtctattgggagactgcctttccctggtgctatattaaaaaaaattaggataaataaataataaataaataaatgaaaaatacattttctcttccttatgattttattaataacagtttcttttctctggcttactttattataaaaatacagtatttaatatatataaaataatatgagttaatcgactatgttatcagtaaggctgataacaactgcttgatcatcacctgatggtcacctgacattcctggtagggggtgggaggagccctctcctgccctgctcatgcctgactagctacctactgtaacagaacaatgccagatttcaggagtaccaaactgctgcacaattgaaaatccatgtatgtcttttgactcccccaaaacttaaccacgaatagcctactgttgaccagaagccttactgataatattaaacagtcaattaacacatattatgttatatgtatttagataaatactgtatttttacaataaagaaagctagagaaaagaaactgttattaagaaaatcatgaggagaaaatatattttctatttatttatcgtttatttaccctaattaatacagcaaccccatccccatgcccatcactctctatccctcaccttttaacttccttcaaaactagttacattccttgacatgttaaatattaatttgtttattgtctgctttctaccaactagaatgcaccatgcatgagagcagaaattgtttcctctaactattttcattgttcttagaagtgttggtgcttacgaatagtttctcattaaataaatgacagaactatttgaaattgcctaattaacacatgcacctaatttctgtctttatgtcttcaccaccttccctgacatataagcctttgaagacacagctgtagaggagaaggggagggttattcaaccgcatttacaaatcataactgattttaacttctgtattttcagacctccccagcgactttctctcaggaaactccactcccaactgacaggtgctatttccagccagtcctatgctgttgcaaatagtgagtccatgaatgccctctgccgtgtgcattacttattttcatcagcagatcttcgtaacacactcctggaagtgggatgacggggtcaaaaggcgaatccatacataagttaaatagatattgctcaattctcttccacggggttcagaccattttggatttctacgagcaatgaagacagtgctattcctctacaccctggccggccaactgagcgtggttaaacgtggggagggaggagggtgaggttaccaacctgatggttgagaaagggcctccgcccagcgcgcccttcctccacccccacccgagagacagctgaactccggccgggacgcgcgtgttgccagtccagccctgcaccgcgtcccctgagggcgggctgcaggcggccgggaagccttgcacaaccggcccaaaagaggaagcccagaaagtgctgaagtaaacactttgggagaccgttgcaacataaagcggcctctcagtctttggtggaaccatcactaggccccaatcccttagtccctcttgcgtcgaggctgcaaaatggttccattcgccaggagacgctcctgagagaagggcgcgcgcggcacaggtagggggaggcgcaacgtttcccagaattaaaataaaataaaataaaataaaataaaaatcccttcaaggtggttgtgta

SEQ ID NO: 4749 - DNA, 2300 bp, Homo sapien
ggttaaggcggcagtgatctgtgattgcgccactgcattccagcctgggcgacagagtaagatccagtcttaaaataaataaataaataaataaataaatagaaaatgcagttccaacaactgagaagttactacaatttaatttagttgattgcttgatatttgtaatcttaaagttacatatgctagaatcaaaagttaaaaccagctatcatcacactgcttaggaaaaatgtaagcatttcctttaaactctggagttaattagctatgtttactttgaccaaagtggttttcttggtttagtcaagtgattttagccctctctgatagtagcacatccaagttttaaacccatgggattttacttgccttttttgaataaaatagggcaactagtagtctgaagccctatatgaagtgctaactggcccccaaaatcagattagaagactgctaaaagagctacattataaatagggctgggcacagtggtgagcacctgtagtcccaactacctgggatgctgaggcaggaggatcccttgagcccaggagttcaaggctgcagtgagctctggttgcaccactacactccagcctgggtgacagataaagaccctgtcttaaaaaaaagaaaaaagataaagaagggttacactaaaaatgtgtattttctattttccccattaatgtccttcctacatacatccccaggtgatggaggagaaaatacattgtaaaataatagccaaattggtataattctccataaaattttttcaaccgaatagatcagtgaagattcctttaaatctatcttaaaatcataactaataattattatttagttactaatttagttcaaagcttctcagctgactgtatatattctgttgaatatttctcttgtgtgattcaaaacaaccttaaataactgtgacaatagcatatcacccagctaggacaggcagggtgcttcacttcaacaatttttcacttctttcaccccttcattttgtccatcagccagtggtgaaaacaactaaatattggtatttatcgaacttataattttgacaaccactgcagacctttaaacgttgtatttctttaatgttctcattatcttctcaagcctgacaatctcctcatgcgatgtgctttcagctactattattttcattatttctaaatgccaattgaaggacagcatttaaaaatgctgaaagaaataaaagaatctcagaatagaaatcacttaactatatgtgaacaccaattcccaagctgcctgttcagaaatttaaataaaaagaaaaaatacatcaccagttaaagagcttatcatgtgaagtaaataaactaaataaaatagaaactaaatcagaaggcactttattagaaaaaaattccaaatttaatcttcaatggtaagaggccactaagcagagaatgaaatgaactggaaccctgataaactgtaaattgaaatgataattatcactaaaacagagggattcaatccagctgcctggggatgtttcattatataaattattattatctattccagtattggcagaggaagggctatgcgtctattagacttaggccaaatttggcatgctggtttctaccaatagcacatgctggtgattttacttttcagaactcacatatttatctcatttgatctcatcacaacctgagacacgagtcataatgaggactatggggctaattttatatccagtgaaccagccaagtttcatgcagttgagaaatggtaaactgtccagacatagtggctcacgcctgtaattccaacactttgggaggccgaggcaggcggatcacctgagtccaggagttggagaccagagtggccaatatgtagaaaccctgtctctacaaaaagtacaaaaattagctgggggtgttggcacacacttgtaattccagctaatccggaggctgaggcatgaggattgcttgagctcgggaggtggagtttgcagtgaggggagatgctgccactgcactccagccgtggtgacagaacgagactctgcctcaaaaaaataaaaataaaaataaaaataaaataaaataaagaaaagaaaaagtaaacttattagagaccagatgtcctgtcctgattcctggcccaccacactgccttccctgaagctgtgaggccagctggagccaagcttgtaatcggctcctccctagaagcccacagtcctggcaaaatggacctgtgttctcagctcaccaacacaaggagacattgtc

SEQ ID NO: 4750 - DNA, 2300 bp, Homo sapien
aagcctctttgtttgttgaagccatagattctaatttgttgtatcaaagtgatcactagaaaactgtgatatacttagtgtatacatttcagaaagtgtcctctattactcgtagctcgtggcaatgtgtttttctgaaagcacatgcagaaatatgtcttttttcaggttgaaaaatctcagaggttatgggggaaaggggctctatgaatataggaggcagatttgggttcagtaattttagcatcattcattgtaaggtgatgatccctaggaacttcatcacactgagcaacatgaaagctcctagcagccagcaataaatgaaaggtggggcgggtccactggcagggtggggccttgtaagcctggtgcttaagctctgaattccacgttgggggggacacatgcaaaggattctgggcctgattgtttcctctaacccggatgtgttctggttggcagggcaactggccttcacttggtggctttcagtgggtgccctcattggttgcctttggttagtgccctcagttggtaccctcagttgtttctcttcagttggtggtctgcagttcatggttttcagttgttgggcagtggtggaaggaggatgaatctgtgctctctcctccccaggccacagctctcaggcttgttgcatccagtcccttctaaaataaaccggacaagttggcagtttttttttagcagacaagtcagctcagagtacgggggtgacacagggtgcaggctgctagcacagtgccgccccatggcccagggctgcccgtgctggcaatgctcttgccagcaagaggcgagagttgttgaggtctgcagacttgggggcaagtgaaggcccaagctgcccgagaagagcaggggtgtcccatggggaccacactgaactcttgcatgtgcaccaaagccagccccaatcatggccggcacaagggttctgcaggaccagcctgtggctctcatgtctaccagcgtacagacagcaaagacacacgacacgatatacaggagcagaggcgcccagaacacgctgtcccccaatgccagccacaagcggggccagctcagggtgtagtgggtgaagccgtcctgcagctctgtgatccacaaggcggaggtggcagtagcacaggactccaccgctttggaggctgcccagtcgaatttgggagccagtgagagtcctgacagcagcacattggccaccagaagacacccaaaggtagggaggcggcagatactgcttaagttcaggagctcctctggccattgctcacccaaggttccccccagaggcatccacagcctggggctccttcctcctgcctggagtttgctttcctatgcccaggccccaagcaggaggactggctctgcctcgagtcctcaccccttcttctttccctgctgtgtccagctggtttcttactttcctcctacctatgctatgcccagttctgtttcctcttcttcttcccccaggctggctgaaaactaagtttcaaaatacaaaatgcatgctacagatttcattgctgtagatgaaatgctgacagcttttctatttaaactctggttgttctcttcatttctttaaacattagaataattaagcctcatgatagatgtgcctttgtaacttgaaagtatgaccctcaattttcacaatttaaaaaaattttttaatttttcttttcataaatttttggcaaacaggtagtatttagttattgagtaactcctttagtggagatttgtgagattttgttgcacccatcacccaagcagtacacatggaatccagtttgtagtctcttatctttctcccccttcccaccgttttcccccgagtatcattcttttttttgagactgagtcttattctgtcacccaggctggaatgctatgtcgcgacgtcagctcgctgcaacccttgcttcccgaattcatgtgatcctcctgcttcagcctcccaagtagctgggattagaggcgtgggtcacgacgcccaactaaattttttgtatttttagtcgtgactgggtttcaccaaattggccagtctgttctcgaactcctgacctcaagtgatctgcctgccttggcctcccctagggctgggattataagaatgagccaccagaacccagccaaacttccccccaccccgcctttttgttttgttttggttttttctaatctcctgaagtcattctttgagttgtcatgtagattaatgggtttctcaaactactagaaaactagttgaagaaata

SEQ ID NO: 4751 - DNA, 2300 bp, Homo sapien
ctctggttgctgctggcccaaagttcccccagaggcattcaaggcctggggctcctgcctcctgcccctagtttgctatcctaagcccaggcctcaagcaggaggactggctctgcctcacctccccaccccttcttttttccctgctgtgtgcagccagtttctttcctcctacctaccccaatgcccagttctgggcactccacttcttcccctaggctgtctgaaaaccacatttttaggatacaaaatgtatgctatagatttcattgctgtagaggaaatgtctgacagctgttgtatttaaacttaagtagccacactgggactcataatttcatatcttgagttctagaccagagccctctctcctaaagcaatgtcagagggtcagaggtaatcttcttgattctaataataataaatgattttttgtacagacagggtttcactgtgttgcccaggcttgtctcaaactcctggcctcaactgatccacccatcttggcctcccactttgctggcatgataagcaggaactaccacacctggcctttggaggtgctctagctttgtgtgttttggctaatcttcctgcacagctgtcagtaagatgctcctgcagtatggttccaaacctttctacacaatcctgtgatatttttacatggaagagccttttgtttactgcagagaagctagacaattcacagttagtaacctaaggcctagaaaattttgtttcttgatcaaaacaactgtttatagatgcttgtggtccaaagatgcagattcctaatcataaaaaagaagaagtgatgtccactgcaggcaaccagggagggagtttaggattgttctgaggccgtgaaagccattgaaattcacccataagaaggcagagcaagggaatccacatgtcttgatccctccatgtggagggtataattgggtcttcatgaaggtgcaccacctttggggtcagagagaattggatttgaatcccagttccaacactcactacaaagtgatggtgaatgagtttttaaatcctctgagcctcagtttgctcatctgtaaaagaagtgattcttatgaggcttgtattagtttagtgtgtaaaaatctgggaataatgcctgtaatttaaaagacaggttgttatgaggcttcaataaggtaagtgtgtaaaaatctggacacaatgcctttaattttgtaattgtacaatatatgaaggtggaggattatttttctctccttttatttttagaacaagtttatacaattggcattattcctatttttaagataatcaaaggaccaacaagttgaaataaatcaccatactcacaaagcagttcacaatatatttactgggtaattgctacttaaaagtagcaatgatgatcacattgaaaatcttgtattacgtggtggttttctcttccacgagcctcttcatttgtggaaaccatagagtctaagttgctctataaaagtgttcattagaaaaatgtgatgcacttagtgtataaattttagaaaatttccactgttagtcttgttaatttgattgaatatgtgcgttttggattatgaatgtgaatatgtattgatatatgaaataagacttgacatcatacagtaatctcagctcatggcaatgttttcttctgaaaacacctgctgaaatctgtattatttctagtttccaaaaaaaatcagtcacaacggggccaaggggatgtttgaatgtcagatactgcatgaggcacattagtgtacagtaatttgcgcataattcatattcataattcacagtgaggaaatctgaaagttgctaccagctactaataaatggaaggtggggcgggctgctgtggggatggggccgctgtgggggcggggctgccgtgggggcggggtcgctgtgggggcggggccttgtgagccagtgcttggacttccacgtcataaacggaagggcggtgcgtggagggaactcaaggcctgattggttcctcctaagcaggatgcgatctggttggcagggcaaccggccttcagttagtgccttcagtgggtgctttcagttggtggcattcggttgcctttcctgaggagaggtggcaggtgctcagctctgcaggtgtcggggcaaggaaggaccaagcgacctgagaagagcagaggtgccccatggggaccacgctgacttgtcgcatgtgcaccaaggccagccccactcagggccctcacagggcttctgcagagccgtcctgaggctctgacatctat

SEQ ID NO: 4752 - DNA, 2300 bp, Homo sapien
ggccattttgatccatctgtactggctcttttcatttgtctaagggcagcaaaatagactaaagttgttttcagactgcacaagagaagtctgttctttagcacttacctgcataactcagatagtgtttttaacttcctcaactcatgcttggcctagtggggtcaaaagaactacttgtgaattccgtatgtccaattggtagcttactgttttttctcaagagtttagctatacagtaacgttggaagtcttgaggaacttcagctgctgtccctacttagccttgcaatactacggcatctttttttctttttcttttttttaaagacggagtctcactttgtcacctaggccgaagtgcagtggcacaatctcggctcactgcaacctctgcctcccaggttcaagtgattctcttgcctcagcctcctaagtggttgggattacagaacatgcaccaccatgcccaactaatttttgaatatttagtagagacgggtttcaccatgttggccaggctggtctcaaactcctgacctcaagtgatccacctgcctcggcctcccacagtgctgggattacaggctgagccactgtgcccccgacctacagcatctttttaagagcaatgttttctgttttaatgtggccaagcaatctctaaacgaacatggtctgacaaaattgtgtagtgacatacttgacaactgggtgagcttgagtgtgatacttatttgaccatacggtatttcctctatatgtttccttatctttatatacaaaaaagggcaaatgataatgtcttagtcataggatcaagtacaacccaagtgcttactgctacactctacttggcaaattccaccttatgaatgtttcttaatatataaacctaatctaaaccaagataagctacaggtgcatattaacaatctttactcataaagctttgcatatttttacatactattcttcaagatggaaaaaacaccatcaaactggcttattttcatagatgtctttatatagtctatgatgtcttcattccataaaaaatccacacgattaaatatgaaattaatgtacccagctatgaggctaccgcattctttaacccaagaacaagaaaatacatgaatcagagaactgcaattacctacttgctggtctatttcctcattagagtgaattttttgaggactaaattgcatttctctatctctaatgcttaccccctatctcactggctctgtgtgtttgagtgcatgcgctgaatgtttatatcacttaatttctgttcggaacacgctgtctcttagcaccagtagatctggccttagagctaaggaaagaaggcctttctaacccataaggggtactaatcctgtacagactccaatatctcccgggctgggtacacgcaggttcacacccaggtgtgagcaagattgccaaactatacctataaggcgtttggaggggagagtccaaaagtcacgagacccggctaatttagctactatttcacaacaaccctgatcgtggtcggacttgtttctaggaagatgcgatgggctggaacttccttcaagaacagattgcaaaaggcagccgaccagggcgtgtcaggtcactgccaagggaagcagcagcggaaaccgtcgcctccggcttaggctgcggagcgggaaccccattctctgagttatgtttctgcctaaacacgcagaacaaaagagttcgtggctgcaagggtggcgcgcggtagtatttcttgctaataaaaggtccccacagggacatttttgctatgactgcaggcgtggccagtctccctgcacagcttccgggaagaggtggggataggaggctcgccccggggaaggttacgctcggggtccccagaccaggtctccgcacgcccctgccccgtcgcctcccgggagcggctgcagtccccgttggctgcagacgggcagacacccgaagtgtccgcgccggcagccggaccgcaagcgaggaagagcgaaccgcgctcccgggcctggccgaagcgcttcctgtgccaggtttccggctccgggtcccgggaggaggatcgcgggccagaggcggagccgccgccctgccgcgactttcagactccgaccatggcctcgcgctggtggcggtggcggcgcggctgctcctggaagccggcggcgcggagccccgggcccggctcccccggccgtgcgggaccgttggggccgagcgccgctgccgaagtccgcgcgcaggtgaggttgggaggcgcg

SEQ ID NO: 4753 - DNA, 2300 bp, Homo sapien
tgggctgtcatacacttttaaatgaccagatctcaggagaactcactcgagatcataaggagagttccaacaggatgctgcataaccattcgtgagaaatctgctccatgatccactcccgcttcccccaggtcccaactccaacattagggattacaattcaacatgagatttggcagggatgcagatccaaaccatatcaatcagtaacctaggaaacttgacggcattttcagtgcccttagctaaactccttaacctatctaagcttaaatttccttatttgataaggaaggaaaataatatttatattatctgtctctcagagttgtgagaagaaatctgacagtactttttatttgtatttatcatcatcatcattattattcattcattgctcaactgcatggacagtacgttgaaaatagtaaattagtatcacctccctaatcacttccccaatgttgttgaaatgtgtcaatatttgaatatatacaaactgagtgatttctacagttaaacctcaagtagagaccaagatcaataatacattaaattttaataacttggattaagtcgtgtttgggttaacgataaatatcaaaagataactattacacctattccagataataaatgtattactttccataatatctggaataggtataatagttatcttttgatagattccttgatggagaatctggtggcaaggggaagttaacgtttttagtaggaaactgagtttttcctttcagaggtcgaagagggaaactggttccctggggccctgaataaggccccagtaaaggcaatattcaataaatacctggtgctggcaatttttaatttggttgagtgatgtttttactcctagttattttgattctaaatgactttatggagatacatgaacatatgtccaaagtctttggacaacacttttcatagctgattatatccgaagcatttaatgttcctgttgaagtgaagagcttgaaatatagggccttttgagactattccaaagcaggtgataaaaacaaaacaaaacaaaaatccaggagcaaaaaacgaaggatcagggtgggtggctcatgattgtaatcctagcagtttgggaggttgaggcagaaggattgcttgaggccaggggttcgagacgagcgagggcaacataatttgatccctgtcgctataaaaaattaaaaagctcagccaggtgtagtgaccgacgcttgtagtcccagttactctggaggctgaggcaggaggatcgcttgactttaggaggtctaggctgcagagacccatgattgtgcccctgtactccaggctgggtaacagtgagatcctgtctcaaacaagcaaacaactcccacccctaaaaaaacgtgcacatgaccttaaaagtgtaggaagattacatgataaggagagtcagagaaaagagaaattaggacaggaaagcactacaagctatgtatgtttattttataattgagtctttaagggtacggagtattcgtactcaacttgtacccccagtgtctagtacgctgcttggtaaacagctggcaatcaagaaatgtttgctaaattttaaatgaattgatgggggcggaacttcagaaagtaaagcctgactcgctttatttctaagaaggcagaggaagtaaaaatctagttttccgtactctgtcccctttttaatccttctctgaatgggtgtccttgattcactgacatttcctaattaaccaagttctgccaagtttcacatgaaacttggggaaccgatttcattcccccagtatcaccctgtggcgccaccttccggagctgtgaggaaactccggacttccccccaacaccgccccctccctccaccctcggtctccgctttctgcgctctgccgcgttggttttcggaggtgtctgggcgcatgcgctttggacgggccgcctagcctaggagagactacaattcccagaagacagtgcgaaagaaaaaaaaaatcccgcggtccgtgggggtgggagaaataaacgctcgcgagagaacgaggttcaggcggctgcacgaagggggtggaggggggctggagagagtgaggaggaaggggaggaggtgccgtcccacaataccaggcgggagggcgggtaggcggtttgtatccgggctgtgaggtgctcggagcctcggcggaccttgctgcctctgtctctttaacgcgagaggaagcgatgcagaggggtggaaaatggcagagctgcagatgttactagaggaggag

SEQ ID NO: 4754 - DNA, 2300 bp, Homo sapien
ctctcactcataagtgggagttgaacaatgagaacacatggacacagggaggggaacatcacacaccggggcctgtcaggggttgggctgctagaggagggatagcatgagcagaaatacctaatgtagatggtgggttgatgggtgcagcaaacctccatggcacgtgtataactacgtaagaaacctgcatgttctgcacatgtaccccagaactttaagcataattctatatctatatatatatacacacattaacgcgtgggtatatcggtttatttctagttatattttggctggcgccctctatgtgtaaaacactctgattgacagactgagcctcactgtccagatcagtgattttaaaaccctgggaccccacccagtgttgatcttctggtccagcaggaagatgcagctgcacactggacttcgagcaccaggaccatttcctcccttcgtggttgggagaagtcagtctcccaccaaaggagaggtcagagagtgttgcctggctgttttagggaaaagagagatttcaaaagactgcaggacccagtacaattcattagtatttcattccagtcctatctagccgctacctacctgagcttctaagaagagatgaggatactatgggctagcacagtgaagtaaatacaaatatttcaccccacttttaaaggaacctctaccatctaccctctctgagggctgttggctgtaaagtatcatctatataacaagacctcatttgcaagccgggccttctcttctctcttatagcctgccttgccactataacctgatcttgccatcacttgtttctggccatgccgtgagcccccattgtttccgtggcctctaggtggtagctgtgctaagcactattggaggttggggtcagcactttgtggttctcccttgcgcacatcaatagccctgcatgccatttctcctcttaatctgcacttggccagtcgatttttcagtgaaactttagagcgcaaaggggaagtgttcccttgtgctctatcattttgcggctgtgagcagaataccgaaacctgctcttccggaagctgcagccaagggaacccaggaccagagcagctggcagaagagtaagaaatccttatcagccaggctgccggcctctgtgtggaatctgtttgagcagatggtgaaaattgttgtcttttatttctccataaaatcttgattagtggaagaaaaagatttgtgtgactagtagtgcatgtagcgactcttgtgtagtctttggcatgaataatcatgttgtttgatcccttttcctcctagaaatagtctctcactctctgtttgtctctctgggttgtactgtcacaaagaagggcacctcagaatagaacaggggtccagaacccctagaaacacgatttcgagccacctctgaagactggtcagatttatggctctgatcagactggtgtctattcaggcaaactttactatttgttccccaaataaaaccacatgaagttcccctctgatcttgtttcatgtccttgagagcttggcttttaaccaagtgggagcacagttggtctccaccatctgagaagtgtgatgtttgggtcccatccagtggccagtctaaaattggctggggacctcagacgtgtaagattttaggcagcacattttttgttccaaatgtgtcaagctctcaggagagtttgtcttaagaagttctatccctatggggtgtggggaaaagcaagagagatcagattgttactgtgtctgtgtagaaagaagtagacataggagactccattttgttatgtactaagaaaaattcttctgccttgagattctgttaatctatgaccttacccccaaccccgtgctctctgaaacatgtgctgtgtcaactcagagttgaatggattaagggcggtgcaggatgtgctttgttaaacagatgcttgaaggcagcatgctccttaagagtcatcaccactccctaatctcaagtacccagggacacaaaaactgcggaaggccgcagggacctctgcctaggaaagccaggtattgtccaaggtttctccccatgtgatagtctgaaatatggcctcgtgggaagggaaagacctgaccgtcccccagcccgacacccgtaaagggtctgtgctgaggaggattagtaaaagaggaaggaatgcctcttgcagttgagacaagaggaaggcatctgtctcctgcctgtccctgggcaatggaatgtctcggtataaaacccgattgtatgc

SEQ ID NO: 4755 - DNA, 2300 bp, Homo sapien
ttggtggtcttcggttgttgggcagtggtgggaggaggatgaatccatttgtgctctctcctcccccagtcacagctctcaggcttgttgcctccaggcccttctaaaataaactagacaggtggcaggatttttttagcagacaagtcagctcagggtacaggggtgaagcgggttgcgggatgctagtgcagtgtcgcctcatggcccagggctgcccgtgccagccatgcctttgtcaggaagaggcgataggtgttgagctctgcagtcgtgggggccagggaaggcccaagctgcctgagaagagcaggggtgccccatggggcccacactgaactgtcgcatgtgcaccaaagccagccccagtcagggctggcaaaggggttctgcagagccagcctgtggctctgacatctacgagtgtgcagacagcgaaggcgcaagctgcgatatacaggaccagaagcacccggaacacgctttcccccactgcgagccgcaattgggctagctcagggtgcggtgggtgaagctttcctgcagctctgagatccacgaagtggaggtggtagtagcgcaggaccccactgctttggaggctgcccaatcgaatttgggagccagtgagtgtcctgacagcggcaccagaagaccccgaaaggtagggaggcgacggatactgtttagattcaggagcacctctggctgctgatggcccacgtttcccccagaggcatccaaagcctcagttttctcatctataaaagatgtgattgttatgaggcttccataaggtgtgtaaaaaccaaggcaaaaatgtttgtaatttaaaagagagagtttctgtgaggcttctataaggtaagtgtgtaaaatctggacacaatacctataatttaggtcactataacctctgcctcctgggttcaaacgattctcctgccttagcctcccgtgtagctgggattagaggcatgcgccatcaggcctgaccaatgttgttctttttaggagagatggggtttcaccatgttggtcaggccggtctcgaactcctgacctcaggtgatctgctcaccttagcttccctaagtactgggattataggcgtgagtcaccatcctaggccaaaaatttcattccttgatcaacaaacctgtttccaaggagatgcttgtggtctacatatgcagattcccagcatttccaagaagaagggaatgactgcaaggcaacctgggcgggagtttaggattgttctgaggctgtgaaagccattgaaattcacacataagaggatagagaaagggaattcacatgtttgatccctccatgtactgggtataacttggtcttcattaagtttgcaccacctttggcatcagagagaactggagttgaatccaagttccaacactcattaggatgtgatcatgaatgtgtttttaactcctcagaacctcactttgcttatctataaaagaggggattcttatgaggcttccgtaagttaaatgagtaaaaatttgggtggacaaaatgcctgtaatttaaaagatagggttgttatgaggcttcgataaggtaagtgtgcaaaaatctggacacaatgcctataattttgttagtgttcaatatatagagaaggattatttttctatcatttaatttttagagcaagtttataaaatggtgttactcatctttttgagaaaatcagaccaaggatcacaaagattaaatgagtcgccatagtcacaaaggagtttacaatacatttcctgggtaattgccagttaaaagtagcaatgatgatcacatttcaaatcttgaattatgtggtgcttttctcttacgtaagcctctttgtgtgttgaagccatagattctaagttgctgtatcaaaatgatcactagaaaactgtgatatacttagtgtatatattttagaaaatgtcttctattactcttgttaatttgattgaatacatgtgttattttcaaaaatgtaaatggaatatgtgtggattgaatatatatgtacatatatatgaaatatgatttgtcattatagtgtaggcatagctcatggcaatgtgtttttctgaaagcagctgcagaaatttgtctttttttagtttgcaaaaatttcagaggttatgggggaaagtggggttctatgaatcccagatagtacatgaagcagatttggtttcagtaattttagcataattcattgtaaggtgatgatccctaggaacttcatcacagtgagcaacctgaaagctcccagcagc

SEQ ID NO: 4756 - DNA, 2300 bp, Homo sapien
gcagagccacctcaggataaggtgtttggagccgtcctgcagctctgagatccacgaggtggcggtgggagtagcaccagactccactgatttggagtctgccctgtctgattcaggagacatgactagcagcacatcggcaccagaagacgccagaaggtagggagactacagataccgcttggcattaggagctctggtgacccaagtatccacagcctagggctcctccctcctgccctagtttgctttcctaggcccaggccccaagcaggaggacttgctctgactccacttcccaccccttcttctttccatgttgcatccagctggttacttttcattgccctgcccaaatgcccacttctgggccctcttcttcttttcttaggcctgtcaaaactaagttttcaaaatacaaaaaggatgccacagatttcattacggtagaggaaatgtctgacagctcttgtatttaaacttagctagccacattgggactcccaatttcatatgttgagttctagagcagagctctctctcctaaagtaatggctgagggttagaggtacgcttcttcattctaataataaaaaatgatttcttgtagagacagggtttcactgtgttgcccaggctggtctcaaacccctggcctcaagtgattcactcacgttggcctcccgctttgttgggatgacaggcaagaaccaccacacctggccttgggagctgctcctgctttgtgtgttttggctggtcttcctgcacagctgtcggtaagatgctcctgcagcatagttccaaatctttctgcacaaatttagtggatgatgtgattttttacatggaatagcccctttatttattgcagagaagctggacaattcacacttagtaacatatggcctagcaaatttcatttcgtgatcaccacacctgttaaaaggtgatgcttgtggtctaaatatgcagattcctcatcatcctcaaggaaaagggaaccacagcaaggcaacctgggagggagtttaggattgctctgaggcagtgcaaggcattgaaattcacacacgagggggtagaaaagagaatccacatgttttgatccctctatgttctgagtataacttggtcctccttaacacgcacaatttttggtgtcagagaaaactagatttgaataccacttccatcactctttatgatgtgatggtgaatgtgtttttaactcgtctgagcgcagtttgctcatctatagaagatatgattgttacgaggcttccataaggtaagtgtgtaaaaaccatggcaaaatgcttgtaatttaaaagagagtgttattatgaggcttctatgaggtaagtgggtaaaagtctggacacaatgtctacaattttgtaagtgttcaataggtggacgaggaagattatctttctctcattttttagaccattaatttttagaccaagtttgtaaaattggggatactcatatttcttagacaatcaaataaatgatcagaaagactaaataaatcaccatagtcacaaagcagttcacaatacatttactgggtaatttctagttaacagtagcagtgatgatcacattgaaaatctcgtgttttgtggtggttttctcttacgtaagcttcttgctttgttgaaagcatagattctaagctgctctatcaaaatgattattagaaaaatgtgatgtactttctgtgtaaattttctaaactttcttctgttaatcttgttaatttgattgaacatgtgtgtcattttcaaaaatgtaaatcgaatatatgtggatgggatatatatgtgtacatatgaaatataacttcatattacagagtaggcttagctcatggcaatgttgttttgtgaaagcacctgcagaaatctctctcatttctagtttgttaatgtttcagagattgcgtgaggcagatttggtttcagtcattttagcatcattcattgtaaggtgatgatccctaggaactgcttcacaatgagaaacctgaaaggtcccagcagtgagcaatgaatgaaaggtggggcggggctgctggcagggtggggccttgtcagccatatgcctgtgctctcaagtgccaagtttgtggggatgcatgcaggggattctggacctgattgtttcctctgaaccaggatgtggtctggttggcagggcaactggtcttcacttggtggccttcagtgggtgtcctcattggttgccttcagatagtgccctcagttggtaccatcagttggcgctcttca

SEQ ID NO: 4757 - DNA, 2300 bp, Homo sapien
taatcttagctcatggcaatgttttcttctgaaaacagctgccgaaccttgtcttttttctagtttccaaaaaaatcagaggcgatggggcaaggtgggtctttgaatgtcagatagtgcgcgaggtacattggtatacagtaatttccgcataattcatattcataattcacagtaaggaaacctgaaagttgctaccgggtactaataaatgaaaggtggggcgggctgctgtgggggcggggccttgtgagccagtgcctggactcgcacagcacgtcacaaatggaagggcggcgcgtggggggaactcaaggcctgattgattcctcctaagcagggcgtgatctggttggcagggcaaccgaccttcagttagtgccttcagtgggtgccttcagttggtggcatttggttgcctttcctggggacaggtggcaggtgctcagctctgcagggtgggggcaattgaaggcccaagctgcccgagaagagcggagttgccccatggggaccacgctggcctgtagcatgtgcaccaaagccagccccaggcagggcccccacagggcttctgcggagccatcctgaggctttgacatctatgagtgggcggccagcaaaggcgcaggccccagcacagaggagcagaggcggccggaacaccctgtcccttgataccagccccaagcagagccacctcaggataaggtgtttggagccgtcctgcagctctgagatccacgaggtggcggtgggagtagcaccagactccactgatttggagtctgccctgtctgattcaggagacatgactagcagcacatcggcaccagaagacgccagaaggtagggagactacagataccgcttggcattaggagctctggtgacccaagtatccacagcctagggctcctccctcctgccctagtttgctttcctaggcccaggccccaagcaggaggacttgctctgactccacttcccaccccttcttctttccatgttgcatccagctggttacttttcattgccctgcccaaatgcccacttctgggccctcttcttcttttcttaggcctgtcaaaactaagttttcaaaatacaaaaaggatgccacagatttcattacggtagaggaaatgtctgacagctcttgtatttaaacttagctagccacattgggactcccaatttcatatgttgagttctagagcagagctctctctcctaaagtaatggctgagggttagaggtacgcttcttcattctaataataaaaaatgatttcttgtagagacagggtttcactgtgttgcccaggctggtctcaaacccctggcctcaagtgattcactcacgttggcctcccgctttgttgggatgacaggcaagaaccaccacacctggccttgggagctgctcctgctttgtgtgttttggctggtcttcctgcacagctgtcggtaagatgctcctgcagcatagttccaaatctttctgcacaaatttagtggatgatgtgattttttacatggaatagcccctttatttattgcagagaagctggacaattcacacttagtaacatatggcctagcaaatttcatttcgtgatcaccacacctgttaaaaggtgatgcttgtggtctaaatatgcagattcctcatcatcctcaaggaaaagggaaccacagcaaggcaacctgggagggagtttaggattgctctgaggcagtgcaaggcattgaaattcacacacgagggggtagaaaagagaatccacatgttttgatccctctatgttctgagtataacttggtcctccttaacacgcacaatttttggtgtcagagaaaactagatttgaataccacttccatcactctttatgatgtgatggtgaatgtgtttttaactcgtctgagcgcagtttgctcatctatagaagatatgattgttacgaggcttccataaggtaagtgtgtaaaaaccatggcaaaatgcttgtaatttaaaagagagtgttattatgaggcttctatgaggtaagtgggtaaaagtctggacacaatgtctacaattttgtaagtgttcaataggtggacgaggaagattatctttctctcattttttagaccattaatttttagaccaagtttgtaaaattggggatactcatatttcttagacaatcaaataaatgatcagaaagactaaataaatcaccatagtcacaaagcagttcacaatacatttactgggtaatttctagttaacagtagcagtgatgatca

SEQ ID NO: 4758 - DNA, 2300 bp, Homo sapien
tctcataaacaaatagaagaaaaccctctcgatttataaaataaaataaatattattttctatttctgtaaagactataccttttacctaactgttctaagtagttcattaaactaaatatttggattttttcagctgaacatgacttagaagtagcatcagaagaagagcaagaaagggaagggagtgaaaataaccagccacaggtattatatatttttaaaaatttctggtttaatattgttttctttgctttaatgatgtaacatagtccaaatgaaattacttttcagactagccttttagaatcaatagatcatcatttaatatttagtattaaaaacgttttgactagttaaaatgttcttagaatgtgtagtaacctatagctaatcttttgtttttgtttttgtttttgttatagttaatctttacccttggaattgaagccagaaatttcctgagtattgtttcctctttcatttttataacttccttatatgataaagatggtaacatcaaatattgaatcatattattaagcagtagaaattatgaacattttaacactgatggccactgagttggattcatcttaaaggagtaatcattcccagtggttcaggatttacattcttatattgctggtcactgattccaaggttaaagatttattctgccttgtgatccctgttgatttcagtgtctacattcagggaaagaatgaggtcagaaaatcaacccagttattaagagaatcattcctttcagaatgggatctttccattgttaggatatacacaataactttctgattatttcagtctaggaaatcagtaaatattatagaatttttaaatccactattaatgaaccttaggatatttaagaattagacttaagtcttatatagtttatacagatgcataacaccatattatggtatataatttcaattaaaatgtaagagttaacttttctttctgattggtgtttattttggctcctaataatttaaactttccctactctccagttagaaatctttacaaaaagtacttaaatgcactgtaggggctcagtatttgaggtatggtaaggtaaaatcttttaaaatgaggatgcctttataatgctacaaatcatctgctaatttatttttggtagatttaacacataatgaattaagtttaatccaaaggaacagtgataaacttaactttgctggttcatgtttttctcctattttaggctaaggcaaattagtttttacttcttagttacaatccagtgatttgggagtaactaaacatagactaagtttaacagttgaattttaattatttcctaatttttctttgtccgtacttgattactcaaggataaagttattttaaaaacatgcaccctgacagaaaagacatctgaaaaacaaaacaagcaaattaatcgtccactttcatgtctgcaaaagatgtctcaagaaccagaactgaataaggagtgtgatagagaggatgtatctgtatattcaggacttccttgtgtgcaaaatgatgaagaaatgtggaccaaacaaggcaaattagagtggaaaaataacttaaaactcatcacaaatgagttaaagcagagctgtggtgaaacttgtgaaaaatacaaaattactgcttctcctggggaagagtcactacatgataactctaaaggaggcacaaacttaaaggaaataccttcttctttgacaaataatatacttgattgcgatgaaaaagattctcctgtctctgtactattccaggcattgcctgaacaaaaagtactcagtctcgaaaatggcttttcatttccttcatactctgggtccccagaatatgcttgccagtcatcttctaagccttatttaaatgaaaataaattaggccatgaaaatgttaacaaaccagacactgaacatgtttttaacacagatgagaatttttataatgatacagaaaataaaaaagtaaggaacccagaagtagttacaggtgtaatgaaagaagagtttgataagacaaaaaatatgaaccgaaataccactaactggaaattagacatcagacgtgtgcctcagtatagtgatccaaaaagaccttttgatttgatctgctccaaagaaatgaatcatatgtttcacataaaaaggcatagtatttctgctggtacagacgcttacaagaaaacaaaaccaatacagaacttgttccagaagccattatatgatcattgcagtgctaataactataaaagcatggaac

SEQ ID NO: 4759 - DNA, 2300 bp, Homo sapien
gcagaaatcataaagaaaaaagtttgacttattatacaaatgcccagaaataacaaattttaccacttttttttttttttgagacggagtcttgctctgtcgcccaggctggagtgcagtggcgtgatctccgctcactgcaagctccgcctcccgggttcacgccattctcctgcctcagcctccggagtagctgggactacaggcgcccgccaccatgcccggctgatttttttgtatttttagtagaaacggggtttcactgtgttagccaggatggtctcgatctcctgacctcgtgatccgcccgcctcggcctcccgaagtgctgggattacaggcgtgagacaccgcgcctggccaaattttaccacgttttgtacatattttcagctaacacaagaccacagtctgtatgtataatcaaactttttttctcacttgagataccaaagtatatcctcacatgccaatacacttctgtatctattgccactttcttttctttctttcttttttttgagacagagttttgctcttgttgcccaggctggagtgcaatggcacgatcttggctcactgcaacctctgcctcccaggttcaagcgattctcctgcctcagtcttcggagtagctgagattacaggctcccaccaccatgcctagctaatttttgtatttttagtagagacggggtttcaccatgttggccaagctggtctcgaacttctgacctcaggatatccgcttgccttggtctcctaaaatgctgggtttacaggcgcgagccaccacgcctggcctctactgccactttcaatggtcacatattatcatgcactgacatttattcacaaaatccattctatgggttctccttaatacactgcttaagcaatgctgagaaaaacaaattacttgtatatctatttcctaaaggcattttatttctttttctttttgaaagatagggtcttgctctgttgtcactgacatacctcactgcagcctagaactcctgggctcaagtgatgctcctgcctcagccttccaagtagctgagactattagagttgggggggggggtctcgctataatgcccaggctggccttgaactcctggcctcaagcaatcctcccgcctcagcctcccgaagtgctgtgattacaggcgcgagccaccgcgcctgacgaataacagattttatagaaataatttttaacccagaagttgctatattatggaaactgcttatctcattatgcacctttccataagtgtatgacattgtatcttaaatgtgtacattaaaaataaaacgctgtacgtgcttttgttcgttaattcactttaaaattgtcacttaagtgctctctaagggatttcggggggatcggaaaccagctagagttctgtttttgtttttctgctcagaaaggcggcctgggcgctggagccctgcaaggtgtcaccgtcccaggggctacggagcccgcgggaggctgatccaggccctgggtggctcccacaaaaggggcccctcttcctgcccgcctactccagtggcactcagtccgggcttgcgacgcctattacctgttcatcttgtctctatcgttcaagccattcttcctgagcaaaaggatctgctgcactttcgccacattacccgcgctggcagctttgtggatcttgccgagatctcggtctcggacgtggtagccgggctgcgagtaggcgccctcccccggctcgcccccgcctcccgcgctgctcctctgccgccgcgcgaaggagcccaagggcgactcgcccttcttactaaaaatcttcttcatggcccaggcgaccgggcttcagagacacctcatgtctctctcggctcttaacggcctccggagcccaacataacaagtcagccccggctggccgcagcctcccaaaggaaactccgcggtttccaatctctccctccgggttaccaagcaagcgatcccgctagacacaagtgcgcatgcgcacctcagatggcaaggtccacgcgcgtgcgcacgaaggcccagtggtcaagtgtgctccatgcgcatgtgcaaggcccagacctcgcaaatctcggcgactgggacgagccctgcgttcctgtcaaacaaatgtcggtgggagtctggctgagtgttcaggacgtttgcgaaaagaagcctcgcgcctgtggggaagcagcctttacgcatgactgggactggagtagcgtggagttttaagatgctgaaagcctcttctccgagaaaactcccctaa

SEQ ID NO: 4760 - DNA, 2300 bp, Homo sapien
tgcactccagcctgggagacagagcgagacttcatctcaaaaaaaaaaaaaaaaagagctttatctaagggatttgctaaggcattcatatctcagttgattttcactataaaacaaatattcccctaacacattaatttcattgacataattattaaatgagggtataggaaaactgaaccagggcattactttagccttagataggcatgggagttccaagtgacaactttctagagggtgtctgctctggatctgaaattaatttccatatgaatgggagatcttagctttcaatgaactccaagaaactttttggggatccagcatttggctgatgaattcaacacctcagagctggcctaacatatagtccttgggtatctctggtctatacaaaaacactatagtcaaccaaatctctacaacttacctggagagtggtgtgtgattcctatatccatccagactggtaatgtctttggccttaatttcaggctgcattaggaaatgtcagagtcctctgttcagagtcagtgttctccacacttgagtattttttgtttgtttttgtttttgttttttgagagagagtcgtggtctccatccaagagtctccactccagaggcagtggtgtgaacctctgcctcccaggttcaagtgtttctcctgcctcagcctcccgagtagctgggactacaggcatgcaccaccacacccagctaatttttgtatttttagtagagacggggtttcaccacgttggcctggtctcgaactcctgacctcaggtaatccacccacctcggcctcctaaagtgctgggacttgactagcttcatagatcaccttggggagtgttgaggagacaacataactttctagctggggtagtgtaggaggaaaattcttggtgacgatagtggaaaccactctcccacatcaaaaccatttgatctagctaagctggagaggcctgagaagtgttgttttgtttttgctcatttctcacttggcaataaagacgcctgttctggggccagccacctcctccacaagggaccctagagctgtccagagctatggaggtgcattccagcagcaatttctgctgagactccacttgacgtctgcgttgctaattccaatttgttgtcaaattattcaatctaggctgggcgtggtggttcacacctgtaatcccagcactttgggaggctgagatgggagcatcatttgagccctggagtcggagaccagcctgggcaacatggtgagaccctgtctctacaaaaaatgcaaaaatagccgggcgtggtggcttgcgtctgtagtctcagctactcactcaggaggctgaggtgggagtatcgttgagcccaggaggtggagactgcagtgagccgtgattgcaccactgcactacagtctgggcgacaaagcgagactctgttggggaaaaaaaaaaaaaaaagaagaaagagatgtaaccttggaaaatcaaaagcaaaaaataaaacataaggctgggccaaaggcagaggggtgggggaaggaggcatgcagaaatgcgttctcatttcttctggagaatgtgcattggtttctcctcgtaagtttgcacttgacacatattgccacgatctccgaaatcctgtgccctctgcacttgacacatatgccacgatctccgaaatcctgtgccctctgttgttgcatctgttaagttctcatggagaccagatggcacccaaagggacatggaaggggaataaactgagagatagggagattcagagagtttcttaggggagttttctcggagaagaggctttcagcatcttaaaactccacgctactccagtcccagtcatgcgtaaaggctgcttccccacaggcgcgaggcttcttttcgcaaacgtcctgaacactcagccagactcccaccgacatttgtttgacaggaacgcagggctcgtcccagtcgccgagatttgcgaggtctgggccttgcacatgcgcatggagcacacttgaccactgggccttcgtgcgcacgcgcgtggaccttgccatctgaggtgcgcatgcgcacttgtgtctagcgggatcgcttgcttggtaacccggagggagagattggaaaccgcggagtttcctttgggaggctgcggccagccggggctgacttgttatgttgggctccggaggccgttaagagccgagagagacatgaggtgtctctgaagcccggtcgcctgggccatgaagaagatttttagtaagaagggcgagtcgc

SEQ ID NO: 4761 - DNA, 2300 bp, Homo sapien
tgcagtgagccgagattgttcccactgcactccagtctgggtgacaaagcaagattctgtctcaaaaaaaaaaaaaaaataggacatttaacatacatacaaaaccattatcaaatttagagtctatattcaaatttcagcatttgctccaatagtatcctttgtagtgttgccctgatccctacccacttccccagttcaggacctaatccaggatcacaggtaacatttaggcttttattgtttttttttttttttttttcaaatgaaacaatgaaacaattccttagccttttgtgagggagtggagagaagaggatctttcatgatttttacagttgcaaagagtacttgcctaattatttatagaatgttctcagtttagctttgtctgatgttttctcatggttaacatgacttttaatgacttcacagtatccttctaatttatggttgtatcacaatttaaccatttatattgaatttttatatggtttccagtttttttgctattaagaatagtgctgtgtttcatcttaattcaaggctttgcctgcatgcttaattatttctttagaataaatttctagaaatggaattgctgagttaaaggatgacactcctttttaatgcttgtttttatgctgccaactatctccactgaaaatacagcagtgtatgaaattatttgcagtaacctttgctaatttagggtacatttattaaatcagtgcttaataatgataactttagctaatatcactggcaaaagccttatcaacatcatgtacttcctgatgctctagaaaggacccaagtgatggcttatgtggtgtccacgcaaaaaggaattaaaaaagagcacaatctcaatacaatcatgagaaaacactggaaaagcccatatcaggagacattccacataccacctttacatttatttaaacatcacagagtgaatgtttaaaaccatagaagtattaatagttacactcttcctctttctaatcacaaggagtattttaaatttgtagaaaatttgagtagtataaatttgtagaaaaatcttcagataccaagatgtaatccacagaaattaatatgatttaaaccagttaagtataactaaaacatgacaatactaggatagtcttaaagctatttttgagcttgagctttctttaaaattttttttatgttaaaatgcagcaaacatgtatgtaaagaagttttgttgctttttaaatgtaatatgtatatttataaaaacatataaatcaggtaattctgtttttctaacgtgaaaatctttggtgttatgaaaatttgcaaacatggaaaaccttgaaagaacagtacaattaacatccatatcctatccacttagactcaacaattgttaacattctgtcatatttgctttctgtgttatgtgtgtatttttccccctgaacatttgaaagaaaactataaacgtcaactacttgacatctaaagactttcttgtacatcacctaagaataaggacagtgtcctaaataaacataataaccttatcccaccaaaggaaattatgcctatttccttaatatcatgtactctcagtcttgtttaaatgttttcaccagatgtctctagaattttttgttctttatgaaaaagcatcaaatcaggattcactaattacatttggttgtttagtcttttaatctatttttacatgaattttatcttatttagtgataaatgggtttatatttttttgcctcaagattctccctgtcatgtctcttgttgatatggaaacaatatttatataatacaggaacattaattttggacaagattctgaagtgaaccattagcagagacaagtacggtttgctgtgtttcaaaatattggttattggtgtgacctcagcctgaaaattatataaatgaataattatttattttataggttcatatcgagggattttttaaaaatactttgaatcattctcgttttcattttcttttaggaattcttttagttggacccccagggactggaaagacacttcttgcccgagctgtggcgggagaagctgatgttcctttttattatgcttctggatccgaatttgatgagatgtttgtgggtgtgggagccagccgtatcagaaatctttttagtacgttttggtgtatctttgatgcagtgctaaattttgttaagggaagtgtgtatcttaccctttctttgctaattactttttttcttcctttttttaatttctattttttggggcctccagctt

SEQ ID NO: 4762 - DNA, 2300 bp, Homo sapien
agtgagcggagatcgcgccactgcactccagcctgggcgacagagcgagactccatcttaaaaaaaaaaaaaaattaaaataaaaaaaagtatgcatacccgtgtttgtttatagaaaaaaatgtgtgaaagaatttagtctaagatacgtatccctgagtaatgagattatgggcgatcttatttatactttcagcatttttagcaaaaaaacatggatttgttttaaggctagtcaagtgaagcaatgtatcatttttagagtcagaaagaaacagtaagttccttacagcctgggggcagtaaaaagaaaaaaaaataaacagtaacttcttttgaaactttaaaaataatcaaatcatttcaagatacatattttctacctctttgaaaagatttatttgaattagttatatctcttttatttgaattagttatatctcttttctttcacaaaaggatttagagttgagctcttctcaatgaaaaagttcattttctgtgtcttcctttttaccatttaatttcaagtgtattcaaccaattaagcaacaaggaattccaaatgtgttaccatccttcaaagcaagaaatgcctgagagtcctcactatatttgagccctgttaagactgcctagggtacataaaaatccctttatcatctctaccaacatcacatactactaactgtccattcagttgatggtaaattctcctaaaatcaggcctcttgatgtgaactaaggcaaagagttgagtttcaaaaacttcaataccatattcaataggccatgtcagacttctttttcaaacaattactaggacttctccagacactgtcatcttggtaaatagcaccttcaatgcattcatctgatcaaacccagaaacacctctccccatcatctctctgatctctcatgcaattccactttcttcaaaatatatctcattctcttctttccataaccactgcaacagctttaattggggggtgggtgggtatttttagctgataacatcttccactcttgccctctcctattctccatatagcaaaagccagtcatctcttaaaaatgaaaatctaatcatgttttaaaactttcaatggttcccaatacacttaaaatgaaatcagccataatatatcctttactccctgtatgatctgcctcaagtcttttctccaacctcttctgtcactaccccctttaactactatgttctagccacactagccttatttttgttccttcaacctgctaaaccctttcctaactcaggacctccaggtatttttctgtatgcctgtgatacctgttcactcttcaccttgctaagtcctactcatatttacttcatatcaatattaagagaagattccacatttgctttgctcacctggtacataactgatgcccaataacaagcagctgcttcagtttgttagccagtactagcacaaaaaattaaaaattcttaaaatgagggggagtaaaagttacacaaaggaacacaatcatatgcttaaatcaagaacctaagagtgtcgattttcttaaaaattatgttttaaaaaaactcaatgttttaaaaactatttctttgcaaaactgtaggaactctcaaaaaatctattaaaatgttaccatcaaaaaaagagactggaatgaagcaagaataaaacattgtcacaagtgattgcccaagagcgtaatgaaaacccttgaaatcatttttctcttcactaccttttgttttacaaaacgatgaggatgaggctgaatcaaaattttaactgcaaacagtttacgactcggaaatacacattttagttacttctggtcaaaatgagaaaaaaacttgcatggctggccatccgaaatattataccatgtttgggttaaatttaaattccatttaaaaggaaataaagagcaggggataggggctgtgaacactaaagccactggaaagtcggaaaaaagggaacattacctgctccctttaatgtatggtacagacattttcccaccccagaacgccggacactgaacaatgccggacggattctctagcagaaattccacgcaatcagttcgataagccagggtctctctctatcactgagctcacatcccgcctctgccctcaacagcttcatcgtcagcactgaagtctccggcccactctcagcgtcgtcccctgatccactcctcaatcctgggattcgcattgagtacatcacttcatttctagagtcccttctgagaaatcgcttccacgagcgcaattt

SEQ ID NO: 4763 - DNA, 2300 bp, Homo sapien
taactgatgcccaataacaagcagctgcttcagtttgttagccagtactagcacaaaaaattaaaaattcttaaaatgagggggagtaaaagttacacaaaggaacacaatcatatgcttaaatcaagaacctaagagtgtcgattttcttaaaaattatgttttaaaaaaactcaatgttttaaaaactatttctttgcaaaactgtaggaactctcaaaaaatctattaaaatgttaccatcaaaaaaagagactggaatgaagcaagaataaaacattgtcacaagtgattgcccaagagcgtaatgaaaacccttgaaatcatttttctcttcactaccttttgttttacaaaacgatgaggatgaggctgaatcaaaattttaactgcaaacagtttacgactcggaaatacacattttagttacttctggtcaaaatgagaaaaaaacttgcatggctggccatccgaaatattataccatgtttgggttaaatttaaattccatttaaaaggaaataaagagcaggggataggggctgtgaacactaaagccactggaaagtcggaaaaaagggaacattacctgctccctttaatgtatggtacagacattttcccaccccagaacgccggacactgaacaatgccggacggattctctagcagaaattccacgcaatcagttcgataagccagggtctctctctatcactgagctcacatcccgcctctgccctcaacagcttcatcgtcagcactgaagtctccggcccactctcagcgtcgtcccctgatccactcctcaatcctgggattcgcattgagtacatcacttcatttctagagtcccttctgagaaatcgcttccacgagcgcaatttgcaaacagccacgggcagggcgggaggaaaaaaaatgggctgaatgcctggcttacctggggttgcaccgtgctcgacaaggaaaacatctccggcgggccctcagcgacctcacccgcctgccgaaactgtgcccctctgtccacggcccggcggggaggcgctgagcccttcttttttcctttttctccgacccgttgcccctcactcctcccagaaacggaaaatggcctccccttcctacagctactgcaacgacagacaatccgccccggaaggcgaggcgctaactcaacagtacttccggggcaagtgagcgcccacaaggccaagtgcctgcgcgttctttcccgcggaagtagttgacatttacaaggagcagcgcccccaaaggtctttagctgttttttaaggggagaacagcctttaccctctttggactttttcttcgttttttttttttttggagacggagtttcgttctttcgcccaggctggcgtacagtggcgcgatctcggctcactgcaacctctgctccccgggttcaagcgattctcctgcctcagcctcccgagtagctgggattacaggtgcccgccaccacgcccggctgatttcctcttaagactttctacagcttccttatgaaatcttctgactgggccttgagcaataaggtcttttgctacaatttagtgctcttttcctcacactaaatcgaaaactctccctgttggtcctgatctgtttcagtcaggcaaattacatcctgggaaaacgtcagatgacaggggaggccactcgcttcctgctcatccagtttcgacactttctgtgctttcattagcttccagacctcagccctggccctcgctttactgtacagtcagaactggtttctacgcctcgcgagggtgggaggtcgtgtatgggaggaggaccgcttcccaccagcctcgttgggaagccaggagaaatctcttcaaatcctgcgattcagagtcaagtcccagtcgtcctttttctggtcggcccagaactgtttgtgcctcctccctcatgaggaatgatgtcagtggggccgcggtcgccgcccacgaagagtgtaaggctgcgaagtcggggctttcccgacgccccctccgtccgcgtctgcgtaggggaggtgacgagggcggggcgcggcggcggggtgacgtcacggccgcgcgcggcgtgggcggagcctcactttgaacccagttggcgggagtggctgctcgcggaggggcagtgtctgcggggccgctgtatgctgtccagcgatggatcccaccgcgggaagcaagaaggagcctggaggaggcgcggcgactgaggagggcgtgaataggatcgcagtgccaaaaccgccctccattgaggaattcagc

SEQ ID NO: 4764 - DNA, 2300 bp, Homo sapien
aaaatagtaatctttcttctggttaagaataaaacttaaaaagttatcagtgcctacagattaatcactcttctgtggtagaaaaatttcgacgattctgcacgtcaaagcaaacaaggtaaacaaaaccactaattactaaaaaccttttggatttagaaacctaactcgccgggcgcggtggctcacgccagtaatcccagcactttgggaggccgaggcgggcggaatacgaggtcagggaatcgagaccatcctggctaacacggtgaaaccccgtctctactaaagaaaccccgtctctactaaaaatacaaaaaatcagccgggcgtggtgacgggcgcttgtagtcccagctcgtcgggaggccgaggcaggggaatggcgtgaacccggggggcggagcttgcagtgagtcgagattgcgccactgcactccagcctgggaaacagagcaagactccgcctcaaaaaaaaataaaaaagaaacctaactcaagccagggtgagactacgaatcacggctttggctttaagtgcctgttgtactaagaccgatgtaatcacctcggtcaagtccctttgcctttggcctcagtttcctcatttgctaacgctgggcagggagaagagagtcaaactttgctgttctcactgggcatctgagatatggagggaagggcggaacagaggcgagacacccgacccgaccgctgatgtcgccccaaaaagaagtcagctcgcagggctctggaggcttcagcaagccaggccacccagactcctcgctccagcaaccccggggcctgcccaagccggtggggcaggaaggagggccgaagggcctaaccccttccttgctactcgttgacttcctacctttactgcatacaatttgccgcctttctgccccagatacactttcccgaaggcgccccggctaatgggcttcactatgctgaattcctcaatggagggcggttttggcactgcgatcctattcacgccctcctcagtcgccgcgcctcctccaggctccttcttgcttcccgcggtgggatccatcgctggacagcatacagcggccccgcagacactgcccctccgcgagcagccactcccgccaactgggttcaaagtgaggctccgcccacgccgcgcgcggccgtgacgtcaccccgccgccgcgccccgccctcgtcacctcccctacgcagacgcggacggagggggcgtcgggaaagccccgacttcgcagccttacactcttcgtgggcggcgaccgcggccccactgacatcattcctcatgagggaggaggcacaaacagttctgggccgaccagaaaaaggacgactgggacttgactctgaatcgcaggatttgaagagatttctcctggcttcccaacgaggctggtgggaagcggtcctcctcccatacacgacctcccaccctcgcgaggcgtagaaaccagttctgactgtacagtaaagcgagggccagggctgaggtctggaagctaatgaaagcacagaaagtgtcgaaactggatgagcaggaagcgagtggcctcccctgtcatctgacgttttcccaggatgtaatttgcctgactgaaacagatcaggaccaacagggagagttttcgatttagtgtgaggaaaagagcactaaattgtagcaaaagaccttattgctcaaggcccagtcagaagatttcataaggaagctgtagaaagtcttaagaggaaatcagccgggcgtggtggcgggcacctgtaatcccagctactcgggaggctgaggcaggagaatcgcttgaacccggggagcagaggttgcagtgagccgagatcgcgccactgtacgccagcctgggcgaaagaacgaaactccgtctccaaaaaaaaaaaaaacgaagaaaaagtccaaagagggtaaaggctgttctccccttaaaaaacagctaaagacctttgggggcgctgctccttgtaaatgtcaactacttccgcgggaaagaacgcgcaggcacttggccttgtgggcgctcacttgccccggaagtactgttgagttagcgcctcgccttccggggcggattgtctgtcgttgcagtagctgtaggaaggggaggccattttccgtttctgggaggagtgaggggcaacgggtcggagaaaaaggaaaaaagaagggctcagcgcctccccgccgggccgtggacagaggggcacagtttcggcaggcgggtgaggtcgctgagggcccgccggagatgttttccttgtcgagc

SEQ ID NO: 4765 - DNA, 2300 bp, Homo sapien
acacaaagagggtgggtgctaagcaaatactgactgaacacatggattggtgttttcatttcaactgatcatgactaagtactgtagaaggaaaagtaaaaatctcaggaacatataaagtaaccaattcaatcagatcttccaattctgaaagattagggaaggtgtgaaggggagctaagatgaatcttaatacatgaataagacaggtggagaagagcacaaaagggtagaagaaaagcacttaaaaaggaaccagcataaggccaggcacggtggctcacccctgtaatcccagcactttgggaggctgaggcgggcagatcacctgagctcaggagtttgagaccagcctgcccaaaatggtgaaaccccgtctctactaaaaatacaaaaaattagcccggtgtggtggcgggaatcccaactactcgggaggctgaggcaggagactcgcttgaacccgggaagtggaggttgcagtgagctgagatcacgtcactgtgaaactctatctcaaaaaaaaaaaaaaaaaaattcatagcagggcagggcgcggtggctcacacctgtaatcccagcactctgggaggccgatgtgggcgggtcacctgaggtcaggagctccagaccagcctggccaacataaccaaaacaacctggctaaattcaatctcggctaaaaaaaaaactacacaaatcagccaggcatggtggcgcgcgcctgtaatcccagctactcgggaggctgagacaggagaatcgcttgaacccaggaggcagaggctgcagggagccgagactgcaccacagcactccagcctgggcgacagagaaagactgtcttaaaaaaaaattattaaagacttctcagaaaatagtaatctttcttctggttaagaataaaacttaaaaagttatcagtgcctacagattaatcactcttctgtggtagaaaaatttcgacgattctgcacgtcaaagcaaacaaggtaaacaaaaccactaattactaaaaaccttttggatttagaaacctaactcgccgggcgcggtggctcacgccagtaatcccagcactttgggaggccgaggcgggcggaatacgaggtcagggaatcgagaccatcctggctaacacggtgaaaccccgtctctactaaagaaaccccgtctctactaaaaatacaaaaaatcagccgggcgtggtgacgggcgcttgtagtcccagctcgtcgggaggccgaggcaggggaatggcgtgaacccggggggcggagcttgcagtgagtcgagattgcgccactgcactccagcctgggaaacagagcaagactccgcctcaaaaaaaaataaaaaagaaacctaactcaagccagggtgagactacgaatcacggctttggctttaagtgcctgttgtactaagaccgatgtaatcacctcggtcaagtccctttgcctttggcctcagtttcctcatttgctaacgctgggcagggagaagagagtcaaactttgctgttctcactgggcatctgagatatggagggaagggcggaacagaggcgagacacccgacccgaccgctgatgtcgccccaaaaagaagtcagctcgcagggctctggaggcttcagcaagccaggccacccagactcctcgctccagcaaccccggggcctgcccaagccggtggggcaggaaggagggccgaagggcctaaccccttccttgctactcgttgacttcctacctttactgcatacaatttgccgcctttctgccccagatacactttcccgaaggcgccccggctaatgggcttcactatgctgaattcctcaatggagggcggttttggcactgcgatcctattcacgccctcctcagtcgccgcgcctcctccaggctccttcttgcttcccgcggtgggatccatcgctggacagcatacagcggccccgcagacactgcccctccgcgagcagccactcccgccaactgggttcaaagtgaggctccgcccacgccgcgcgcggccgtgacgtcaccccgccgccgcgccccgccctcgtcacctcccctacgcagacgcggacggagggggcgtcgggaaagccccgacttcgcagccttacactcttcgtgggcggcgaccgcggccccactgacatcattcctcatgagggaggaggcacaaacagttctgggccgaccagaaaaaggacgactgggacttgactctgaatcgcaggatttgaagagatttctcctggcttcccaacgaggctggtgggaa

SEQ ID NO: 4766 - DNA, 2300 bp, Homo sapien
ctctactaaaaatacagaaaaaaattatctgggcatggtggcaggcgcctgtagtcccagctacttgggaggctgaggcaggagaatggcgtgaacccaggaggcagagcttgcagtgagcagagattgcaccactgcactccagtctgggtgacagagtgagagtccgtctcaaaaaacaaacaaacaaagaaaaaaaactttgtatataaattttgcatccaatgaatattttatttagaaatcagttttacctatatcttaagacatctcctacttacctcttgaaaccatagtttaagtgaatattctttgttaaactaatttgtccctctctgttcctaaaaggaataaagccacattaaaatactctgtaattaaggccttccctagttaccaggctttcctccaattactataaatgttgctgccttatctcataccttgtgtgggatacagaataatcatgtaaatgtttacatttcctgatatgaaattgagtagtagtctgcctattttagagaataattttaggatttaagatacataacatatccagaatatcagaaattattaataaatgaaaaaaatggctttatcttctctttaaccagctgtggtaattggtaatctaaacttcttggaaaataaagaggaaagcagttgtcacattgcccaagtgaaaacaatgtgggtttttgcacttttgattataccaaaatgttcacatactaatgttgcagatagtgactatctggggctgatggcgtgggcaataaaggaattgatgaagacagttgtaggtaaagaaaggcaaatttattagacgaagtaggaaaatacattgtaaggttgtaacgagcaagtcaccaagaggggagctgatcacaaggcgacaagggcttgctagagatgttacagggcggtgcttgtcccggagaaggccgcatgctgcgctgataatgccaaggttgcagtgagctaactcgcatttttcttttcttttcttttcttttctttttttttgagacagagtcttgctctgtcgcccaggctggagtgcagtggcgtgatctcggctcactgcaacctctgcctcccaggttcaagcgattctcctgccttagtctccccagtagctgggattataggcatgtgccaccacgcctggccaatttttgtatttttagtacagacagggtttcaccatgttggctgggctggtcttgaactcctgacctcaggtaatccaccctccccagccacccaaagtgccaggattacaggcataagccaccgcgcccagctctaccttgcatttttgtatcaatcaagggtctggtgatacgtgggcacaggacaattgtgagttatttgtacaggagggctgtgcgtcctggaccatgaggaaaggcagacttgcagcttatctgctttttctttttgcttccccctggtcctaccagcctaactcgttttccctaattaggactccacaattaatatttctgttcatcaaatatttgtagagaatgcttgcaactttagctgtttcctcttcgattacaggtcctgcggtagactggtgggcacttggagtttgcttgtttgaatttctaacaggaattccccctttcaatgatgaaacaccacaacaagtattccagaatattctgaaaagaggtgattctttttctcctattaagatagtcatttactggctgggcatagtggcccatgcctgtaatcccagcactttgggaggccaaggcgggtggatcgcctgaggtcaggagttcgagaccagcctggccaacatggtaaaaccccatctctactaaaaaaaaaatacaaaaaattagccaggcatgttgacgggcgcctgtaatcccagctactcgggaggctgaagcaggagaatcgcttgaacctgggaggtggaggttgcagtgagctgagatcacgcttttgcactccagcctgggtgacaagagtgaaactccatctcaaaaaacaaaaaaaagtagtcatttatctctggatactattattttgagcagtaataaacaagtttatttgtatatgtataattttagatatcccttggccagaaggtgaagaaaagttatctgataatgctcaaagtgcagtagaaatacttttaaccattgatgatacaaagagagctggaatgaaaggtatggttttgtgttaatacattgttttaccattgattttttgcagatggtgaatatttataaaaatagcaagttctggctgggcgtggtggctcacgcctg

SEQ ID NO: 4767 - DNA, 2300 bp, Homo sapien
tactttattggagaaaacgaaatttttcagagcttgtttcctgacgcagtcacacagtgaactagcggcaaatccaagatagactttgggccaagataaccctaaacccgttcattttcctcaatcccaccagaaatcaccctaaagaggtttatttatttaaaaaaaaaattgaaacatctataggtcacattgattatttcccattaaaaatgaaaagggttctattaaatccaataagggggaaatgaatattccttcaatttaggtttgttccttttatggaataaagtaataacgcgttagataagtgtcactgctttttagccattcatacattaccatttggaattctttagtatttacaacccaaagttggttctctaatctatttctcatctttgtgtgataattttacaaaatgtcctcttcatttttgaagacaaagaaacgtgaaacgtccacgatcaaatgatttccccctgtgttgtattagacaaacccgaagcaaagcctccggagggcgctggagaagccgcagctgcagacaccgcgacaatctcaagacacttaagctggaagcgaatgtggcatttcaaagaggcacgaaatgcaaccggctaggaaggagggattccgccgcacggctgcggcgtccgcgggacagagacgcctaaccggaagagctagcaggaacgccggacgccgctgggacgtgtccggaagcgcggcggaacggcggactacatttcccataagcccgcggggcagggcgaggggcgggcgtcggggacattaccggacaggccttgtccggcaataccaaggtaaatgccggcgccgcggctcagagggaagagtaacttacgatctgcgcctagatttttcctagtaaccctcctaacccatccccctaactgacaaaaacgactcttccatccgggagactttgggatttccgggctacaggactccaccccccacaacctagtcagtcccaccaccaacgttcggcctggggcacttcccaaatgcctaaggacgcagggggttgcgctagtaagttgaaggcccagggcaccccctttctagggttgacgacccgtaaagactcctcattggccccgccctctacgcccagtatcctatttttatttttttttttaattattggtttcttaaatagagccagggtatcgccatgttgccaggctcgtcttgaactcctggcctcaagcaatcctccccactcgacctctcaaagtatcgagattacaggcgtgagccactgtgcccggccgtccccatgcccagtctcctattaaatcccgctggaggtgcctggctccctggggctgggtggaaagggtagtgtaggggaagttgccctccgtcccagcccagtttaggagccggcgacctcctctctccttcggctgctcctcggacgttcttggctcagggcagcgaaaactgtcgaagacctgcgggccagggactgctgagcacctccatccaaggtccccaatgcttttctccatctaccctttagagtgggtgtcacgattgccactggaaaggctaagtgacttgccctaggtcacataatttaaatggcagaactggagtttctcacagaacctgtcccgacttaaagccctttgcttaggccccatttaacttcctcaaaccttaacttaggagagtgcaggcgctggggaccgcagagtcatttttgttgcccagcggtgccgtcgcgtgcagctttgggcccaggtgcagaacccaaccgcgcatccccagcgcgcacttcgtccacccggctgccagagcggacacatcggtccggcctcggtttcccccttctgaacaaaagcgcgcacagtgtgctccccgcaccaagccgggactgtggccccctttccccgcttcccggaccctcctctggggacagacggaccgcgcgcgtccttgccgcggcggcgggtcgggtgggtggggtttgctgcactgctgctgcggcggcggcggcgccagtgggtcctccggtgactctggggcggggctgtggggagggcacggactgacagacggactccggcggaatggggggtgtggctgctccgccagggtccccagggtgggagagcggctccgcggccaccgatgcccggaccccctctgtcttctgctagacatgctcttcctctcggtgagttgttttgctgtcgtcgcgggccggattcgtgaccttagtcacgccccgggggaggaggaaggagccgggccgcttcgatctg

SEQ ID NO: 4768 - DNA, 2300 bp, Homo sapien
aaaaaaaacttcttattcacaacaggctgtgtgacataggcctttaacatggggccaatgtcgctaagaagttgaaaatacagtattacaaaatcagtagaaaacaagcaacaaaacaaaagtgtctatcttcttttctttgtccaacatgtttgggtagtagtattgaaggagctctatgacaagtgcaaatgattgtaaaatgaatcagctctgctcagcatatacacagagactataaagttacttatgcaaatatagctctactgtgttaattgccacaggacttagataggtatggcagaaagatggccagatttagatgacctagacactgatgtcacactaaactcttggaattggcttcttggctttcctctctgacaagtgactgaaatgggggtagggttgaattttatgaagatgtgacacttaacccaccacacacacgcacaaattattgtatttccttcttcgtgcctgtgttatggcctgctaatggtatactttacttgaatgaactcatgtgctccaaattttctgtgggatagagattgatcatattccccattttaaggaaattacagcttgaaaaaactaaatagtgtggcaagaaagctagtaagttgcaaagtcagggatggtcccaggattctgtctctggagactgtcctttccaccccaccacacatggctgctgatcatcgagacaggtttccatgatgcacaggatggtgggtgaagtaggtggaggcaagacatgttcactacactcacacctgtcatttaccagcaaatcagccatggaaagcaccacggtccttaaataaatgacccctgctgggacttactttagatagccgacatgtttgaagcagccctggctcacaccgaggcctgaggcctccgtggagactgcgcatctgcccattggatgtaggagagcctcccagcacatgcagtgggcatgccctgcagagcgcatttttctcattccacagagcatcgatcttaagacagatcatcctgaactgcccttaaagctgagggcaatctgtccatccactcacacatcacttaagagacagaaagaaacttcattctctctgtgtgtgtgtgcgcgtgtgtgtgtgtgtgtgtgtgaagtcatttccttttcctctctcccccgccaaggcacctgctcagcacactttccttttcgctttttcctcctgggcagtgctcatcctccctgcctgattcagattcttccctggtgctgctgtccaatatttattgctcagctaagtatcaaaaaagaggaaatacaaaaatcttgaaggctactacatgctaggtaatttcacatactttattggagaaaacgaaatttttcagagcttgtttcctgacgcagtcacacagtgaactagcggcaaatccaagatagactttgggccaagataaccctaaacccgttcattttcctcaatcccaccagaaatcaccctaaagaggtttatttatttaaaaaaaaaattgaaacatctataggtcacattgattatttcccattaaaaatgaaaagggttctattaaatccaataagggggaaatgaatattccttcaatttaggtttgttccttttatggaataaagtaataacgcgttagataagtgtcactgctttttagccattcatacattaccatttggaattctttagtatttacaacccaaagttggttctctaatctatttctcatctttgtgtgataattttacaaaatgtcctcttcatttttgaagacaaagaaacgtgaaacgtccacgatcaaatgatttccccctgtgttgtattagacaaacccgaagcaaagcctccggagggcgctggagaagccgcagctgcagacaccgcgacaatctcaagacacttaagctggaagcgaatgtggcatttcaaagaggcacgaaatgcaaccggctaggaaggagggattccgccgcacggctgcggcgtccgcgggacagagacgcctaaccggaagagctagcaggaacgccggacgccgctgggacgtgtccggaagcgcggcggaacggcggactacatttcccataagcccgcggggcagggcgaggggcgggcgtcggggacattaccggacaggccttgtccggcaataccaaggtaaatgccggcgccgcggctcagagggaagagtaacttacgatctgcgcctagatttttcctagtaaccctcctaacccatccccctaactgacaaaaacgactcttccatccgggagactt

SEQ ID NO: 4769 - DNA, 2300 bp, Homo sapien
gcagtagttggcggaagctgccgctgccttccgcccccacacacgcacaccacaccacacacaccagcgcccctggcggcggcggcgggggcggcggggctggggcagccacctggcgtgcaccaccgaggccctcggccgttaacaaagtggtatacgatgacctcaagagcgaggaggaggagtacggcgacgctgaggagacccaggagtctgaggacaactaggaggatgagatggaggaggacgacgatgacttcgattacccttacccggaggagctggaagacgacgaggaggactccagttactgcagggaaagcaacttcaggagccatagtacctacagcagcacttcaggctggaatgcaatgttgcgatctcgcttcactgcagcctctgactcccaggttcaagcgattctcctgcttcagcctcctgagtagctgggattacaggtcagtttctctccctggaaagaagagtattctcggatttcaaaaaaaggaggaagagttcaggctgccagaagtggactagcacttctgaatatccggaggcgaggtcgcctgacttccttgggaagctctgcagtgcccccaccccaccctaccccaccactgcaggccctggagtcctgggaccacccaggtctgcgacccaaatccttcctcgctaaggggaggggagggggttccgggggggcgggatgggaaggggtgcttggacaggattgtgacataagattgccatggtgacatggagcagatttagacccgagcctaataaaggtggcattaaataaaggtgtcataaagacagggcagggcgcacgcttataagggacacgagcgtttcggggctgccagaatggctctcgctcactgcgcggtgccagcatgtgtcatgtcccggctgtgtttctggggcctatggcccctgctcacgtggcaactattgtggctactagtcaaggaggctcagcctctggagtgggtcaaggatctgctccagctgacctctaacccccgggggccgcctgagccctggtcttccgctcctcccatctcccatgggaatctccccatgcccctattgccccagcagatccgggggactttgattacctggggccctctgcttcctcgcagatgtcagccccaccccaggaatcaactgaaaatttggttccattcctggacacggattcagctggagagctgcccctagggccagggcagttctcagttgcacaccaggatttcaatgacaagctgactctgcaagaaaggctcccagaggtggttccaatgctggacagggatcagaaccagaccctagttcagcctcctcgcctcaaaagtaaggttcaaactgcagatctagatggggctgcaggtcatcaggcagatgaaatacttgttccactagacagtaaggtttcaaaaccaaccaaatttatttattgtttgtttcacccaggaacctgaagaaagatctagctcagcattggagcattgctgatattgttggaattccacagcaattatccaaaccacagcgttagaaacagactttgcaggatgaatattcgagtatggatacacagtatcctggcagcctgcctccagaactccgggtgaactcagatgagcctccagggtcccctgagtaagttggactttctcaattccatctagagcctgaaactcaaaatccagagacccttgaagatatccagtcctcttcactccaggaagaagccccagagcagcttccacacctccttcttcaacccagcaggaggccccagctctgcctccagagtcctctatggagagtctagctcaaactctaccaaatcatgaggtgacagttcaacctccaggtgaggatcaagctcattataacttgcccaacattacagttaaacctgcagatgtggaggttaccataacttcggagcctaccaatgagaaagaatcttcccaagcccagcaggaggctccagttcagtttccagaggaggtggaaccttctgcaacccaacagtaggccccaaccgagcctccatgtcatcctacggagcgtgaactttccattagtgagcaggagcagccagctcagccttctgagtcttctggggaggttgaatcttctcagactcggcaggagaccccagctcagcctccagaagagatggaacctcctgcaaaccaagaggaggccccaactgagcctccaggtcctcctgtagagcctgaactttcccccagtgagcaggagcagccagctcagcc

SEQ ID NO: 4770 - DNA, 2300 bp, Homo sapien
tctcgaattctcactgggcctcagccgcctacccgcgggtcagggctcaggacctgcagcctgcggcatatgcccaaatccgccccgcgccccccacccccgctcccgccccgccccccacccccgctcccgccccgcccccctcccccgctcccgccccgccccccccgctcccgccccgcttcccccaccccctcttcccccgctcctcccctggctcctccccgccatgggcgcactgcccactgctctgcagcgccagatcccattgacccctcaagggctaaggagtgcccgcgcaccgcctgggactgaaggtcagctccgcccgcggcccatggcgcaggatccaccaggcctatgtaaagccagctgggctcctgagtcgcttggcgacttggagaacttttatgtctagctggaggattgtatatgcaccaatcagcactctacgtctagctccaggggtttgtggatgcaccaatcagcactctgtatctagctaatctggtggggacttggagaacttttatgtcaagctagagaattgtaaacgcaccaatcagcactgtgtctagctaaaggtttgtaaatgcaccaatcagtgctctgtgtctagctaatctagtggggacttggagaacttttatgtctagctagaggattgtaaatgcaccaatcagcactctgtgtctagctcagggattgtaaacactaatcagcaccctgtcaaaacggaccaatcagctctctgtaaaacggaccaatcagctttctttaaaatggaccaatctgcaggatgtgggtggggccagataagggaataaaagcaggttgcctgcgctagccaccgcagcttactgtggtcgtcttcctgacggtgtgttttgttctttccgctttttgcaataacagttgttgctgctgagtctttggggctgtgctgtctttgtgagctgtaacactcactgtgaaggtttgcggcttcactcctgaaggcagtgagaccactaacccaccaggaggaacaaacaactccagacgcgcaccgtttttatgaactgtaacactcatcatgaaggtctgcagcttcgttcctgaggccagcaagaccacaaacccaccggaaggaagaaactccagacacgtctgaacatctaaaggaacaaactccagacgcaccatctttaagaactgttaacactcaccgccagggtctgcggcttcattcttcaagtcagcgaggccaagaacccagcaattctggacacacccgaccctccaaaaaactgaaaataaaggacaaatatttaggtctcatatccctacatgtttgcaggaaggttctgctttgagctgtatccgtataatgacaggtgatatcctgaggacattccacatttgcctctttggcatctggaaaagaatccagtttcaattccgaaacatcccatcatcgtaaatgctctggcactggcctctaagcacagtctccctccaccccaagatagtgcattcttccccacccacccccgcctcaatattcctactcccttgtccctcactggttttccagttgggactcttgctggtagggtgtctagaggtggggtcaaaaccatcttaatggacaaaggtaaaagccatttaaaaaaagagatgggggacgtgttttcatttcactccgatcctctgccctattgaagagcgctttctgctttccaggtgagtatcagagtattctaacatattcgttttttggagagaaacatgtaagcctcaaatatcctaggagaagccctatgctatttgggggtactcagtgaagatttcaggtacatacaacgcacttgtctggaagcctgtggagaaatgtaaaaagggtttctaaggaatattttctctttcctttctgctctattttaagtttctgctaacttgtccccgaccccacaactgctcacgaccttcgtgaaggtcaacctttcctaccgcgtggagtgagttgggatgcatactggggagttgtataagagtgtctgagaaagggaaatgcagagttgaatgaaagtgtttcccgggaggggccgagtggaaagcagcaggtggccggcgcgggtggaacccagcgcgggcgcagagcgtctctggcgtgggcattcggtgcagcgagtccgcgggaatcttggatgcgcggaggtccccggaccgcggtgacggacggggctgcgatcgtggccggtgagactgggagcggagggctggggcggcgcccgagggagggcacaaacccgggaggc

SEQ ID NO: 4771 - DNA, 2300 bp, Homo sapien
ataccatgctctttctctgccttcaaaacaaatatttaatattctccttaagaaagtacaacattcattcactcttattactcactacattaatgaaagagtggcctatttgaatagaaagagcttggcctttggactcagttcaacttgggcttgaataaactttacggtctttcacttactagctgtctcttaacctctctgtgcctcaattttctcatcaataaagtgaagatgaatacagcagttatctcacaggacatcactgtgatgcctcgatgagaatctatgcaaagtattttgaagagtttttagcacatgtaacagctcagtaattgttagatattataattataacttctacttaacaaagacaacattttaagtaaaataatacaatcatgcctactttgtggtgtgttttaaaggttacagataacactgtattttaacggttctaagatgctcaatttctcatattttagcatctctgacattgaaatgccacttacaattcattatttattagaactatatttggcaaaaatttaaacaatcttttattggtacataaaataaggaggcatcacacaattcagggtgccttccatgaagtggaatatggtatatacaacaggacgatggtagtcctaatcacaggatttacacttaaagaaattttagcttttaagagtactacgcaaaaggagagttgaaataaaaacaacaaattgttaaaacaaagtactcctttaatattttaaaaacttcaagccaaagaaaacttgggattcaaatgaataggtatggctcattttattttgtatttagatttacagaatgtatattaattcatatttagatttatggagggagtacatgtaaattaggtatttccaattattcatattactatttaaagctgttataaatttccaaaatcgtggttggtagttatcttttactaatttctcacttcagaagtatttttgtttgaaagatgagaggaaaagcttcaattgagattcagtcctattactccaattttaagcctctcatgttgctgaggctgagcaggtaaatgtgaaatttttaaggatgaaagggtcttgagagttaatagaatgtgtcttctacataataggcattcagcttacatgtgataaatggattcaaagaatggataaatatagttgggaagttcaatatcttaaaaaactgctataaataaagcacttatatttgctactttattttcctaataacaaaactacactaaaatgattaatctgtaattattgacatatatataataaatctagatataataaaaatatgtttctaataaaatgtacatgtaaatcaacaagcacagataaaaagtttctcttctgaaaatgctaaaagttcacagaatatactaatccacaaaaaataaaaattaaaatatagaaagtgaaaaattattttaatctgtgcaaaattcatattcctgctcttccccaaaattatttcattaataataaacttttactaataacattgtacttgttcaatgcagaaatcaaagataataaaaaggaaaaacattttatattaaaacaaatgccctcaaataacaaattttatcatatttcgtacataatttcagataacacaagaccatcatctgtatgtataaacaaactgaactttacccttacttggtacaccaaaatacattttcaaatgtcaacatacttctgtatatgtttctacattcagtggtcacattttatcccacgctgtaaattcactgaaatgtatttataaaagccattgtatggattcttcttaatacactgatattttaagcagcgctcaaaaaagaaattgtgtgtatgtttccttattttctaaaaatatcttaatgtaatagaattgatcaccaacaggcatatacaattttttaaatatggtacttaccaccaaattgtctatttgaaaagtcatctgcaacttaaactttaagcagcagtataaatatcactgctctttatcctcataaactttgtggatagaaaacagtatttgattcctgttttaacttaaatgccttctctaacgaggaacactaaatattgtttcctgtgtgcataagtcacttgcagatctagaagaaggagtttgcccaattttaaattagaggcaaagtacttttcttagatctgcaatttacatctctaatttaaattgcccaattttaaatagaggatttttttgttgatttgagtgaattctctgtaaaatgaagattttta

SEQ ID NO: 4772 - DNA, 2300 bp, Homo sapien
taacagtcactacagatgttcctggtcagtgactaggtatcctgcccatgatgcttcaggaacccaggttcctgccagcttatgtaccacagttcaagtaggttcctctgtcacctatgtctagatgatgggatgggatagagcaattcttaaaggtcttggtctggaagaaacacccatcacttccacttatattctgtagctgattactggtcacaaggccacacaaaggaacaaaggagatttgaaaatgtaatccttgattggacagccatatttcaattacaattccatattatgatggaaagggtagcatagttttcagttggcaactatcacttaatgtcattgattcttaactgcctacattaaactaaaataaattccagatggattaatatttaaatttttaaaaagcagataattattgtattagtccattagtgctgttataacaaaatatctaagatcctgtttacaaacaacaggaatttatttcttacaattctggatgggggaagtccaaaatcaagatgttggcaggtttggtgtctggagggcccagcctttgcttccaagttggtgccttgttgctgcaccctctggagggaaggaaggctatgtcctcacctggcgaaagagtggaagggcaaaagggcctagctagttatctccagcccttttataaggtcactaatcccactcataagaggtctaccatcatgacttaatcacccctaaagactatcacattggggtttgagttccaacctttgaattttggagggacacattcattcaaatcgcagcaattataatcacaaaaaaagaaaaatttgttatgacaaaaaatggaattcatgaaagaaaagtattcattaattgaattgcaaaaataagccatggcaatgagaaaaatgaggggagaggggaggcttgtaactcagaccacaagaaaagtggtcatttctttaacatataaatcaagaagaaaatcccaaaatccaataggaaaactattgaatggaataggcacgcaaaagatatgatagttcactcaaaaaggaaagataaggatactaagcagtacattcaaaattaaaccaaagtaagatgccagtggcacaaaccactttgctgacattgtaggataggctgtggcaaattcatatattgcttatgagggtataaatcaatacaacttctttggattttaatttctcaatagctctaaaaatttaaaagaacctatcctttggcctagtgaatccactctaaagaattatctctcacagatatggttgctgtgtacaggttaaaatatgatatttatttactgagcactgtttataaaagcaaatgactaaacaatgtatgggtccatcagtaaaattctggctaaattatgtttcatccatacattggaaaagtatagagcagttcaaaaaaataagataaatccatatgcactgacatgttcaaatcttctgccactgtagatgaaaaatgtgatctacataacatgaatagtgaagtagtatttatgaaaaaggtatatttgctatatctttgatatgcatgtatatgcatagaaagggtttgcaaggatgtagacccactttttaacacttcttttaagaggaatgggagtgaaagattttgatttttttttccccacttttcattctatgcatttacttctttttactaggagaatgtatgtacatgttacacttgtggacagaaaataaaaataataactaagtcaagtgtgtcagattcataaaagtcttacttgaaactgttactgggtgaatgccaagaaaggtaaaatctgtcactcaggacacgtggaatttctgtgccatttgtgtgcatggaagaaacacccacattctcccaataaattgcgagtccataggataggcacgcatttgatggccttgaagaagcgttccttgtatgtgcagaacccctgagaaaccaggcacgccacaaacacatttcagattagttgggcgacggggcaaaccacgtgctcccaacgcagcctccgcttccggagcgcggctggagggcaaactcccctagaatttctccaggaaaccgttgggtggggccaggagagcgttgggtggggccaggaaaccgtctggtgggatctccgcagctgcttttcacctgctgttcctcctgcgcttcctaagaggaagaatcaatgccgtgggtggagcccaagcccaggccggggccggagcagaagcccaagctcaccaaaccggactctgccaccgggccgc

SEQ ID NO: 4773 - DNA, 2300 bp, Homo sapien
cctggagtgtagagcctgagacagagggaccatgctacatgtgtcctaatgggaaagggctcttcttgagtaaaaaggtggttactgagttttgctttctcctatagaggaaagatgagcaaaaacagggagatggggacctggagaagagagggtgcagaagtggccaggtggggacacctgtgatggtagtggggggatttgttggcaaactacagcttgtaggccaaatccagcccactgcctgattttgcacggcctaggagtgaagaatggtttttacataaaatagttgagaaatgtttgaaaaagaatatttcatgacttgggaacattatatgaaattcaaatgttagtgtccataagtaaagctttattggaaagtgccagacccctgcacttacgtattgtctagggctgttttcccctgtgcagagttgaagagtttgacagagaccatatggcttccaaagcctaaaatattaactgtgtgaccctttactgaaaatgtttgctgaccccatccttatggtataatgcgtggatttttggaagagtaaaacaaatgtaacatttgccaagcactcattcttgcccagcagggctataagctcttctcatgtatgtaatagaattctgtgaacaaccctatatggcaggtaccattattatcttcatttcacaaatgagaaaattgagacacttcagtagttttctcaaagtcaggccattagtgagtagaaaagctgggatacgaacctaggctgtccagttccagagcaataatctggtttcactttctgtgatgtaattcctgccagttatccctcaaaaataccagtatcactatgcaaaccatcacttacttgatcagtcttgctgtggagaaagggattgggctgtgcctacacttggggtgcaatgggagaggacgcaatgggaggggacagtagacttgaggagtggcaccagttcactcctgggctttacattcaatggcatcacagaatggaggaaatcattgtgtgtgtgtgtacatagaaaatgtctagtaggtttcaccccaaactgcaaacagtatttgccctttaggagtgaaatggataatatagaattaggagatgtctaaattttaatcctatgctgtttgaaattttaagtgaggttgtagtctttgtaatgctattttcagaaacccacaaaatatggtgaaaagaactctctggtctggttttcccttttgtgaggtaaattgacttaactctccttcaagtgtcttaggtattgagaagcggtagatagattatttaataatccatttccccaggatggcacctagagaaaaagaagattatccagccaccaagaaatgcccagttcctctatttcggatgaacctgacttaatcaggagtagaaggcacctttcttcttttcagagttacacaggggccctgggtttcctgttgacatgaagatattcgcatccttcacaaacagcttgtcatctgttccactttctgctcttagaggtgaaataggaagtttcttctttcttcaaaagattaaggaaaccactgtttcccttttgaaatggggaaagatgtgtgacatcttcatgccctcagtgtcagtcctctgagcctaagctaagccatagcatctcctgtgacctgcacttatacgcccagatggcctgaagtaactgaagaatcacaaaagaagtgaaaatggcctgttcctgccttaactgataacattccaccacaaaagaagtgaaaatggccggtccttgccttaactgatgacattaccttgtaaaattccttttcctgtctcatcctggctcaaaaagctcccccactgagcaccttgtgacccctacccctgccagccagagaacaaccccctttgactgtaattttcctttacctacccaaatcctataaaacagccccacccctatctcccgtcattgactctcttttctgactcagcccgcctgcacccaggtgaaataaacagccttgttgctcacacaaagcctgtttggtggtctcttcacacggacgtgcatgagatttggtgctgtgactcagatcgggggacctccccttgggagatcaatccgctgtcctcctgttctttgctccatgagaaagatccacctacgacctcgggtccttagactgatcagcccaaggaactcatctcaccaatttcaaatcgggtaagtggcctctttttactctcttctccaacctccctcactatccctcaacctctttctcctttcaatct

SEQ ID NO: 4774 - DNA, 2300 bp, Homo sapien
aaaaaagaaaagaaaagaaaagaaaaagaaagagaggaaatggccaagagatggaggaaatccaagagaaaatgatattgccaaagtacgtcaacagtattacaggttgcaagagatagccctggatttattgatgaagtttttgtttttgtatttatcttggtgtgaatagcacagtgcaatggttctcacactttttggttgtacaaattatagtatactcttaaaaatcattgaggacctgaaagagcttttgattgtaagaaccccaaagagattacatctcttatttatcctactagaaattaaaactgagaaaatttcaaacatgttaatttacttaaaaacaataataaacctattaccagttaatagaaatgtttatgaaaataactactttaaaacagaacaaaattgagaacagtggcaatgttttacattttaggaaatccctttaatatctggcttaatatcatagaaaaccagtaagttcacatatcttgttctgccttcaatctgttttgctattacatgttattaatatatagcctctggaaaactccattatattatcatcagagaatgtgcatgaaaaaataacatattaactatgaaaatagtttgatcttgcaacccccctgaaaggttttcagggatttctagggatctcgggaccccagggcaggagagcttgacaatactgtgaacctcataaataagatctttttgtcataatgaaaagtaagctagatagacttgactgaagtttcaagggctatctgatgagaagtggaggttgtttcattgacattattctctaaggttaggaatggactctacaacattcattcaattaattcattcagcatacatttatttagcacatattatgtgccatgaagtactctagatactgaagacataccagtagacaaaacaaaatatccttgccttcatgagacttctaataaagtagtaaaatatatagtgtatcagagagtggttaaatcctatgcagaaaaacaatgtaaagaggtctagagaatgctggagggatttgcatatttcagtagaatggacagggaaggcctctttaagaatgcaacatttgagcgaagacctgaaggaggagaagccattgggatatcttttgaaagggcttttccagctatttaacaaattaatttcttaacatttgaaattttatttatatgtagtctttaatcaaatatccattgtatatgacattagctgcaggtataaggaaataagacaagagaactgaggtttattgagtgcctgccatgtaccaggcactgtgctaagtattatgaatgaggtttggtaccttcactaagatttacaacttaatgcaggaggcaaggtgtagacatacacttcctgcagtatgggtgtagcagttcttatgaggaaggagagttgacttgaagttgcaccgccagaagtaatgcacctgacctacctgaagtctacgcctccctttcaagatgaattagggtgcagagggtgctctccactataacagaggggaagccagcaagataatacctgatcacaccttttatagagcactttggttaacaacatgtcttcacaaattaactcacttaaccttcataacaataagaagcagatgttctaagaagtgttactgtgtctctcagagatggagaaaggctaagaaagctgggtagtatgacaaggcagttataaggtagagctggacctaaatttaagataatctgcttcaagcacagtgcttttcccaccgcagtgcagctgttatgagcagctgccgaaataaaacagcttgatattctcctgactgagtcctcccactgactcaaaaggagggttaggttgaggctggggcggagctagacctcaagaagaagccaacaaagtcacacacagcgctccccacctgcgcttgcgcaggggaggaacacgcagtccggaaaaacgccggggattctgggtcgcgcagccgtggagctacctcaaggcggaactggggagtccagggcttcggcagcctgaacacccggtgtgaaaggaaggtggcagacgtggagcggcgcgcatgcgcagcagctcactctgctgaagggctgagaggcgcacccgggcggccagctgggctcggagcggaacggggtcaggatggacgaggacgtgctaaccaccctgaagatcctcatcatcggcgagagtggggtgggcaagtccaggtgaggcggaggtgcgggtcgtgacgagggtggctgggctctttctgc

SEQ ID NO: 4775 - DNA, 2300 bp, Homo sapien
ttacagagggatatttcacaccatttcacttctagaatggatccttcactcttctttcatttttaaatggattttaattattaaatcatagtctaagggaattaccatatgttaattttttagtgagttgaggcttactcaaatgtattttattcctatatcaaatgaaaagtatttttgcattaagatttttgctgtatatttcatttcagactttaagaaaacaaatattacatgtaagtatatcttaaaagcgctctaaatgcatttttaaattgagtaaatatagttaagtactaaaacaacaaaattcatttgtcctatactaacatgtactatagcatatagctcaaaaagttagtagaatactgggaaattgcaagtaactgtatgatgcctattgctttacctgggacagctgaccaaaaaatgtttcaggggtatgttagagctaatttcattacaattcccggtgactaacaccactgatagagaccataaaagagaaggtggctcttttgtcctatgaattatcaattagatctgcttctgtggtgaaatttgttagctgaaaattgatggctgaaaccttaggatttacccctgtctttaagctcctacagcgaggtctgtagaccagaagcctgtactgaactcacaccacaagggcagcgccaaagacaagatgcaagcgctgcaacagcaagttatataacaaaagagaaccgaggacatcagaacgtgctccaatgatactttgtatcttcctggtgcgcaaaaatgtaaaccggccttcctttatggtttacattgtacccctgcacaacggtttgctatcgcgtaatttgggaggtgacacatatgaaatttgagggtgtgattagtctttaaaataatagttttggtatatattttaagcacttctagcgacccccccaacacacaaacacacacacacacacgcgcacacacacacacacacacgaagaagatgctaaggtgggccactgccccggctctggccagccgcatttagaggggaaaaggacaaatggcgctatttctttaagcttggtggggggaaatctaagtttgttctttaaaaagggcgaaagttcgctaggaccacagggccttcggcgagagcgcaggcagcttcgtgttggcaccttggggatcttctgggctgccagaagctctgagcttgcagttgcacctaaaccgccgctttcgctacttatatttgcggtaatgttaggaagcaaagtatcatcaatcagagaatctggtagccattctctctctttgccctgtgtcccagcttgtgattcttctaagttccatctcctttgctgcgtgcagatccttggctttgggcgcgcttcctcttctgcacttgggccaccgcgggttggccacctgggctgaactcatcccatccttgctttcccccatccctatacccagcggcgagggcagcctcaccagcccttgccccggaggtgaatgtgtgcctggctttgactgagacaactaggaccccagaagcccagtgacatcagaaaagaggctcctgggcactagcacttcccgcaatacgctccagggctgtaggtgcaaaacggagctctaacttccctccagctaatcgagaggaaaatacagggcgcgtcacagtggcctctcccgcctagccacgcgcagtgaaatttccggcaatcgggccagctaagacacgggatttgcaccgcagcctctcagcttctggagccggagccgagcgctcccggcagcttctccaatttctctcctaaagtgcgaagggaaaagccccgtctgctccacgactgcaaggccggcggatctgggagccgcgcccggctccggaggactcggcgggcccggggctccccggcagcggctcctctgctaggggttaacagcagcccccgcggccgggcgggcgcggacgcttcctctccacccgcccgggaacgtggataccgcgcccgcaggatgttcgccggctgggaccggcagtcaggaaacatgagaaggcctcgctattcctgttcccgggcggcgcgcgccgggctgggtaaataaagccgagacgacggcggtggcggtggtgagcgcgctggagcccgcgtggagaacatgcggcggggatgggagtgcgcctagtctcgaggcgggagagccagccgccctgcagccggccgtcggccccgcagccacaggtacagcccccgcgtcgccgagtctcagccggctgcggcggaacgccaggctcgctc

SEQ ID NO: 4776 - DNA, 2300 bp, Homo sapien
cctgttacttagtcctctcaccatccacttcgtgtggtggccagcccttgatgtgagtaacctttaggtaacaggcctttaaaaaatctcttaagtcctaagggcattattccagaagcttaattttagagaaaatatacattttgtgaacaatgcatgtcattggcaagtctagaaatattttattcattcatttattccccagatgtttactaaatgtcttctatgtgcagttcctatctgaagtgctggtgataggggcagtccctatctgcacccagcagaatcggactcataaagtccctctgtgagccctcttttgctgctgtaacacattgccccaaacctaatggcttaacacacacaaatgtattatcttacagttctagaggtcagaagtctaaaatgaacctgcagggctaaaatcaaggtatcggcagggttgcattccttccggaggcttaaggagaatttattctttgcttttccagcttctagaggcccctatgttccttgactcatgactcatggctcatggctccacatcactctgaccgctgcttccatcagcatatccctgtcgctgcctctgtccctcctgtcttcctcttataagaaccctggtgattatgtttggcttcctccaaatacccagaatagtctccccatctcaggatccttgacttaatttctatgcaaagtcccttttgccatgtaaggtgacatgttcataggttttggggattcagatgtgaacattattctgtttcccctagttcctatcctcttatttttattctagtgagatcgtcagtaataagtaatctcggttggtcagatttactttttctgatgaactagcaacattttacatctatgtatctacattgcaattcaaaatatgttagatcaggccaggtgtggtagctcacgcctgtaatcccagtactttgggaggtcgaggtgtgtggatcccttgagctcaggaattcaagaccagcctggccaacatagtgtaaccccgttgtctactaaaaatacaaaaattagcgaggcatggtggcatgtgcctctagtcccagctacttgggggctgaggtgggaggattgcttgagctccggaggcagaggttgcagtgacccgagatcacgccactgcactccaatcccggtgacagagggatactctgtctcaaaaaaaaaaaaaaaaaagctagatcaggtgttaaggtgtcaggagtttcatcagatatagcctcctgtaatacaaaacctagacagtttagttaatgttgtaagtggtagaaatctatagaaatatcacttccatgaaaacatcttaatattttttaaaggccaacctgaaaaaaatcattaaaatggatggaaacacaaagctaggagactcaataacttttgatcaggaagaatccatttagaaaaactgcctattatcccaaggcaaaccaaataaagaagtttagagtgggaaaggaattcagagaggatctagtttgccttcagtttgctttttttttcatagtttttttgttcataaacacagtgtagccaagaaaacccctaaccactaattactgtggtgtaaaaattttataaataaaataacattagaactccccaaagcatgaagggttttgcagaaccaatgatttttaaaaagatgccagaaatcaacacattttagaaaacaaaaacaaaaactgtgactatttgagttcaattgtgaattcaagaaattgctaaaaaaaaaaaaaattcttccttggttatatcctattggtcactaggcttgctggtaagtttgaggatttaagagtttgagtgtggaagaaagtgggaaaacagatgagctactaaccagatgtatttatattttctgtattttataatgagatataggaataatctgtctaaatgtcttaaatttaacttctactgacctctaggtagcatgaagctttcaattttttatttttattttttagtgaaacaacagtcaaatcagaagaagttgataaaaatggacagcctttgctatttctctctgtaccacaaattaaaattaggagctttgggcagctgtcacgcttgttacttattgccaaaactgggaagttgaaggaagcccaagcatgtgttgaaggtgatcttaatgctccagtctgtgatttgaacttttagaaacaatcttgctgggaaagtggggaaagggtgggaggatcatttgttagagtctcttgaaaaagattctacaatctacaaggtaaaaagtcaaatgt

SEQ ID NO: 4777 - DNA, 2300 bp, Homo sapien
ttttcataaagcttaccttgtaggggtagcagatgggcaacaaggcaaagacaagttatggccaggcacagtggttcatggctgtaatcccagtgctttcggaggccatggctggaggatcacttgagcccaggaatcagaggctgcagtgagctatgcttatgattatgtcactgcactctgcactccagcctgggtgacagaatgagacctcgtctcaaaaaaaaaaaaaagaaaaaaaaaaaacaagtcatgataaatccttcagggagtgactgggcccaggtagtgtttcatcacgacaaggaaaaattggaaagaggcgactgggacttcttcagatttaaatattattaagttatttttgcttggaaaatatccggtaaaataaattcacattttggcatcagattaagcaacttggcatgaatttggcaaacaacgacatagttgctcagatcttggtgggttctggctttttccagctttgcaaaccaaggtgaaatgtcctgaacttggaagatctctggctggcatccacattggacccagtaatgctcccttatgtcatacagctgattaaaatgtgcagaggaactaaagtacccacagaagcttccttgcttccaggactgggactactccaggatccttccgaaggatgccctctgctcctcaccaggttgtgacctgcattaccgccacaggtgtgatgctgttgtctcagactgtaatccacccatttttaaaagggcttctctgtatacctattagcataagcccctttctcactggttgcaagtctaagcttctctgcaggtagtatctcctttaggtgaaactattccattcctaacaactttcgcactttcaaaaagagaagaaaagaacccaaaacaggccaggcatggtggctcatgcctgtaatcctagcactttgggaggccgaggtgggtggatcacttgaggtcaggagttcaagacccacctggccaacatggtgaaacttcgtctctactaaaagtacaaaaattagccgggcatggcggcgcattcttgtaatcccagctactcaggaagctgaggggggaggatctcttgaacccgggaggcagaggttgcggtgagccgagatgggaggcagaggttgcggtgagccgagatcgtgccactgcactccagcctgggtgatagagccagacttcgtcccccaccctccaaaaaacccaaaacaaaggacaaatatctatacctcatatccctacgtgtttgcagaaaggttctgctttgagctgaatccgtataatattatgacaggtgatatcctaacatcattccacatttgcctctttggcatccggaaaagaatccagttttaattcctaaacaccccatcatcctaagtgctccggcattggtccttaaacaccgtgtccccccaccccaagatagtgcattcttccccatccccccccacctcaatattcccactcctttatccctcactggtgttccagttggggctcttgctggtagggtgtctagaggtggggtcaaaaccatcttaatggacaaaggtaaaggccatttaaaaaaagagatgggggacatgttttcatttcactccgatcctctgccctattgaagagcgctttctgctttcccggtgagtatcagagtattctaccatatttgtttttttggagagaaacatgtaagcctcaaatatcctaggagaagccctatgctatttgggggtactcagtgaagatttcaggtacatacaacgcacttgtctggaagcctatggaaaaatgtaaaaaggggtttctaaggaatattttctgcttcctttctgctccattttaagttttctgctaacttgccgccgaccccgcaactgctcacgacctctgtcaaagtcaacctttcccaccgcgtggagtgagttagggtgcacactcgggagttgcataaaagtgtttgagaaagggagatgcaaagttgaataaaagtgtttcccgggaggggccgagcggaaagcagcaggtggccggggcgggtggaacccagcgcgggcgcagagcgtctctggcgcgggcatacggtgcaacgggtccgcgggaatcttggatgcgcggaggtcccgagaccagggtaacggactgggctgcggtcgcggccgggtgaggctgggagcggaaggcggcggcggcggcgcccgggggagggcacgggccctgtaggcctcccacaagggcgccggcgtgcgcggccgcagggcgcgcagtgttgacccg

SEQ ID NO: 4778 - DNA, 2300 bp, Homo sapien
ataataaaaggctaatgtttcaaaatatatagagatgataaaaatcaataagaaaaacatttacagaaaaatcagcagtgcatatggacaaatactttacaaaagaaaacatagatgtctggagacacgaaggtgatgccaagcccagggcaggcttgatcccctcaaagcattttcaggatatgagattggaaagcttgataatgcctagagttggtcagggtataggaaaataggtatatttatatgatttggggatgggataaattattagtagaactttttgagatctgaaactatcaaaattttaaatgtgcataccctttagttggaaattaatcctcaagcaataatttggtaaatgtgtataaacaaaatttttcaaaaatattcggaaactaccaagaaagttgcgttgatcaaataatcattcatccatatgctagattattgtgaggcaatcacgagagatagacctatatggctcagcagtaatagtaataacaattgagtccttattaaatgacactgttgtaaggaccatagatccatttaaaaaaaaacacacagacacaaactagaaaaataagaggagattatagaaaagacttttgttttctctctaccaatgtaattcagtattacagtatgagaattctttataagatttgtgagcgccttctacaataagcaatagcaatgatattaccattttgaaataaatcaaccctttataaaattctattatttaaactatcagaatcccattttacttaacttgctgtgttgcactagagctgccttcttaaggctcggcccagagctgactgtgtgatgcaccatttcccaactcagctttcagcaacttcatgctggtgaattgaaattgactatagtgaaagtatttataccatggaaattgacagacagtacacatcagagcctttttttttttttaaataaatggagtcctggtttaccagtgcaccacagatagtgagactcagagatatgtcttgccctaccccccttcctttcatatctttcaaatgtgccaagtatttagtgcttttatggagcttacaaattagcaggagtaacatatcttatgaaataatggcataaataattaaatatggctacaatacatggtaaaaagagagagacagagaatgacatgagactatatttaaagagaaatcctatctgagataacaaaaacttgtgggtgctggtacttattttaatgaagttagaatagatactcagtcttttcatctttcaattaatctattacgttggatattttactcgctcaccagaatacaatagatatgaatgttctttattttttttttctgatgggcattgccactaattgaatcatgtatttgtaactgcactactgacattataggtgttttgtcccccaaaacatggatgctgatacttaaatgtaactgtatgaaccttgtacattattctttaaaaaaaaaaaaaaaagcttcttgctctgtcacctaggctggagtgcagtggtgcgatcacagctcaccgcagccttgaactcctgggctcaagaggccttagcttcatcaccacgcttggctaatttttaaaattttttttgtagagacaggggttttgctatattgctggtcttgaactcctgggcttgggtgatcctgccaccttgcctcccaaaacactggaattacagacacgagccactgcacccagacctttatacattatctgttctagtcattgaatactgtgtttatttaaggtgttgtgcatattttgtgtgtttctatttcgaagaaacttggatgggaatgtatttacttgacagcttaaaagtacacaggaagtaaaagtggatttaggagttaatgttttttaacttattctacaaacttcagagctttctttctcacattacaggaatttctacaaaaatagtttcctccgtttagtctatctaagagtagaagccccaagcttgtaaattttcagatgcatttcactttctacctattttaccttattcttccttgggtctggttttcttataactccttgttttatctgttaccaggctcagtctcagggagcaattacatttaagattatacccggcagcaaagaggagacaccatcaaaagaaggcaaggtaattattgcttaaaaacatttcttcgtgcgtgggagggaagtcatgtttttccatccaacacatatccactttgtcacaacacatttctttcaatattccagttttaaaattactatgtttg

SEQ ID NO: 4779 - DNA, 2300 bp, Homo sapien
agggatcttggtgacactggtttttcctgtgtgcttcctttcatgtgcatttcagagtggtatcctcagtaaagtactttacttaatcattggtgttcataccaactattaatctcaccaccaagatctgttcagttgttttcagttcagtgtcttacacttaataaatgatttcagttgttttcagttcagtgtcttacacttaataaatgataactaaagtgattttgacttggcttctgttatcctgggtgcttctaatttccagatgggtctgaaactgggtatttaaatttagtcttatttttgcatatggagctaaaagtatcctttgggacaggctgtgtatgatatggcaagtctgcttatcaaaatagacattttcctgtctaataacaattttggatggaaaaaaagctttgggggctgggcgtgacggctcacccctgtaatcccagcattttgggaggccgaggtgggtgaatcacttgaggtcaggagtttgagaccagcctggccaacatggagaaacctcgtctctactaaaaatacaaaaattagctgggcgtggtggcgggcgcctgtaatcccagctacttgggaggctgaggcaggagaatagcttgaacccaggaggcagaggctgcagtgagctgagattgcgccactgcactccagcctgagtggaagagtgagactctgtctcacaaaaaacaaaagctttggaatgttttaatagagtggtatgaacttggtgtttacagattaagagcggtcatttcttggttctttacagtatgccaggtgctgtgttatgcaaaccctccctagatgtccatgcttaattcagctctttgagtattccatttacatttacaagtagaaaaatggagtcagggagaagttaggtaatttgcctttggggtcatataactaggaactggtagagccaggattcaaacccaggttacccattctcctatacatcagagaccagtgtgtaagaactgtaggatttgaattcatattggaaatttcctcccctttatggatctttaatctttctttctttggctccttcacataatttggataagcacaagtttcacctattttggccagtgccttaagttactccaccaacgtgcacctcttcccaggagaagactgggtcacattgaaaagtagcccactgcaggcatgacattgttatgaaattttatgtttcatgtaaaagattaaaagttactttccactgtgcgcaactgacacaccagaaaaaggtatctttttttaatgcctacccctatccacacaccgtacctcaggttgagacacaggctatagaactttccagtcatgtcataatcatatatggagttcagttaattcactatgttgttgttgtgggggtcaggttgggaggaggtcaccgacacagaacaagcaggcaatagcgaggggttgaactgaggagtaacacagatccgaacagtgtaagggagaagatttgatgactggagatggggagcttagttcctccatttctggtttcttcttggtttctgccactgtttttctttacgctcctgtcctttaattgtgggagtgtcttcagtccttttcccacttactcacccccaccgccccaattgtgcgtttgcccattgtcttggtttcagctctcatttctgtctgagtggcttctaaactgcctgtggctttaatgagctccagttcagtgaatccacctgagccctaatttgctgtagcaaatttgcagttgctcagtggctatatcctggatatttgaatgtctcagagtgagtacgtttgattttaaccgctcttcctccaaagccagctgtaagcatttttaagtggtacacaaattgataggaagagaacattcccagatccactgtagatgaggctcaggttcctattttatcagccaaggttgctgaactgccctggaagcgggcagccacatttgctggaaaagagacaatatactgaggtgtagttttctctggccccttggtgccctgtgaggcacacagctgtctgtgataatgtcagagattacatcacagtgccaatggaactaacaggaaccacctgtgcacttccttttacaggaatgttcataaacagcaggttctcctaggctttgaacaaaatttagcttctccaaggccaaaagcctcattgtgaagagaaagaaaggtgggtgttcttcttaacgatgactctgcttgtagccttccagtgtcctgcaacgctggtttccacagctg

SEQ ID NO: 4780 - DNA, 2300 bp, Homo sapien
tcccgaataactgggattacaggcgcacaccaccacacctggctaacttttatatttttagtacagatggggtttcaaaatgttggccaggctagtctcaaactccagacctcaaaatgatccacctgacttggcctcccaaggtgctgggattacaggcatgacccactgcatccggcctatttactttttgagacagggtctccctctgtcgtccaggctggagtgcactggtgtgatcatgactcactgcagtctcgaactcctggactaaagtgattgttcagcttcagcctctgggagtagctaggaatacaggcatgcatcaccatgcctggctacttttgagcaaatggtttataccaatttcagcagacatctagttatcaaacaaattagtagtaattttgctgccagttttcaaagtttctatgaaatgttatttgttgtactcctctgatgtttgtcttcaatggattcactacaaatatgtcagaaattacatgttaagatgctaccgaatttttttgttttcataatttcagtcactgtcaatttttttttttagttactggtagtttaagagagcattaaataggctttttattggtctgcacatctccacaaacagcaataagctctacatctggcagatggatgtgacaaataagattatgtaattaaaattttttttccaaccagttgtgatttcagagcctttctccctacatcattccatctctccattctattaggtctagcaataacgtaacttcttggataccaagtaaatcagttactttttattttttggagggggttgtttcttctgacttgtttactatttgcctcttctgtgttaatcacctaattatgtttaccacaattcttttcattaaactatgttgccttacaaatagtgcaaaaaaaaaaaaaaaagtcaaccaatcacccgaataccaccactctcaactaacggttgtttggtatacttcacgtttcttctctcaatgtacctgcagcagtacataaaatcaaatttgtagcaatttcacttaacacacctgagaactttcacatgaattttctttcaccaatggacttcagcgaggaagaaacagaggagggaaaagtgagagataaagagagggtgggcagggcaccgctgggtatggaaaacgttagaaagggatggaaaacgttagaaaggggtgaaaagccgagcgcagtggctcacgcctgtaatcccagcactttgggaggccgaggcgggaggatcgcttcaggccaggggttcgagaccagcctgggtaacacagcgagaccctatctccggaaaaactttttttaaaaaattagccgggtgtggtggtgcatgcccgtggtgccagctacttagagggctgaggtgggatgacccgtaagccccggaggtcgaggctgcagtgagccgtgatcgcgtcactgcactcagactggacgacagcgcgagacctgtctcaaaaaaaaataacaaggggtagggtggggcagtgagatggttcagcgttgttcccaaggaactcatctccctaaatttccagtctcaagcgccgctttcattccctgccccgagcggcgctccccgctccgtgcacgcatctccgctgagggccgccctgacgcacggccttctgccttgaacacagaacccctcagcccttcctattagccgtttctggccgggactgcacgcgctccttcctgcctcggggcgcagggtgagacttacgtctaaagggcgcccggcgagctcgcagcagcccctgccccgcggagggccggtggcgcgcggcgtccggtgaggggcagcggcccgggctcggttccggcttccagcagcggcccgaaggcgccggagcacgctccccgctccccagaacgcagcttccgcggctgcagcccaggcagctcttcgggaagcgtccgcccgtggtctcgccagggggtttccgacctccccgcccgacagcgcaggggcgggggccgcggccggagagctcgcccgagagcaccccctcccgctgcgcctctgggcgcacgcgcagccgctgcagcctcccttatttagtccgcgatggcttccctcgcgccccaccgtcctcttccggaaggcggctccctccctgcgcagcccggagcccctgagatcagcctcgagcaggcgcccgagcgagactatccctaaacgggaacggcggtggccgactcgcgagtgaggaaaagaaggaaagggcagactggtcgcgaagagaagatcc

SEQ ID NO: 4781 - DNA, 2300 bp, Homo sapien
ttccatctctccattctattaggtctagcaataacgtaacttcttggataccaagtaaatcagttactttttattttttggagggggttgtttcttctgacttgtttactatttgcctcttctgtgttaatcacctaattatgtttaccacaattcttttcattaaactatgttgccttacaaatagtgcaaaaaaaaaaaaaaaagtcaaccaatcacccgaataccaccactctcaactaacggttgtttggtatacttcacgtttcttctctcaatgtacctgcagcagtacataaaatcaaatttgtagcaatttcacttaacacacctgagaactttcacatgaattttctttcaccaatggacttcagcgaggaagaaacagaggagggaaaagtgagagataaagagagggtgggcagggcaccgctgggtatggaaaacgttagaaagggatggaaaacgttagaaaggggtgaaaagccgagcgcagtggctcacgcctgtaatcccagcactttgggaggccgaggcgggaggatcgcttcaggccaggggttcgagaccagcctgggtaacacagcgagaccctatctccggaaaaactttttttaaaaaattagccgggtgtggtggtgcatgcccgtggtgccagctacttagagggctgaggtgggatgacccgtaagccccggaggtcgaggctgcagtgagccgtgatcgcgtcactgcactcagactggacgacagcgcgagacctgtctcaaaaaaaaataacaaggggtagggtggggcagtgagatggttcagcgttgttcccaaggaactcatctccctaaatttccagtctcaagcgccgctttcattccctgccccgagcggcgctccccgctccgtgcacgcatctccgctgagggccgccctgacgcacggccttctgccttgaacacagaacccctcagcccttcctattagccgtttctggccgggactgcacgcgctccttcctgcctcggggcgcagggtgagacttacgtctaaagggcgcccggcgagctcgcagcagcccctgccccgcggagggccggtggcgcgcggcgtccggtgaggggcagcggcccgggctcggttccggcttccagcagcggcccgaaggcgccggagcacgctccccgctccccagaacgcagcttccgcggctgcagcccaggcagctcttcgggaagcgtccgcccgtggtctcgccagggggtttccgacctccccgcccgacagcgcaggggcgggggccgcggccggagagctcgcccgagagcaccccctcccgctgcgcctctgggcgcacgcgcagccgctgcagcctcccttatttagtccgcgatggcttccctcgcgccccaccgtcctcttccggaaggcggctccctccctgcgcagcccggagcccctgagatcagcctcgagcaggcgcccgagcgagactatccctaaacgggaacggcggtggccgactcgcgagtgaggaaaagaaggaaagggcagactggtcgcgaagagaagatccaggcctcagaggaggagaaaggccggagccagccgaggtttgccgagggcggtgttccggacccgcgcggtgcggggaggaaggccgagggtgggagaggaggggcccggcggaaactgccgaggtttcccgaaggcggcagcgtccgagttgcccggatgtagttggtggagcggcagcggcggcaccagcggcggcggcggcggcgggaggaggaggaggagaagaaggaccaggcggcggcagcagcggcggcggcggggggaggaggggaggaggcggcggagcaggaggaggagaaggcggaggaggcagtcgctctccgcggggctgagccggacgcgtcgtcttgcccccctccccccggttcgcggtgccgccgtgtagttggcgccgctgccccggctgagagtgagcgtggtgtcgacggagggagatggcccgggagcgccggcgccagtaactgggagctgatgagagtcgccgagggcgcgccgggcccaggtgccggggctgcccgccgcccgccgccgccgccgcctgcgcgcccgcccgcctttcgcggccgctctcccccctccccgacacacactcacaggccgggcattgatggtaatgtatgcgaggaaacagcagagactcagtgatgggtaaattgtcttttcgtttcgggccgggcggcggcggggggcggcggcgggggggctgttcctccttatctggagctggccgg

SEQ ID NO: 4782 - DNA, 2300 bp, Homo sapien
taagtcatttagctatttacccaagttcttcacttaattttaatacctttacattaacttttcagttcccccaacacaataaataaataaataagcctcgtaagtcacctatcatctcatcccatcgattccttcactcgcaaataatcaaataatcgagtcaggtctttctggctgcaaatgattcttttttcctaaatcagcgaactccctccagtcacctgtcaaaataagtcactaaaccttgctggagagcgctaaaggaaccaaacctggaattttaaggggatccgcggtgctagtttcagatgtgttgcaccgaagggcctgtatcgacttctgaggcctgcgctcgagtagcagtccctcccttccccctccggccccttccaatccctccaccccggcctcggctggtacctggtaaggctgcgagtcccccctccggtcgtgacagctgaaaaacaggaagagaaggcagcgacataagacacggcgcgggtggggggccggggaggaagaaaacggggcccccgccgcccctccccgcgggagacctaccgagcgccccagcgccgagccccgcacgcacacggcacaaacccggagcctccggaagggccggagagggcgaaatgccgcgaagccgggcccccgctccccgccacactgcgttcccgcccgcccgcccgcgcggccgctcctcctccccaacccgatccggatcagggttaacaacaaaaatggcggcccggccagctccagataaggaggaacagcccccccgccgccgccccccgccgccgcccggcccgaaacgaaaagacaatttacccatcactgagtctctgctgtttcctcgcatacattaccatcaatgcccggcctgtgagtgtgtgtcggggaggggggagagcggccgcgaaaggcgggcgggcgcgcaggcggcggcggcggcgggcggcgggcagccccggcacctgggcccggcgcgccctcggcgactctcatcagctcccagttactggcgccggcgctcccgggccatctccctccgtcgacaccacgctcactctcagccggggcagcggcgccaactacacggcggcaccgcgaaccggggggaggggggcaagacgacgcgtccggctcagccccgcggagagcgactgcctcctccgccttctcctcctcctgctccgccgcctcctcccctcctccccccgccgccgccgctgctgccgccgcctggtccttcttctcctcctcctcctcccgccgccgccgccgccgctggtgccgccgctgccgctccaccaactacatccgggcaactcggacgctgccgccttcgggaaacctcggcagtttccgccgggcccctcctctcccaccctcggccttcctccccgcaccgcgcgggtccggaacaccgccctcggcaaacctcggctggctccggcctttctcctcctctgaggcctggatcttctcttcgcgaccagtctgccctttccttcttttcctcactcgcgagtcggccaccgccgttcccgtttagggatagtctcgctcgggcgcctgctcgaggctgatctcaggggctccgggctgcgcagggagggagccgccttccggaagaggacggtggggcgcgagggaagccatcgcggactaaataagggaggctgcagcggctgcgcgtgcgcccagaggcgcagcgggagggggtgctctcgggcgagctctccggccgcggcccccgcccctgcgctgtcgggcggggaggtcggaaaccccctggcgagaccacgggcggacgcttcccgaagagctgcctgggctgcagccgcggaagctgcgttctggggagcggggagcgtgctccggcgccttcgggccgctgctggaagccggaaccgagcccgggccgctgcccctcaccggacgccgcgcgccaccggccctccgcggggcaggggctgctgcgagctcgccgggcgccctttagacgtaagtctcaccctgcgccccgaggcaggaaggagcgcgtgcagtcccggccagaaacggctaataggaagggctgaggggttctgtgttcaaggcagaaggccgtgcgtcagggcggccctcagcggagatgcgtgcacggagcggggagcgccgctcggggcagggaatgaaagcggcgcttgagactggaaatttagggagatgagttccttgggaacaacgctgaaccatctcactgccccaccctaccccttgttatttttttttgagacaggtctcgcgct

SEQ ID NO: 4783 - DNA, 2300 bp, Homo sapien
aacaaaaaggaacccacctacctagaaccacctacatcagaatgattatccaagtacccaaagacctcaattcttacagaaacaaaagcacacatatcttttacttgtaaggcaattaagtataccaaaaatattaaaaggggaaagggtagtactttataaccgacttgaaagttgtaagtcatttagctatttacccaagttcttcacttaattttaatacctttacattaacttttcagttcccccaacacaataaataaataaataagcctcgtaagtcacctatcatctcatcccatcgattccttcactcgcaaataatcaaataatcgagtcaggtctttctggctgcaaatgattcttttttcctaaatcagcgaactccctccagtcacctgtcaaaataagtcactaaaccttgctggagagcgctaaaggaaccaaacctggaattttaaggggatccgcggtgctagtttcagatgtgttgcaccgaagggcctgtatcgacttctgaggcctgcgctcgagtagcagtccctcccttccccctccggccccttccaatccctccaccccggcctcggctggtacctggtaaggctgcgagtcccccctccggtcgtgacagctgaaaaacaggaagagaaggcagcgacataagacacggcgcgggtggggggccggggaggaagaaaacggggcccccgccgcccctccccgcgggagacctaccgagcgccccagcgccgagccccgcacgcacacggcacaaacccggagcctccggaagggccggagagggcgaaatgccgcgaagccgggcccccgctccccgccacactgcgttcccgcccgcccgcccgcgcggccgctcctcctccccaacccgatccggatcagggttaacaacaaaaatggcggcccggccagctccagataaggaggaacagcccccccgccgccgccccccgccgccgcccggcccgaaacgaaaagacaatttacccatcactgagtctctgctgtttcctcgcatacattaccatcaatgcccggcctgtgagtgtgtgtcggggaggggggagagcggccgcgaaaggcgggcgggcgcgcaggcggcggcggcggcgggcggcgggcagccccggcacctgggcccggcgcgccctcggcgactctcatcagctcccagttactggcgccggcgctcccgggccatctccctccgtcgacaccacgctcactctcagccggggcagcggcgccaactacacggcggcaccgcgaaccggggggaggggggcaagacgacgcgtccggctcagccccgcggagagcgactgcctcctccgccttctcctcctcctgctccgccgcctcctcccctcctccccccgccgccgccgctgctgccgccgcctggtccttcttctcctcctcctcctcccgccgccgccgccgccgctggtgccgccgctgccgctccaccaactacatccgggcaactcggacgctgccgccttcgggaaacctcggcagtttccgccgggcccctcctctcccaccctcggccttcctccccgcaccgcgcgggtccggaacaccgccctcggcaaacctcggctggctccggcctttctcctcctctgaggcctggatcttctcttcgcgaccagtctgccctttccttcttttcctcactcgcgagtcggccaccgccgttcccgtttagggatagtctcgctcgggcgcctgctcgaggctgatctcaggggctccgggctgcgcagggagggagccgccttccggaagaggacggtggggcgcgagggaagccatcgcggactaaataagggaggctgcagcggctgcgcgtgcgcccagaggcgcagcgggagggggtgctctcgggcgagctctccggccgcggcccccgcccctgcgctgtcgggcggggaggtcggaaaccccctggcgagaccacgggcggacgcttcccgaagagctgcctgggctgcagccgcggaagctgcgttctggggagcggggagcgtgctccggcgccttcgggccgctgctggaagccggaaccgagcccgggccgctgcccctcaccggacgccgcgcgccaccggccctccgcggggcaggggctgctgcgagctcgccgggcgccctttagacgtaagtctcaccctgcgccccgaggcaggaaggagcgcgtgcagtcccggccagaaacggctaataggaagggctgaggggttctgtgttcaaggcagaaggccgtgcgt

SEQ ID NO: 4784 - DNA, 2300 bp, Homo sapien
atggttgcgccactgcacctccagcctggccgacagcaagaccctgtttcaaaaataataataataaaaggtaaaataaaaaaatcatggtatgacttgtagattattttagattagttgtgcatatttgatttttcaaagggggctctgaattaggaaaaaaatgttgcttatttttatttaaagacactgtaattgagattttcccttctaaatattctatgccaattttgatttgctgggatgtgcttaagttcaatcctgtatgagtttgcattcatattccagctcatcttgttatcaactaagtatcatctgcatactttggagcttttgagtcttgagccaggcgaggtgcttcccacctgtagtcctggctactcaggagactgaggagggaggctcgcttgagcccaggagttggaaaccagcctgggcagtataacaagacctcatctcggggaagaacggaaaggaaagaaaaagtttgagtctcatcaatatctaccatattaaaaattaaaactgggaaattattcatttcatttaaaatatcaattgtaaacccattatatggtaacatatgtaacatctttgtgaaaagtaatttttaaaaaaatagacattgaacatcttagtaatgtttgacttaatagaaaaagacacttagaatttcataatttcgtatctgcttctgcattcaatctgttatgatacatccagtgttttgttgagcctctgggtaaacttcactgtatgcttgtggtaaaatgaggaagaaaaaaataatcatgttagtattattatgaaaatagttctggtcttgtgaaaggctgttggggttccccaaggtttcctggataacacttggagagctgctttagagcatatattggcaaccatcccaggccaaatctagaaaactttaaatgtttgcaggcctttcgtttaagtcctcaatattagttactctttttgtaaagttaagaaatttgacacctgctattgcacatcggcattgtaaaaattatcccataatttgaagggtttctttttccttaactccttgaggatggcagtggggtggagaaaataaagttattggtatgtgattgtatgctctaccctggaattctgttaagtgtaaggtatcagcttggactaatctagaatttgataggcaaaatcaatgtagtgtggtagaccggtgctcgggtttgtgaactttctgtcctggaggttgtgccagaatgttaatcacttaaatagaatgtttagttcagctgacttttttttttccttaaagcacaacttctgtgaaagaaacagtatgtttatatattcaaatgcaaactccttatttcctccaggataagttggcaaaccatcacttggaagagcactggcctagaccatactgacctctggtgtcctctgtccactagtctcaaatctcattctacctcttcagttcagtaattccacataaccacttggcaagcaaaccaagccttccagataacatccgtagaagggatcagttgcataataatttatgtatagggaggagtaggtggtagggaagaacttcctgaatttggccctttgtgattgggttcctaaagcttgattgtaggcttctggaagctagtgggattgaaaattaactctccactgctttttgaggtgtgagggcgcagggctgctttgccaccctcattattttgggatgtaaacctgagcatataaatacatggcagagtctgtgatctttttccaactgccttcagaattattaggggaatttccagactcggtgttaatttagtggaaataataggcatttggaaaccagagttttttgtcctttgataaaccactaattagttttgtgacctatagacaactcataagttctctcagcttgtttcctagttgttaaaattaaagctgggccaagggtaaggcagtgaataagacttcatttcctcaagcttgaaaattgtggcacgatacagtgaacccagaaggataggctatgatagtatagtacattatttcatttttttaagtggtttaatctttttaaatattttttaatttttctaaattgacaattctacatatttatggggtacatagtgatgtttcgatacatacagtatatttttataatgttcaaaagagtaatttgcatatcatctcatttatttgtgttgggaacactcaaaatcctcttttctagctatttgacaaaatataatcaatgttatttcagtaagctcctttgaaaaaataag

SEQ ID NO: 4785 - DNA, 2300 bp, Homo sapien
ggtggagaaaataaagttattggtatgtgattgtatgctctaccctggaattctgttaagtgtaaggtatcagcttggactaatctagaatttgataggcaaaatcaatgtagtgtggtagaccggtgctcgggtttgtgaactttctgtcctggaggttgtgccagaatgttaatcacttaaatagaatgtttagttcagctgacttttttttttccttaaagcacaacttctgtgaaagaaacagtatgtttatatattcaaatgcaaactccttatttcctccaggataagttggcaaaccatcacttggaagagcactggcctagaccatactgacctctggtgtcctctgtccactagtctcaaatctcattctacctcttcagttcagtaattccacataaccacttggcaagcaaaccaagccttccagataacatccgtagaagggatcagttgcataataatttatgtatagggaggagtaggtggtagggaagaacttcctgaatttggccctttgtgattgggttcctaaagcttgattgtaggcttctggaagctagtgggattgaaaattaactctccactgctttttgaggtgtgagggcgcagggctgctttgccaccctcattattttgggatgtaaacctgagcatataaatacatggcagagtctgtgatctttttccaactgccttcagaattattaggggaatttccagactcggtgttaatttagtggaaataataggcatttggaaaccagagttttttgtcctttgataaaccactaattagttttgtgacctatagacaactcataagttctctcagcttgtttcctagttgttaaaattaaagctgggccaagggtaaggcagtgaataagacttcatttcctcaagcttgaaaattgtggcacgatacagtgaacccagaaggataggctatgatagtatagtacattatttcatttttttaagtggtttaatctttttaaatattttttaatttttctaaattgacaattctacatatttatggggtacatagtgatgtttcgatacatacagtatatttttataatgttcaaaagagtaatttgcatatcatctcatttatttgtgttgggaacactcaaaatcctcttttctagctatttgacaaaatataatcaatgttatttcagtaagctcctttgaaaaaataaggaattcaaccaggatagttgagattctaccagatttcctgggggcaattagatacttaactaatctttgtgagattcgtttcgtggaaactagacctttcagatctttctaatttcattatgttacgttgtctataaaactacctggaagagactgtacctgagaatttttgaaagaccatttttagttatgggaaaaagagtgatactgctaatcctgtatattacatgagaacaagattctggtttatgtgtacttgatccatcttgttgattttgaaggtgaaacaaacttacagcttttaattagctttctgtttatgtttacatattttggttccttttctcactgagtaacagttaatacaggcaagattgttctcttttataccatatataattagtattgtgccttagaatttagaactgatgatttcatgccatcatctagtcgagagtgcattccccacccccatgttactggatttcaacaattaaaattgtggtgggagattttgtcatgctttctaaaatcaaggtgatgttaatttcacagttttctttctgtgcctaacaatctaatttttattctgcttaattttgatattttataaagttctgttgtctttgaagattttcataaactaaggtcttataaatacttacacagataattgcattctagttcagagtacctttatctcataagtgttttcctgtatgtgtgctttgatgttgttgatatttcatgtgattaaatagtattaacattttctaattgtaaaaaatatatttttaagccttatgattctgcagatgactggtctgagcatattagctcttctgggaaaaagtactactacaattgtcgaacagaagtttcacaatgggaaaaaccaaaagagtggcttgaaaggtaattagcttttaatctaattaaacattatttctctagcttggttctactggttaacatcttacagcattaaacattctaatttagcttttttatagtgctgcccatctacactttttagttgcggtggttggttgccccttcgtgttttccatagtttgtcttta

SEQ ID NO: 4786 - DNA, 2300 bp, Homo sapien
atgatctgaggcagagaaaaagaaacttaatgggtttacaataaaggtaaaccaacagagtttcttttacactaattaagatgatcacctgaacaaagtctctctacaaaatttaacgagtgttcacaggaacttccaattatgtcagaaacctattcatatgtgagtgttcagtatgttatatggaattaactggataaacaactgctatttcatgtgattgcccttttagacaagctggccattcaaatcctatatcaagatccaccctaataaatctaaaaatggatacaaaaaagggagtattggccggacatggtagctcacacccagcactttgggaggctgaggcaggtggatcgcctaaggttaggagttcaagagcagcctgcccaacatagtgaaaccctgtctctactaaaaatacaaaaaattagctgggcatagtggcaggtgcctgtaatcccagctactagggaggctgaggcaggagaatcgcttgaacctgggaggcagaggttgcagtgagccgggattgcaccactgcactccagcctgggcaacaagagcaaaaactccatctcaaaaaaaaaaaaaaaaaaaaagtatttaggaataccatgtatttttgatgtgtaagatattttattattgacattaactattatttcttcaactatttattttggagacagggttgtgcaatcacagcttaccatagccttcaccttccaggcttaagttattctcccacctcagcctcccaagtagctggaactacaggcgttcaccaccacacctggctaagtttttgtatttttagtagagatggggttcaccatgttgcccaggctggtctgggcttaagtggcccaccagcctcagcaagtgctggaattacaggcatgagccactgcatctggcctcctcaaactatctaaaagccccactttgcctaaatgaaacatttacctaccacacaagagaactgcgtggttagagaataaaataaaaatacaaaaaaattaaggacagtaagaacagactaatgaccaactagcctgagatagctttatttttaggataagaacttaaccacttaacactacttttaagtatattatgtgaaaatgtacataaaaattgatcactttatttttatttattttgagatggggtcttgctctgtcagccaggttggagtgtacaggcaccatctcagctcactgcaacctccgtctcctgggttcaagcgattctcgtacctcagcctcccgagtagctgggattcacaggcatgtgccatcacgcctggttaacttttgtatttttattagagatagcgtttcaccatcttggtcaggctggtttcaaactcctgacctcaggtgatccacccgcctcggcctaaaaatttatcattttcaacagaaaattttgcagtgcttttaggaattaacgtgtgaatctgaatagtttccaaattaacacatctacttttattcatactttttcaaagtggctgactaaatattctgaaacgtaagtagcattactgaaaagcaaggctggaattaaataatgcaattcaccaggaaaaaaatggcaacattttatctagtacctatctcctcccttctcagaattttttgaaagtattttaagtagctacctgaattcctacttttctagtaattagcatattttaaatattctgagtaattatttatacaggttttttagaaacataccagaagttttaataccgatttcaacaaacgctcgattgttttaatgtaaaatttcaccatacacattatgtatatagaatggcttacctccagtaactaccagacacataacaagtattgaaaaatatacacaagatccaagcaccactaactcaattatactaccaatggtcttaaactacagtggatataaatttccaaactccaaaaacaaaaaacaaaacaaaaaaaagtgttcaactataaatttcaaaagaaaacaaagaccattcctaaactggggattttactacttacataactttgcacaatgcaaataaatttttaaaaaactgttatgaagatttaccttcatttattttagatatgtccacattagaattattaagctgcagcgtggcttgcaaagcaggaagcaattgtctaagaagatttgggtcctgaagtaagggaggtattggcgactgtggaacaggagaaacagggaccgctgaagcagatgttggaggtgcagatgtggggttcagtccagaggcagaagacgtggaa

SEQ ID NO: 4787 - DNA, 2300 bp, Homo sapien
tggtatgtttctaaaaaacctgtataaataattactcagaatatttaaaatatgctaattactagaaaagtaggaattcaggtagctacttaaaatactttcaaaaaattctgagaagggaggagataggtactagataaaatgttgccatttttttcctggtgaattgcattatttaattccagccttgcttttcagtaatgctacttacgtttcagaatatttagtcagccactttgaaaaagtatgaataaaagtagatgtgttaatttggaaactattcagattcacacgttaattcctaaaagcactgcaaaattttctgttgaaaatgataaatttttaggccgaggcgggtggatcacctgaggtcaggagtttgaaaccagcctgaccaagatggtgaaacgctatctctaataaaaatacaaaagttaaccaggcgtgatggcacatgcctgtgaatcccagctactcgggaggctgaggtacgagaatcgcttgaacccaggagacggaggttgcagtgagctgagatggtgcctgtacactccaacctggctgacagagcaagaccccatctcaaaataaataaaaataaagtgatcaatttttatgtacattttcacataatatacttaaaagtagtgttaagtggttaagttcttatcctaaaaataaagctatctcaggctagttggtcattagtctgttcttactgtccttaatttttttgtatttttattttattctctaaccacgcagttctcttgtgtggtaggtaaatgtttcatttaggcaaagtggggcttttagatagtttgaggaggccagatgcagtggctcatgcctgtaattccagcacttgctgaggctggtgggccacttaagcccagaccagcctgggcaacatggtgaaccccatctctactaaaaatacaaaaacttagccaggtgtggtggtgaacgcctgtagttccagctacttgggaggctgaggtgggagaataacttaagcctggaaggtgaaggctatggtaagctgtgattgcacaaccctgtctccaaaataaatagttgaagaaataatagttaatgtcaataataaaatatcttacacatcaaaaatacatggtattcctaaatactttttttttttttttttttttgagatggagtttttgctcttgttgcccaggctggagtgcagtggtgcaatcccggctcactgcaacctctgcctcccaggttcaagcgattctcctgcctcagcctccctagtagctgggattacaggcacctgccactatgcccagctaattttttgtatttttagtagagacagggtttcactatgttgggcaggctgctcttgaactcctaaccttaggcgatccacctgcctcagcctcccaaagtgctgggtgtgagctaccatgtccggccaatactcccttttttgtatccatttttagatttattagggtggatcttgatataggatttgaatggccagcttgtctaaaagggcaatcacatgaaatagcagttgtttatccagttaattccatataacatactgaacactcacatatgaataggtttctgacataattggaagttcctgtgaacactcgttaaattttgtagagagactttgttcaggtgatcatcttaattagtgtaaaagaaactctgttggtttacctttattgtaaacccattaagtttctttttctctgcctcagatcatttcaaatttgggacccattgtattactcctatctagtaggcttttattttgagagttctaggttgaaatattccagtttcttgtgagttctcttccttgtcaggttgttactaatgccacataagcctcttgtttttatatgaatgtatgaaataatatgtttttagttcttacagcagctgtgacacaagcctcactgcagtctataattcataagtttcttactgctggaccatctgctttcaacataacgtctctgatttctcaagctgctcagctctctacacaaggtattcttactcatcttagatatctctagaatggcatcttgattttgttttggaattaatagcccttttttgtatttagttttttctttcatttttttttttagttttttaagagattagctacaataattttgttttttttgtaacactggcatatacagtagtatttttatttcctttctttttagatgaagcaagctttgacatttgtcttaaggtattgccatcaaatctgtaattatttaagacagtattta

SEQ ID NO: 4788 - DNA, 2300 bp, Homo sapien
ctagttaacctctttcttttaggcattgtaacatcatgcacataaatctccattattgtccagctccattgttttgagatttactatctagtttctgacatctttatacccccagacattgcaagcctcgcctacggtgggaggccaggttgaactaacataccctgaaagtttccttttagctaataattgactctaaaagagagtgtaatcattacataaaaagtattgtcctctgggcgcggtggctcacgcctgtaaatcccagcactttgggaggccgaggcgggcggatcacgaggtcggaagttcgagagcagcctgaccaacatggcgaaacctcgtctctataaaaatacagaaattagccaggcgtggagacaggtgcctgtaatcccagctactcaggaggctgaggcaggagaatggcttgaacccgggaggcggaaggttgcagtgagccgagatcgcgccactgtactccagcctgggcgacagtgccagactcgtctcaaaaaaaaaaaaaaaaaaaaaaaaagtcttgtctgcataaaacccttacaattgttaacttgtcaaggttctagtagccaggaagttctaatcaaactcggccccaggactgccttgtcagcacgccccttgagaaacttttctgagaaacctgctgtttacctggtgccctaaccagtttaattttcttttaaaacttctactggatttctccttctctccttttagatgcaattttgatctagagaagtaatggtctgagcatcagtttatgaaattattttatttttctgcacataaacattatttttcaaagacaatttcattaactacatcctgcagctctgcagactttcaacaactttaaaaggttaggcgtttgagatatgttcgccttgactttcagtcctcaagacatatgtacatttttcttagtctcaaagctcatgtctgcactctagtcctaaaggatttgtctttataattctcaccttagcatgaaatgtgcttctctttctttccttccccaccccccacccccttttgacatatccggtagggaagctctggcagattctcaagaagaattttgcaaatggtcgacttttgttcatctcaggttttggagggagaggataaaagaacattccctcagataatgagttttaaccttaattccttccaaagcggagggggaaacaaaactacagcaagaccaccttgagtaccttgggaagggcagccccgcgatccctaataaatgaattagcatctcaaggaggagatcactgcggggctgatattgatcagggtcagccggcgtgtttgccagccattgtttggggggtggttaattgagtgtcagtctcggccagtgtcgtctcgttggcgccgggtgcttttggatttgctaattttcgttaagtgtctctagcccgctactcgtcccgcgtacccgggagaacctagcggctcctaacggatcaacagtcagtctgtctgggctttattgatcccatggcgggcagctcgaggcggacacgctgagggggtggggggcgaaggctgaatgcagaccccagcgctgggccgcctcccccgggctcccacccgaaccctcctccgccacctgcacaggccggggcattgtcactcgcccctgggggttccagaaaacgcagtgcggccggggaggacgaccacacggaccccctgcgtgtttcggggggcacccaaaagaagccccgcgctggggaacgctgaccacccgaggctgagccgtcagggtctcggaggcgggttcccgagccggtcccggggctgggctcccccggcgcctcgcgaaggtcactgacgcgcaggcctccgcaagggggagcgcgggagacggcagcgcaccagccgggcgccccagccgggcgccccagacgccggcgccgctcggagccgccgggcaggtcccccagcgctcgcgtctgggcccgccccccgctgcggggcggattgacaggagcccggcggccaatcggacgccgtggggcggggcgaggcggggcggtgcaggccggctcccggcgcggggcgctatttacggcgcggagccggagagacctgggctggcgcgggcgggagctgcggcggatacccttgcgtgctgtggagaccctactctcttcgctgagaacggccgctagcggggactgaaggccgggagcccactcccgacccggggctagcgtgcgtccctagagtcgagcggggcaagggagccagtggccgccgacggg

SEQ ID NO: 4789 - DNA, 2300 bp, Homo sapien
aaatcccctgaacatttgctgcaaaagtactttcattcttactccattttggttaataagaacaccaggcatcaaagtcacatcctggccttatccctgtttaccttggcagtgatagatatagccagagttccaaagattattcatttctaaggtacaaaattcccctctcccctctgcctttttttttttttttttccagagacagggtctcactctgtcccctaggctggagtgcagtggctgaatcatagctcactgcagtctctaactcttgggggcaagtgatcctctcaactcaacctcctgagtagctgggactacagacatatcccaccatgcctgactgatttttttttttttttctttttattgtagtgatgaaggtcacactatattgctcaggcaggtcttgaactcctggcttcaactgatcctccgatctcagcctccaaaagtgctgggattacagctataatccatggcacccagccccatttttttttttacaaattttacagaatttttacatggcagactttttttctatctaattattacttttgtttcctagggaaatgctaaagtgcaaatgtagggttttatttatttatttatttatttatttatttttattttgagacaaggtctcactctgtcacccaggctggagtgcagtgacaccatcacagctcactgcaaacttcatctcctggactcaagccatccgcccactggactcaagccatccgcccacgtcagccccacaaagtgttcagattatacgcatgagtcaccacatcagaccctgcaaatgtagatttttgaaaaaacaactgcaacattttagccctttttaaaatcaggacccctaggtctttcccaatataactaactagccagtgattcctcactcatctacctttttttttttttttttttttttttttttttgatacggagtcgcactctgtcacccaggctggagcgcagtggcgcgatcttggctcgatgcaacctccgcctcccgggttcaagcgattcttctgcctcagcctcccgagtagctgggactataagtacccgtcaccacgcccggctaatttttgtatgtttagtagaaatggggtttcgccgtattggccaggctggtctcgaactcctgacctcagtatccacccacctcagcctcccaaagtgttgggattacaggcatgagccaccgcgcccagcccactcccttttaaatgcagatcttctgtgggaggattaagtcactgagcccacagggaactgtgctgggaggggaagtggagggtgtggaaagccggtggaaaacaaatctgtggatagcctgtagggcagatgcctgaggcttggggagactgggaaagcaggtctctaaaaggaacttcatcctttttctcctaggcctcagatgatgctagagtcctgccagaaattgcaaataattctggctcacttttgtattagtgcaggtgcgtagaccagagtctagaagagcaacaacaacgacaataaaattcagtgtgtccttgaggcattttcatgagatgatattaaatatataattaaatactactcattgttttttctcacaaatatatacccaccacctaccaggaactgtcccagaaattgatgaggaaaaaatgatttttatgccataactaatcataccgtaatatgcactagaaaaagcaaagaacgtaaaatagtatatcatggggacattcgaatttataatcctaggagtgacatgtaagctgggcttgaaagaataaccataattttgctgaactaataagtaggttgtggaagagagtgctagctgattaggaaaacctctgctctccttctaagcacgcagttaaaccgttttccatccgtttttgccgttaagtgtggtcatatgactgagttctaaccaattagaatgagacggcaagggatgtgtagctttttcaatcctggccataacattcttcttcatgctcttctcaatgtcctttctcctttcattaggtaaaatggagatgatccccagggccatcttggaaacagtttttgaagttggtagagtctcgggcccgcttaactgctgaaagagtaggaaggggtccgtttcattagcgcgttcaaccaaagagcgctgttaggtgagcaaaaacaaaccagttgtgtctgagccaacacccgtttgtctatgggttgtagcagttggtccacctaatcaaggaagtgccgagagcacaggacatgaaaagacacagcgctaa

SEQ ID NO: 4790 - DNA, 2300 bp, Homo sapien
gaggccagagcagtcctccagatggtattgggatcagaacaagagcagtaaaggcagcctccaggaggctagagcagtcctccagatggtattgggatcagaataagagcagcaaaggcagtgagaagttgtcagaatctggatgtgttttgaagaaagagacaagggatattcttgatgaattggatgtaggataggggagaaagagaggagtcaaggatgaatccaagaagtgttctgttttaggccacaaggacgaaattgtcatcaactaactaacatggggaaggttgtgggtacagtgggataggtagggaaaatcagtttagtagtggacgtgtgagttagagaagtattttagatattcaagtgaaaatgatgagtacgctattggatatgcaggtttggagttcaggacagaggactggactggagatattcatttgggagttatcagtgtgtgggtagtatttaaagccatggaaccacatgagatctccaacggagtaagtagagacagagatgaaaacaacagcaacgactgagccccagagtaattagaagttaaaaggggctaaggactgcaatgaatgtgcatgacaagatccatgtattgccatcaaagtgagtgactgtttctaggagggtagaggtcaagatgcctgaaggaggagagaagtttaatgacctatgatggtggagttttggaaagattattatctatgcattgaacatgctcagaaaagagaggagaagtattggggaggatgccaatgggctgagaactgatgttgttgaaaaaggtggtgaacaatgttgggcaggggtattacaggaccaacatgtttgtatgcctgttgtgcagaaacagaccaatacaccaagacagcaggctttgcagcagagagagggtttgatgacagcagggaggccgagtgagcagatgggagaagaccctcaaatccatctccccgaagagttctaggctgaggttttcaaggggattatggggggtgaggggctgaaaaactatagtcattgattggttggggaaagggggatgaaatcatcaggatgtagaaactgcattcttcagtgagtcagcttctcgtggggtccttcagaccagctggcgtcagtagtttcatcagtatgcatgacctacaagaatatctcaaatggaaagcaacatttcacaatgttcagttgttatctgtggagcagtgaagggggactctaatcttgtgacagggtctgtgtgattctggagcaataggtagcaaaacactatgaggaaggatcagagaacagctgaccccatgactaacactgagtatgtgcaagcttggcttatttttgtttctctccctcccttctcttctgattaattgtataaagtttctagggacagtttcaggggtgatagatgatgatggtacgagatttgcagtagaagggaaggagaaggttctggaaggggaaaagaggaccagcagggtccctccatcacctccaggtctgcaggaggtggcaggagggcctggaatgaaaaacagccagtggctgggcgcagtggctcacgcctgtaatcccagcactttggggggctgagacgggcagatcacgaggtcaagagattgagaccatcctggtcaacatggtgaaaccccgtctccactaaaaatacaaaaattagctgggtgtggtggtgtgtgcctgtaatcccagctacttgggaggctgaggtaggagaaccacttgaacccgggaggtggaggttgcagtgagctgagaccgcaccactgcactccagcctggctacagagggagactccatctcaaaaaaagaaaaagaaaaacagccagcgcatgagagaagatgtgagcatcgtcctcagggaagagtcagtttttgtcagaacaaggagggactatttggaagttagtttgggatgtgaggcgttttgctattagtggatcaggctgatggcaccgtggaggggtttcaggagtcaagaacaggtgggagaaagtttcccagtgcaggttgtgcaagcctcctggcccggagagtgtgggtgtgacgagtggcttgagagacagggatgaagagcatgaatgcgaatgtacagcactgagctcgcgtctgccacatggtaagctcttagaagacctcagcttcttattcattttgtcacaaatcgattaattactgagctgaaggacatattagaaaacggtcaatagcaatacttctaacttccaatctgtacttacgcttggcattcaatcgatgttat

SEQ ID NO: 4791 - DNA, 2300 bp, Homo sapien
tgtgcttttgatgttatatctaaaatttcattgccaaacccaaggtcctgcagattttttatatttaacttaaagaatttcatcgtttcacactttttacatttaggcttttgatccatcttgaattaatttttgtatgagatataaggtatgtattcttcaatatgccttatgccttgttttatttttgttgttttcgttgttttgcacatagacagtcttattttagtaccatgtgttaaatggaacatcatctttccattgaatttaatttgcatctttataaaaagctacttgactacatatgtgtaacactatttctaggctctctattttgttacactgtcctatgtgtctgtttccacaaatatcatcctgtcttgattactacagctttatattaagttctaaaatcaagcaatatgagtccttcaattttattattcttctgaatagttttgcctactctagtccctttgccttttcatataagttttaggaccctcttattgatattttctaaacaatttttctgggagtttaaatgggattccactaaatctatgtattaaatcttaataatattgactcttcaaattcatgaatatggtgtgtctttttcatttactcaggtcttctttaattttccgtctgtcttatagttgtcagtatatatatcctgcacatattttgttaggtttaaatttaagtacttcatttgcatttgtgtactattgtaaatggatttttttttatttcaaactcttattttctattcctagtatataagattgtaaatggcttttgtatatttacgtcatatctgaaaacttgctaagcaagcatttttgaaaaagaaaaagacaatccgtctctattttctcactggtaagatccctatttcaaagcattttgaaaaagatgtttgagggaaaaacctatacattttctcatattatagactgttcacaagaagtccactaatggcttctaaagataaaaaagaccctcaagcagcttgaaataacgaaagttgaaattgaaactctgctgaaaaattatgtttcatctctaatattgagaaatattgaaacatttgataacacagtgtgctatcttcctgatacaagcccatgtgaaaggcaatttggcaaatatctagcaaaattacaaaattataccctttgatccagcaagatattcttgtaaagttacaaatgacatatgtacaaaattactggttgtaatatgtttacaatagaagaataaaataagtgtgcatcaatatgaaattggctaagtatgctatgttgtatctgtataatgcaatactatatgaacttcaaaatagatttcaacaaaacctttgcattattggcagatggaatttaagaaaatataacgattagttaggtgcagccaacaataaacttctacttagatctacatattctaatgagaattcatttcaaatgtgtcactaaatctgaacattgaaataaatagaccttgaaaacagccctttagttattgattcacaaagtgttaagccaaatttttcaaaaataataaaatcatgttattacaaaaatattttattaataataatttgactatagcaaatgtgctgttaataaatttttaatgttaatttcacctctatgtcattaattttcaaattttagttttatgtatgttgataatttatgtagcatattagtactgaggtacagaagtatgatttataactcaatgtacatctaaagaggatacatgcttaactttctttattaatggaatttgtgataaagtttgcagacgcctcagagaagagctctcacttggacaggaggccctggccaagttgtgtaatgaggagggttgttgaggggaaaagacaaaaaacaagaggtattaagccccagaagacagttatcacctgcctcagaacacaagcatgcaggatgatacagcttttagtgccaagaagtagaattctagcatctctaggtggtgagaaacaaaggattaagaatttttctttctctaacactctaaagaaatgttcttgagctaggaaaggattactcgcgcctcgttagaatcagacatggcttcaggggatgcaggacgctcccctgagctgcctgtcaccgactaagtggagcagtgtttcttccgcagactcaactgagaagtcagcctctggggcaggcaccaggaatctgccttttcagtaagacctaaattactcttatgagaaccagcaatggcaggttcttgaaggatgtagaacatga

SEQ ID NO: 4792 - DNA, 2300 bp, Homo sapien
gtgtatgctgtgaaaagatttataaaagaaaatttatgcaccaaaagtgacagtcgctaagaattaccattataacatgtaattgagactacttaaaaaataggcttacatgcaaggtgtgtgaggagaaggaaatgtgtttttggaaagagtttataagaaggcatgggaatgtaaatttttgcctagtttagagggttaaaggattgtttaaaattaaataaaataaagctaaaggtttaaacaagttatggaaggtttgtaaaaattaactttgtgaacataattctatgtgtgaaaatattgactaattaaagctctttcatatgtaaacataactcacataatacatttaaatacatagacagacagaagataaaaggactcattttccaagccaggaattgtaccctgaacctgggctgcattgtgaaaagaaaaagcatggcagcatggttacaagatcaagctcccaaggacatacaagacaagagggaaaactcatccagtttttttttagagacctgcagcaaagtttgtaactgaccagcttgctgggccatcttaaaaagcaggcttacaggtatcctaagcctgtgttctatcctaagttacccttatccattatagaacacagaaagacacacaaagcacactagattctctacagcttaagattagcctcacgaatccttcatctcattaactaaaactttacagaggagataaacagtgatttttactattcattcaactaatttgcacagagaaagagagaggccagaagtctggtaagaaattcttaccttttgccagtatgccaggcttttggattcctcggagatgctggaggaatctgcatattttcagtaggatgtgcagggaaggcctccttaagaaggcaacatttgagcaaagatctgaagtaggcaaagaagccatttggatatctggtaaaagagcttttccagatatttaacaaataatttcctaacttattctacgttttattttttgtttttgagacacggtatctctcactctgtcgcccaggctggagtgcagtggtacaatctctgctcactgcaacttccacctcttaagattccagcaattctcctgcctccacctcttgagtagctaggattacaggtgtgcgccaccacacccagctaatttttgtatttttaatagagacggggtttcacatgttagccaggctggtctcgaacttctgagctcaaataatccacctgcttaggcctccaaaagtgctgggattacaggcatgagccacagcacccagctaagctttatgtgtatgtattctttaatcaaatatctattgtatatgacattaactgcaggtataaggagataagacaagattacgggtgttcattgagtgcctgccatgtaccaggcactgtgctaagtttaatgaatgaggtttggtaccttcactaatatttacaacttaatgcaagaggcaaggtgtagacatacacctcctgcagttggagtgcagcagttcttacgaggaggaagagttggtctgaggttgcaccacaagaagtttatatgcacctgacctacctgaagtctacacctccctttcaagatgaattaacatgtaaagggtgctccccactctaacagaggggaagccagcaagttaatacctgatcacaccttttatagagcactgtggttaacaatctgccttcccaaagtaactcatttaaccttcataacaataagaagcagttgttctaagaagccttcgtgtctctgtctgagatggagaaaggctcagaaggctgagcagtgtgacaaggtagagttcgacctaaatttaaggtaacaggattaaagcacagcgcttttcgcacagcaatacagctgttatgagcatttgctgaaataaaacagcttgatattctcctgactcagtcctctcccactgacaagacagaaagagagctgggttgaggtcggggcggattcagagcccaccgtgtcagcaaagacacataaggaactcgccctccggaaagacgcgggggaattctgggagtgcgcggccttggagcgcgcacatgcgcggcagctcccgctgctgaatagctgagaggcgcacccgggcggccagctgggctcggagtgcagcggggttaggatggacgaggacgtgttgcaccctgaagagcctcatcatcggtgagagtggggtgggcaagtccaggtgaggcgggcgtgcgggctgtgatgagggtggctgggctctttctgcctccgta

SEQ ID NO: 4793 - DNA, 2300 bp, Homo sapien
tgttgctcaggctgatctgaaactcctgggctcaatctgtcctcccactttggcctcccagagtgctggaattgcaggcatgagccactgcgcccagctaatatttatttacccttatggagctaacaactcgtgttccagccatttcaggatgaatgctaaaacggtgttcagatggtaaatttgggcttaattcagtgagatttaataatagacaatttatgtcaatttccaaataatacaagtcagttccaatatatcccttaagagacttccagaaccccatggcgtcagatgtgaagaacaatccccacagctctgctgaggctgggagggcgctggggctgtggcatcctccgcgctccctttctttctgttagcttgcattcgcttctgctcctgtggcttccttttcaatctcagctgcgcgacagaaaagctcagtaaaggccagttcagtattagaaacaagggatactggtctgttcatctttcttctctattagtcctcaaggatcagctttagacactgtgaaatcagtggggcatttccatacagactccacactcgcagcgcatccatggtactgatggtaggaacagaagcctctgatgctttcccctggcaggtccatctttctgatctaatcctgggggtgcatccattgtcagaggtctgaagcagcccaacatcctttctctggggagaagagcaaatgcatgcaatgcaatgtattttcttttcaaaaagaggaaggcttctttgggccaaatgccctaccaatatagttaattttcagttatttgcatttgaattaccttgatatttctgaaaacagagcactgtacttttttttttttttttttttaagagacagggtattgctctgttgctgggtgcaatggcaggatagtagctcactgcagcctctgcttcctgggtccaagtgatccttccatctcacctttcagagtagctgaaactaaagccatgtccccaccattatcagctgatttttaaattttttgtacaggtaggatgtcactatgttgcctaagctgatcttgacctcttggcctcaagggatcctccctccttggcctctcaaagcactggaattagaggcgtgagccacctcacctggcctcgcaccaaactctttattgacttcttggttattgtcgcctgttactagtcgctacgctagttcagaaaggctttgcacagaggtctgttttgagacttctgtgccttacctagatctcagatcaagaaagtcctgtgatggctgaggacggtggtgggaggtcagtgggattggggctcaggaccatcgctgatttaggtcttcacactgggccttctgtgatctcagaacatcacacacccataaataaacctccaaggaccagtgtctgcaacttattgctaacaaaaaatttaagatgcagaacaaaaacagtttttgtttatatatttttaatatagggtcttgctccgtcacccaggctggagtgtagtggtgcaatcatggctcactgcagcctctacctcctgggctccagtaatcctcctgcctcagcctcccaagtagccgaaactacagggatgtgccagtttttttccttttttaatgtgagcatacacatctatgctagtagatgtaaagaaaaatccagaagaatataaatcagattattaaagtacttgtatttggttagtggtattatttatgatttttgattcctagattatatatctttgtagtgattgcattttttacgtagatcaggtgttactattttttaaactgcttttttgtgatattttacatatatatataaaatgtgtttgtgtatgtatgtatataataatatatgccataaaatacgctcatgtaagtgaacaataatttctttaattattatttttttattttttagagacaaggtctcactttgtcaccaggttggagtgcagtagtatgatcacaactcactgcagactcgaactcctgggctcaagggatcctccctcctcagcctcccaagtggctgggactacaagcacgcaccaacacacctggctgatttaaaaatttttgtacaaatgggatctcactatgttgcctatgctggtcttgaacacctaggcccaacgatcctccagcctcgccttctaaagtgttgggattccaagagtgagccatggtgtctggcctcaaaaatctttaatacctttatagagttgtgcaatcatcaccacaatccagttttgagacatttccattactccaaaa

SEQ ID NO: 4794 - DNA, 2300 bp, Homo sapien
agaaggtcagaaaatgcacctagaatattctggagcagaatcaatttttttgtttttaaaaccactgtgtgaatatgaacaaactattctgggtaaattctcttcctccattaaacttgggaccccagattggctgctctccttttgggtgggtggatggtgggaatgcatgactaagagctgttgctcatattagaaatacatggaacagactggtggtcaagaggcaggttttgggctgggtgcagtgacttgtgcctgtaatctcaacactgtaggaggctgaggtgggaagagtccttgaatccaggagttggagaccagcttgggcaatatgatgagaccctgtctctataaagaatacaaaaataggctaggcatggaagtgtgcacctgtagtcctacctacttggggtggctgaggtggtagggtcgtttgagcccaggggttcaaggtttgtgtgagccatgattgagtcaccacactgcagcctgggtgacaaagcaagatcctttctctaaaaaaagaagaggcgaattttggatgatcttgcctgcgtctgagtactgactcctccactcactgaaagtcactttggccaagtgacttcgtgtttttgtgtctctgctcccacaccagtaaaatgggaataataataagatatcttgatggactgttgtgataaatgagaaaatcagtgtaaagtgcttggagatgtgcctagtgcagagtgggcacttgctgaatgttaattatttgtataacttgctggtgtgggaagcctgactcttctccggctggaatcccacaggcctgcacaacagtaaatggccccgctgctaacccccaagatctatagtgaatacacagggaggatggtgagttatatccttctgaaagtggctcaactgtgccacagaactgatgtttatgatttctttggaataaacgtcgaaattaactctcctagtcttgaaattcgagaaagttatatttgtcttatctgagttcctttctcaggaaaccaaccatcaggcatctccaatagtatcaaaaagccagcagtggctcatgcttgtaatcccagcactttgagaggctgaggtgggcagatggcttgagctcaggagttcaagaccagactgagagacatggcaaaacctcattgaaaatacaaaacaaattagccaggcattatggtgtgtgcttgtagtcccagctacctgggaggctgatgtgggaggattgtctgagcctggagctggaggctgcagtgagctgtgattacaccactgcactccagcctgggcaacagagcaagaccctgtctcaaaaaacaaaaacaaaacctgaagcttaccagaccccttacccaccatgatgcctaaccaaccccccgcttcctgttgaccagctcctcttcctcacccctccctaattcctgtttcccacacatggttacatttcttccctgctataaaaatccctaattttagtaggccagagacacagatttgagacttatgtcctgttccccttggctgtagcacccaaataaactttcttccttggctatgcttgtctcagtgattggctttcttctgtgtagtgagcaataagccctggactgaacccctggcaatttggtaactcctgaacttagactgcatgcagcagccatagagctcgtaatccctagagccttctggtttcacgaaaccacagttgcagtgaacagaaacatctcgttccggctgcggcagacaccaagctgaagtcagccccttccctgtgtacatcaagtccatttggctccagggagacaggttagggtgagcagtgatgtctgtactacccaacaggccctctccattgctaagcagaagtagattctgtttgtttaaaattactcgaatttcctataaaatacacttgggtcgtttccccaagcaaagcagctctcacatggtaaaaaaaaatcaaaatggtaaaaaacctatctctcaccaaatcaaaacaaatccttggatttgctattcctagcaatgttaatagctcatatataagaaattcaacatagctataataaaattctttcctgtgtggttggaaaagaaaacattctagattataatatattttggtggatagaagttatgataaatgcctcatgcagaaataccaggtggtctcataaaagacaatattaatgagatgttgagtgatcccttatcataagggagtcgcagcacctccattcattcagttttctgaacatactaattcatcagatttcgtt

SEQ ID NO: 4795 - DNA, 2300 bp, Homo sapien
gtgcagtggcgcagtcatggctcactgcagcctctaactcttgggctcaagcgatcctctctccttagcttcctgagtagtggagactacatgcatgcagcaccatgcctcgctaattttttttttctttttgtagagatagggtctcatcatgtggcccaggctggtcttcaacctccgggctcaagcagtccttcctcctcagcctcccaaagcactgggattacaggcatgagccaccactcccggtggcagttttgctttttaaggcccatttctctgtaagagagccatgagctcacctcactgctaagcaatcgcgtgcagggcaggaacgccactgacctgtctgcagtgagatgtgcgctccagtgttgattgtgctctttggagatatgcggtgctaacagccccttgagtggcacatgcattatcccttccactcttagcacagccctgccagtatccagaagggccagggccttgagctggggcaaagggaggaggacctggaggacgaggaatgaaaaagaccaactccttgacaccacttctctctgcctacaggcttctccccgttgaactgtcaaagggctggggtatcctgggtttctctgtttgcccctttgcccctggtttgatggccaagggggtttccccctgtgacactgcagtcaagagggacaacatccactaggttgggggaggagtgagctagaagtgtccgtgaaggagctcctgatggtctggccctgtccctgccctcacagcacttttccttgttgacaatcaccacgaggtgtacctctggcaaggctggtggcccatcgagaacaagatcactggttccgcccgcatccgctgggcctccgaccggaagagtgcgatggagactgtgctccagtactgcaaaggtgaggctccctctaacatgcctgcagcacggaacagatggggaagcccctcaggcatgcgcagccaggagacccccttccccttctgtgcatgtcagccagcatccatccataaagcctggcaggtggtgatgaaaccaattttttcccctttaactttttgagatgtattaagttttagattagcgcattctcagctgccagcatgaagaagaactagtttttctctctgatattatgaggctaacttgttaccctcaaggataaaggctgtattgtggaatgccccaggcagattaaaaccccgctgtactcggggttgatcatgctgagagacaagttggcctctgccctgtacattatctgcaagcactaccacgctgttggagaatggaggtctcccccaaacagtgaacggccattgccaacctttttattattcattattatttttagtattatatccaaagagaaatacccatagtaagttcatggttctttactatacacatgaaatttctagtcttttatataaaatgaaaatgccagtaattaatcttatttaatttttatggtttcattgacacaactagtttaatgtcactgagtatgtgcaatggattctcttcctgaaaaactctttagcaataaataacatatgaaaccttccactcaatgttatagtgaatgtggatgtataagatgctgtcgttcgccgtcagtcattatgggagttaatcctgtgctaggaaatgagacggatgactctacaggtgaattcaggaggaagaaaatgctccacccagaagctgcagacagagcctctctctcccttccaggaatacacagcgttttgttaggttcaagaagtatagactcaggttgattataggtcactatggtagtcacaggcatgaaactaacaaacatcttatataaacattatccatgtgttgttatgaactactggtaacttgcattttaagcatgaagtcatgagttctggcaaagaagaaaagatttcaagggaaatcagagaaagacagggtctccctggggtctactgacattgcaatctgtgtaactacaggaaaaaatctcaagaaaccagcccccaagtcttaccttatccacgctggtctggagcccctgacattcaccaatatgtttcccagctgggagcacagagaggacatcgctgagatcacagagatggtgagcacgctttcctgccctatgaaggtggctcctgcgccttttggattgtgggttaactttactttggggagagcatccaattgcactttcagagtgggaaaatatttttccttttgcaacatcttaacaaacctacatagaatttgcttaggaagaagagaagtctaa

SEQ ID NO: 4796 - DNA, 2300 bp, Homo sapien
ccagactccacctcttaaaaagtaattacacgcttgaaatatcaatacacagatcagagtcccaaaatttatagccagaaataaaccgtagtgtacccgaaatggtaatctgtgtagtatatgtgaagtttaagcttcacatagtagtgagaaaaggaggaattatttaataaaatcataatgaaaaaaatgggtttgccagagggtgggaagaggcatatctctcttctcaattcataccaaactccaaaattagttccagttactcacctgtttagtttaaagaaaataatggaaaagatacatgaatatttaattcaggtggaatgaaaaaggccgtatgggaagggttaaggtaataatggaatgcctgttagatagactgttaggacccttaaatgatatcttcaaaatagatttccaaatatgggaattttttttttttttttttttgagacagagtctcactttgttgcccaggctggagggcagtggcatgatctcggctcactgcaacctctgcctcccgggttcaagtgattctcctgcctcagcctcctgagtagctggaattacaagcacgcaccaccatgcctggctaatttttgcatttttagtagagacggggttacaccgtgttggtcaggctggtctcgaactcctgacctcgtgatctgcctgcttcgtgatccgcctgcctcagcctcccaaagtgctaggattacagttgtgagccagctgggaaaacatttttatagaatacggaaaatatttttatagaacattaataactaactattttataaagaaaaaattatattaactagaaggaatatataaaaatgttattagtttgtagggtgatgattgataggtttttttttttgttttgttttttgagacaaggtcttgctctcttgctcaggttagagttcagtggcatgatcgatcatagcttactgcagccttgaactcctgggctgaagctatctgcccacctcagcctcctgagtagctggcaccatggacatgtgccatcatgcccagctaatttttaaaataatttttgtagaggcagggtctcactatgttacccaggctggtctcgaactcctggcctccagccaccctcccacctcagtttcccaaagcgctgggattacaggtgtgagccactatgccaggctcatattagatatttcctacaccaggcatgtgtgttataactggggaaaaaaaacacttctgtaaaaaagaaaagcctggtgaataatgatatgggccatatcgttatggttactctcagatccccggaaaccagcatccatcacttgtccaatgacggcagctcacttgtctgctgtctttcccagaggacccaactcatcctatggcctcccacgtgaaatactgaactccacaaaaaagggtaaatcagtaaggggaaataagcactgaacaaagactgaggcgctctggggagtgaaggggctgagctgaagttaaagccacgccttacggggcttgcagaacgtgcaccattcacagcctttgtagatttcactgccgatctcagacttcttcaacagcccaggtaaataatcagtttaggcaaacacacctcggtgagaaactggtccttcacagcatgggcacccaggtgtgtgctgtgtgcagtagagtgtcattctgtgtgtaaatacatgtctttacttgaaatctgcacctctcatccatgtgaccttcttgtaggccgatcaaatgaagaggaggaaacttctgattcttctctagaaaagcaaactcgatccaaatactgcacagaaacctccggtgtccacggtgactcaccctatggttcgggtaccatggacacccacagtctggagtccaaagccgaaagaattgcaaggtacaaagcagaaagaaggcgacagctggcagagaagtatgggctgactctggatcccgaggccgactccgagtatttatcccgctataccaagtccaggaaggagcctgatgctgtcgagaagcggggaggaaaaagtgacaaacaggaagagtcaagcagagatgctagttctctgtaccccgggaccgagacgatggggctcaggacctgtgccggtgaatccaaggactatgccctccatgtgggtgacggctcttccgacccggaggtgctgctgaacatagaaaaccaaagacgaggtcaagagctgagtgccacccggcaggcccatgacctgtccccagcagccgagagttcctcgaccttctctttctctgggcgagac

SEQ ID NO: 4797 - DNA, 2300 bp, Homo sapien
cttaagaaggccgaagtgggaggacagctggagcccaggagttcaagacaagcctggccaacctaatgagactccatctctacaaaaactaagaaattaaaaaattagcccagtgtggtggtgcacatctgtagccccagatattcaggaggctgaggcaggaggactgcctcctggggaggttgaggctgcagtgagccatgattgcacacctctactccagcctggacaacagagcaagaccatgtctcaaaaaaacaaaacaaaacaaaacaaaacaaaaaaaccttgcaagattttgataggaattttgttaatctgtagatcagtttggggacaattgacatcttttgtgtgttgatttttcttccaattcatgattatcatcattggaaagaagtgagtatgatgagtcttctaagccaggcagatagcaaaaaaattaggaaagtaaatggattgcacaggaagaattaactgggatttaaataatcaaagacagaaaggatatataaaagaagtgacgaaggagatttaccctattagactccagtgtattaatctaggacagtttggttgctatggggaagcagtgtgcaaaaacttaagaggcacacaaaagactgatgtttattttgtgggagtgaatctttttttaggaaggaaatagcactattgtggtaacagtgattcattttctcctcctatcttctctttacagagaagacccaaatagtgaactgtttcatgtaagtttttatttatttttgccctacttttctctagggaggggcttaccacagcttataaaaatacgtaaaacaagatcaaataaactttaaaatgaggaaaaagccaatatggtccaagggaaaagaagatcagggtcaggactgagattaggatgcaaaagccatgctatgaaattttgtttgtttgttatcttgagatgggtaaaaaaaaaaaaaaacagttgactgggacaaatacccctagcacaaaacagtcatgaagccaatgtttaattattatacctgtcatcttttcacctggcctcaggactgtcctcttagggagaggcattgttctgtagggttaattagtaacaggaatttagatcctgctttgagaggcctcctgtgctggccgaagcagctggtggtctgagaaccctgacacccagaggcataccactgggaggccccgcgcagcacacagcttttgctgtactccagcccaagtcttatggggtttgtggtttatactgaagttggtgcagacaattaagactctctgttcttggtaccgacagggacagagacctacaattgtaagtattttgtaaacagggttgtgatatttgtttgagtgtattcaacatgtcagtggccttttaatgtttaaaaaaatgcatatggccatttaagaagtggttgtgcttcatagttaatatttttttcattaggttaggttcatctggtttttcagtgaggtgagctacctgagagccataggaagatagatcttgccagttcagaggactgactttggctttaagagaaaatatttgtgtcattttcgagaaagtacttccagcacaatgctttcttctgatgattcattttctacagttattggaagtgggaagaaatccacagaggttacagaatttgtaaacttgtagagacatgtgccattatatcatgctgtttcatagatgtgtatgtctgttagttacttttcgggcattcattgtatatatgtctgttacttacttttggggtgttcagtgtctgagctttgtcaacgattgtgtgctctttttttagcctaaaaaaactaagttagagaaatgtttgctcatccaaatctgtattgttgtagcttattcagtagactgctgttgtatttttaatttctctatacaacaagctgaaagacagtgtggacaacctaattgcatttgaagtagctgctggccaggcctgctgcaacagctgatgggctcctctgaatttccagggctatttctggtagatgagctggtatcaaggctctcgagttcaggccataaaaggcccgtcccatgtgaagttgcttcactgctctgactgcgtcctccccaggctgaagtgtcctcaggtttcatgtggatttgcccagtaatggatggctccaccgaggccaggttggggaagttcagcctcgaggacactaggggacgaaaaacttcaaaaagaagactctttttattaatattttggcgttctttttggagaggaacttttgggatgtagcct

SEQ ID NO: 4798 - DNA, 2300 bp, Homo sapien
tgtctttaggagaaaagattaagacacagacacagagggaaggccttgtgaagacgccacaaaaagccatttacaagcctaggagactggcctcagaagaaaccaaccctgaccacatcttgatctccagaacagtcttccagactccaagactgtgagaaaatcaatttctgttgcttaggccacccaatctgtggtcttttagagcaaacaaaaacactcgcttttcttttttgtctgatggtgcatattcaggaggaaacataaagtagtctaacactcagaggagcacaactacctctacctactgaaacagacaagtaacatacttaacaggttgaaatttatctacttatctactgttctgccgtttaccaagcacttttacaagccctaactctcaatcttcgcggctgcctcagcatcacctgggaatctgttcgaagtgcaaattctcgggccccacagaagtcttacagaatcagacactggagggggcacgaagaggggcagtcatggtgttttcacaaacgttggaggactctggtgtagctaaagtgcgagaaccaccgaggcagggttcggtccaggtggaggggattggggggtcccgcgactttttcacaggtgcgcgtggccagcaaggacggtctcctttgcaactggcccacagcgttggcacaggtcgccagattttatttatccctggaaggtctggagactcaaaggggcctctcagggctccagggtaagcggctgcctccgggcagcagagccggtgagagccagggagccctgagccgctgggcgcgtgcgcgtgggcgcgtccctgggccgggcgcgcgccgagggggtgggtggcgccggccccgccggcctggcgcgcggtccgagccactcagagcgcctggcggccgacacccgggggccctacaattaataccgggcgcctgcccgctggccgggactcgcgcgccggctctcggggacggaggcgcccggtccgccctgacgagctcgccactggctctgctccggcggcgacggcgacagtggccctggccgactttcccggggcccacacctcctcgagagccagcttgggcaggggacggtgccgcaccaccaaggccccgcgctagtgtgcacccccggcccgggcccggcaggtgggcgaggagggcgggcgcagtcgggctctgcaggagcgcgcggaggtgagacgggggggaaggtggggacgcgagtgtgggcgcgtgagtgtgggcgcacccccgggaaggtctcggagatgtcctctctcccttcttcctggtcccctccagagtttcgctcaggtcctcaggggacagcctgagaggccaacctgctggaagagttcactcgggcgacagagcgagttggacagccacacccccggccgggagagcgatagggcggccctggcctccagcccctgggatcctaaagccccgcatctccggggctgcagcgggggctagcccaagcatcttcccagccctgggaccgggggggcgtgactgccaccaccctgagagctactgagacacaggacacaaacttagtttccaaacaaagtaaaatctgcctttccggtgttttaagataggacgtgcttatgccgattcatcgcggtttccttgggccacctccgaggacgcggctggacccgctggccgtggagggggtcggctccgggcgcgagttcgtgtcctggggcgtggggacagctctggtgcttcccccgagagtcgtcccagcgtggtccccgcgcactggcccctgttttgggaaggggtgcccgcgttgagagaggcaggggtgcttgtgcttggcccccctctgtgtccccaccctctccgcccgatccttgcccagtccgagggtgctcccgcctggtggcccagcagagggcgccagctcccggccgccgcgcgggtcgcaaggggtggggacgcgcgagcctccaggtaaggagcgaagtgaatcatcccgagcggggacccgctccccgcgcggtgggaacgaggcggggcgtggccgcggcgctgctgagaagtcggggccgccgagccgctgtcggcgggaagcggcgatcctgccaccgggaggtgtggaagagccgggtaggtgagcaaagtccctccgcgcggtggccgaggggcgcgcggagccggggccggcagacgccaggacgcgccgctgcgctctgctccggggcgggaggcgcgggtcagtctcgctctggctgcgggaggccctgccggggaccgaagcgg

SEQ ID NO: 4799 - DNA, 2300 bp, Homo sapien
gaacctgggaggcggagcttgtggtgagccgagattgtgcctctgcactccagcctgggcgacagagcaagactccgtctcaaaaaaaaaaaaaaaaaaaaaaaaatgtacatgggcactctcaagtttcccccaaatacagtgggattcttaggggtgttagccagtgttgcttctctgctccttatgcaaaacacatgattgaaataatccttcgtcggggccccgttggatcctctagttggacaagctgggcctttgcagtggtagagaatactgagaatgtgaaggctttgccattatggtaggaaaagggttacctgcccattttttgagctttctggatttattgtagccttcagcataattcctctgcagtcccccttcctcctcaaaaaatatgcccactagactttaaggttagttaaaacttgtcatagacttctaaagcaagttttcttcatctataaaatcaggatgattttctcagtcctacatcttcctgaaaattgtaaggagtttaaaataagacaaataaatcctgttataatacagtaccagttggtaaatatttctgtgtctcagttcatggaaacctatttcaggaaggttttttgttttgttttgtttgagacagagtctcactctgtggcccaggctggagtgcagtggcatgatcatagctccctgtagccttgaactcctaggctcaagcgattgtcctgcctcagcctcccaagtagctgggactacaggcatgcatcatcacactcagctatttttttagttatttgtagagatgaggtcttgcctacactgctcaggttggtcttgaattcttggcctcaagcaatcctcctgcctcaattatggtgcccagtctagggagtatttgataacacaaaatttccagttcagaaaagcactccttcaatttttaacttgactatttagtgtgagaaggtccagtaggtatctaaaaacacccaggtaatgcaaattttaattttagccagttattaacaacacctccctcatgacgtttttgggttttttttttaaccactgctactaacaagcagaaaatttaattatttttttctcctctccatctgatgcatttgctaatatacaataaaatggccaaaaatctgcaggcagagagccactcatgttgacagcttcctcgggcattttcaagtacagtcatgcgtcgcttaatggggctgcactctgagaaatgcatcattagcagttttgtcattgtgtgaacaccatagagagtgcacttctacaaacctagatggtagaatctactacacacctagtcttcatggtagagcctattggtcccaggctgcaaacctgtacagcctgttactgtatggaatactgcaggcaattgtaacgcaatggaaagcatttgtgtatctaaacatatctaaagaaaaggtacaggccgtgcgtggtggctcatgcctgtagtcccagcactttgggaggctgaggtgggtggatcacttgaggtcaggagttcaagactggtgtggccaacgtggtgaaaacctgtctctactaaaaatacaaaaattagctgggtgtaatggcaggcacctgtaatcccaattacttgggaggctgaggcaggagaattgcttaaacccgggagccagaggttacagtgagctgagatcgcgccattgcactccagcctcagcaacaagagtgaaactccatctccaaaaaaacaaaaagaaaaggcacagtaaaaatatggcataaaatattaaaaaaaaagaaaggaccacttttgtagggcacttaccatgaatggagcttgcaggactggaagttgctctgggcaagtcagtgagtgagtggtgaccgaatgtgaaggcctagaaaattcctctacactactgtagactttataaaccctgtacacttaggctacaccacatttgtttaaaaattgattgcactatgacatgacgtcactagatgacagtaatgtttcagcttcattattatcttatgggaccactgtcatctatgtggcccgtcattgaccaagatgttgttctgtggcgcatgaccataatcggaggggagagcaccattagggacgatatcttacatttgttttgctcaggtggccccctgtgggcctttcatgtgatggtcaccaggcctcaatattcaaaaccactcgtcttgagagcaactgaggtcatatgatggaggtagtaatacttttgacgtatgtccacttttccgctcactgttgcttcacaagttag

SEQ ID NO: 4800 - DNA, 2300 bp, Homo sapien
gagggtccatgggaagttggaggaaggtcagagcatgtgatgaagaagccagtttgggaagaagaattgcgaatgtcaggtcctgccaagtggcagaacgtcagcctggaaagctggaaccagccaaggaaattagggaggcagatgtctgatggagatggggagagactgtttcaagacctgtacccattcattcaaggagaacatgtgttgaattctcaaaacaaagggaagtctcgctcactgcctagagttctttcccccgagagcctgagttgcacggaaattcccattccattaaatgaaagacattcacctaaaatgccaccgtatcctcccacttgcgcaccaaatttggactccacgaggaattctgagaagagtggctgctcagccccatttccccggcctaagtttgggaggcccctcaagcccccatcttacagctcgcaccagcagtctaggggaggagcggacagcagtgactctcaggacagccagcagatggacgcctatgtccccaggcatgagctctgcctgtcagaccctggattggaacctccagtgtacgtgcctccgccctcatacagatcgcccccgcagaacatcccaaacccctacttggaagacacggtgcccataaatgtgtgtggcggtcacagtcaacagcagtctccgaccgagaaggctggggccagcggtcagcctccttcaggcccccctggaactgggaatgagtatggtgtgagcccccgcttgcctcaggggctccccgcacatccccgacctgtcactgcctatgacggcttcgttcagtacattccctttgatgatccacggttacgacattttaaactagctcagccccagggtttctgtgaagacataaagcttgacgataaatcatataactccagtcctgtcactgctcaagagccggctcatggaggaatgcagcctgatggtgccatttggaatccacagagcttaatacccccgtcgggggatgagagaggcctggtcttggccgattccagcccccggtggctgtggggccagccccccggggatggggaaaacagtggcctccccaaccagagagaccgctgtgtggcaaggggacagtggcctgatgtgagaggcagccagcacgggcacactggaagacaagtttcctccccttactcacagggcgagagcacctgcgaaactcaaaccaagctcaaaaagttccaaactgggactcggaccaagaaaagttcaaagaaaaaaatgaacgagactatattttgcttggtttctatcccagtgaaatcagaatcacatctgccagatagagatatggacaacaatgacttaaagcccagtgctgatcaaaagaatgggtctgataagagcccggctctgcaagaacagagtctgctgagcatgtcttccaccgacctggagctgcaggccctcacaggaagcatgggtgggagaacggagttccaaaaacaagatctaggggaaccagaagaagacagacaaacaaatgacctcagtttcatccaccttacaaagcacagagaactcaagcattctggctcttggccagggcaccggtacagagatcagcaaacacaaaccagtttctccgaggagccccaaagttcgcagctgctccctggtgcaaagctgggagggccgagtcgtgcagcattgagtccaaaatgttcagaccctgctgcctccgaagctcagacgcacacagcattccctaccggtgatcacaaacagaggccaagtgcccgtaacctgaaaggtcacaggtccctcagcccatccagcaacagtgcgttctcaaggacttccttgtccgtggaccaggcaccgacgccaaaagcaggccgaagtcagccctgcgtggatgtccacgggcttggagcccaccctgggcctaagcgggaggtggtgaagggggagcccacgggcccttgcaacagtaaacaactctttgggcagtttctcctgaaaccggtcagccgtcgtccctgggatttgatcagtcagttagaaagttttaacaaggagctccaggaagaggaagaaagcagcagtagcagcagcagcagcagcagcagcagtgaggagagtgaggcggagccgcagcaggagaaccgtgctcactgcagacaggaggatgtgggcttccgcggaaacagcccggaaatgagggttgagccacagccgaggatgtgggtgccggagagccctgtgtgtaggtcgggaagaggtgagagtaagtctgagagctggag

SEQ ID NO: 4801 - DNA, 2300 bp, Homo sapien
tagccacaatccacttgtccttcaaagtcttccctggtggttccaagtcaaacagcagtagctgtacaagtgttaatggtagtagctactattttcttttctttcttttttttttttttcttgagacagagtctcactctattgcccaggctggagtgcagtggcatgatcctggctcactgcaacctccacctcccgggttcatgtgattctcctgcctcagcatcccgagtacctgggattacaggcacctgccaccacgcccggctaattctgtatttttagtagagatggggtttcaccatcttacccaggctggtctcgaactccagacctccggtgatccgcctgccttgtcctcccaaagtgctgggattacaggcatgagtcaccatgcccggccaccattttcttgactattacatgtacctgaactaagtgataagaaggcatcatctcattgaattctcatgactctcctatgagatgcaaaccatcattacccccactttgttagagaggaaagtgaggctaacagaagtaaagtaccacatctagaaagtggcagagaagccaagcccgggacctgagctacctggttctcgagcccctaatcatgctgcctgctcctatcgccaccatctggtttcctcccacgcactcctgataatgcacaatacaacattcaattacattgttcgttcttttccagcaatagtgtgtttagcttttatgctgtgttagattatacgttgctactaaccatgaggaacatatgattcaagagaacaaagaaacgaccttgctctggtggttcagagcgagggtcttgggctagattctgcagcttgccatctgtgcccgtccctgagcccactcctcatctgtaaagtggtgcccatatcatcaaactgtgatgaggattaaaagaaataatacataggaagggctcagatgtggtaatagagcaaaaaaagttagttattggtgtttcgacagcaaatacagtcctaaaatcatgatgtggctaagtagttttctgaaaactaatttggcaaggtcaccagtctgctgtgccatccatgttttgtctgggtggacttaactaacattccctgtctctccccaatgcatcagcaatatttcacattttttgtcttctgtctgccttccaaaattatgaaaacgttcgccctgagcagacccaggcagcagtctaatctttctgccccttcccgctgtaagagaaatatggagtgggtttggggttacccaaatgaccccaaatgttcattctggtctgaactctcccactgacctcctcctatctctcctcctacccctgccctgtaggcaaatcctgctcctgtcatcagtttcctcctctgccacaggagagtatgggccagctgatctgaaggtggcttccagactccttcagacttttttttgaaagaagtaaatcccaagctgttgtcaccatcactgttttctgctcttcataatatcgatgtgttatgtgggtgcgtttgtgtgtgtgtgtgtgtgtgtgtatagccatactgtgttcccatgtatgtatgtatatgtgtcagtgtgtttggctgcatctgtgcgtgactgtatatgggtgtgtttgtgtgcacctgcgtgtgactgtatttgagtgtgtgtgcacttgtctgtgactgtgtgtgcacctgtgtgtcctgtatatgtgtttgtgtgcgcctgtttcctgtgagtgtgtttgtgtgcatctgtgtgtgggtgtatatgagtgtgtttgcatacatctttgtgtgtttgtgtgatatgaatatgtttgctttctgtgtatctgtgagagtgtgtgtgtctttggacatttccacagggttgacgtggcccaaacccaagtgacaagaaaagagggaatggtggtcagctcacttgtgccttctgcgcgacccacgcaggcggaccccaaaagcctaggaagctcgtggcctggataccgccctcagcgcagaggaggcagccccgggcggtgggcggggcgggcccgggcggtgggcggggcggacggcggttctccgggcatgctcggcctcggcggctgcaggcggggcgggtcgcgctggtccccggccggccggagcggcggcggtggcggcgcgaggcggcatgagggagccgctcggtaagtcccggcgtctaaccctcctggctcccaccgtccattagggccgctcccacggcgcttcgcgggcctcacccgcagcctcccgcactccccccaacttctccagctgggacgt

SEQ ID NO: 4802 - DNA, 2300 bp, Homo sapien
aatgacaaggaggaggccctgacagggctccaaggcttctatatgagagaccagttgagagacagccatgttgagttcttagaggtgaggtcaggtacactgtgtctatccatcagtgtggctatgcaggaatgggagtacctgtgtaaaagactttctctgatgagtgaataagaaaattggagacttaaggcctgaatatgggttggtggtgtaagtagatgttctctccatagtatgatctttaggaattattgaaaaaaaaaaacctgcttattcctttcttccacccatttaaaaataaaaatcatgcaaaacaaaacaaaaaaccctctgtagcagaaatttttctatgaagaaccagttaacaaatagttcgggccttgctgggcctcacagtctctgccgcatctattccacgctgctgctgtcatgcagaagcagccagatacagtgtgtaaatgagtgtgtggttgtagaccaataaaactttattgacaaaaatagtcagtgggctgcctttggcccaagagccatggttggccaactctttttttttttttttttttttgagacagtttcactcttgtcgcccaggctggagtgcaaaagtgtgatcttggctcatggcaacctctgccctccaggttcaagcgattctcctgcctcagcctcccgagtagctgggattacaggcccccgccaccatgcccagctactttttttgtatttttagtagagacggggtttcaccatgttggtcaggctggtatcagactcctgacctcaggtgatcccccctcctcagcctcctaaagtgctgggattacaggcatgagccaccacaactggctggccaactcttgatctacagaatcaaatttgcaaaccatcgcctaccactttgtttgccagctcttttctaagtgcacattttgaatttgtgtgtgtaggtaggatggaaagagtcctctgtgggagggcatagggcgactctggaagagaagtgatgggcagaatgaagaggtcccactgagctgtgtgaagaaaaggatctgctaccagagagaaggacaggcccactcattcctccttgaggagtgcctcctggccgcttgtcctgctgtctaaccgtggctccaaactgactggttgcatcttggccaactgctcctaggcagggctgcatttcgtccccgaggtgacagtgcacatgataatttatattttggtgcaaaagcacctcaagctcctttgagataaaagactctatataaaactgagttatgaccctgcttaataggagcactgttgcctttttccaaaagtggagttaaacccctctggcatctgcaaagggctggctgtaaaggatcgttggccctttcagccgccctcatttttgctgttgattctgtgtgccataaatcattctcttccaagtccaaaggcggcatttgtatttgccaaaatactaaggaggaggatctccaactggttgaagctgaggttggatctttgctttttaagttgtgtgggaggtggggagcacgcgtgcgtgctcacacacacacacacacacacattaatcctcccttaataacattccagaatagctattcccttaccctacaacttcctatggattctcatgacactggttttgtttttgcacaaaagatttgacttggtcagtcacactcctttgttattttgtacttttaaccccctttctctgtggagaaaggctaccacgagaaaggtaactttctcttgtccaaagcccaggaccacataggctcggtaccaagcttcttttgggacagtatttgacagggcataccaacacgtctttttttagaaaagaccataagtgtcttatcttactccttcggaattttccgcagttatttaatctctagtttaggaaaagttggtttgagggttcttcaaatctcctcgaacctcttacatcagatctgtgagcttgattcacttgaggtggatgggggctgtgtttgccagcatacctcatttccatctctcctccctactgactagaaaccttgtggttaaaataacacacagcctctattcagagctcaaacttagagctgctatcggaggaggattttagatttaggaaattctcagcagagcatccgaggggcttttgaaaaattcaattctttagacgctcatgaagaaatcagggatttcctcaggtaaatattttcttcccttttccattgttttgttgaaaggatgattaagaaaatagggccggtaatcactgaaaa

SEQ ID NO: 4803 - DNA, 2300 bp, Homo sapien
cgcctgaggttgggagttcgagaccagcctggccaacatggcgaaaccccacctctactaaaaatacaaaaattagccgggcatggtggtggcgcctgtagtcccagctactcgagagtctgaggcagggcaaatcacttgaatctgggaggcggaagttgcagtgagctgagattgtgccattgcactccagcctgaatgacagagtgagactctgtctcaaaaagaaaaagaaaaagaaaaaaaaagtacaagacagaacctttttctcattccccaaaaggcaaaaccaggtgccagggagagtccccccagaacacagaacttagggataccaaattggttggccaaaaaactaactccactttcagaccaagaaacagaattcccatctgtgaggatatgacataccttgtttaccatgatcttctttcccaaatggaaggatttaatgtatgtgccctcttcttttcccatgtttataggttaatataggatacatttatcgtttgcgactgatatattttcaacattcatcctacgtcttggataacttctcacattatgagttctacattcccaaggtagaatacaggaaattcacatccccagaatcccttgcctctacagggcagacacatagcttaacttccacctatcagatacacccacgggaaatgtgaaaacagaaaagagcaacaatgaagaattgagatgaatctttcagcaactgtggaggcagtgtttggttctgtaaccgcccaacgggttctccttgcctgatgcctagacagagccgatttatctagatagtggaattgcaatagagaaagagtttaatttacacaaagctggctggacaaaagaccagaattttattattactcaagtcagtcccctcaaaaatttggggattgggggttttaaggatgatttggtgggtagggggtcgggaagtggggagtgttgattgattggtcagatgagataatagggagtcgaagtggattttccttgtcttctcatcctaagtaggatcacagaactggttgagccaaattacttagtatgggaggcatcctctggtgcatcaaaatgcagcatctgcaaaacatctcaagtgctgatcttaggttttacaatagtgatgttatccccaggagcaacttggggaggttcagaatcttacagcctccatccccacgactcctaaaccacaatttctaatcttgcagctaagtggttagtcgtacaaaggcagactagtccccaagaaagaagggagtttgttttgcaaaaggactattatcgcctttgtttcaaagttaaaccataaacaaagttcctcccaaagttagtttggcctgcacccgggaatgaaccaaggtcggcttggagaatagaagcaagatggagccagttaggtcagatctctttcaccgtcataattttctcagttataatttttgcaaacgcggtttcagttccatctgggcaatagtggtagtgcttctggcacccagcccttaagtgctgtagaagtctggtggcagtgacgggagtatttttgctggacctgtacctgcggcatgattgggcattgttcctaatctgtagctttagaatgtggctctttggtcccctttgagatgctgtttgctatctgatgtcatttactaaattcattttttgtttaatatagtccagtagattccattgtttgtaattgagaatcctgagcaataacgttggagtcagtaatttatcatttaatcctaatttactcaataatgaggagctacatcctggcctggcattattagctgcagaggctggagttgcagctggctgaagtttgtgcctctcagctaagtatgagcattttgaaggtgtggatattgattaacaatattcccaacatccactctcaacatccactctttccctcttccactgtgttgaagccaagaggttttagttggattaattccatccccagctactgggatagatcatgattggtctaaaataatctgacaacagtgattggttcagggatggacgaattagaacatagtttagaactcctgttccatggttatgggaggtagcaggatctgccagcagccgtcttgggaccctgaaggaaaccatcttgagcgtgaagccggtcacagaggtgggtagaggtaagacagccacagaaatagagccagatcaaactgcacttgaagcctactacctatgaaccttttagttattactgagccagaagatcctttttagtcataagccatttt

SEQ ID NO: 4804 - DNA, 2300 bp, Homo sapien
cgtctgtaatcccaacattttgggaggccgaggtgggtggatcacctgagttcaggaggtcaagaccagcctgggcaacatggtgaaaacctgtctctacaaaaatacgaaaattagccgggcataatggcaggtgcctgtaatctcaactacttgggaggctgaggcaggagaattgcttgaatccaggaggaggaggatgcagtgagctgagattgcactaacgcattctaccctgagcgacagagcaagactctgtctcaaaaaataaaataaaaaaaaagtacctactgccaagtggctggagaacattttattctgctaaagggattaaatatcccccacaaaaattaaaaagtcctcacatccatccccaaactcattgcttacgcaggactttccttggaagtatcaaaatcaaatatacttctatctaactttgagattcttcaacatccatgtgggagtggcaggactctgtgtggcctgagggtggccttgagtgtgtgtccgagtggaaggcccaggatctggggactgacctggggtcaaatggcacagccaactttttttttgagacagagtcttgctctgttgccaggctggagtgcagtggcacaatcttggctcactgaaacctctgcctcctgggttcaagtgattctcctgcctcagcctcccaagtagctgggattacaggtgcccaccaccacacctggctaatgtttgtatttgtagtagagacagggtttcgctatgttggccaggctggtctggaattcctgacctcaggtgatcctcccgccttggtctcccaaagttctgggattacaggcgtgagccaccacacccagccagcacagccaacttctaatgaggccaccttagacaagttacttactgtctctaagcctccgtgttctcatccatgaaatgggtttaatcactcagatttgttgagatgattaaaaaggaaaatacctgcaaggcaatagcaccatgctaacacagagctggctagtcagttccggtgctggtttgtcctctctcacgctccgattgcgaggccccttgcttttcctttcgcctccagcagcagtgtattcccccggggaggctgccttcagttgcaggcttctttgcactgtttcgtatgtccttttcccaggcacccgagcaagggccactggttatgacacaggcactgaggaggagccttgaatcaagggcagagctctgactttaaactttgactccccaggtgtgacctatagccagtcgttgtctgatctgtgccccactttctcatgtccaaaatgagaagactgaaccagtcctctccaatgcctttcgtatggctttaagatgaggtatgtacctctcacttggaggaggggctggcaaaaccacttgaattttaatttgaattgaggcatattggcagaggttgtaaaatgtcctcacatggttcaaggaagatgatgatgccctgcctgctcctggtgcccctttcagagaggttaaaagcctttccattattttaactttttttttttttttttttttgagacagggtcacgctctgttgcacaggcttaagtgcagtggcgcgatctcggctcactgcaaccttcgcctcctgggttcaagtgattctcgtgcctcagcctcccaagtagctgggattacaggcatgtaatcacgcccagctaatttttttgtattttttagtagagacaaggtttcgccatgttagccaggctggtctcgaacccgtaacgtcaggagattcacctccctcagcctctcaaagtgctgggattacaggcatgagccaccgcgcccgggctctggttctattttcatgatgctatttacaagagtaggtggagcgctccttctatggaacttttcatttggtaaattgtgtgactgtggaagtaaaccatgtctgaaagcttaggtatcttctttccggcctcaatttcctctcttcctctaaaagcgaacttctttcgcctagtttgaccctcgaggcttcccatttcttttgccccccccctcccccccgacgcatgcgcgaaaacgcgctgacctttcagcttcgcgctagtgctgttttttttttttttttttttttagcaatggcggttcccggcgtggggctcttgacccgtttgaacctgtgtgcccggagaagaactcgagtccagcggcctatcgtcaggcttttgagttgcccaggaactgtggccaaagaccttaggagagacgagcagccttcagggagcgtggagaca

SEQ ID NO: 4805 - DNA, 2300 bp, Homo sapien
aaatagaagtggtgttgcttgccttccatttgtgaagtttaaatgagatttgtaattgctgttgtttttatgttaatccctagtacatggcctgctgtaaacacccaggacagccaggaaatgtttgttgttgtttgattttcctcatccccagtctcaacgggaagccaggccgatgagaacagccacttgtcatcaggctctccctttagaagtcactgaaagggccccaggatgtggtgaggagggccccaggcactagaattaagagaagaactaacttgccaccagattgctcggtgaccacagaaaaatcacttcttcccctgggcctcagttttctcctctgtaagatgatactggataagatcagtgtctttaaaacttgttttttagctggagccccctttgttccaatgaacccttactcagaagtctgtttttttttaaatggagatggtggtctggagctctactagattcatcgcccatgtcctgggcctgaggagaggggtccggtgagcagattaagagctgcattggtcaggggactccactctgtgactgcattgctcaggagactcttctatctatttgttcctgcccctggcaaggcagcaggtggccatttggaagaatggcacaggccatggttttgatctctgctgttcctcagcgtttcgtttccctgaatccacattttcctccttccctgactttcttgcttcgctctaagccacttctgtctttctccccctgcccttgtttttctctttttgccttctgtagattcaggacattctgaaggtgctggtgtccaaccttaaccattccaatggggtagcgctctcccattggacaaatggaaggtgaggcagtgctgagacccctctctggcttgctctctccagctgtgcatgcccctgaggcttctctggtttgggggatactttggcttattttatgttgctgccattaaccttcagcctgtctgcttcttcacctgcttgattaattgagttttttccttccctgcatcttttatcatcttggagaaggtgagacataccttaaagtttaaaagtaatttgggaataatgtatagagcaggcatgtgggatctggggctttttgttgttgtcgttgttgagacggggtctcactctgtcacccagactggagtgccacggtgtgatctctgcttacttcaacctctgcctcctggattcaagtgattctcttgccttagcctcctgagtagctgggattacaggcacctgccactacgcccaactaatgtttctatttttagtagagacagggtttctccatgttggccaggctggtcttgaactcttgacttcaagtgagccacctgcccccacctcccaaagtgctgggattacaggcttgagccatcatgcccggcctgggacttgggcttttgaatgcccagtgtggtactctcagactaagagagatgaaaaacaaaaacaaaactgacctttaggttttgtcctaaaggcaaagatctatagaccacataaaagtttgtgcttattttggattaattcactttggtttaagagtagggaacatagggttaagataaaatgagttcacattatagctggaagggttgaagctattttttcagaggaactaactgtaaatgatgtgaggttaaccaaacagatgagtgactaagaccataacctcttgaaaatcaaatggacacttagcatatttattgggcttttgacaacaaaggcactttgctaaataaacagtggagagaatagctgaacaaggtagggtgcagactgagggaggcagactcctctgaaggaggcaagaaagaagtttggaacattccaaatgctcagctcagtgggaggttggttctgaatggacttgagggtggaggaggtgacatttgaggttggctggaagattaaaggtgggtaacattcatccatatggggagtgggggaggaagggggagcggtgaggtcatggccatcgttatgaactcatagagcacctttcaggagcacaaagagcttgctgggagacagggcatagggacacatgggcttggagatgacctcctctggctgtgatttggcatttcctccgtatctaacttgcctgggagactcctgccaagccagaggagcagggcacaaatggaggcagatcctgctggagatgggcatggggagggggactgacagagcacccttggctgctgttagacagttgttcagtcatcacacctgttaacccaagttggtcag

SEQ ID NO: 4806 - DNA, 2300 bp, Homo sapien
tggtgttttatttttattttattttattttttgagatggaattttgctcttgttgcccaggttggagtgcaattgtgtgatctcggctcaccacaacctctgtttcccaggttcaagcgattcttctgcctcagcctcccaagtagctgggattacaggcatgtgccaccacacccggctaattttgtatttttagtggagacagggtttctccatgttggtcaggctggcctcgaactcctgacctcaggtgatccacctgcctcggcctcccaaagtgctgggattacaggtgtgagccaccgtgcccagccttggtgttttattatagaactcctagtgtgcctgagacttacattgtgaaagacacttttttaaaacttgagatgtaagaggatgtaaatggtattgtgtaagatcaggctggatgagaactgatacttgtaaatatactttttagatgaaatctctgattgccacttgttttcttatttaactcataaaaataaaacacactggatggaggatgggagtaggaaggagatttatttcttttaattgcatgtcattgtttcgtatcaagacagaatatatagtatccctggctttgaacctacaggaggaaatacatttttctacctcctgtatgccacaggttcttgaacacctggagggattactgcaacacagattgctgagccctactccagagtttttggttcatcaaagttcagggtgaggcctgagaatttgcacttataaaaagttctcaggtgctgctggtgctgctcgtccagagactacatctttgagaaccattcttgtctactaactgtaaattgtagaactctagaaaaaagcttagttcggtctgggataagaagcacacgttatggagcaaatcatgaaagattcaacccttgatcccagcctactatggaattcaggtaacaagcaatacacagtgacataacataattcttagttttcatgattccaaatcatagccaagtatcaagtgagaaattcagtatcatttgtaaggcttagagaggccaggtgattctagaaaaatgggccttgtatttgttttaaactggtaaagagctttaagtgcttattaaattgaaagctttgtgtttatatttattttttattttattttattttttgagatggagtcttgctctgtcacccaggctggagtacagtggcgtgatcttggctcactgcaacctccacctcccgggttcaattaattctcctgcctcagcctggtgagtggctgggattacaggcacccactatcatgcctggatagtttttgcatatttagtagagatggggtttcaccatgttggccaagctggtcttgaagtcctgacctcaggtgatccaccccctcagcctctcaaagtgctgggattacagggatgagccaccacaccaggcccaaaagcttagtgttttttaagatattagacatgtttcttgtttaaaaaatatcttaacaataatgtaggagaataagagaaatatttttctaaaaaagggaaatcactgtaattattttatcttattggaatgttgaataatatagtctgctttattaatcatcaagcatgctatggattttccatttttataggatttgtatcttaattgaggtaatactggtaattcttgtactccatttgaagatgtaaaatataggccaaactcatagaccttgcatagaagctggataacgaagacagctctggaggaacatatagatacacacacacagacacatatatatatataaagtatacacacttttttttaaagtttcttttttaaagttttaaagcttttaaagcaaaagctgacccctcccctctcccggagtgggcagcccctcccctctcccagagtgggtggggacagcggttgcatggacagctttccttgtgacacaacaggtccctctggacatgctgctgcctggccacacctcctttcgcattcatcattctcatcgaccaatgagcttggatcattaaggccacgcccctattctgagttctagtgggaccctggttacacctcctctggctcagttgcacaactgcctggcatgtgactggaggtactttgcagtcattgctgggatttcactgatgtgaccccaacgctgcctccctctccaccccacgatgttggaagaaactcaacagagtaaattggctgtggccaagaaaaaggtaaaataaaccaggacatggccccccaacccagccacaaatcccctccagtgg

SEQ ID NO: 4807 - DNA, 2300 bp, Homo sapien
gggtatatacccaaaggattataaatcatgctgctataaagacacatgcacacgtatgtttattgaggcactattcacaatagcaaagacttggaaccaacccaaatgtccaacaatgatggattggattaagaaaatgtggcacatatacaccatggaatactatgcagccataaaaatgatgagttcatgtcctttgtagggacatggatgaagctggaaaccatcattctcagcaaactattgcaaggacaaaaaaccaaacactgcatgttctcactcataggtgggaattgaacaatgagaacacatggacacaggaaggggaacatcacacaccagggcctgttgtggggtggggggaggggggagggatagcaataggagatatgcctaaggttaaatgacgggttaatgagtgcagcacaccaacatggcacatgtatacatatgtaactaacctgcacattgtgcacatgtaccctaaaacttaaagtataataataataataataatatatatatatatatatagaatgtcatagtaacacattctatggaaaaagagcagttaggagaatggagaatatcatgccatgcttagaggtaaaagggttgctattttatagggtgatcagaaaatgcttctctaataaggcaacatttgaacagaagcctgaaggaagaaagggagtaagccatataggagagtacacgtccaggaagggaatacagtaagcgctaatatcctgaggtggaaattttcttggatgtttgagaaatagaaaggagattagtatagcaaaagccaagtagttgaggcagagagtgccaggaaatgtgctagaaaggatgtaggaagcatgttcacatttggttttgcaagcgtttagcttttaagcctgggtaacatgacaagaccccatctctacaaaaaattcaaaaattagctgagtgtggtggtgcacatctgtagttccagctacttgggaggctgaggtgggagaattgcatgagcccaggagctggaggctccagtgagctaagattgcaccactgcactccagcctggatgacagagggaaacgctgtctcaaaaaaaaaaaatatatatatatatatatagaatttatcttttactcaagtatgaaagaagcccctggaagatataaaaaagaagtgtagcatgatcacaacactctagccagtgtgctgagactagaatgtaaggagcttggaatagagatgcaaacaagttaagaggttatggcaaaaatataagtaagcagaatgcagcaacatataaaaaaggcccatatcatgaccaattgggattaatcccaggaaggcaaggttggtttaacatctgaaaattaaccaatataattttattaacagaataaaggacaaaaccatatgatcatctcaatgtaagctgaaaatattgacaaaatttcatgataaaaattattaacaaacagaatggaaggaacttcttcaacctggcaaagggcatctacagatcatcccagctaacatacataatggtgaaaggctgaatgcttttcttttaaggtcaggtacaatacaaggagctgcattccaaccacttctattcaacattgtactagaggtgctagccaaggtaattacgcaagaaagtgaaacaaaagcttccagattagaaaagaaaaaataaaactatctttatttgcagatgacatgatcggtccattctcatgctgcttataaagacatacccaagactggataatttataaaggaaagaggtttggctcacagttccccatgggtggagaggcctcacaatcatggcgaaagagcaaggagcatctcacatggcagcaggcaagaaaagaatgagagccacgccagagggaaaccccttataaaatcatcagatctcgagagacttattcactgtcaggagaacagtatggaggaaacgcccttatgattcaattatctcccactgtgttcctcccacaacacatgggaattatgggagctacaattcaagatgagatttgggtggagacacagccaaaccatatcaatcttttttttcttattctttttttttttttttttttttttgagatggagtcccactctgttatctaggctggagtgcagtggtgtgtgatcttggctcactgcaacctcagcctcccaggttcaagcgattctcctgcctcagactcctgaatagctgaaattacaggcacctgccactacgcctggcaaatattttttgtttgtttgtttgtttgtttgtt

SEQ ID NO: 4808 - DNA, 2300 bp, Homo sapien
gtgctgccgggttggtggaagctgccttccctccctccaagatcagaaaggcggagggttcaggaaggggttctcctctaggtgcaagggactgcctggatatttggagggaatggcaaagccctgcttcatgaggtgaatgaatataaattaaatcgctctcgtatttaaaataacttgacggatgacagtgcccattcagtcaatcggccctcgacgttggatttgctacctgggcttgttgtctgcgagttaaggtcctgcaaaaagcccctggcttgtcacctcaactaacctatctcctccagcaattctctcaatacatcctcgggttgtattgtaattcattttccatagcagaaatgtggagggctctagagaaggtacaaggcaaattttttttttaaattttatttttggttggccgcggtggctcacgcctgtaatcccagccctttgggaggctgaggcggacgaatcacctgatatcgggagtttgagaccagcctgaccaacatggagaaaccccatctctactaaaaatacaaaattagccgggcgtggtggcgcatgcctgtaatcccagctactcgggaggctgaggcaggagaatcgcttgaaccagggaggcggaggttgtggtgagcccagatcgctccattgcaccccagcctgggcaacaagaacgaaactcagtctcaaaaatttttttgttttattttattttttaaatttgagacaaggcctcgctctgtcgcccaggctggagtgccatggcgcaatcatagctcacggcagactcgaactgctgggctcaagggatccccctacctcagcttccgaggagctaggatgacacgcgtgagccaccatgcctggctaatttttagattttttgtagagacggggtagctatgttgcccaggctggtctccaactcctgacctcaagtgatcctcccgcctcggcctccaaagcgctgggattacaggcgtgcgcaaccgcgcggaggcaatctagaaactgcagagggagcacggacctgggcactgggaagaatagggcgtggacttggagtgtgaccgcgtttgaatctgggttgtgcctgggacaccccacctcctgggccgtaggtggggggggagagagagagagagagagagagagagagaggatgtcgaccttacatggctcctagctctccgcgctctagccgaatgcctggttcctagtgggtgcttgatacgtgggaaatgtagggggagggggtggcggggcattgggaatgtcccgcagagtggatttcgggagagtggcgcttttctctagaactctcttccggttacacctggagtaaaagcttgacactctagaaggaaaaccccagatgagcagctaggactgagggttagcggtaggcgggagcggggagatagtacaagtacgcttcctaatgaggcggtgccgcaaaataaccaattttaataaagactgcagagaagaaaaccaggttctgctggcggagtgcacaggctcccagccgagcgcccaacaaccaggttccgggcccaccctgccgcagcctcttggaaatctctaagttggaatgtgtgcgtgcgcaccacgggtcactgccctctttgtgtgtgaatttgaagcgaaatctgggcgaggcggggccgtgctactagcaatcggacccacagtcgcggttccaagaagccccgaagcttccccggcttcccgcagcactgctgggagggcacacggcgcctctgtccccaccccagagcgtggggcgcgcggaaaaaggtctggtgactgccctccccgccgccccccgggagcgtgccctcccgccggaccctgggactccagagaagcgccgagggcgcgagtacactaagatatacgaccttccctggggaccgggaagggcacaaccacctcttgcaactccgccactaagacgccttgggtcaccaggcccgggggaaaactcgtccccgtcccaggctctcgattcgggccgcagctcacgtcccgcgctcctccctgcgcgccgctctgctcctccctagtcccgcctccagctccgcccgggcgcccagagggcaaatgaggggcggcggggtggcgggtgggggggagacgcggaatttcccagcgcgggggctctggcttaccctgcaaccgggcagtctctttctgtttacggagagaaaggggaaatggaaaagtcggggaggcggtggctggcgtccgctgcgccgcccctgggcaggctcagacgccgtgag

SEQ ID NO: 4809 - DNA, 2300 bp, Homo sapien
tcttaaaatcatgtagaatgagtccttcaattttgttctttttctgaatagttttgtttattgtagtccatttgcccttccgtataagttttaagatcatcttattgatattttcaaaacaattttctgggattttaattggaattccattaaatctatagattaaatcttaacaacatagaatttttaaattcaggaacatggtatttcttttccacttaggtcttctttagtttttcatctgtcttacagttgtcagaatatatatcctgcacagattttgttaggtttacatttaagtacgtcatattcttgtgtgtgctgttgtaaatgatattttttattttagaagaatctaaaatattttgattcctagtatataagaatagaaatggcttttgtatatttactatgtatccgaaaacttgctaaacaagcatttttgaaaaaaaagacaatctgtctctattttctcattgactataaaattcctatttcaaagcactttgaaaaagatgtttgaagaaaaacctatgtattttctcgtattatagacaattcacaagaaaaagcacacaggccagatgccgtggatcatgcctataatttcagcactttgggaggttgaggcgagcagattgcttgagatcaggagtttgagaccagtctggcagacatggtgaaacaccatctctactaaaaatacaaaaattatctgggcgtgggggcacatgcctgtaataccagctactcgggaggctgaggcacgagaatcgcttcaacctgcgaggtggaggttgcaatgagccgagatcacactactgagctccagcctggacaacagagggagactctgtctcaattaaaaaaaaaaaaaaagagagagagagagagaaaaaagtccacaaatggcttctgaagataagaaaagatgctcagacagcttgaaataagggaagctgaaattgaaactttgctgacaaattatgtttcatctctaatattagcaaatatcttaacctttggtaatagggtatgctagccatcttcgtcatacaagcccacgtggaaggcaatttggcaatatctagcaaaattacaaaattacagtccttaacccagcaattcaatttccaggaatgtatcctacagatattcttgcaaatgtacaaatgacaaatgtacaagattactaattgtaatatgtttatcatagaagaaaaaaataccttaagtgtgagtcaatatggaattggctaaatatgttatatctacacaatgtaatactatataaacttaaaactagatttcaacaagatctttgcattatttgcagatggaatttaataaaatacaataattagttaggtacaactaacaacaaacttatactgagatctacatattccaatgagaattcatttcaaatgtgtcattaaatctgaacacagaaataaatggaccttcaaactagctctttattgagtcacaaagtgttaagccaaatttttaaaaaacaatgaaatcatgttaattatacataaaaattttttatttcttttgtggccctcctttgacaatattttattaattaacaatataactatagcaaagaaatgtgctgttaattaatttttaatgttaatttcacctctcattcattttcagattttagttttgtgtatgttgataatttatgtagcatattagtacagaggtacagaagtgtgatttataatttaatatacatctaaagaggatacatgcttaactttattaatggaatttgtgataaagtttgcagactgttgccttagagaagagctctcacttggacgggaggccctggccaagttgtgtagtgaggacagttgttgagaggaaaagagaaaaaacgagaggtattaaggcccagaagagagttagcacctgcttcagaacacaagcgtgcaggatgatatagcttttagtgccaagaagtagaattctagcatctctaggtggtgagaaacaaaggactaagaatttttctttctctaacactctaaagaaaggttcttgagctaggaaaggattactcgagccttgttagaatcagacatggcttcaggggatgcaggacgctcccctgagctgcctgtcaccgactaagtggagcagtgtttcttccgcagactcaactgagaagtcagcctctgcggcaggcaccaggaatctgccttttcagtaagacctaaattactcttatgaagccacctgtccctgagaaccagcaatggcaggttcttgaaggatgtaga

SEQ ID NO: 4810 - DNA, 2300 bp, Homo sapien
ctacttccatatgctgatcattcaagatttgtgccttttttttcccaacaaaaataaatgtcaacaacctgatagtctctagcaagagaaagtggaaaactagtatatctgctgagcatctaacatgtagcaggaactacttgcaccatcatgggtatttttctcatttaatcctgacagggacctttgtaggcagatattattatgcccatttcatagatcctaacatttaggcacagagagtgaagtgccaaagccacaggtacatgacagagccaggagttgaaaccaaatctgtctaaaccccaaaacacacagtctttctactgaagatcagatgctggccataaccacacatagtagcttacagtcagcatgcagaggtagaaagagcctttggaataaaatgggctaggatttgagttccagcactgttacttatgagcttagaaatccttgtaaaacagacttggctgggcacagtggctcacgcctgtaatcacagcactttgggaggctgaggcaggtggattgcttaagtccaggagttcaagaccagcctggaaatatggcaaaacaatatataaaaaaatacaaaaattagcccagcatgttggtgtgcgcctgtagtcccagctacttgggaggctgacgtgggaggatcagctgagcctggggagtttgaagctgcagtgagccgtgattacaccactgcagtccagcctgagtgacagagtgagaccctgtctcaaaaacaaacagatacaacagtggttcctaattcaggttttttgggtattaagtgagataatgcatgttatatattttgcacagtacctaacccataaaatctgcttatcattgggataatattaaagaaacagtattgataaagaagctcagctcctcagaaaatgagaatttccttccctgcgaagtgaggtgatggatgcactgtttgacaagacaaatctcaaaggcctgtgctgagtggaagttgccctgcatgtcactggtggtgttaaggagggagaggggagttagctaagagcaataattgagcagaacacacaagtatgtcaaggagaatggactaaactagattcaggatacaagatctccagttaggaatgtgcttgtttcctttgcattgtctcaaatttcctgaaacttaggtctgagacatgatgactctaggaggtctccatgctgcagatatgtggactagaaatgcatttggcatcctgagtccttagaaacaaaagaacacttgtgcctattgccggcacgttttacagtgcatgctccatagtcagtgctcaataaattcctgttgactctgactgctgctgcagaccctggacagtagcttggggagagggtaggcaatggctaaaggtgtttataggtttttcaacaaaattaagttgcactcccttgtgttatgagacattgcttttatcccagacctctccagggttttaccatatttattttaactagagaccatcttgggaaacagtttgaaccccaagtggaatttattatttgaaagccaagtggcagggaaaacagggataacaacgaatgaaattgaaaatagagtatttcagtttaataaaattaaaaccagaacaacacctaaaatttttggctctttagtgaccaagacttggcagaactttcctcgtgagcctggatccagggggcctgtttcaagagcagggacacgcctctctttctctgcctgctcccttctgcactcttagcagtaggcctgtgggccccagcagatggaataatggaactttgcccaaaccagcgaccagaagaggttgaacaactttattcagaagcaacagagcaggctttggttctgccaatggacatcaggaagtgagctgtttgtagctatctagagaattgcctcatgtgcttgtctcttaatactatttgtggtagctgcattgtgaaacagtttaataaagctgggtaagacattggcacctagtgctattgagccctcattctttcctccactgcctttaacatgtaaatgatatccatcagatccaatcctttgatggcaatggaggaggaggaggacacacgttgcacattctccaaatatccaacagcctttctggatttctcagagtcctatggatagtaagtggcaaattcaaatataaaaatatgcttttgctttcaaatgactattaattttctgtgagttatctctaataagtgggctttcagaaagttagtataatttaatggtaatagaaattttaggccag

SEQ ID NO: 4811 - DNA, 2300 bp, Homo sapien
gcatgactgcaaatggtacagaatggtgaaaaatttggattgctcaacacattcctagttgacaagctgatttccttcagctctcatacggtaaacaagtctcctttttgtggtttatatagtgccatgatttttgcttttttaggcttatgatttctgtgtttaaaatgactacccagtgtggaactgaagtgctgtatattgcgcctaagtgcaagaaggctgtgatgtgccttaaggagaaaatgcatgtgatagataaacttatagtgctgttggctatgagttcagtgttagtgactcaacagtgaacagccatacattgcttaacaacagggttaaattctgagaaatgtatcattaggtgattttgtcattgtgaaagtatcatagagtgtactgatatgaatctatagcttactatacacgtaggctatttggtatagcctcttgttcctgggctacaaacctgtacagtgtgttactatactgaattcgtaggcaattgtaacacaatagtaaatatttatttatctaaacatagaaaatgtacagtgaaaatatagcttgataatcttatgggaccacctccatcatatatgcagtctgttgttgactgacacatcatgcagtggatgactatatattaataaggtatcttgaaacagaaatatacataaaatgaggttatgtttgatcagctaattaaaatgtaatcagaggctctcaggagctctcaggaacccaaccctgaatttcccttatgagtaaacagtttggtattccctaattcagtgttcatggtgacttcatagaacttaactactgtgaataaggagaaccaacggtaattttgtctttgttgttgaacttctaaactgatttttaagtagcaattaaagcaatgtcaagtgtttcatattctacagaatgaacttccaaaagctttactttggtttcatgaattagatgaaatcatcaaaccattattggaattaactgatttttctggttggtacatctcctgatgctgacagaaagctggcaacatttaactgtgagtttttctgttaatggagccaaccagttttcactttactttgatgatgtaaaagagacgctttagaatcagaactaagtgcatttttttaaaaagtcattggatctagatgaaaagtcatgctttagagaataatacgtaaaacactttctctgtcctgtctgctttcattaaatccgtgtctttaagctagccatgagcagggagcagtattcagtatttcttctaccttcattcaagactggaggagttagctgtccctacctgctcctgcctaggtatactttttctgcatggtgcctgggtgctgtctttaagaatgaagtatcagttacagtacatttagtacatttagaaatgggttactgctaggtgtcttaaagatttaagcaagttgcgaaattgacaactggcttcattgcacatgcatctcacacatggctcaatgagattatggcagagcctaaaagtacaagtaagtcttagcatattttaatgctatcattaaaaaaaatcattagaaaatgaaaaatccaggacaaatggtaaatttgtgggacactgggacaatggccgtaaattgggactgtctcaggcaaactgacacactttactagacatgtgtccttttaaaaatcttcaaatcccaaactcttgattactgttttcctgtcaaaaaggctgcgccctgaatatgaatcacttgtttgtgactgtttactaatttccacagtattatgcacatggaaaagaatgtgaagcattcttcttagccagttttattcattgtggcatttctttttttctggaacattttctatttatcttaaaacttttattaaattttgcatgctttcatttttaaactaaagacatgtaatcaactatggaattattttcttctacattagttcttttattatcttaataaaaatatacagtaattaaaaatgaaacttgaaaagaaggcaccttttacatatatttgatgaaaatggattatctgaatatgattataataatactttgtattgttacagaattaattaaaaggatttacggtatatcttatgactctacaggagccttgggatataggtaagtgacaagcattttttgaagagagatttctgaaacattaagtaatttgatctcataggttcctggcaaagtagacagtggggcatatcttacttcagcaattaactcttttctcttcagtataacatttgtagaaata

SEQ ID NO: 4812 - DNA, 2300 bp, Homo sapien
gaaaatgaatttttaaatattttaaagttataggtaacaaacttttatttctttattacaatctttatgatacaatatataatttttaaaatcagttggcacacttgacctccctctcttctcatcagaattaacctctctgtgtcctgtccaattatctgattgaactctcaggaaatagggtgggcctccccagaatgtgggcttttaaggatagctgcatttatgtgactgaattaggtccccaagcattttttgagcttttactgtgcctgggtgcatataacttgaaagatatggtacttagtattttatagtttgtaaatacattcacattatcagcgatgagttctacagcttttaataatgtcaaatataaatggtagttgtttttttaaaacattttttgagtatctaccatctgccaatgactgaaatacagaattcctttaaggaagtccttgtctgacaggaaagacagacatccatgggcctttcatacagcaagatgagtgttgtaatcgtgttgtaatgagtgcaatgggttgtagagtgaatggagaagcagttatttcttaagagggctggtgagatgagatgactgttctctggtaagataactctcgaacaggactttagaagatgggcaagatttttgcaagatggataggagaaaaggggaaaagcatgaacagaaaggtagaagtgtagaaatacatgatgtcttcagaagccactaaaagattttggagagggatatgacatgattaggtttgtatttggaaagaaaattgagatcagtgattataacaaggaaacacaagaaaagttttttttttttttgcatgcttttctatgtgacaattttgtgagcatccccagattttaaattgtaacatagataggacaggctttacattatgcacagttctggccagccaaccatatgccctctcatagctgtacatcagagtgtcccttctaaaagtctgggtgaacagtgggctacaggaatgaggtcagctaagaagccattgcagtgttccacatcaccacaggaagtgatggcttaatcagggccatgataacagaaatggatgggagggaatatatttgcctatgtagacttggtatcagagttttgtgggggtagagagaaaaaggaattatacatcagtgtttctcagattttaatgtgcatgtgaattgtctagggattttgttaaaaggtagattttgattcaataggtctggcagtggggcctcagattctgctcccaagtgatgccaacactgttaggccatggtccagtgaataattaacaaggacgagataacgtgggtgtgagactccgctggctagatggtgatgtcattatctgaaatacctgaaatggggaataccagagaaaagaaagcttgggcagggggatggggtgaagtttttgtgggacattcaggtataaaaattgtagacagctgaaagtttggattctaagcttgagagaaaaatcaagcatagagacacaaatttgggaataagcatttcgttgccgacataaaagtcatgagaatgagtgacattacctacaaaaaagagataaagttaatattagaaaatatacctattccttcatcattcaaaggcctcatcttctaaaaagacaaataaagaaaatatacctatttgctaaaattttaatgtccatttaagtgactataaaccagcaatgggaaagaaattggataggtagcttcctccctatgaacaatctctaggtgtaaattgaggggaggagaagtcttctttggaaacccccccttttccttggtaatgaccatagatcaagttaaaaacgattaaagtatcttatgagaaatcattcatataaataaatatgtgtaaagaatcgtcaaaatgccaggcagtcttctgaccttaacattaatagcaaatgaaatgaatccctgaaacagtggagcttatgggggagattgacaaatgctgtgttaggaaagtatagtgtcatgtgagagcacacacatcaggaacacatgactcagtgtggagacaagggatggccttcctgaggaagtagcattaagctgagaccagaaggctgagtggtggtgacctacaagaagaagaagggaaggtcataacagtaatgacttggagtggagaggccctgcaggttggagaagttcagtgtggctcaccatggagtgtcagagtgagggagatgactgctgagctccgagaggtgaacagagcccctggtgaggcccactcctctggg

SEQ ID NO: 4813 - DNA, 2300 bp, Homo sapien
tgagaagactatattctacaatgccatctttcagaggcaaaagtatctatagtaaaaacatttgatacatttggtgtatgcttcttacccatttccactccaaaaaataacagatgacatgtacctgtgaaacactcccataaggtatacctagaaactcacttaaaaaaattacgatttttagaaatgatatatataaaacattttataagcatgtaaactattaacaatttaaaggtttcttaaaattgttttgcaaggaaaaacataaatatcactgttttaaaaatatgcaggactttaaaaaatgttaatttttctatacctctgctctacagaaaaaccttattgttacaattatggtacagcctttacaaatttcttttacatcatttgataataactaatattcagataaaatatacaaatattttttcaaatcagaacatttaaaaacactgacgtagatttttctggaataataaacgtttttatttttaaccagctcagatctcgaattaaagcctaatattcccatcatcactctttcctgtaaaaataagacagcactttcaatgagagtggaaataaaccattgtttcaggttttacttacaactggagctgccttgcaaaatccctgccctggccatctgccgtggttccaaataagtttgtaaaagtgaatcttgccattttcaatacttcctcctttgggtctatttattccgaagtctgtttttctcattcttttaatttttttccccccaagacggatttgtctgagacacttttttgccataacatttgttttttctgcttacgagagtgtaagaattccacaagccaaatgttaatattttgttgtcagttctttaagccttcattttttccgtctatcgagcccttttttttaaccagaactcattgcttctgagagtataaaagagcaaagaggccgggcgcggcggctcacacctgtaatcccagcaccttgagaggccgaggcgggcggatcacgaggtcaagagatggagaccatcctggccaacatggtgaaaccctgtctctactaaaacataaaaattagccggctgtggtggcgcgcgcctgtaatcccagctactcaggaggctgaggcaagaaaatcgtttgaacccgggaggcagggggtactgtgagttgagatcgcgccactgcactccagcctgggagacagagaaacactctgtctcaaaaaaaaaaaaaaaaaaaagtggggagcagagagccggacttggacacgggaaggtatcgtgacatgagtgggtcgggggctggaaagtttgcccaggcgaagaagtgaacatgtttatccggatcaccgtttgttaaatgaacagcaacccataggtagcttcaccgagccgaaacgggaaaggcggcaggcaagggagaagctaaaatctgcaagaaacgggctgggctggaggcggcgccagggcaagaagggcaggtgggggcccgcgggagccgggagccaggggcgggagccggaagggcgggacccaggggcaaggcctaagtgggcgtgggaggggcatagtcaagagatgggcggggactgctcggggtctgggcggagtctagcgggagccgcgtcgagccggggaggagcgagggaccctgggagagctgtcttttcagggctgaggacccgccagcacctgatggagagcaaatggctgtttccacacgtggagaacttttaacgaacacgtgaggaaggcgggcaatgtctgtggaaaaactacctcacaacccaggcgtcttactccagcccccagggcgacagcttgtttacagtatttctgaaggtctccgtccccttttgtcggcccctcctcctcctctaaccccgacttcaggctttgagtgaggctttggtagagcagtcgccgccgcaggcgccccggtcggcgaagcccacaggcatgcgggcgcagaggccgtctgcgcctgcgcggggtgtctgctacggggaggtgcgtggagctcgagggcgtggagctcgggggcgtgtctcccgccgcggcgccggggcggggcgagggcggagcctgggggcccagcggcccgcgccccgtggcttgacctccccgactgctgggcccgtgacgtcaccccgctgtgacgcgcacgctgtaggaaaactgtaagtttacgaggattcctgcagctcctagggcttgcggggcccgctggcagctggcagtcccggcggtggtggtggctctgggggcgtcagttccttggggagtc

SEQ ID NO: 4814 - DNA, 2300 bp, Homo sapien
agatcctgccactgtactccagcttgggtgacagagtgagaccctgtaccccgaccccccaaaaaaaagaaagaaaaaaatatagagagagagataactcaaaatcaatatcacaaattgtgtttgatcttgctatgccacaaagtactacaccaagattttcactaatcaaaatttttaaatcttatttcaactttttctttaaaaatatttattttttacattttataatgttcataatatgttaatatataatatttaacataaaatagtaggtattaaagcctggtgacataggtaaataaatatagatgttagataagaaatattttaaaagtaaatatattagaaacacatgctcaaaagttttttctgatggggcacgtgatatgtagtcttttacagcgaatagacaatcagaaacagcaaagaaaatgggttagtttagttctttataaaatctatcagagaaaatatacataacataccaaccctaaagtatgcattgatcctttattgccaagcaagccaaattgggaagctaattacataaacgtttttagaactgttcaacaaagtcgtccatttacctttggttaaaagtcaaattgttggagcacagccctagagacgctgattcagcaagatgagtatagacccaaaaatctggatttttcacagcactgaaataactcctcattttgaagatgaggagagtaagatctagagagttaacatgacttggccaatggtatgtggggagttcaccaaccagagccagggctagagccaccccagccctgttatttccctgtgcagcgcccccctttggcacatcctgctcctcaaatgaaactctggtgcctgcctacttagatattagcagattggaggaaagcaatcaaggggctccaatttcaatgcttcagctagaaaccactcgtcacttgcaaaattatcctttgaattttctggtgagactaatggccacagcactttatagagctaaaaacaaaaagctattgttaggtttgttattgttgccatgttgctaggagagcctctgcgatggaatgtgccattcaatacaagctttgcttctctggtacaaccctaccatgttcaagggacatggcccaggtgcaaggggagtgagaccatacattgcaaggccaaggccagaacagcaagagaaaggggagatttcctctcgggctttgtgggagaagaatcaaagactagcacacaagtcctgaaataacaacagagttcttcaaatttaagaaataagcatacatgaaaattccaaatgttatgctgctttgcttttgtggtccctaaacctgcccattgctcatttggttatagcaaacagcagtaaaatggtcctgaaatgtataagactgtattttgttggaagtaggccatgccctggccccaagtttgattcactgttcttggaaatactccaagcatggtggtggtatgagagtgggatattcacccaaacacctagttgatcagatcagcaaatacaggcaaggagggtggcagatgaacagaactggatacacgtgtgtaagacaagtgacaatgtcctcaattatatgctggaatgaaaagcacatgtccacctcttcaagcacctgaattccaaatgccatcactttcctttgttatttgcatcctagaaaatacacctccaaggataatgtgtgcatatatatacatatatttccagggtgagagaaagcatgaagaataaagggagaattaacgtaccatttaacatttttgaaatgtttgaaaactgccactgggaaaatggtatacctcttgcttaaaaaatgacacattttatttaaaaatattccgcattttttatttcaggggaaggggaggtaagggctgttgttttgtaaaacctcccaaggctgagcatggctgtcatttctggagtctttctgctgaggccatttctcctgtgaccatgggctaaagggcacagccgcgtgcccccacagctgcttctgaattctgagcacaggccagaggaggggaagggccggatgtttgcagaagcagagccgacccttgggtaaaaatgggaaaacaaaaagtggtcaggatggattccagagtagttggagttatagggaaatcttcactgccaatgttctctagatcctcagcactacgccctggccagccccgaagtcgtggagcccccctcctgccctgggctggccacctctctcactggatgagtgatgtgctctggctcaaaggctgagggggca

SEQ ID NO: 4815 - DNA, 2300 bp, Homo sapien
atattagtatcccctaccgtttgatttgaataaacctaaattttaataatcttcttttataaattgattctaaagatttttcccctattctttagctgtatttaagagataagaagcaaccgtcacacatgcatcatgtttaaagcagtaatttattctgagatttacttttgtctgttttctttccagtccaggtatcaatattttcaagaatattaaagtataataatcaaacattcaattcataacatatatgcttatcagaagcttttacaaaatggaaattttatgttagaagatttgggctaccagtaatattcactgtgcatattttaaaaaaaaaggtgaacagagttcattgtttagggaaaatgattatggagaaactaaaatcaagagcaattttaatgtggatattaatgacagtgatcactttcatatccatgactttatctgttcctaaggactaaagggatgaaggcagattatgtaccttactgtcaagaacagggtcagaaaaggtcaacaatattaatttaagaaatgtttattaagcatctactattggctacgtactccactaggtgttgaggacatagaaataagaaaaaaaagttacctgaaaaggtacttgtccacagtttggcccaaactaactaaaccagaaaccactaaagtaaggaagaaaatgacttctgtttgtctcttcacttcatctctctatgaggtgaggatgaacactgaaggaagcttagcagggaggtacaggccagaaagagaacatgagaaaatgctatttgtaatacctcctaagtttaagagtaggtaaaatgtgtgatagagctggaaagtttttttttcctttctggtcagaaatcagggtagctgtaaaaatgttggtggggtggggtcaattccatagtctatgacctgattcggtaggcgactgaaaaacattgtacaactcttaaaaaaagggaggaagaactcacacttaaccaagcaaagcaaggacaccgtgttgacatacacaagtttcggttaacatggtatcaaggaaagcgaggactgcctgtacttaaaatgatcattaagactaatgattctagttttggcattgaggatgaatgcagatatatagacataatgtatagcaaagaatatttacagtcacatttcatggaccaataaataacgcatttacttctcaaaatgcccaagaaaatgtgggagagaaaatgttcatttatattcaagattaaactttctaactttaaatcatcagacttcagctgtaaatttatttcagttgaaaggtttgaagacattattaatgaatattctaaaattccggaaggtgtttaaaagataattttaacctaataaaaaaatcctgccatagaagtgacaaaaattataagcataaatttattgagcacctactatgtgtcattgtgctaggtgatgtactacgttatttccaatactccggtcacgtttcagttttctcaatttctctatcaataactgctacattgttaatttataactatattacttgaaatacagctcagcttatttattccataaagttggtcccaaagacgtttccttattcgaaggaggtgggaagcaggaaggaaacctaaatctaaattctacttaatactgaagacgactttcttgatatttgtggttatctgtatggtcttttcagaaatcccaaaacttgtaccaagtcaaggataaaataagataaaatcagcaatctatcaggttcagagatcacatctgtcagccgatgcttcttgccttaaggtcctgcacggcgatgaccgctcatttaggaaggaattcatggcctgtggataccttagctctgagtcctgccacctaggatcccacggttctacgcgaggaagagggcggggagcgcggaccgggtgtgggaggccgaggtgacagcaggtgagggccgggtgcggatggggaagtgagacaagcaccgtgtgggtattactcattccgctctactaaggaggctgctggcaagcggaacttctagcctctctttcaatccagctgaagttcaatctcattgaagtcacttcccatcccggttcgcttggggggaaaccaggcgtccctggaagggaagggaagggagtccgggctgcgcgggtcaggtagcctctctccggtcgccgcgtgtcctcgccgtccccaaacctgcccttcccctcatcaagggaactccccggggagtccagaccgcgatccctttccttggccccggggtg

SEQ ID NO: 4816 - DNA, 2300 bp, Homo sapien
tctctatgaggtgaggatgaacactgaaggaagcttagcagggaggtacaggccagaaagagaacatgagaaaatgctatttgtaatacctcctaagtttaagagtaggtaaaatgtgtgatagagctggaaagtttttttttcctttctggtcagaaatcagggtagctgtaaaaatgttggtggggtggggtcaattccatagtctatgacctgattcggtaggcgactgaaaaacattgtacaactcttaaaaaaagggaggaagaactcacacttaaccaagcaaagcaaggacaccgtgttgacatacacaagtttcggttaacatggtatcaaggaaagcgaggactgcctgtacttaaaatgatcattaagactaatgattctagttttggcattgaggatgaatgcagatatatagacataatgtatagcaaagaatatttacagtcacatttcatggaccaataaataacgcatttacttctcaaaatgcccaagaaaatgtgggagagaaaatgttcatttatattcaagattaaactttctaactttaaatcatcagacttcagctgtaaatttatttcagttgaaaggtttgaagacattattaatgaatattctaaaattccggaaggtgtttaaaagataattttaacctaataaaaaaatcctgccatagaagtgacaaaaattataagcataaatttattgagcacctactatgtgtcattgtgctaggtgatgtactacgttatttccaatactccggtcacgtttcagttttctcaatttctctatcaataactgctacattgttaatttataactatattacttgaaatacagctcagcttatttattccataaagttggtcccaaagacgtttccttattcgaaggaggtgggaagcaggaaggaaacctaaatctaaattctacttaatactgaagacgactttcttgatatttgtggttatctgtatggtcttttcagaaatcccaaaacttgtaccaagtcaaggataaaataagataaaatcagcaatctatcaggttcagagatcacatctgtcagccgatgcttcttgccttaaggtcctgcacggcgatgaccgctcatttaggaaggaattcatggcctgtggataccttagctctgagtcctgccacctaggatcccacggttctacgcgaggaagagggcggggagcgcggaccgggtgtgggaggccgaggtgacagcaggtgagggccgggtgcggatggggaagtgagacaagcaccgtgtgggtattactcattccgctctactaaggaggctgctggcaagcggaacttctagcctctctttcaatccagctgaagttcaatctcattgaagtcacttcccatcccggttcgcttggggggaaaccaggcgtccctggaagggaagggaagggagtccgggctgcgcgggtcaggtagcctctctccggtcgccgcgtgtcctcgccgtccccaaacctgcccttcccctcatcaagggaactccccggggagtccagaccgcgatccctttccttggccccggggtgcggggggcggacacgcgaggcgtgggactgatggtagccctgcctccaggaagcaggcaggcggggacctctgggcgctcggaggggcagctccgagggcacagggtacagggagaatcagccagatccctccctgccccgggcagccgcggcgggtgtggccagcgcggaggcaggacgccgccgagcctccaactttacctttccaactccgacagcccgtcgcctttctgaccgcgtccctacggtttcccggcatccgcctccctctccccaccacacctgaggaaaacttttccctcgcccctcaattcaaattcagcagtgcccacggttgccgcaaaccgcccggtccctagcaacaaggttccggccgtagagcgagagcctctaggtgtaaggaaggtgatgtcgtaaagccgggagtgtcgtaaaccaggtgcggtggggaggggggaggggtggaggcggaggggtgggggggaagggggagggagggggaggaggtgactcgagcatttagacacaagcgagaggatcatggcggatggccccaggtgtaagcgcagaaagcaggcgaacccgcggcgcaataacggtgagtggcggaggggaccggggagcggcggagtcagggggagctgggcagccggggcgcccccgggggtgaggggggcgagccgggctgggggcagccggggcagggacggcaaagtg

SEQ ID NO: 4817 - DNA, 2300 bp, Homo sapien
gcccaggcgcggggggtggggctgggggagcacgagagagttttctcctaaacacgtatttcctcgttttctcgacgctgcagcggtcccattatagacgcatttattgcccctctcttaaaagtcgttttaaaaataacgcaggaaccaaagcgagcccctcggtccgaaatgtacgtgtaattccttatatagcctgggctgcggccggcggcagggccgttgccgcccattattatacaaacaggtaccggggcggcgcaggcgggggctgctctccctgcgctcccgccgcccccgggcggacaagtctcgcccctctcgccacaggaactgtccagacaataacaatcagcagacatttcgctgctgcacgagagggagagaaagcatagcatcgccccgagataaccagaaatacaatcaacttacaacgtctctccaaactggaaaaggcgactgtgcaaccaccaccacatgttcaggtctcgatccctcgggctgtctctctttttttttaactctcacgccaggcagaggggtgtgtgtttcccttggcacagcagcacaaatcaataaacactgcagctgcggtgcaagtagcagccccgcgcgtccgtcggtccgtccgccccctcccccaccctccttccacccgagacccagagcgccatccaagccccattatccggcttcagcgctccgtgcgtccggcccaggtaacaacttccccaaaaaccgaaagagaaaagcgcgaggcgcacgcacaccggcccatcccggcgcagagacctcgtctgccccgggagggggatctgtctgtggtgcttcccggtctctaagcccaggtaacaactccgcaaacacacccgccgcccagctcgcccccatccgcgcggctcccggcggcgttaagtgggtacctttcctgccttgttccccgcgccgccccgccgcgccccgccaaacgtggaccccactcgcggggctcgccgcggagtccccaggccggggctctgggccgggcagcgggaggcgccagggaggaggggcgcttagggacccgcgcccccgcgcctctaatccccgttacgcgagcgcgcccggcccgcgggtcccaactttaccgccgccggccgaaccctgtccgcccgcggcgcgcacagccggcgcccgcgcacacgcgcgcacaaaccccacgcaacccgcggccgccccgtcccgccgccgccgcagcccgcctgccgcgcgcccacagcccggcccgagtcgcggggcccgagcgacagcgacggcgccggccggggccgcggcgcgcggaagccactttgcacggtcagcgccgggcacaagtttgttccgcggctcccgggggcctgggcgctgagggagaatcgcgctgagggggccaggaggagggggagagggaggcgccgaagggcacaagagtggggaaaagtgcggaaagaagcaacagccgctccacccgggaccagaaaagtggccagtgcgtcccggccgcccgccctgcgccggggatgcggcggcgtcggcgccggctaacggtccagggaggcggcaggggcggcgggagccgctaggcggagagagaccaggtaagagacataacggttcagggagagcgagcggccgcggcgcggctccggcagcggcggcagcggaggggggcagagagcactactttctactttcccactccactttgccgtccctgccccggctgcccccagcccggctcgcccccctcacccccgggggcgccccggctgcccagctccccctgactccgccgctccccggtcccctccgccactcaccgttattgcgccgcgggttcgcctgctttctgcgcttacacctggggccatccgccatgatcctctcgcttgtgtctaaatgctcgagtcacctcctccccctccctcccccttcccccccacccctccgcctccacccctcccccctccccaccgcacctggtttacgacactcccggctttacgacatcaccttccttacacctagaggctctcgctctacggccggaaccttgttgctagggaccgggcggtttgcggcaaccgtgggcactgctgaatttgaattgaggggcgagggaaaagttttcctcaggtgtggtggggagagggaggcggatgccgggaaaccgtagggacgcggtcagaaaggcgacgggctgtcggagttggaaaggtaaagttggaggctcggcggcgtcctgcctccgcgctggccacacccgccgcggctgcccgggg

SEQ ID NO: 4818 - DNA, 2300 bp, Homo sapien
ctattatggttggagttatatctgtaagactgcaccaaactgtattctaaaggcatctggttaaaaatatatcagaaaaattaccatataaaagcttaaaaacctagcacgatgttaaaattgcagtaaaattgatgggataacaaattagtggagtctcttctgccataacacttattttgaaaatgcaaatttgtttcagtgcagttggtttattagagaactacatgagcataaagagaatgtcacctttgcttatgcatgattttatctgcgagaaacactaagtgaacacagaaaattgctgccagcttaactaagtcacataagaataaacaaaaagcacacctgcacacatctcaagttaccagccacttcagttcaccgtgcttctgttacgagccacacccatcacatgcaatgttacaactttccttctgatttcagataatcctccttctaccacttcacattaacttggagatcacaattccatacctacttccacaagcaaacatcagggtttgttcaaggtaaaaagtgtcacttgtataatagtaattatgtatttcttaaccatttaacatatgtaaaactgtgctgcacttgttattagttttctgtctttttaaaaatgtgtcactgacaaaattattgtgggctgtactccaaccccattttcctcataagccctatgatttttattgcccaatctaattctgggtaattagctaaaggaaataatttaggcaaatgcaagaagttatatgcacaaatatatcacctaccatattattaataacagtaaaacaaaacagccttaagatgtccaacaggaagaaaacaatttattaataatgatacatcagcaagatggtctattattagtcatttaaaaagactataatgaaacatgaagaaatgtatgtcataattgagaaaatttggattatgactctatttaaatcagttatgcatatagtcaagaaaaaataattatgaaatttgaaactaattatttggtagctttatgtatttaaaaattattttaaaaagcagttactttaacaaaagctatgttggtaggctgaattagtatttgttccatgctttttgaagatgaaaacttataagacacagaacaaggatcctgaaaagttcagtctctgtactgcctttgaaactcttctggaaatttaaattattttataagtttttttgtaaaaaaattcctactgtactaaatgactacttttaatgataaaagattcttttaaaaagtattcacatcatagcatactcaaatagtaatcatatttaagttcaaataatatttttttttagtattccacactttaaaaatagaataaatggtcaaagctaaggatctgtgcaaaaaagaaagttctacatatataatgataccaatgtatacagtcatatttctaatacctttagctccatgcatgtcatttactggaatatttgaatgcttattcaatgatcccaggagctctcaaaaatccctgaactatgttaaaattttgtgttggctatttttaaattccacttatttattaattcatcaatattaactaagtgtataacgtgggccaaacactatatttctatgtgctgaggacagaccagtgaacaaaggaaacaaaaagcctttatattctagtggaggaaggcaaaaaataaatgaaaaaagtaggtaaaatatatgggatggtagatggtaacaggtcttcaagaaaagaaacataaagcaggaaggagaattggggtgaagtaggggaaatctgcaattttagatcaagtggctaaagaaagcttcattaaattgacatttaagtacaaatctcaagtaatgagagattgatccctgtagatatacagggaaagagtattacagagaacaaccagtgcaaaggctctaaagcaagaacttgcctggcatgttctaagaacagcaaagaagccagtgtggatgactagagcaaagtgggtgtgagcaggcaggagtggttggcagtggctgtctgggaatgacagcccagagcacagagcctggtaggctattttaagaactttagtttttattctggttgagatgaaaagtcaatggaggattttcatcaaaagagtgacataatatggcttatatttaaatataactactttacctgctatattaagaatggactgaagttaagtcaacaggaaaaaacaggaagaccaattacaggaggctttttgcatcaatacaggtaagagatgaaggtgatttggatcag

SEQ ID NO: 4819 - DNA, 2300 bp, Homo sapien
atggtaagagaaggattttgatttttttttttaacattaagcaaaccagcttcttgttttgccatcaaaattcctagaatttttatgattttgagtgatgcaaacagaagttccttatagtcctaagatgttaagaaaataattttgtttacaaatacttacatgtttacacctgtttcaaattaagatctctccaggcatctgctgaatgtttggtactcacagttaattaagtatatgctattctttgatgccatttcatttaagcatttgcttaaaatgaagaaggtagtgattgtgaaattgagcttgtttttaagaaataatttgacaatgtataagatccgaggagattgtgtttacttactaagtttcttctgtcctaaaaatcagatgacattttaaatggttaagtcaaccacaaatgtctcacgagataaaaatttttatgtcattttctgtaaaataggacaaactaatttctattgtgattaatttaaacatagctataatatttatactagttttatatacattagtatattgtaatcacattaacttatctctgtatatcatgaaagagattttgtacaattaaaacacataattcaatttgtaatttctgccagttacagatctcttgtcccactgactcttcttgtcaacatggcaatagggatactacactattgtcttaatttgaagctaaatgaatagtacattcaataatgtgctttagtaaatttgtacattattatcatttaatgaatacctgaaatttcggggcttaattgtatgaatttcagatgattctgtttcacatataaaagaaaataataaattatagcaaattatgtattgtttttatagaaccattaatttagtggttatattaagtttacttattacaaacacttaatatgacagatgccttcaataaagtttttacaatatgtgcatttacattataaaatggtatgcaaaatatgcatgggctgattttacctgctgacttcctttaattttgaattatccccagatgttttcagaaatttgaaattgttagtgttttaagattaatgaaaccatttccttgagctgattcacagtctatatgatgagcagagtagaattactgctgtttattaaacagaattcagagcgaatctccatctctctcccctgccaagcatctaccagaagccatttagagaaaaagaatatttgcccatttgattttaggctaatgcaaatgagtgggaattctgacacatgcaaacgtgttcagaagaggcaaagaagtactttaaacacacacacacacaaattattattgtctcttaggtttggatattgatgggatatacagagtaagtggcaacctcgcagtgatccagaaactaaggtttgcagtcaatcatggtaagattatatttactgttgttattcagatgcatcactcataactttttgaactggcttaaagtaattttttaaaatgtccaattcctgctgtttttcagatgagaaattggacttgaatgacagtaaatgggaagatattcatgtcattactggagccctcaaaatgttttttcgagaattaccagaacctctttttacatttaatcattttaatgattttgttaatgcaattagtaagtatgtaattctactcagttttttctagatattgaaaattctttgcacagattaagccacccaattttttttatcttactttaagcaagtattttcaacagattgttttactccaaacattttaaatgtgaccaccagatgtcactgtgtattaccaaatatcagcttccaaactgtgacattgctttcagtttcataagaatttgctgtaaaatatctggttattatcttttttcagagcaagaaccaagacagcgagtcgctgctgttaaggacctaatcagacagttgccaaagccaaaccaagacacaatgcagattcttttccgacatctcagaaggtaggaggactgcccagtcatgggatgtggtatagcacaaggggaagcgggaaggcctgtggggccagggtcactcagactcagatttggatcccagctatgctacttgctgtctttgtaacttgaaaaagttactcaactccttttagtatcagtctgtcatgggtaaatgatttgctatgaagaatacagtaaagtaggtattatatgtgaagtatttatgtaatgcttagcacatagtaggtgttcagaaattgttgctaaggttaatatgaagatgagattggatattaattg

SEQ ID NO: 4820 - DNA, 2300 bp, Homo sapien
ttcctgaacatttaccactaatatggaatttcaaaactgttgggttgaaagatcaatagaagagtatttgaaatgtattttgtgaaatcaaatgttggtacgtgatggacggacatatgcttattttaatagtttttaaaataatcaagtatttactaagtgccaggcacaagcctaggtgctatgaatacctgttggtgttcaggaactacatggtccttggtcctctccctcatgaaacttatactcaagtaggaagtagacaagataatgtgaaatagtaacaaatgctgtgaatctaacacagtaataaaatagaatgtgtctagaactgggttctcttaggtaaggatggtcagaggggttattaaagtaggtgacattttagctgagaccaggagtgataagaaggagccaaattgggtagaaaattgctttctgcaaaagcagtagaaagtacaaagaattttcaggcaagagtgagtaagggtttgtatgagtttggaaacgaattgtttgaagtgaaaagaagtaggcaagatgcatattgcataaggcatagggccatgttaaacaatatttggttacgctggatgtttctgttgcactctgaatggttagccatttcatgaactgaatttcagcaaggtgattgactttttaaaaataaatctttttcagatcaggtatttggatccaatctcgctaatctgtgtcagagagagaatggcacagtaccaaagtttgtgaagttatgtattgaacatgttgaagaacatggtaagagaaggattttgatttttttttttaacattaagcaaaccagcttcttgttttgccatcaaaattcctagaatttttatgattttgagtgatgcaaacagaagttccttatagtcctaagatgttaagaaaataattttgtttacaaatacttacatgtttacacctgtttcaaattaagatctctccaggcatctgctgaatgtttggtactcacagttaattaagtatatgctattctttgatgccatttcatttaagcatttgcttaaaatgaagaaggtagtgattgtgaaattgagcttgtttttaagaaataatttgacaatgtataagatccgaggagattgtgtttacttactaagtttcttctgtcctaaaaatcagatgacattttaaatggttaagtcaaccacaaatgtctcacgagataaaaatttttatgtcattttctgtaaaataggacaaactaatttctattgtgattaatttaaacatagctataatatttatactagttttatatacattagtatattgtaatcacattaacttatctctgtatatcatgaaagagattttgtacaattaaaacacataattcaatttgtaatttctgccagttacagatctcttgtcccactgactcttcttgtcaacatggcaatagggatactacactattgtcttaatttgaagctaaatgaatagtacattcaataatgtgctttagtaaatttgtacattattatcatttaatgaatacctgaaatttcggggcttaattgtatgaatttcagatgattctgtttcacatataaaagaaaataataaattatagcaaattatgtattgtttttatagaaccattaatttagtggttatattaagtttacttattacaaacacttaatatgacagatgccttcaataaagtttttacaatatgtgcatttacattataaaatggtatgcaaaatatgcatgggctgattttacctgctgacttcctttaattttgaattatccccagatgttttcagaaatttgaaattgttagtgttttaagattaatgaaaccatttccttgagctgattcacagtctatatgatgagcagagtagaattactgctgtttattaaacagaattcagagcgaatctccatctctctcccctgccaagcatctaccagaagccatttagagaaaaagaatatttgcccatttgattttaggctaatgcaaatgagtgggaattctgacacatgcaaacgtgttcagaagaggcaaagaagtactttaaacacacacacacacaaattattattgtctcttaggtttggatattgatgggatatacagagtaagtggcaacctcgcagtgatccagaaactaaggtttgcagtcaatcatggtaagattatatttactgttgttattcagatgcatcactcataactttttgaactggcttaaagtaattttttaaaatgtccaattcctgctgtttttcag

SEQ ID NO: 4821 - DNA, 2300 bp, Homo sapien
ttttatcttttaaaaccctccccagtaatatatgatctgtattagttacttattgctgcataagagaccacctcaaaacttagtggtttaacaaaagaaccattttgtttgctcagcctggcctgggctgagctgggtgatttttcttctaatctcacttaggactattcatgaggcttcagtcgtctagtggcttgattggaactggatggtctcaagtgacctcatggctagtattggtgccagctgttggctaggcctccttgtccgcaagatctttcattctcaagggagctaccccaggctgcatcaagtgacggcctcaggattccaagagggtgagggtggaacctgcagggcttctcagggcctagatttggaagtcacacattactttcagagtattcattggttaagactgttcaggagactagccaagtattcagagttgtgggaagagaggcagcctattgacagaagagcagcattatctgtcccattccagaagggtgtggttacagagatccaagactgattttgtggacagccttccagatcccaacctctttttgtagtctcatgtctcagggctttcctgttgtgttgtgtagacagattggtttaattgctgttttccaagtggagcccaggttttctggtttgtctgatttttactctttattgttctgcctcgagcaccaacccatgccaatctctccgtgccaaatgctccctttcttccaagactcatgacaagcatcaccataacaatgaggctacttctttatttataataataaatatttatttaaaaataatatttagtgtacttgggttatcatttgtcaattatttctctcattagataattacaatttttttgtttttcccttaagtaaagagactatgtttttcctttaaataagaacctataacagagcagagtatcttatgtgcagtaaacattcaatattggtaaactggcttgaccaacactagaaaagtgcatgaaagaagtcactgtttcctgaattagccttgtagtttcaaaaggtaaatcaagaataaaaatggtttcatggtcaaataaatttgggaagcagtgtatattttattcctatcttagaaaatcacagtgcaccctagaatatcaaaagcctgtgacatcttgaaggagagaatctagttatattttcttcaatccagtattttccaagttaatattatatacctttttcaaaaatttattttttgagggtacctttttaaaacattatttgtgaaactatgtttgaggactatgtttttcagaatgtttgggaagcattgccatatcttcctctaggaaaaaaaatcagtttttaatcggaaaatgggaggagtgctttccacaaatgtgtcaaaattcttcctcacttaagtttaagaaactgcaaaacagagattgtacataaattagttattgccttcatatagaataaacatagtattcttacttcagctcatgatctgacacttaatttagtaatacttccgcccaaaaggggtgtgacatttatgcctgctctttgtactaagccattatatttacctacaaagtaggaaatattgaaagtctttatgtattctttcttctgtattttttagccagagagacagaaaaaaatttctcaggttgtgtaaaaatgtcatagattttatttctttatcctaatttagaatgcaccactttgatacttgaacagatttttaagtgataaacgtactagtttcagcaggttttatggcatttgtgtgatggtgtttgggatcctaaattattagatttttgtgagaatttattatgagaaacaactttatgtttttttattcaactgatattattgtaaaccaaaaaggtattccatagccgtgtagtcctttaaccttgcatcattgttacataatatatggcagctactcttggtggttttgttaactttgaattaaaggtattcatgtattttgctgaaagcacaaactgaccatactcttttttctccctgcttttctctaaagctgaaaactcgtcaaggaacagaactgctaattcagtctgacaatgacactgttattaatgattggtttaaagttcttagtagtacaatcaataatcaggtatgtcgttgacttaggtaaaatttttacttcagagctgtttttcttttttttttttaattgcttattggatatccggattgcaatctatatgtgaaaaggcactttatatatgtttgacagagatggaaaaaacaatggtc

SEQ ID NO: 4822 - DNA, 2300 bp, Homo sapien
attcaagcaattctcctgcctcagcctcccaagtagctgggattacaggcatgtgccactacgcgtggctaatttttgtatttttagtagagacggggtttcaccattttgaccaggctggtcttgaactcctgacctcaggtgatccgcccgtcttggcctcccaaagtgctaggattgcaggcgtgagctaccatgcccagcctcatgttgaaagttttaattttttgttgtctataaataatattatttgttttctttgaaaacttcatttatttttaagataatgtttgtgtgccacatatccaggtctgaataactatagtatgtacatcagttgttttttcaggagaaaaaatggggttccaggaaaaaaaaatgtgactaattcaccttgcaactaagtcacgcaagtgcttagtccttgaggcaataatcgttattttactatttatgtattcaatatttgttctcagatatatatctactagttctacagtttttctcattttgaaaattgaactaaaaaagcttacttaaagtggaaataggctaatttaagtatttttcatagtagggagtcagtagatgatatctaaagaaatagaagactgagaatataaaatgaatttacaaaaaattaaaatacttccaaaatatcttcagatccagaaaatgaaataatgatgacagaaaaagcaccatctataatatcaatatcagtaaatgtaaatggactactcatctattgaaagaaaaaggtgctcagactgaagcataaaaaagcaaaacttaactaaattctatatgtaaaagaaacacctaaagatgattcagaaaagttgaaaaaaaaaagcaataaggtgtgtcaaaggtatagaaagtaaagcaagactagggatatcagtagcaaagttcatcctagggagagagcataaagcattatgaaagtagtatttaaaatggtaaagcatgtgcagaagtccacagtgaagatgtaattattaggaatcaccatttaccaaataaagtagcattaacaaacataagcaaaaaaatacaggaaataaatggaaacatagaaacttagtagtaattaactttatttcactagtagtaattaactttatttcacttatcttaatccataaagttcaactagacataaaaagtaatttaaaaaaaggtaagtcttattgatagatattaaattctacattctgaaaacagaaaataaacctcctttagaggtggttttttttttgtttttgtttttttttctgggtgacggagtctcactctgtcacccaggctggagtgcagtggtgcaatctcggctcactgcaagctctgcctcccgggttcacgccattctcctgcctcagcctcccgagtagctgggactgcaggtgcccgccaccacgcctggctaattttttgtatttttagtagagacgaggtttcaccatgttagccaggatggtctcgatctcctgacctcatgatccacccgtctcggcctcccaaagtgctgggattacaggcgtgagccaccgcacccggcctagaggtttttataaaattggccatatgtttggctataaggatagctttaataaatccctgcagtagacagatttgacattcatttatcttcctagcaactgtgtccttatatagggtaattttaatttattttcctacttgtaaacactgattcatacctgctgtttgaaaagtactgtgctaggcctgaggcagataaaaaataaaaataaaaactgttttgttttttcaaataatttacaattcctatgagagagaaacatttacataaaaatctctaatatgataagggagaagttgaggggaatctggctggggtgtaatattcaaaagctttaaagttctaaatgggtgaactgataatacatatgctgtgtgaggcgtacctctgtatctggagataggatagtagataagtggacagtttctttaaaagccccatattataccaaagtcttaacattggttacctctagagtatggattgaagaagaaatgggattccctttcctttacacatttttgttttcagagtttttgcataccgtatatgtgttgcttttgtgatggaggaaacattttgtttttaaatgtcgtgtggtctatcagtgtacaattcattgtatgcctgtaatgcacctagtacctactacctgagtactccagcccaattaggggaaggcagatcaccaagaaatgtaacacagtctgtataaagaattaggtgagtgagg

SEQ ID NO: 4823 - DNA, 2300 bp, Homo sapien
ctcaaattcctgacctcaggtgatccacccatctcagcctcccaaagtgttgggattacaggcgtgagccaccgagcccagatgaaaatcactttcttacaatgacacattatgctaaagtttatctattaaataatctgcagtaaatctcatacttcacggtgagattacagaagctttcccattagagttaggaactagactagaacatttctatcacgcttctattcaacaattaagaaaaggaaagaaataatggaattaaaaaggaagagatgcaattgtttttttaaattattgttattattagaaaatcccaagagaacctataaacttaaaactgatgagagttcagcaaagttgctggatatgaaattaacatgaaactacccatttgtctagtaaaaagtgagtttgaaaatgtgattgcagtgaagatactatttacattagcagcagtagcaacaagagttgtaactaagaacatgtttattaaaggtctgtaagattttaataaagaaattttcagagcagaataaaggaagacccaaataaatagtgtagcataccatcatgatcttggattgggaggctgaattttataacaatgtccaaattaatctacaagtccaatgcatttccatttaatatcccttccctcacttttttggggaatggaacctaaaatttatatttgcaaacagatatccataaagagtcaaaatattcctgaatagggagtcgttggtgggtagggaacaggagagatagagttcctgctatggtaattaagttggaatagtaagggcacatgtataaaactcagacatggcattacaaatcaatggggttagggagactttggctctacaaaaaaaaaaaaaaaaagccaagtgtgctggcatgtacttgtagtcccagctactcaaatggctgggacaggaacatctcttgagcccagaagttcaaggttgcagtgagctctgatcatgccactgcgctccagcctgggtgaccagagagggaccctgtctcaacaaacaaacaagcattggtttgtgtcatctgagatgctgcaacaacaactaaaaagaaaacaaatcaatggggtaagcatggactaagtaagaatgttactaagattattggttttcacatgataaaaatgaaaataaatgtagatcttgacctcacttcatgctcaatgattaatttcagttagattaaagacataaatataacaagtaaaactttaaagactgtggaaagatatatcaaagaatatctttgtctgcagagtaggaaagatttcttgaacaagactcagaagcctactataaaaggaaagattgacagatatgactgaattaaaattaaacaaaacaccttctctttgtagaagatgtaatcaaaggggagaagatgggctacaaactaggaaaagatatcttcaactcacatagcctagaaaggtttagaatccagaacatgtaaagaacttactagttcattttgaatttaatttttggtttaggtttttaaaataatgcttatttttgattttagtagaagagatagaagtagaaaaaataatttgtctgattttactttataaattatgatagttaatatttattgataatatactactcttttaatactttcttctttaatactttgatctttatagcaactccgtgaatgagatatttctgttatatccactttacagttgacaaaacttagactgagggagattaaatattttaccaaagataacactaccttggtctgtgtaacaccagagtctgtgatcttctcaattgtgccacagttctggttaaagatgagaaaactgaggctggaaaatttgtggagatgtcatataatgaacttcgcctaacagtctttgtcatttggagccaagatgtttagattccactttcatttctattgtttatgaactgttttttgtgttttttgctttgttttgttttagtataatgcttcatcccagcagcaaagagaaataattaaaagtaggagcctggacaggcggctgcaagaaccaatagtattaacaaagtggagacatagcaccattgtattggacactaatgataaggtaggactgttgagatttttggcaagttctttgcattatattgtacagtgaattgtaactattcgtactaatattttatgtatttagtaaatattctttgctaaaacatttgatttcttttgaactaatttaagcttttgatctgcatgtatgttgaaatgttactacattattg

SEQ ID NO: 4824 - DNA, 2300 bp, Homo sapien
tctagaaagtaaatttcagttaacaaaattgtatcagtgactaattgacttaccacctggccttataggcgttatctgtcatagagaagattgttatcctcaggagaatgatggttactacacctgtagtgtagaataatatgctcagtacttgtttgctatagaaaattagtaggttgttatggaaccttgggtttgcacatttttggtaaatctcagtttgccttaggatccttgagcattgggttgaatgtattagtttcctagggctgctgtgacaaatactacaaactggagtgcttaaacagcagacagttatttttattctctcactggtctggaggctagaagtccaaaatcagttttggcagggccgtgctccctcggaaggctccaggggagaacccttccttcctcacccctgcctgacttctggtggttgccagcagtccttggtgttccttggcttttagctgcttcactccactccagtttctgcctctctcttcagatggtcttctccctctgtagctttcctctctgtaaatctcctcctttttttctttttattttgagacaaagtctcactctgtcacccaggttggagtgcagtggtgtgatcttggtccaccacaacttcagcctcctgggctcaagagatccttccacctcagcttcccaagtagctgggactacaggtgcatgccaccacacccagctaatttttgtaattcttgtagaggcagggttttgccatgttggtcaggctgctctcaaattcctgggctcaagcaatccacctgcctcagcctcccaaagtgttgggaatataggtgtaagccactgtgcccttaatctccctctacttataaaggcaccagtcattggattttggggcccaccctaatcaaatatgaccttgtcttaacttgattacatctgcaaagaccctctttacaaataaagtcacattcacagatcctggggttaggacttgaactgtcttttgggggaacacaattcatccccaaacaggtgggaactggctcatgctgtagtgatgtgaggatgcagtgatcatttaaacccgtaatgccgtgttctaggaggtgatcatttaaacccgtaatgccgtgttctaggaggtactaaaatattttggaattgttatagaaatgaaagtaaatgcatattagttattagtgagcctttctaagaaggtgaaggaggtttgagggagtaatgaaaggaaggaaagttcttctcaactcttgtgtctacctggttagtgtatatttactgttccagttatcggcttttgttttggtcataagtgactgaaaaatgtagattacaattagaatgaaagtgtttttaatgtggcagtgcatatgatagtagacacatgtttgctttttggggtttgagatttgaagtaatgttctttaaatggcctatactatatgatgcttgtgagtaaatacgaaatccagattgcattaacttttttcttcattctctttctccatttaaataaaacagctatattcatccaacaagccataaagccataatgtggtataacatcctttttgagaggtgaatattattgaatgaaaatggctgacagaagtgggaagattattccaggacaagtgtatattgaggtggaatatgattatgaatatgaagcaaaggacagaaagattgtgataaaacaaggggagaggtacatcttggtgaaaaagaccaatgatgactggtggcaagtcaagccagatgaaaactccaaagcgttttatgtgccagcccagtatgtgaaggaggtcacgcgcaaagctctcatgccacctgttaagcaggtagctggtctgccaaataactccacgaaaataatgcagagtttgcatcttcagagatcaacagaaaatgtgaacaaattgcctgagctttcaagtttcggaaagccatcgtcatctgttcaaggaacaggtcttattcgtgatgccaatcagaattttggacccagttataatcaaggtcagactgtcaacctaagcctggacctgacccataataacggaaagtttaacaatgactcacattctcctaaagtttccagccagaataggacacgctcatttggtcattttcccggtccagagttcttggatgtagagaaaactagcttctcccaggaacaatcttgtgattccgcaggagaaggctctgaaagaatacatcaagattctgaatctggtgatgaacttagcagcagctccactgaacagataagggta

SEQ ID NO: 4825 - DNA, 2300 bp, Homo sapien
taatgaaaagtaggttacttattaaagaactaggaagaaagtaggacaagtttatgcaaagtacagactacattttcacctaaaaatacatttaacaggaatctattgtgcatctaccgtatgccaagtgcttttaggcacttgggatatacacacaaacaaatcagactcaaatctctgcctgtgtgtggagcttatatttcagttctacattttggaactctctgctacttcataagaagccagttaaatgtcaaaatcctgaaaatgatctgttgaaatcctgagcacaggcgccagacatatgctacaagtgttatttaaaaactaactagaggcagtgttacatatgatcatagctctccatcaggttcttttaaaacaacacactagcgagaaagctctttttatccgcctccatctgctgttggtggtgatcagcatactgtgggcattgtggtatcatccgagattaggctgtgaaataggaagtggggttacaggcagatccgcaagtgtatgcaaactgttgagttctatctcttgctaaaaccaagggtgcccaattcaggtttggagagtagggaaagtaaggttatcagcgcattcctatcagggtcgttttcttttttgcactgctcttgttctggttttataaggagaacacaagcagagtctatggaaaatagttgccaaagcatacaggaaatactccttatactgaacaaatgcaagaaaacagaacgggttagaaaccgagggagacaaaaaggcagtgggtgccaaggactgtgaaaagcaaatgcaacgatagagacagcacagtctcaggcttatttttcaaaaattctcattgtaagcctctttcctttctaaatggagactatcttaacactttagctcgcattagacttaatttaataagaaggttgtaaaccacagctgttaaagtcttgccactgccctaccggattcttcgcatcctgtaaggcacaattcggagttcagctggttgataaggaagccaggcattgtggcatcttcaagtacgaagtgaagcacaggaaagagccaactccggagagtagctcttcattgcttgaatcatacatatgcttgttttttcccccctctcctttctggtctctattattaacaaatatttcatcctggcacaacaggcacaatcaacaactggttaaggaatgagtagttactgaagtcccaacgcctctcagttatttttctcacactcactgtattctagacctagaagccagctctcatttgaaagctgaggttcagaagggtgaagtgccaataaatggcagaagccaggtctctttcctgattcccattccagctgagctcctcctgccactggatcaccatcaaagacctgccaaagctgttacttccgggttcggtgctgccacagtgcaaacggggatgactttggacaatgaccctgtggcccccgcagggctcgcaccctcaggcccgtggaaggctaaatgctgacggactggttctgccctggagcggctctccgcgtcccaggggtctcctcagtcccgagtgtgcacagcgggtcctgccacgtaccctggcgaccccagcaatggactcagtgccccgggtccctttccgtctccctcaggcggcgtgcagcactttttcgggtgtcccagtggaatttccgggcccgtgaacgactgacccacgcccggccgcagctccaggggccgacgaagggagcgctagggcccacggcagggccgtctttgcccgggctccattcctgccaccctggcgctatgtccgcccttccctggttttccctacgagcgtttttttaacgcttcccactccttgtttacaaagtgctgagcccccttgaccgcaggctcccgcgccggcccgagttcccacaccgtacgctggctgccccctattcggatccccgccgggcgccgcaccccctagccaccccagaccgtcccggagacccgcgcccgcccagctcgcccgggccatcacgtgagcctcccgccccgcccccgcgcgtcacgtgagccccgcccccgcgccggcgcgctccgacgtgccctgtaacttaccctccctcagaggccagcctgcggggacgggccggccgcggccgtagccgtgtgaacgctcttcgggctcgcgtcgtcgacccgcagccgcggggcggactaagaagggagccgcctgctgcgaggccgccgggctcccggtgaggtgcagggcgcgggtcctggcggacggagggcagg

SEQ ID NO: 4826 - DNA, 2300 bp, Homo sapien
tggattagccattgtgtcagtggcatcttgttttatgtgctgacaaaggatttcttctctcttgaaggtttttaatggaccattctcttcaattgtgtttttctcccaagtttttatttttaaaaatgtgaagcttaactaaaatttgagaaaactgaacaatgaacatacataagcctttcatctagattaatcaattgttaatattttgccatggatgctttatttctctttttatatttttcaaccaattaaaagtaagttctggccgagtgcggtggctcacacctgtaatcccagcactttgggaggccgaggtgggctgatcacctgacgtcgggagttggagaccagcctgaaccaacatggcgaaacctcgtctctagtaacaatacaaaaaattagctgggcatggtggcatatgcctgtaatccaagctactcgggaggctgaggcagaagaatcacttgaacccaggaagcagaggttgtggtgagccaagatcgtgccattgcactccagcctgggcaacaagagcaaaactctgtctcaaaaaaaaaagtaagttccacacctaaatattcatcctgcatctcccaagaagagggaattctcttatataaccacaacagcattgttctacctaagaaatgtaattgacgtaataatagtaatatacagcccatattcaaatttctccaattatccttaaagcttttctttttctagattcacaatccaatcaagaatacggttgataaggccgggctcggtggctcatgcctgtaatcccagcactttgggaggccgaggcgggtggatcacgaggtcaggagatcgagaccatcctggctaacacggtgaaaccctgtctcaactaaaaaatacaaaaaaaaaagtagccgggcgtggtggcgggcgcctttagtcccagctactcgggaagctgaggcaggagaatggcgtggacccgggaggcggagcttgcagtgagccaagatcgcgccactccattccagcctaggcaagaaagcgagactctgtctcaaaaaaaaaaaaaaaaaagaatatggttgataattatgtctcattaatatctttttaaccacaacaatccttgtgatggtcaaaatgtttatcatccctcaaaattcatatgttgaaatcctaaaccccaaggtgaaccctcatataccaaattagagaccttgtaatatatgcccatgggagctcattggccctttccaccatgtgaggacccaactgaaggcaccatctatgaatcagaaagtgggttcttaacagacactgaatctgctggcaccttctttaaaacatttgtaatttcattttcatttttagagacggggtatcgctttgtcttgctttgtcacccaggctggagtgaagtaacgtgctcatgggtcactgcagcctcaaactcctgggcttaagcaatctttctgcctcagcctcctaagtagctaggactacaagcatgggccaccaattccctgctatctgctgggaacttgatcttggacttctcagactccagtactgtgataaataaatttctcttgttggtaagccacctagtttatggtattttgttataaaagcctgaacagactgtgaaaatccccgcctttttttttttttttgagacagagtcttacttgctctgtcacccatgctggaatgcagtggcataatcttagctcactgcaacctctgcctcctgggttcaagccattctcctgcctcagcctaccgagtagctgggattacaggcacgtgccaccacacacagctaatttttgtatttttagtagagacagggtttcaccacgtgggccagcctggtcttgaactcctgacctcaagtgatctgcccgccttggcctcccaaagtgctgggattacaggcgcgagccaccgtccctgaccacaccccccctgcctttttttgtcttttataatattgatagttttgaggagctcaggcctactacctcattttatttagatttttatttttctttaaaaattaaaaaaaaatgttttgtagagacaggatcttgctatgttgctcaggctggtcttgaactcctgggctcaagcaatctcctcaccttggcctctaaaattgttggcactgcaggcatgagccattgtacctggcctaatttagatgttaaaggattgtaacagtgttagtaaattttatgacaatttgagaaagagaaactcctaagtcattttggactaatattcatcctgtcactttgaagactatg

SEQ ID NO: 4827 - DNA, 2300 bp, Homo sapien
taaatatgatgaaggaaccaggcaaagaataataggactgaaagagtgagaaagtaagactctaccttcattgatcagactggactaacagacagagataaagccagctgaaaggtaagcagaaaagtatttctctcaaggacatactacatttataaagtgtcacacaaactccttctttgagtgacctaatttctttctttttttttttttttttttttttgagacagggtatggctctgttacccagactggagtgtagtggcacgaccatagctcagtgtaatcttggctcctaggctcaagcgatcctcctgcctcagcctctgtagtagctaggactgcaggcacacaccaccacgcccggctaattgtatttttttattattttgtagagacaaggtctctctatgttgcccaggctggtttcgaactcctggcctcaagcaatcccccttccaaagttctgggattataagcacgagccatcatgcctggcctactgatttcttactgagaaaactgattccacaaaaatcatagactattacaaactgttgtttgaaattgtatcagtaagaataaaacattccactcttgcttggaggacctaagacacagagaagcagtcttgacttccaagccaggtgaaggaaaaaggggtttctgaagacaacacttcccatctatcttaactgtagtattcacggaaacagaacctggggtccatggtggtccagacctgatgttaatgcctttatttgcagctctgctttgcctggggcctctcaaaaacactgcttcatttaaatgtcatcagaactccacacctcccagaaagccctgggttaatttcatccattcctttgtttggtgagatgttccaaggttccttgagcgtgagctcttcttcaaggcagtggattaataaacctgaatctgttgaactctgaatttgtttctgtaggtattaggatgattgggtgagcacaggtagccctggaggttttcatagttcagtccttcattttacaaacaaaaattggggacgagggggaggagttgttactgcagttcttctgcagcacctcagagccacttcctcagagccacttccccgtggaattttatggtactcatcttctaaaactagaaggcaaagtcaactatggagtggtcttccttggatatgaaatgaacaaatttacctaggccttttataaagaccatctttaggctccaggtcagtcattcctccagcactgggattgatgggttccgtatgttcattgcagggaaagtggcgggaattcgctgaacttcgtgggggcggcgagggtgcgggctggatgcaaggtactgggccgctggagtgacagagatgctgtgtgatgggggctgagggctcttccccctcctcaccctactgttccacatttcttcagcaactttcttcattccttaggaaaattttcctttttctttcttattcctgtttccccacatcccactctctcaggaaagagctacccttcattgaaatcttacttttttctggcaacgcgctctaaaaagatgggccaggaatgattccctccacccccagacaaaaatgaaagcaacacttccttttaggaatatagtactttctgtttttaattttaaagctagtcaagtgacacagtgcgagtggagaagaaacaaatctctggctgtgaccaattagctgcaaacaccaccgcaacgggaccagcctagtgatttatttaaacaaacgacattaagtagttaaagcaaaccccttctccctcaaagaaaagaaagctaagtgcgtctgccttagctctggggaattcttcggcggcttgggatggcgggtgggagctgccgccctgcctccccaggaacttctgcgacaggggcagtgcagtaaaatttgaatctgcgaccccgggccaggagtggtggtggaaacagcagcccggccgccgcggcagggtgcgagcgcgcgcaccgattggtcgccgggccgcctggcccactgcgcctgcgcagtcctcctcccgcaccgccctgtcgcccaacggcggcctcaggagtgatcgggcagcagtcggccggccagcggacggcagagcgggcggacgggtaggcccggcctgctcttcgcgaggaggaagaaggtggccactctcccggtccccagaacctccccagcccccgcagtccgcccagaccgtaaagggggacgctgaggagccgcggacgctctccccggtgccgccgccgctgccgccgcc

SEQ ID NO: 4828 - DNA, 2300 bp, Homo sapien
ggcatgcctctccctaaagagatcacacacattctaatagggaggcatgcttaacaagcagattataaagtatgtgaagtgggttcttagccactaaaaaagatgaaagtggttaggaaccacttcttgggtggggaaaaatcaaaaaaggattctagatgagtgataccaggctgggtgctaaaaagaataaataggcatttgcctccttggtgggcaagcagaaaaacagggatttttgtaaaggcctgcagtcatgaaatagcatactgcatgaaatcaatgaaatctgatgttactagatcataaagaactgataacactggagagaataggaaaaaagggccttataccattctaaagatgtggactgtaatgttagtagaaggaattaagtaagggaaagatgtgagacaaatttttatattaaagctatttaatattttgcttatattcatatcaacctagcttaattttggtaagtaattaaacaacatttgatagtagcagcggttcttgcagatctaagatcctcccatttccatcagcatgacagtgttcgcgtagagaaacaaacttcctaggcaggaacatactcaccgagtgacagctgctgaaaactcaaaatctgaaatgctccgcagttcgaaatttttgagcaccaatgtgattccacgtgtggaaaattatacacctgccctcatgtgatgatgggtcacagtcaaaacttcacgcacaaaattatttaaaatattacataaaatcaccatcaggctatgcatataaagtatatgtgaaaaaaatgaattttgtgtttagacttgggtcccaccctcaagaaatctcattatacgtattcaaatattccaaaatccaaaacacttctggtcccaagcattttgggtgagggattctcaacctgtactgttattggtagtggcttctaacacttcaactttaaagaccactcccttagcttttggtaaagtagttgaataatctacaaaataggacttaaatattatagaaaaaaatcttaaaggccttctccttttatattataaaaattgcctatgtgatgatttttgagctataaaaatggcacttcacatggttcaaccaaataagttttaatgatcgctttatgttcttaataggcttctagtgtatttgcttttaggagtggttggagggtgtcgcatccattgtcttttattacttatatgtatattcatagtaaagataatctcctttctttaactttaaatgtgtaagacaaatctaagcttagattgtttgcgactctgaaaacaaaatccaagaattctttcttatttctttagaaagtctaggtcttgtttttatgcagacatctgtggagtttttgtcggtgaattcacacagtaaatgattgcatatggttccttctgtcagcttttagtttggatgctgaacagcctgattatgatttggattctgaagatgaagtatttgtgaataaactgaaaaagaaaatggacatctgcccattgcaatttgaggagatgattgaccgcctagaaaaaggcagtggtcagcaggtacaacttcatttgtatataacaagtatatacatattctatgtaaagaactgtattgtatggaaagagtgtgagattgcaggttgggggtaatcagtcaggctttagagttaaaaagtatgaattcaaatctcatctctgcttatcagtaacctgtgtaatcttgagcaatatgtttaaatttttctgtgccttggttgccctgggattgtcgtaaagatgaaataatgtatataaagcaccctagttcagtgactgacaggcataatgtactcctcaagtttcccatttgttaataatgttgtaatattgattattgtcctttaaatttagaagtaaatacttatgaaccttgtatgtgtattgtatgaaaatgacataatggttttacatttagccagtcagtctgcaggaagccaaactactgctaaaagaagatgatgaactaattagagaagtttatgaatattggattaaaaagagaaaaaactgtcgagggccatctcttattccatcagtaaaacaagagaagcgagatggttccagcacaaatgatccttatgtggcttttagaaggcgtactgaaaaaatgcagactcgaaaagtaagtgaatttgaagaatttttttgataattatataataaaaattatttatagttatgactgtctcaatactgtggtttaatttatattcaaatatgactttccaattataagaa

SEQ ID NO: 4829 - DNA, 2300 bp, Homo sapien
gtaggatgtggaaatagttattttgttgtttactgttattttaatgagggtagaaataattcatttccttggttcactcttgacttactctattttgttcttaaaatcttaggctcctcaattatgaattctactgctaggactttcaggaacctaatgttgtaggctggagagggctgtcagaataatattcagccagtattttcggaactgttaaacctggctaaacaggtgtcattccacagtgaagttggcaattcttgaggctcccagaaagtgactgctatctaatgactcagcttgtggatacgtcgctaccgttgtcttaagatacctttcttcccttcatttttactttttttgcaaagttaacccacacttatcctacataattttactcagatatcatctcttccaaaaagtcttcccttgctacttcattagaactactctcctgggttgggcgccactcttgccccttcccacagtggcctgggcttccaccataacacttagctcgccgtgtggcagttgccattcgcgggtccttctccccactgtgtaagctcctccaggagccctgtgggtgccaagctgacttggaaggctatgagggctcaatacacaccctcaatactcattgaatgaataaaggcacggtctctgtgtaggaaatgcaggtgaacgtccttatgcctcacttaagtgagctgccaatatcggagtttaagtataattttggagaactgcaatccgtcctgttttctccctaccccgcgggagctggctaaaccagcctggaggctagcagtttgcctgtgtgccctaagctagtgacagctcatatcaagcccagtatttaaggagcgtgattacttttactacgtagttcccagggagaaaagcaactcaaaacatttttgtatctttttgtatcttgttgcacaagatacaaaattgtgcactaagatacaaattgaaactcgaattgaaatttggctgccaatttattaaacccaccccaacaatcttccctattaacaacaacaacaacgaagagatctcaggatacccattttcatgtgtaatataaaccgatgccacccatctatcatatccatctaaatctaataattcagctttttgtttggcgggagtacgacaggtctttatatgattcaatgttacaaagtttttcagaggacaaatgatgaaagtgtgaacccacggctatgatgaagccgcagtctctttgagtacagaatcatgagctagatataaagaactggctttaaattctgaagtagatcttgcttttaaatgttatagtggtgggtaataatttcctttgcttcagttactatttaaaaagtaaatatgtgtagatgaaaatgcaggatttaaaaaaatctactttgtagaataggatacctatcatttatattaagcccaatgcgtgggaaacggatcaatgacttgatgcggtgcctataaaacattataatccaaagttgcattaggacataaaaataactgctgataaaagtttactcaaagtagcatctgcccctaattcagtttgtatttttatcgtaaagacctaaggcgccgcgggaactaggctgtgcgttcgccccccgcggcagacggcggcgcgcggcgcctctggagcgcccctccgaagccccgtgggggcggccgtggccccggggcagccgctggcgagcaccccagaggtccgagccctccgagccccaggtgcccggggcccgagccccgcctgccactctccccagctgcctttccaaacggcggcgtgctggtggagagagttttcccgcaccttgttcgcccgtcagaaagcggcgccgggagggagcgagcgtgagaaagtgagcgtgtgcgctgcaggagagcacgacccaagagccggcgcccggtgtccgagcgcccagtccgccctgtccgcccccggacccgcgaagggcgggggcccggagcagcgaggcgcgggaagcgaggccggcgggtgccgggggttggcgggacgcgcgcttcgtgccggcgccggcctcgagcccgcgctccctccccccgcccgcgtgcccgcgccgctgcgcgatgcagtgtggggaatggctggggttggctgaagagcgcacagtggagttttaatgtccgccatgttggccatggcgtattgaagagagcgagcgagagaggagcggagcggcacagcctcccaccctcccggctggtgttagtgcccggacggcgggctctgcgctccgcccctcaag

SEQ ID NO: 4830 - DNA, 2300 bp, Homo sapien
tgaatatggtctcaaaaactccaaagaaaattatcccataggaaagcatgtaatcagaagtatgtgtatcttacgaagtgcacagaacatcctaatctacagataataaagtatatgaaggtatatacacatatggatgtgcatatctaggtattttctttaccatggctgttcattaaatatatctgaccccaagtccactcagattgtctacttcacttggcagtagaacaaacgcaggagacgcggcccagagaggggtctagctcaaatgctatctaaattggcccaggccccatggcggtaggcaacctgtctagtgaaagttcaaggaggtctcactaaaaacacagtgagttctacctcctggcttatcatggacaggctctgtttattccagctgtcctataattagcccttttcactctcaaagtatcctgtgttagatgataaattcatagtcaccctagctatatctttctaagaatgttacctattaagtgccaggcagggataccagaccaacgtgtgtgtgtgtgtgtgcgtgtgtgcgtgtgtgtgtgtatatgtatgtgtatgtgtgtgtatatgtgcatgtgtgtgtatgtgtgtggtgtgtgtggggaggggaagaggttgtgaagaatgtagataattccccacccctttcttaatccagttcctttaaaccctgttctcttcttggcttgttagaaaatttagtgggcaaagaatttttactgaatatgttgacacatgtatgcagtatttgacacattacgatctttgtcgacttttctgactttacattagcaaacatagtcttgcgtctgtttaacgttcatttttttaaagtcttagattttgtctttatttaaaagcccagttgcaaccaccaaatacctgactcagctcacaactagagaccgagcatcaaatttcccagcccacttaatttgaaagcctgccaagataggtgaaagaccttataaatatgtaaagcaggaagttcgaattacagtcaagtaaatctctagtgattgatgttcttttcaaaacaattttaaaaaactaataatgaccagcacatttctaagaccctcttaccaaaggtttcccccgaattcagactcaatggtgtactttcagtactgtatttattttggatttttatcacttcctggaggccaggaggaggcacagtgggaggatcctaaaaaactcagtaccacagccattttgtttgtaaggcagagtggtagaattctgtcagccagtaaaggtttttgaaacagtttttaaggggggcgggggagggggagggaatatgcctattgttttcatttaaccgctaaattcattattttattttactttttgcacacatcgtagttactgtgagtaagaaattatattttttttcccaaggaattaaagatctcggagctaaaggagtcatgaattttgttccaggatgactggcttctctaggtaccttcatgagatcaaatcgaaaaaatattttgatggacatcgtttttacatggccaggtttgcatgcagaggatctatcgagtggttgaaaaggatcaacaatctgctcaagaaaaacatgataatgctgttttaaaaaaaaaaaaacaaaaacaaaaaacaaacaaaaaaaccccacatccaagaagccagagtgttccttcagatgttaaaaggggcattcccccgagctcacaggcagccgtgggtgctattgtcttgcagtgtcacttcatagcgagcttagacttttgtcattttggtggctgtgcttttaaaagcccagtgtaaaatggcacacacactgcatttttttccgagctgcaggaggcgggggcagcgggggatagtgcagactgtagggacactgccctcccagccaatcagcgctcgcctgcttgccatcgcaaagttgttaaccccagagtcttctggctgtgctgcctcctctgcttttaatcttctgtggatatttctccgatttcccccaaaagcccacagatcctgggggaagccaccccattcggccaccgatcatggaagaaagtattactttttatttaccaaacattttaaagatgttggaagatccatatgctgcctggaggctgttgtttctagggacacaagtatccagcctatattgttacaattttttttcaagaactgccgtcttctttgcctgcactaatggtaagtttgtaattttcaccatttatgtcagtctttgaaagagccaccggctaaaaaggattttcattgtgttt

SEQ ID NO: 4831 - DNA, 2300 bp, Homo sapien
atacagctttatttctttcattgaaatcattatgcctttatttctttttcttgccttattgcacttgttaagacctccagtataatactgaatagacatagtgagagcaaatatccttgcctccttccaatcttaaggaaaaatcaatttttcactattgaaaatgatgttagctggagatagttcacagatgtccttcatcagatgaaaaagttcctctctattcataagtattgtttgttttcaaagaataatcgattcatgtcacagactcaaaccactgcaaaatttgatattacatgcttaaatttattaactttttaaacttctttgctttacattgtcagcactgataacttttctgtggttcttagctgtgctattaaggccacagatatgaatggtgaacttttggctagactcatgctgagagttttgctaatgtatgctaacttgacaacttgaccgttaagattttaccaacaaaattagaaatgactagatgtaatctattttcagggttctagaaaataactgaaattggctttgtcaaatctaaggtcttctttaatctctcctgacttttagttctatctttcctatccctttcatttacaacggttttgggagatttggaatttagcaattcaattctttctaaactactttcttaattttattgccaactttaaaaaataaaaaattgttggtggaaagcttaataaatctgatcatttatatgtacattttctttgttactgacataaaacacacatactgaaaagtgcataaataagcatatgccttcatgtttttttttttttttcttttttagatggagtctcgctctgttgcccaggctggagcgcaatggcacaatctcggctcactgcaacctccacctcctgggttcaagtgattctcctgcctcagcctcctaagtagctgggattacaggcacccgccatcacgcccggctaatttttgtatttttagtagagatggggtttcaccatgttggccaggctagtctcgaactcctgacctcgagtgatgcactgcctcaggctcccaaagtgctgggattacaggtgcgagccaccacgcccagcctgccttcatgaatttttgaacacacccagaaagagcagaagacagaacatttctggtacaccagaagatgtgttgttttccctttccaggcaaccccaatggtaactcctagtggtgtgatggagctagcctacaccagctcttgggagctgataaattttcaggaatctcttgtgaggcattcagattttactggaaaattagaaataattagatataatgaattttcagagttttagaaaatagttgaaatctactaagtcaaatctaaggtctcctttaaacctcctggtttttagttttagttccatctttcctattcctttcatttacacacaggcattattaacagttaaattgtatcaattaatattttaaaatattaaaaacattttacttcgttcaacttaaagacaaaattaatatatttcttgaggtcaaattatctaaaaaactctaccttgtaaaattgcatcttaaagcagtgcgtggaaactgatggcaagaaaccacttaagtgtcacaactctgcttcaagttaattcctagtccatttgattttgttttgcttttaagatcacgaagctggtgtacacttccgtgcgagcttagagtggtaatgaactccacaatacactgaaaagagcttgaggagacagcagatgaaggactggggctctggttttgtagctgaagcccaggttctcaaaggtcctaccaggcctgtactttatttctcctccgcgggcctctaggccaaatgcctggatgaatctgcgctcagggggcgtcctggaattacacttgggagagaataagaaaggaggaggccgatgtgcccatggacattattaaccttccggcaaatccccacagccgccaaactgcgtctcctcttccgctctcggcgcgcagctcacgctcgcagcgtcagcgacgccggcggcgccaaggcgtcgtggcgtcgggcgcctgggacgtggcttcaacggccccatccggcgccggcggcgggtgcccggcggtctttgctgccgcccgggggcgcagaggccgggccttttctttcagcacaaacgtcagtttgtaaaagggaggtgctggagtctgaggagttttcaggcttccgtctcgaaggaagtctggcaggctcggaattgtcatcttcctcaggcaaatagtttttc

SEQ ID NO: 4832 - DNA, 2300 bp, Homo sapien
attatacaactgcttttttgtttcgatgaaacactatagttaacactatagttaactgaatgcatagttgccaagcataatttttaaatcataatcaaatatgactttgcaaaaataacttgtcactaaaaatccatttgaaggaagaacacaatgctctcttggaaattactgatgataatagtaaataaacacattatagaacttgaaccaaagcccctgcaaaatattcccttttacatttttcgtttttttgagacagagtttcgctcttgtcgcccaggctggagtacaatggcacaatcttgctcactgcaaactttgcctcccaggttcaagcgattctcctgcctcagcctcccaagtagctgggattacaggtgcccactgccacgtccggctaatttttgtatttttaatagtgacagggtttcaccacgttggccaagctggtctcgaacttctgacctcaggtgatcctcccacctcagcctcccaaagtgctgggattacacgcctgagccactgtgcgccctgctcccttttacatttttctcatgccgattgtgacacgatgctttcagtaaaaattaatgatacaagcaaaatgatgcagaaaccaagattaaatttacaaaattgaaaagcctcaaaagaattctgaataaattacattgccaaagaaactccatcaaaaccttcaggtccaagcaaacatcaaaaattccatcaaaaccatcaggaccaggaaacaggacgtaagaagagtggccaatgagccaataagtaaaaccaaaaggttatatatacatagaaagcaaggaaaagaaaatatcaccaaggaccgagtgatgaactacgtcaaatgctgagtcaagtaaaatgaagactaagctgacactggatttggcaacatggaggtaggtcatttgtaacctgaagaacggcaacaatttcagtagaatgatcgaggtaaatatctgacttaccgttcaaaagagaggaagtaggaacaatgaattgaatataagcactgtagagaaattttactataaaagggagtaaagaaatacagtattactagaagaaaacatggtcaagaggaaagttcgatggaaaaaagaacaagtgtatatgctgttatggattgcattgtgtcctctctccccaaaaaagtgtgagggagggagggagggagggagggagggaggaagggaagaggggaaggaaggaagggagggagggagggaggcaggcaggcaggcaggcaggcaacgctcacttggtgcaaaaaaaaagaacctgacaaatgctccgatgaagttcacataaatacaaaaatagtcacacgcaatgaatactcgtattagcaagcaaatatttaaggactttacatatttaattcatttatccctcctaacaatgctaggaagtggatgtcagcattacttcgcccaagtgcatccgtccctttccgccaccacgacaaatgttttctggtttcatccttcaaggattaacttacattcatttcaaatcctttaatgataaagtgtacaaaatagaggagagcggcaggggttggcaggggacgtagggaaaggatgatttgccttcgatcctacatcctgcataaaaagcagcacaaccgccacggaggcagccaggcagcgggaaaactaagtgcaaagccaggactctcccgaaaccctcaggtcctgctaagggagccgctcccgaggctccccgccctgtgtacctgctgagactgtgggaagtcgggtgactgggcggtttggccttgctggctctaaggtgaaaaactatttgcctgaggaagatgacaattccgagcctgccagacttccttcgagacggaagcctgaaaactcctcagactccagcacctcccttttacaaactgacgtttgtgctgaaagaaaaggcccggcctctgcgcccccgggcggcagcaaagaccgccgggcacccgccgccggcgccggatggggccgttgaagccacgtcccaggcgcccgacgccacgacgccttggcgccgccggcgtcgctgacgctgcgagcgtgagctgcgcgccgagagcggaagaggagacgcagtttggcggctgtggggatttgccggaaggttaataatgtccatgggcacatcggcctcctcctttcttattctctcccaagtgtaattccaggacgccccctgagcgcagattcatccaggcatttggcctagaggcccgcggaggagaaataaagtacaggcctggtaggacctttgag

SEQ ID NO: 4833 - DNA, 2300 bp, Homo sapien
gtctgagctcagtttactctactcccatgtaaaatggaataatgatgtatataaagggcataccttagattaaaaattatggagcttttactgttattatgcttaagtttaaataacttattgatataaattagatattgtgataactgcattctatatttcttcgttttgtttaagttactgtgactcaaaaaagcctgaagtgtaatcatagcttccagaagttgcttaatgtactctgagcaaattgctaaagccatcagaaaaagagaaatgtagtatgtgaatttaattagagcctggtgttttctctgaatctcttattttttttcacagggaggaataagtttttttcatctgtaatttggaagccaagtcagtaacaaaatgaaaccagtaaagcatctgttgaccaccagtaacaaatcggcaaatgttccagcattaactactaaaaaaggactacataatttaccattatcacctgagctaaaggaaaaacataatgcaaaattaattcatgataaaattgaaccaatggtcctaagatctccaccaacaggagaatccattttacggtatgctttgcccattccatcgagtaagacaaagaacttactaccagaagatgaaatgatcggaaaaattatcaaacatctgaagatggtaagaggcttgttagtttctgtgttgcagggcccccatgatcaccccaggtttagtgatgtgctaggaggactcacatgactccacatatagtcataccgatggctaagatttattacagtaggcacatgaggtgaaattaggagaaaaccagatctaagcttgcaagagtcttttccctttagagtcacccaggagatgcttaatttctttagcaatgaattgtgacaacacatatgaaatgtctgccagggaaaatcattagaaactcagtgccctgggatttattgggggttgtttactattcactctgtgcttagcatgtacgaaaatttcagactctcacaaggaaaggaggttcagtataaacaatgttatacaaacagtttagggacagtgagctgcttctatcagtgaatggggagaaccctcctgaaatccaggatctcagatgccaggttaaggccaaccttgcaagcaggccttcctaagtcctgcatttctactatgttaaactctgcatttcagaaactttagctcttttttcgtttcttgagatgaagtctcgctctttcgcccaggctggagtgccgtggcatgatcttggctcactgcaaattctgcctccaggtttcaagcaattttcctgtctcagtctcccgagtagctgggactacaggagcatgccaccatgcctggctaatttttgtacttttagtagagatggggtttcaccatactggtcaggctggtcttaaactcttgacctcaggtgatccacccgccttggcctcccaaagtgctgggattacaggcatgagcaccatgcctggctgaaactttagctcttgatgtggggaaaaaatttcctttctctgagtttctatttttttcactgcaatccagaattgaattgtaaatgtaccaaataacaatgaggaagagcacaaatataaaaaaatatatagtacatcaaacttgtacagtacaagtttgttgaaagtttgaggggttaggccagataattttctttaaaaattcattgctttctggtctccatctttctatttcccctaactctcttcagaggagaaagtcaaggcagactttgaggaaaactctacttaatgcttcaaccactcatggacaggccctctccgttttaagatagctatcaacacagaaatggtagagtcatagagcatctctctattgctagggagtagggttaaggaatattgctttctcctcatgatgacatgaaattgggtatgggatgaaaaatttaagtttatggcactggaagaaataagtcttactggtaaaaaggtcctggcataattgattaaatattatttacatttaatataattaattttaaactattaaagtatctaattggcttttattttttttttacaggttgtttccactttggaagaaacctatggacattgcgatcagaatggagaagaaccatttgtaaagcatgaacatgaagaattatctttatctgtaagtatatgcaaccctaatatagagacattaacactgaaaagggtcgattttctttttaaaaatataaatttaaaatattttcttttggagtacttattatatcctcagaatgaatt

SEQ ID NO: 4834 - DNA, 2300 bp, Homo sapien
aaaggatgtcatgtttctttaacattgttaacaagtaaagaaaatatccacaaagaacttttcaaatgaataatttttactttgtaagctaagaggtctacatattctactatttggctaggtttaaactatattcattttatgcattaggggtatattaataaaatttaatattcattcttatcaaaaatagcgagatataaagaaaagtaaactttcttaagctaataaaggcaatctattcatctgtcatggttgcagtgtgaacaaaagaaaaggaaaagaaaaaaagacaatgtatttcaagctgataagcaatatacttaaaggtaaaatactgcaggcattccaattaaactcagttgaaccaagatgttgactcttactactctttttaaaattttagttaaataatacaacaagaaatgaaaaaaagctataagcatttcataaatgaatagacaaaagtgtatttgtgtattataaaattgttttgcctaccatcttggtaaaaatgtaaaggacagaaatatgtagtatttgtggttgtatgctgaaatgagcaacctttcacgtacttctattatcaaaaaagtatgaattgatatattcatctgtttttgttaatagaagtataaaagatatttgttatgtctttctgggagacagaaaagacatagcaaaattggaaagatgtagccttttcactcaataaaagcttttaaaagtttatcctaaagaagaaaaaagtgtacagagattttgtacaagtatgtacaatgtcatatgttttaatagcaaaaattttgaaatgatctaaatgtccattgttaaggagtttgctaagacaattatagtatattattaaatgtacttctattacctattctgatttaaatgtatgtttattgttatagaaacatatctatgacattatttaatgaaaagagcataagatgtaagtgtgtatagtaggacccaatttagataaacatttaaaaaatttggctgggcatcatggttcatgcctgtaatcccagcactttagggggccaaggccggtggatcactttgagcccaagaatttgcgaacagcctgggcaacatagtgaaaccctgtctctattaaaaatacaaaaactgactgggtgtggtggtgtgggcctgtagtctcagctacttgggaggctgaggtggggggataacttaagcccaggagactagaggttgcaaaaaaaccccgcagatatatatatatatagctaatatatatattagctatgtataattatatattatatatattataatatgtattagctatatatatgcagggttttttatatataaatatataacatatttatatataaaaaaatatctttgtgtaatttccctctaacctttctaatatagctaatatatatataatatatatagctaatatataatatatattatatatatattagttatatttagaaaaatttaaaaaggatatatctcaaaatgttaatagtaatttttctttatgaggtgagattatttatgaattttctttttatttatatagtcttttatataagtaagttaattgtatgactaaataaaaattataaaaagtgacatttttaaggagacttttattccagaagaaataaattgttttccacattttatttcattctttgatattataggtgctaattatccttcttatagtctatcaatttttataatgtataccttatatgaatttttattttgcttgtataataattagagccttaaaaataacagccaggaaaaactcctgggtataaaaatagccctcaaaggtggaagaggtttcttcacaacttctgattttaactgtggaattgttaaagtatcaattatagcaatagcttacctttgctcccttcaactcagtaaaaatgagttgagaaatcatgtaggcgtaaatatatgtagattcctgaatgtggtagtattggcaggaaaatatcagaaaatgcttaataaactggtacttttttaaaaacaggaagctgaaaaagctaagcatcaacttaactatttcctaaatcaagagaagttacttaaaagtgaggggaaaactgagacaacaatgcaagtgggtaatagtcaaacaaaagttaaaggtgaagattcaaaaaatataccattggagaaagaaacaagaaaatcactggtttcagattcaggtggacaaaggacaagtgataaaatccaagaatatccacaggtgaggaaataaccaaaatggagacagtagt

SEQ ID NO: 4835 - DNA, 2300 bp, Homo sapien
atgcaagaaaagaaaaaaataactcctggaagggaaaggcgtaatagtaagtgtagtaattatagatgactttaaattattttaaaattaaacttatcagaagatctttgcctttgattcctgaatgtgtattttagcatgtattttatggaaatcgtagactttgccctgaagtcttaagataagtagagagcaaaaatgaaaatgttaacttcatgttggagtttctggtcataagattatttcacagccattggacatgcactcaatatctaccaaggcccaataattcgcctacagtatcttgaagagtgtacctttcagctgactctgggagattagtttcctggagatcatacccaatgatcacttaccacgtgtagcgatgttgttcttccctaggcttcagtcaacaaactgagaggttgttgaggtctgtaactcaaatagcaagtgggaattataggagccaaggagaaggatagtcctgaaggcttgttggttagccctagggcattttgttggttgagcgccacacaaaagtaaggtcttcttggtacccttatagatgggtgccatcaagtttcttgtgtggtggggaatgttaaagtgcccatggccaacaatgattgtgcttccttttcattttaggggattgagaggacgaaaagataggcgactgcacatcatctccaaattcacagggaagggtggagggagtaacacttcattaatcatagggtcttcaatgtgctgaccctagtagggcccatcaacttcactgtttagtaaccagacctagagattgtctctacaggcatcattcaggagagggcgcttgattgccattttattaggttggtgcaaaagcaattgcagtttttgccataaattgcttttgtaccaacctaatatatcgctttcctgctggtcagtctttttctacctcaggagctgctgcttttcccatgcctgaaaatttttcagttaagttctggattttgtcacagaacatatgacctgcccttatgcataagtttgattgaattggaaaatcagcaagagtggcatgaaagaacctagaaatctgagtctggtcaaccatctcctctattgttcttactcttgattgtagaaccaaaggacaaccagcgttgtgattcatagggctgctcttgcctctgcaagggtggtccaaacatgattttagtggtaggttcatcatgggtatgcccaagcgatcagagcccaagcaatcactaagctgaggaatgagagggtcttgaagttggcatctcatacaccccctttctttctcccccttgagtgaagcttctctgtcatgacactctgaaggaggggttctgtagtgacttattccacaaggtaccactttttctcattaagtttaagaagagtacataatgttctaaggtgcctttggtaggtaggtaaagtgatctcagaaggttctacattttttttaaaaaaatcccttataatttaaccatgagtctcaatactttgctgggacataggctgtctatcattgcctggtagctgtttagaagtaacagcagtcattgggtgcaaattagctctcagattctctggcaactctcagccccatctccacataattatatactgtaattaatatcataccattgtttgtggtatatatatctgttcatttgaccaatctcctgtgtgtgaaaatctcaatggttttgaatattttgcaattacaaataatgctataacgaatgatcttatgcatatgcattttcattgtttggcctatgattatatattaagctaaagtataaattatcatgtattatgtaagtattttgattatgtattaaagtataaactcatgaatcctggagaccaatataaactttatttgatgcttcagaatatttatgaaataatggcttagcttccacagcagccattaaaattattctatttttgtgtcagatctagcattatggtaatttacttataactttataaaaataagagaaatgtacatattatacattcatagatttatgtttccatttgatggactaaatgcatctcttgatatagctcgtattgtagtaccaaatgaaaatgtgatttctgttcatcaagattcaaagtcaaaactccaaatgcaagaaaagaaacaaataaattctggagtggaaagacacaagagtgagtataataattatcgataactttaaattattttatgttgaactcatcagatcttttcctttgattcgtcagtgtgtacttcagac

SEQ ID NO: 4836 - DNA, 2300 bp, Homo sapien
tctcatctttttttcttttgccttgagaaagtcacgttcttctcattgtgtactttacatccaaaattattttgtaactcttttttttttttttttttttttttgagacggagtctcgctctttcgccaggctagagtacagtggcgcgatcttggctcactgcaacctccgcctcccgggttcaagcgattctcctgcctcagcctcctgagaagctgggattacaggagtatgccaccacacccagctaatttttgcatttttagtagagacggggtttcactatgttgtccaggatggtctcgatctcctgacctcgtgatccacccgccttggtctcccaaagtgctggattacaggcgtgagccactgcacttggccctctataactctaaatgttgctgcattttattattgcaatgactaataagtccctaaacttgatgcagttagatttccctgttattggatataggatatttacatttttgctcttgtgaatatactagagtactatactgaatgtgtgtgtatatgtgtgtcaccttttatatatttaagtatttccttagggtaaattcccagtagctggattattagagggtagaaatttttttatggtttttgatataaattgtcaaattatttcccaaaaagttgtatcagttcacagagctaccagttggtttctcgcagccatctgctatagttttgttgggttaaaaaactttctatttttgctagttcatcttatgttgctttaatttacattttccaataacgattaaacctaaactttttttgtataaatttgcttttttgagtatttcttcttgtggagggacagatacttatatataattattagattggctgctagtccaagagcagtaagtagttaagggatcaagtcagcaaccagtggccgtagccatctttgaccaatcaaagatatagattcatatcatcgtgaaagctttgattcagagaaaatagttatatatgtacctaatggtaggaaattggggtagttgtatttagtatatagaatattacctaattttttggttagaggttctagaagacaagactttttcagtttgtcttatgccctctttttttttgttgggggagaggtggggggtctggacactctaggaaattaaaactgagtattttacttattgcatgcatagaagttgattttcttttcttttctttctttttttttgagatggagtcctgctctgttgcccaggctggagtgcagtggcataatcttggctcagtgaaacctttgcctcccaggttcaagcagttctcctgcctcagcctccggagtagctgggactacaggcacccacgacgatgcctggctaatttttagtagagctggggtttctccatgttggctgggttggtctcaaactcctgacctcaggtgatctgcctgcctcagcctcccaaagtgctgagattccaggcgtgagccagcgctcctggcagaagttgattttcttaaaaaagagagataataggaaaacaagctcaaaaatctatttggggccttatgcaggatgttggccttagcctgaagaaataaaaactgatgaagcgcattgttagcagagggatgacttgatcaggtttttgaaaacgaatgttcagcattgaggtaactgaggcatctggatatgctggtctgggcccctgggagccgcaggagataatggagatagagattctatgggctgagaccattggtaggttttatggtgttgaggaatacttaacactgattttttttttgagcgctgttaattaaatgttaaaatataatcggtttgctttagagaaaggcacgaatggattctggggctctggtatggaagttattttcgcagtgtaggtgcaaggtgagggaaccagatagggaggggagatgggcgagggtctgtggagaggggctggagtgaaatggtttgagagccatcatgtttataaaagcaatagaaggtacggtggggtaatactttctatttaatgcatttttcattttatttctttataactaatataaggcacattttacatttcagatgaatttacaaccaattttctggattggactgatcagttcagtttgctgtgtgtttgctcaaacaggtaaaaacaaaaaattttcttagttgtcttttcatttccgtatcttgtattgcgctttgaccagttaggttcatatgagaacctaagtcataatcatgctgctccttctggaagccctgcaattgttcctctt

SEQ ID NO: 4837 - DNA, 2300 bp, Homo sapien
gtacacaaattgctacctcacacatcagtttagtcaagtgctctagcccagtcctgggagagcaaaaggacccatttattcatttatcagatattatctgagcccctattatctgtccttgcaacagtgcttgacggtggtgttaaaaagctcagtaaattgtcctggaggaactaatttagtttagagttgtgcatatgtaaatctcataatgttcttgtagcaaagactagctagtgcctccaccagtcacgtacagggaaaaaaattctggaaattgtagtgcaaatcaggcacggaccaattatgcttttgaactatacagttttctgtgctgagactgggccaattctgatgaattctgaacaatggtaaaaccgatacctttaaaattcaagaatgttgagttctaatggcagtttgaccattgagatattaatataggaacatcatttagcctcttaagcttgaacatccattaagtgggaaaaatagtgctcatttcctagaggtcttcagattggctaatcaagttttgattttgctggtaagtaatgagcaaattttcttagatgtgatcgcttcattttctcttatattgattggcagcagccaaatgggcattccagtccctaatctcctgcaagagaaacacttctatttcataaatctggtaatttttgagctcttttcccaacagggtgctgcagctcaccaagcggaacccacagcattttctgctaccaggatagcagcttgccagtagcatatactaaattactgggtttcagtatgattttggctggtacagacttcaatcatcgaatcgacatgcgttcagccattctcataatgaatgtttccttctctttcaaacgttgtttccagccccaatctccaaattttttttttttaagaggtgaaacagaaactgtactccttaggaagaaacttttccttctcatccctgttccccataaaggtacctccagataaatctatcaaaagcaggacgcaactcaccaggttttctaaaacgttccccagtctcaccacccttcgtgacacccatgggtttcccaattcttcacctttctcttagacacaggcaagcacattatcactccagaaaagcagtcctggcttagccagttcccttccagaaggaccacgtggtttttggccccatggagccctgcagggtaggggggctcacggtcccgatttgcctcgggactcagggggcttccgagatgcaggatctcccgggctcgaaacgggacatcagtggacaaacgggagcgagggtcgaacgcgcggctccgaggaagaggaacttaaagaacacgggcccagcaggctacaccaggaacgcgcggggctctagggcgcgtccgactcctcccgcccttcgcagaggaggaaactgaggcacggcgactgtctcaacgcagtcccggccctgccccccgcggcctccctcaggcgcgctcccgcgcagccggttcctttgtcccggtcgcacttcctgccccatcctccgcctcctcctagccccgggccgggctgacgcggcgggagaggaatgcgtttccggagggagagggcggcggcggcctcgggagcgggatcagacgcgcagaggaggcggggccgcggctggtttcctgccggggggcggctctgggccgccgagtcccctcctcccgcccctgaggaggaggagccgccgccacccgccgcgcccgacacccgggaggccccgccagcccgcgggagaggcccagcgggagtcgcggaacagcaggcccgagcccaccgcgccgggccccggacgccgcgcggaaaaggtaggggccggcgggcctcgggtgtgggagcgcgggccgcggcctccggtctcctgtgcgcggcagcacttaaagccgccggccgggccgcgccgggacctttgtgccgggcgtgggggtgggggcgggggcgggggcgggggcggccgccagcggttgggggctggggcaggattccaggctagtccaggaggaagtccgcacgccgccacccgcctcgggtccccggcgctggcagcccccgggcgcagagccagcccagccgcgttccgaacgtgagggtcgccggcctgggcgctgtcacgtcggggctgccggagctgcgggggaccgggcccgaacggcccctgacacctgcggtctcccgccgggctgggcaagcgcaggtgggagccagcgaggccacccggggctcggcgtttgggactcggcgctcccctggacgggtcc

SEQ ID NO: 4838 - DNA, 2300 bp, Homo sapien
ttaggttggtgcacacagccatctggtcgaccttagacacgggaaggcaagcaccccctggttgaccttagacatggaaaggtgagagctatctggttgaccttacacatgggaaggcaagacacatctggtagaccttgcaccaacctaatatgataaaagttgcagtgtggcttgcactattcctacttatcaggatttcctgtttagcacgtatgctgaccaacctttgcttagagtattcataaatttcatagctcactgtccacccattatttgtatgaaatcacaagtagactcgtattcttgaccaatgactgcagtttttagagaacatgtttctttaatttctttttcctcaaaactcatgacttctgtacacaaattgctacctcacacatcagtttagtcaagtgctctagcccagtcctgggagagcaaaaggacccatttattcatttatcagatattatctgagcccctattatctgtccttgcaacagtgcttgacggtggtgttaaaaagctcagtaaattgtcctggaggaactaatttagtttagagttgtgcatatgtaaatctcataatgttcttgtagcaaagactagctagtgcctccaccagtcacgtacagggaaaaaaattctggaaattgtagtgcaaatcaggcacggaccaattatgcttttgaactatacagttttctgtgctgagactgggccaattctgatgaattctgaacaatggtaaaaccgatacctttaaaattcaagaatgttgagttctaatggcagtttgaccattgagatattaatataggaacatcatttagcctcttaagcttgaacatccattaagtgggaaaaatagtgctcatttcctagaggtcttcagattggctaatcaagttttgattttgctggtaagtaatgagcaaattttcttagatgtgatcgcttcattttctcttatattgattggcagcagccaaatgggcattccagtccctaatctcctgcaagagaaacacttctatttcataaatctggtaatttttgagctcttttcccaacagggtgctgcagctcaccaagcggaacccacagcattttctgctaccaggatagcagcttgccagtagcatatactaaattactgggtttcagtatgattttggctggtacagacttcaatcatcgaatcgacatgcgttcagccattctcataatgaatgtttccttctctttcaaacgttgtttccagccccaatctccaaattttttttttttaagaggtgaaacagaaactgtactccttaggaagaaacttttccttctcatccctgttccccataaaggtacctccagataaatctatcaaaagcaggacgcaactcaccaggttttctaaaacgttccccagtctcaccacccttcgtgacacccatgggtttcccaattcttcacctttctcttagacacaggcaagcacattatcactccagaaaagcagtcctggcttagccagttcccttccagaaggaccacgtggtttttggccccatggagccctgcagggtaggggggctcacggtcccgatttgcctcgggactcagggggcttccgagatgcaggatctcccgggctcgaaacgggacatcagtggacaaacgggagcgagggtcgaacgcgcggctccgaggaagaggaacttaaagaacacgggcccagcaggctacaccaggaacgcgcggggctctagggcgcgtccgactcctcccgcccttcgcagaggaggaaactgaggcacggcgactgtctcaacgcagtcccggccctgccccccgcggcctccctcaggcgcgctcccgcgcagccggttcctttgtcccggtcgcacttcctgccccatcctccgcctcctcctagccccgggccgggctgacgcggcgggagaggaatgcgtttccggagggagagggcggcggcggcctcgggagcgggatcagacgcgcagaggaggcggggccgcggctggtttcctgccggggggcggctctgggccgccgagtcccctcctcccgcccctgaggaggaggagccgccgccacccgccgcgcccgacacccgggaggccccgccagcccgcgggagaggcccagcgggagtcgcggaacagcaggcccgagcccaccgcgccgggccccggacgccgcgcggaaaaggtaggggccggcgggcctcgggtgtgggagcgcgggccgcggcctccggtctcctgtgcgcggcagcacttaaa

SEQ ID NO: 4839 - DNA, 2300 bp, Homo sapien
cagtcttaggtatcagcatcgtacttgtttagccagaaacagttgctaaaacagtctttcaaagcactgagtcaaattaaatccttaatgttgaaggcagaataggagaaagaactagattgccaaatttatctctgtcttctcaaatgtatgttttcatctacaaagttgattctctccctgaatttttttattgcttctgatctgtgcttgtgcaaagtaaatgacttttcaaaatagcacatagcaagcccttcatgacggcactgattccataggtattatgtcataaaagggtcatgtgatcaatgagattggcgtatgttgggtttaaccaagttaattcagggtttcataactctcagagcctttaatttactgatataaattgtgaatattcatgaaaagaacattatttgcagcatttccctaattactatcaaaaaaaatttctcttgaagcattttataagactaataagaaaaagggagtaaacacaatagattagaaagtgatgaaaacaataatatgatctagggaatttgccgtaaagggaaaaaaaagaattaatgaaatatctgaaatatggggtatttttaaacatgacaatttcaggaacctgtaatgtttttaataagtttcaactggaaggatttccaaaaggcctgttttattgtacatttttaaatgagcacttatatgcccccaaataattcaagaactaaaatgctgaaaagtaagcttgttcctatctcttcctgtgactttatctacactatcaatcctcttaataaattttatgcataaagggcagtcaactgcagctgtctacattaaatgtattcaaagacattaagctgcttaaatataataaaaagctaagttattttacatattctggtttttagtaaaaacaaatcccctttttgctggaataataatctgtcaaagaaggtaaagaacaacattctctctccctttgcctacctgtcttgttgtcacagctgagacttaagtattatcagggggaattttttatacctttctctagcttctattgtgttaagagaagagtacatttggacatgtttgctttatgccacgttttactttagtgaacttgaccctattccattttttcctgttaggattgccataaggttatcttgggattgaggagcactttagatggtaggatgggggttgtatgttccccttgtttagtttgaaatgtgttcaaccacagagcccatttcagcaagctgcacctttgtgtggtcatatggttaaacttagctgagatggtgctcctgctcttaggtaatgtttatggccattgctttcctttcttctaaacacacaattactccttaaggtccatataaatcatgaggttacctagatcattacaatcctttcttctctccatgagtttgttcctaatatagagatagttaaaggtttgctgtacaccaattcattagtctataaggcaaatcagtgaaaagaaacaaaatcatgtaaaactactggctagacaataaacaatgattctctgaatcttttattttcacatgttgtcagatacaaaaaagctctagttgatatctgaagtattattgtacatccagagatatatttctcattatataaattattcactgcattacagattgattttgggcatatagaggatatttggcagaatagtaagactactagaagttcagtagtatggagctgatacacccaccttctgacttaatagaatttcaaaaaatgaaaaaaagaaaacggacaagtactctaagcatgaatgtatcagaatctaaaaatgatttatagcaaacagtatgctactttcaataaacactagagattacagaagaggaaactctctaatacatgatctgtttttctcatgtacatttcattctagcatcataaatattattaggtacatctctaaaagattcatatttcttggttgcggttatcttagcagtttgtacttcaaggaaactggaagggtctgttgaacaaaattgtgcaatttttacttaggttagtgcccactgcccatcttcttcaagttcaggtgcggtggctcacgcctgtaatcccagcactttgggaggctgagacaggtggatcatgaggtcaggagttcaagatcagcctggccaacatagtgaaaccctgtctctactgaaaatacaaaactcagctgggtgtggtggtgggcacctgtggtcccagctactcaggaggctgaggcaggagaattgctttaacccaag

SEQ ID NO: 4840 - DNA, 2300 bp, Homo sapien
tccgctcaacttaggcatttaactcccagcccttcggtgcccacttcccaccccgcgcctcccaggggtccgacagctgagaagaaggaggaaactggcagaggaaagaggcgctcgggggggccgagtttccaacttggcgactgggaatcccgaggcgcgtggggaggagaagacaggcttgacccggggcaagagagtggcgagtgcgggctccgtgggtgcacctcccactggcccgggaacggcctgcaccccgaggggcgcacgtcactgctcccagcccgagtcgcgagcgcgcagtcctggcctggggcccgcgcgccttgggctttctccctgcccgcccctttttcttccgccaaaacctttgaccagagtctccttgccagcattcctacctccctttggccagctatttgtgccaggtaggaatcaggctgtactttggctgtgtgtgtagacgccaatccccaggaggcgtgtgaccttttcaccttacccacaaactccctgggaggtgccccgtgggcactgacccttctccggggcctgatcggtgaccgcaacctgtttcttcccagaaatgtccttgcttttcgcatctacaaacgcttcctgcagcacttctcggaaaaccctcggggacgggcctggggggcatccagcgggctgggggcacgagccgctgtgggaagtgggggtggcaggagctccagggccggcgtgcacgttgtctgtggccgggagcggacactgagagggcgcagcgaagagcacccctcccccgccactctttccctccctcgggatgcacagagaaacgggggccgcccgacccctgatttccacacccctccctagcacctgggctcccagacaaggttgggcggggtcgggcggcgattgcccccctgcttggaaggcgcagcacctcccaccctccggtgttccctctgccccagaggaacgggcaccaaatctcgggaaacaatgaagcctccgcggcgcgcagagggcacccagccgcgcgccctgatgcgggccagggaggccgcgtggggctgcagcccggcctcgcccgcccaggcggtctgtcttcgcttcacaccacagcgacactgctgcccctcgcccggcttcgcggtgcggctcccactccagcccggctttcccctcctcgccctccagctctgggcaggggcgtccaggggtgccccgctgctccccgccacaggtctcaggatggcgcgatgaggagtggcagggggtgaccctgcgttcctcgccgccgagggcgcgggccccgggatttgaagttgcgagaagcagccgccacctcccgggcgctccgcactgcgcggcggcgggatctgcgcctgcaggagctgcccagctctccctctaggggtgcagagcgagcacgcgaggtgggctggccagaccctgcggctggcactgacctccgcgccccttcctccgacgcccgcacccacgcgaccggggcgcagactcccagcgccttccttcccgcggagatccctgcagggtctctgggaaagacagacagacggacggggagagcactcggagggaaagttgttcctcccagtctcctgtcaggcaattacaggcgagcccaagcggggagaggggcgggaggaagcgagggaagggctccggagtggggggaggccgcaggaggggaggcgggggtgcagttggtgaaactcctctgtctcccgctcatcttttcattgctcgttcccctccttcccgcagacacccggacctcccctgggcgccagctccgcggctccaacgggtccagaaacaagccggattttttttttttcttcctggaaattggctttggtgtgtgttgccctacctccctcctccccctcccacccacagcccccccccggccttttttttttttttttttttttttgagacatggcccgggcagtggctcctggaagaggaacaagtgtgggaaaagggagaggaagccggagctaaatgacaggatgcaggcgacttgagacacaaaaagagaagcgttcctctcggatccaggcattgcctcgctgctttcttttctccaagacgggctgaggattgtacagctctaggcggagttggggctcttcggatcgcttagattctcctctttgctgcatttccccccacgtcctcgttctcccgcgtctgcctgcggacccggagaagggagaatggagagggggctgccgctcctctgcgccgtgctcgccctcgtcctcgccccggccggc

SEQ ID NO: 4841 - DNA, 2300 bp, Homo sapien
gtggctttatttgctggcctggcgggtctaggctggaaaatgcacactcagcagggaaaggggaagagagattggcggcagttttctaaaaacaacacagctcaagtctccctcgtgtgccccctcgctcaccccgccgaggctcagagctatccaaacgggcgctccggagcgagcgcggaggtcgggtccccccaggacgcaggcgggcctccgagactccaggccgccccggccgccgctccctcccggttccccttccctgtcaacctgccaggtcctgagaggcgcctctccctccgagcctggaccgaggtcgctccgggtcaccctaaatctgatgatgccgctcgcccggcgcagccgggggctgggactggcggggctgcacctggggaggcggcgaccgcgcgcgggtagtagccgagagcccaggctgcctctgcggcgctcactcccccggggtctgcgctgggcgcggtcggcgcccccgcctcgcctcccgcctgcccgcctgcccgggcgcagggctgcccatggcttcgacagtgctccttccgctcaacttaggcatttaactcccagcccttcggtgcccacttcccaccccgcgcctcccaggggtccgacagctgagaagaaggaggaaactggcagaggaaagaggcgctcgggggggccgagtttccaacttggcgactgggaatcccgaggcgcgtggggaggagaagacaggcttgacccggggcaagagagtggcgagtgcgggctccgtgggtgcacctcccactggcccgggaacggcctgcaccccgaggggcgcacgtcactgctcccagcccgagtcgcgagcgcgcagtcctggcctggggcccgcgcgccttgggctttctccctgcccgcccctttttcttccgccaaaacctttgaccagagtctccttgccagcattcctacctccctttggccagctatttgtgccaggtaggaatcaggctgtactttggctgtgtgtgtagacgccaatccccaggaggcgtgtgaccttttcaccttacccacaaactccctgggaggtgccccgtgggcactgacccttctccggggcctgatcggtgaccgcaacctgtttcttcccagaaatgtccttgcttttcgcatctacaaacgcttcctgcagcacttctcggaaaaccctcggggacgggcctggggggcatccagcgggctgggggcacgagccgctgtgggaagtgggggtggcaggagctccagggccggcgtgcacgttgtctgtggccgggagcggacactgagagggcgcagcgaagagcacccctcccccgccactctttccctccctcgggatgcacagagaaacgggggccgcccgacccctgatttccacacccctccctagcacctgggctcccagacaaggttgggcggggtcgggcggcgattgcccccctgcttggaaggcgcagcacctcccaccctccggtgttccctctgccccagaggaacgggcaccaaatctcgggaaacaatgaagcctccgcggcgcgcagagggcacccagccgcgcgccctgatgcgggccagggaggccgcgtggggctgcagcccggcctcgcccgcccaggcggtctgtcttcgcttcacaccacagcgacactgctgcccctcgcccggcttcgcggtgcggctcccactccagcccggctttcccctcctcgccctccagctctgggcaggggcgtccaggggtgccccgctgctccccgccacaggtctcaggatggcgcgatgaggagtggcagggggtgaccctgcgttcctcgccgccgagggcgcgggccccgggatttgaagttgcgagaagcagccgccacctcccgggcgctccgcactgcgcggcggcgggatctgcgcctgcaggagctgcccagctctccctctaggggtgcagagcgagcacgcgaggtgggctggccagaccctgcggctggcactgacctccgcgccccttcctccgacgcccgcacccacgcgaccggggcgcagactcccagcgccttccttcccgcggagatccctgcagggtctctgggaaagacagacagacggacggggagagcactcggagggaaagttgttcctcccagtctcctgtcaggcaattacaggcgagcccaagcggggagaggggcgggaggaagcgagggaagggctccggagtggggggaggccgcaggaggggaggcgggggtgcagttggtgaaactcctctgtctccc

SEQ ID NO: 4842 - DNA, 2300 bp, Homo sapien
tgcaacagggggagtagctcacttcttccgtgcctagctgctcaaacctcttgggaagcatacaaggtgggcaggttgtggggctccaaccccacgacagcttctggggtgaatatttatagctcctgaagccccagtgggcgtgtgttacatacagagtgctcttttaattttactcttttagttttccatttataggcttgtgttaaccagctcaattacaccctctaccttgtcgcaaagacagcaggctttctgtattgcgggttcttgccttggtataccagaagaatcggatcacacctgggcttggagaaggagcgaaaggttttattgagcggaagtggccctctgcagatggggaagccggaagggagctggctttttccttggagttaggccgctccacagcctgactcttctccgaccactcaggccaaactctgcatcattgtgctggtcagtggcctgccggcttgtcggtgtctgtccgtgtgctcttctgctaacgtgcccttctcgacgtccagccacttgtgtcttcttccggcgatgtgttcctcacgatgtccagctacttgtgtctgcctgctagggtatagggccaggatgggggtgtggcgggccagggtagtcttggaaattgcaacatttgggcgagaagacaggactgcctgtcctcatctaggcccttgggggtggagccctaaccggggaccacgccctcctctacccagcactcccctttccacttcggtatcatttaaagggaccatgctcttctctccccagcacttctgtatcaccaggatggggatcctttagatgggagagcttcgtaaatgcactctggactgaaaagcccaacagctttggggctcaaactgtcgatggcccagaggcgaattttctatccatagacatctccgtgagagtgaagagatcgagtccctcactgactgtgccctgtaaacaactgctgtatttggctggggccctgaattctgccataaggtgcccaggctcctgaccaagtcataaccaagacaggacatagcaagcctcaagaaaaggttaccttaagggaggcagggaggtggtcaccaagacacagagaacacgtgtggactgagaaaattaactttaatgggggcatttaaggcatatgggaaagcatttggaagaatcacaattttcatgctggcttcccaagtccctaagaaaaaaattcagaaaaggtctcttcaccatttgtgaattgtgaaataaacacatctcaaggggagtgtgtgggtgtgtgtacatattaatattccaggggtgggggaaatattgacacggatgattttggaagtacttgcaattcctgcccaactcagactcatctgaaatgggtgtgtttcaaaggctcaaaggctgccagattccttttgaaaggaaatgtttcttcccgttacctttcaaagtcagctcgcggagtttagccaagagctgtatttcaatgtgttgatgtcacttaacaagaggaagaggaagcgttcctctctgagtggggtttagagggagccaggagagtaactgcagccacgttagcaaggaaatgtgcctgatgacttagctggggcttttgtatcttccccatttactaacaatttactaaatgccttcgctaaagtgtcttttttctgctcccattgttctatgtaactgaaacaagccagcatagcattgtcatctaagtcaataatggtcacaaaagcgctttctctccttctgcagcagggtgcctgcaaaacataaaagagggtagtgatgcacccgagcaaattaccctcccaatctcatttaaataacgtcttcccctcatctatgcaaaactcagatgaatatttacaacatccaggaataggtaccacaggaaagaaagaaagaataataataataataataataaaaaccccaaccaacccaacccaaccccgcaagtgtaatcattctcaaaatgctccggaaacaaagtgttctagctgtggttgcccggcaacaggcccactgtagtattctgcctgggtacgtgtaaagtggagccgtcttttctgcacagagtgtgcactatcatcgtaacagcagagacggagagcaagatgtgaggaggttaaaagtcagggtcagaagttcaggttgctctgaccctcaaatcaatttcaagcactgtttgtgacattttcctgtgttccctcgcttgatgttagtctttgcaatgaaccaccgaatcagacttcagggctcatgggactttg

SEQ ID NO: 4843 - DNA, 2300 bp, Homo sapien
gatgactcagctcagctcaccagcccgataaaagctgttttcacctcgttcagggaggtactgcttttgggaactatccctggcatcctcctcacgcgttgccaataatgaaacccttggtgaactcctccttagctgtggtcattggaccatgaaccgccaagtgattgaaccctaatactttgacctttgagctgccgtcggtctgaccacagaaagagaaggtggatggcagtgcttcaattacatataatatagatatgctatgcagtattatttttataatttctaatacaaatgactatatactgtcttaatggacttagaaatgatgccatagtggagaccatctttcccaaaggacaggtgagttcccctacctccatcctcatctgagagtgggctccagggtctccctggctcccctttcatgcaatttttgctgggcagattccagtgcccatcttgacagcacccgggccggctccgccttgggacacgccctcccaggggatacccttgtgtcttagcaaaaggtcctgaagccaggaggctggtccgctgagtcaaggttgcttcatggagcctattttgacttctctgtggaccattcctacttctcttcccagtgccgctcaaactgtcagtttcaacccacaggtccctttgtgacttgggtccccacaacatgtgattattgcctctcctactctgctgtccgctgtcagttgagacaaataagccatgtgttttggcattagcaatgggcctcctgctcagggagaaaatgaacaaacctgtccatcttcccttttcacttcccacacctggcatgcttgaaagaaccaaggaggtggtattgcctcggcttgccatgcacccctcattcctaatctcgaggtgatagaatttggatgtagtgacaggatgagcgttgctatgacaacccactgatgctaggtgctccataagagggcatttttgacaggtcctcgcaaagtctgccatttgtgtggggaccaaatctcctatatttgtgcactagacatacctagggacatagcaccctttatgccttcaaaatgccgcatgcatatttgtgggcgtccctcttaaagaaatagcaaagccttactttgtaatttgggaaataagaaccaggtttgtactggaagtggactcgaatctggacctttctctgggctcacaggactcaaggccaggactcaatcaaaacatctggcttgctaggatgattccaagggtccaaagggcagtcatgggactatcatgtcgctttctgcataatttttcattcatttagttcgagctgtactggctccttcaattcagaactcctcaggcttcttcaggcagcctgggccttgcagtggactcatgaaggttcttgtctctccccttcccctctctcctcaggtgctcaaatacgcaatcaaccaccagttcctgtgtttgcaaacttcccactttgagacttccaactgtaagactgtatattgtcttaatggactaagagtgagaatgatgtcataatggggaccatcttttccaagggacaggtgagtcccccctctccatcctcatccaagagtgggccccagggttctcctgccccctttcctgcaaactttcctcagatgtgaggaaacttccaactttctctaaatataaaaaaaaaaaaaaaatcacatctgttaatagaccttttaaaaaagcccagctaggcaaggctgcccaggaacaccagagacaccaaaagaacaggaagaaatatgccttttattaggagttgcatatgtacagagaaagctgtttctcacagctcaggggaggctgtgagaaagagccactgtcatccaaggtcactgcgcgtacactggtaacaccacttagacaccgccgcacgtgattaagaaacagaaccatgacacagaaatgcagaagagacacgggtacgtgtgtggacacatcatttctaaaaacaagtcaacacaaaaatacaatgtgccaataaaaaaaaaatagacatatccatacatgtctttttttctgtttttaaagtaaatacatggtatgctgagctttcacctccagctttttccacatcgggattcacaggcactttagcaccccagccatggtttacaatacaggatgttcagaacaatgaaggaagatgggagccaccgagatccccgagacccacacacacactctaatactgacgcgagagtgagcttcctgccaccaccgctgtgggacccgaaaatgttctctgt

SEQ ID NO: 4844 - DNA, 2300 bp, Homo sapien
agtcatgggactatcatgtcgctttctgcataatttttcattcatttagttcgagctgtactggctccttcaattcagaactcctcaggcttcttcaggcagcctgggccttgcagtggactcatgaaggttcttgtctctccccttcccctctctcctcaggtgctcaaatacgcaatcaaccaccagttcctgtgtttgcaaacttcccactttgagacttccaactgtaagactgtatattgtcttaatggactaagagtgagaatgatgtcataatggggaccatcttttccaagggacaggtgagtcccccctctccatcctcatccaagagtgggccccagggttctcctgccccctttcctgcaaactttcctcagatgtgaggaaacttccaactttctctaaatataaaaaaaaaaaaaaaatcacatctgttaatagaccttttaaaaaagcccagctaggcaaggctgcccaggaacaccagagacaccaaaagaacaggaagaaatatgccttttattaggagttgcatatgtacagagaaagctgtttctcacagctcaggggaggctgtgagaaagagccactgtcatccaaggtcactgcgcgtacactggtaacaccacttagacaccgccgcacgtgattaagaaacagaaccatgacacagaaatgcagaagagacacgggtacgtgtgtggacacatcatttctaaaaacaagtcaacacaaaaatacaatgtgccaataaaaaaaaaatagacatatccatacatgtctttttttctgtttttaaagtaaatacatggtatgctgagctttcacctccagctttttccacatcgggattcacaggcactttagcaccccagccatggtttacaatacaggatgttcagaacaatgaaggaagatgggagccaccgagatccccgagacccacacacacactctaatactgacgcgagagtgagcttcctgccaccaccgctgtgggacccgaaaatgttctctgtgtgatgtgtaacggcttttcctttgtcttttatgtttcatggcagaactacttaggagcgcggcatcgccagtcagacatgcagtgtgtggatgcattagacaagcatcaattgcctctgacttgaaaaaccgtagagagcagatcaaaatgactgtctggtttatctctgtcccattctgtgcccttcctgacaagctgtcagaacaaaaactaattaaaataattactaggatgtactgggccatgagctcttcctaggagaatttctttcttagctctcccctcatgatagacacagggccaatggcaggcccagcttcccccggcaggagccactcctgtctcccacgttccccacacagagctgtggtgactcaacccacgtgtcaggaacaggaccgaacaagcgtatgtataaacgcagaccaggatcatcactttattggtaatgttgagtcataaggcagttacaaaaggacccccatggtgaccaaacaatgttggactatggcttagcttctgtaataggatgaccgactctcccgtcacaaagagctgagaaaggaaagagaaaaccacagtgatgacaaagtacgacaaatggctgtgctgtgaagtaccagaaagccccaatttttggtgtatgtcgcccacttttcctccaccagagactaagatgtcatcccatagctaagagaacttagagggagaaacagggccgcacgtcatcctccacttcaggtgaatttgtcactgcaagtggtgcagggatgttacaaccaagccgcggacaactcatgagtagggccgagattcctggtactgtggagaggcgcagagcatatgaacacctcaaacagatgattgtcacagggtgggaaatccttccatgaaacagacacttgagacatagtggcaaagacattaaggccttccatttctttgcctacaccgcttaaaggcactgataccaacaacagaaatactccatagtaccatcgaggttttaaaaaaactcccaaaatacaagtcttcataggaaaatgtcttttattgcgcgacatgaagcatccgttatttgcgtgctcaggaatagaagggcctccctttctcaggagtctgaagtctgttcagcctcgcaacctgagaaggggaggggggcacatcttgccggaagggccccttgggaggggcgtaactggggtcctggactttcttatacgagtcatagttgctgggcccctcggaaggaggctgcttcttcatctgctgc

SEQ ID NO: 4845 - DNA, 2300 bp, Homo sapien
ttccaagaatatgcagggtcaacttctttatcataaagctggctttcattataggttatgggtacaggctgtagataatgatctagagaaagcatcatgtaatgcttgataggactcctagaaaaaagagagttgtgtggtggtgttcttcaaggtcccttagaaacaatacacatttctcccacactctgctcctctggccccagatagaaagctctaccataggcctttctttcttctggagttgcaggttacagaaaaagatcacttataattaatggaattctaagatattagaagtatattttttactccaagaccagaacagagcacttaaacagataaatgttggccaatgaatgaaaactaacaagccgttagagctttcagtaagacgtcaggagagcccctggaagagagagtgggctacaagtctcaggggaaggtttctcccatctctaaccctgtaatttgaagaagacagtagtacagattccttccatgttaactgatgggcagcagccttatttctgtgcactgtggaggtgccagtttatgagctgtcagtctgcacatatggaacaaaaaggcccttggctaacacagaaattgaaataaagtggcagttagagcaatttcttcctatatgattcttgaacacagagtataatgaagaaacatgatgagggggccctgtgtaaactagaaaaactctaatgaaaaactatgaaaatcccacagttctgaagcactgagagacagaaatctaatcacattgaaagaaaatactgctcataggccaggctttgtgttaatataagtctagagttaactctccttcttctatgcacttaatcagacatctacagaacacatctgttgagctgtgtagccttcaggctgggccatggttcctcgactttccaggtctgacttatctatacctccctgagttatggaggtcaatttcaggattgtaaatcaactaattctatgaaaatgaaaactgttgttcacattttgcaatttaaaaaaaagtttttaaaaagaggggatccataatgcaggataactactttttgaaaagtcaaatggctgtgctgtatgttttcaattttaaaccatcaccttgatatgtttaggggtttaatttatggaacaatcaagcaatctttatatttaacattaagtgcctgaatattataaatcatcttagatgaacttttatgggagagtttcagtgcaacttctgaacaacttgtcacttttattgtatggcaatgatttgtaaaaaatgatatgctaagtaatcctagagtataatttatgggcacaaaaacaactgtcaagaaacagccagagaccacatttaatgaaatctttacagaccgaagtaataagtactaaattaatgaacgcagcttaattgaagctctatttgtaactttttttattagacttgttattaatgaacctttaaatgctaccactaacttgagctctatgtttaaatttaaataatgaaccattgttcacacacaaaaaagaacaaacactgctttaatagccctttgtctcaatggggctttcactcttatgcataactaagatacagacatgtccctcctacctctcaacaattatttacatggttggcaagatataatcatttaggctgctaaaatagtctgaaaatagctaacatgaaatccataacaaagtaaaaatgaggtaggaaaagattatacaagaattttggttgatctcaaagataatgttttcaaatctgtgctttcagtgcttttatttatttatttatttattttagagagagaatggaatgatctgttgcccaggctggatttggaatcctgggctccagcattcctcccagttcagcctcccaagtagctgggattacaggtgtgcactaccgtgtccagtttttagtactttttgctaagctcacactcctgtatgtttaaggagattctggtttgggatggtaacgacttacctgaacatgtctcccaagcccttcagcattcccttcttggctttcattttatccttctccttatctctatctttcttcttttcttttccagttttatccttttttctatcagtcttatcacctttctcttggtttccattcatttgtctctccagagagtgggaaggctgatcactggctgtggatacagactctctccctgatcttgaactttcttctgtgtcttcttccacttggaaggaaagaaaaaaaaatagggacacagtgaaccaacgcaacaaaa

SEQ ID NO: 4846 - DNA, 2300 bp, Homo sapien
attcctatctctactaaaaatacaaaaattagctgggtgtggtggcgtgtgcctgtagtcccagctacttggggggctgaggcaggagaatcacatgaacccgggaggtggagattgcagtgagccaagatcacaccactgtactccagcctggtgacagagtgaaactccgtctcaagaagaagaaaaaaaaaaaaaaaaaaaagtctgggtgcagtggctcactcctgtaatcccagcactttgggaggccgaggcggggagatcacgaggtcaggagctcaagaccagcctggccaacatagtgaaactctactactaaaaatacaaaactactaaaaatacaaaaaattagctgggcgtggtggtgggcgcctgtaatcccagctactcgggaggctgaggcaggagaatggcttgaacccaggaggcggaggttgcagtgagtcgagatcacaccactgcactccagcctgggcgacagagcgagactcagcctcaaaaaaataaaaaaaataaaaaaattctgagctttgttttttgcattatgataaatagctggctttttaacaaaaaaacacaactgtgttacttgggcgtagctataccaccatttgatagtctcttttcagatttgtgagggtttaatagcagaaatctaagatattgggacccttttagctggtcttattatacccacgataattgtgtattgctattgaaagtgctccttgctggtagagaggaaggactgaattttactgaggatatattaacttgatttggaggtcagttctttgcaaaagtttgggaagaggccgaaccattctgtttggctctttgttataagaaactcagaaataatgatctatactttctttgttgatgctggaaaaagaaaaatgacttaagaattcacggagtaattaaccttatggccccctataattctcattgtatttggaggagaaccttaggtgaccagtctcgaaagaaagatttctgagagtggatgttcatacgtgtctctctgcttcttatttaatagagaaatgtttaagctcttttggtagggggagacttacttcagttacttgtcgttctttcaactgcaaaaagtttggggtattgaagtgcccttggaccatgtgcttacgaagtgttggttcaaggaatggaatattgttatcactaagcagatcttttatctgcaaagtccagagaagtgcacttattgatttactcattttcatggctccctctacctctgttcagccgccatgatgcagataggcatgcaagattgtttaggattagaatatatagtagcatttacttctgatgttggccttatgcaaagaagagttacagaggctgtgcagatctgttgtagatataagccaaaataatctgctcttctgtgtgagcaggatatgttgggagcctaaggaaagaagtccttgtgctgacattgaatggtgtagtccagcaaattaatgaggggccagagtgtatctgcattattcttacccaagaagaaaggaagcactttgggaaggcctgcttattttctttcttttcatcttgcaaatatagtacacgggacccttagaggtctgcgctgtataacaaggtcttgctggcacccccctagtagtgtacaatctgattcttagagggtgtttctgtgggtgcatcagcatcccaccaggaagctgctgttttgctgctactgacttggcacacgatcttcacgtaggaggcatccacatcacatgttccattttaattctactcaaagttaaacagcattgcagtccatgttgctagcagggccatactgcagtaaaagtgtgggaaagtaaagtccttgaatgtattttagctttattatttttgttgcgttggttcactgtgtccctatttttttttctttccttccaagtggaagaagacacagaagaaagttcaagatcagggagagagtctgtatccacagccagtgatcagccttcccactctctggagagacaaatgaatggaaaccaagagaaaggtgataagactgatagaaaaaaggataaaactggaaaagaaaagaagaaagatagagataaggagaaggataaaatgaaagccaagaagggaatgctgaagggcttgggagacatgttcaggtaagtcgttaccatcccaaaccagaatctccttaaacatacaggagtgtgagcttagcaaaaagtactaaaaactggacacggtagtgcacacctgtaatcccagctacttgggaggctgaa

SEQ ID NO: 4847 - DNA, 2300 bp, Homo sapien
tcacagatttttacaaacaggagtgattctgggacatcttcaaccacttgcgttggaggaacacttcagaaggcatcctgttaccagggatttgccatatgcttccttatcatgcccgcttgagccactgtgttggtgtcacccaaatcaaatgtcatctaaacttagtcattttcttcctgattctcatatactgtttattcactcatctatgcatcctcagcatctgtttcagacttctggtttagtatttttcttatgagctcatagagtacagggaatctttcttatctgttatttggatctacgtacctggcacaatgccttaatcagaataggttctaataaatgtttgttgaattgatttctttgttttaatatttcagagaaactgcagccttatgaaatggcatgccataatggcattttttttctttccttaaaacacaacataaaagatacataagaaggctagaatgtactctttttgaaacttctatttagttacaatttatatggtcacttgttcgctgctagtgtttgtatataatatatgacaggtttcctgaaaaattcagttgttctaatatcaggctcattttttatgatcatcttgaaataattctgtattgtcaaatagagtgaagaaacagagaggaaagtagagaaggagaaaattcacatggagaaagagttactctaaaagttaaattaattttgtatttttctatcactttctatacagccacagttttttttttaatggactgtatttgtattatttagttgaatttttcttgaggaatatacatatgtatatttacacttgcaggtatgtatgaacctccctaaaatggatgcgtgctatttttagtaaatatttttatttttattttttcttcactccagctctttgagtccagatgttgatccagttcttgcttttcaacgagaaggatttggacgtcagagtatgtcagaaaaacgcacaaagcaattttcagatgccagtcaattggatttcgttaaaacacgaaaatcaaaaagcatggatttaggtagtgagtacaatctccatgaatctttatctaaataagttttaaatgctttcaggataaaattgatggtcccaagcagatgtctgtttactttgagcaatagagaaaataaatgtgaaatgtggcaatttggcaaaaattagtttttctcccagtttgagataacgatattactcataagtggcatgtttacataatatgcaatatgttaatatatatgttttcttaagagaatggaaacaaacacatatgcatatcatgctatgtccatgtatctttattttacaaaatgaaatgttttaacactttggctatttaaaaccaatttcattgaaattgtatttggttggttgtgggatttttgaactagaagagaaaattttggagagaaaccattatctcaatccatgtctagaatttggttacttcatgatgtcttcctttcattgctgttctttaaggtttatttattggaagctttcatattttgataattaaggcatttaatcaaagtaataatttgagagtatttattatagaaagtatttaggagcaaatgagaggaggaaaataatcatagttgttcaaacaccaatcaggtagtgtctctttaaatccaaatccaccaaaaaaaaagtaaaataattaattatatttatacactgaatgatttaaaacctttgttaatcaactgtaacttatgctgttctctggtggctgtttgtattccaagactaaaagcattaatttatcatacgcataaagaaaaatttggtgatgcattgccttggctaattatgatatgctaacatataacacacatgtctgtgaaatgaaatgactggcatattgcatggagacactgcttttttttcctccttttttgattatgaatgtttgcttgatgtttcatagtatttgcatgaaatattagctgaggatcgtcacctaactaaaaagatctgggaatggtggaagcatggtgggctatgggaactaactgggctaactattatacatttaccttttaacagtagctgacgagactaaactcaatacagtggatgaccagaaagcaggtaagaatggacagttagactgttgccatagaaacgatggcccacatagcttatcacaattatagagctgccaatcatatgccatgtaaacatacatattccagtcttacgcagatgttttcattgtgagaaattgaattacataagaaaagaaatattttct

SEQ ID NO: 4848 - DNA, 2300 bp, Homo sapien
aattttcagtttgtattatttgctaatcattttatcttagttgatttgatcttaaaatgtgggaatctgaacattgatttaagaaaaacttcacattttcaacagctcattttgcacatgggcaagtctgacctattttctacagttggcacataatttataatggatccatgaaatttagcttttttcaagctccaatattatcaaggcaacatataatttatttttaactttcaaatgtcctattatacaacaaagtatgtttttccatatttgggaaaatagatgatcctacctttcaagagaggatgccctgtgtcctcctcacccctaattccaaactgcaacatacatttagaacaagcagagtataatacaatacagatcactgaaaaaggaggcattctaagagaacagactcaatcccatagagaaagagaaaatggggactgaggaaagagagggaggtatatgctattgataatctcacaagagaacaccatcatctaagaaagccagactgtgggccaggtgctatggcgcgtgcctgtaatcccaggactttggcagactgaggcaggagaatcccttgagcccagaagatggaggctgcagcgagctgtgaccacaacactgaactccagcatggtcaacacagtgagatcctgtctcaaataaaaaagaaaggacagggaaggaaagactgttccctactaggggctttgtaagaggcatcccattttaaataaatgaataagcaactgtttctctgcatgattcacctcccaggtataactctgccaactagaagagaaactgttggctctgagaaggaagatgtgaccctgatttcaagaaaaaattcagctaaaggggcttttgagatcccagtgtttcctgctgagttggcaataggagtattaatgtccacttaggaatatgttgatcacaagaattaagaacacaaaccacaatccacctacaaaataataaaactacaataagcaaagataatttatggtcttttgatgtaaggtcctggaacctaataccctttgcccaaaattaggacagaaatgtagtttatttacaattttagatactagcacttttttgcatttcttacctcattgcacttgcttattctccttgcaacaataagctggatcattcctcgtttattgccttcagtagacatagaccttcttagggtttccatggcatcttggtttgtcttgcccaacagggattctccatttactgctatcagttgatcattcacccgaagccttccatcctgggaagaaaacaggtaaaaataagtgctattaaacagactgctataaaagaagtagcttttcctttagttaataaataaaataaaaacaaagcaaaaaaaaaaaaagtggggagctttaatcctaatggattatgcccaattgaacgctggcataataacgtctaagcagctattgtagcctgtgtctatttcaatcatttatacatttgtaaatcaagtcattatcataatctgtttaccaaaatagcatactaattcaaaggacacaaagtgattactttcttgcttccagaaacacccatagaggttatttagaaaccaagacatgtaaaagctcaaggctattagacagttgcagagaactgtccccttaacaaatggccaggaaattttctctaggctgagaaatagagtaagtgacccacaaacaggggaggggaggggaaagattaacgtctactatacgcccattctgtgacaggacctatgccaagtctttgcattgattaacttcatttaactagcatgtcaatgggttgtatgttctgtgagagaaaaaatgaaaggttgaagttatggactccatccccacgtgacacatcactgatacacctagttgtttaaatgtgaatgtgggtaccataaagaaatgagaaaacttctgttaactgtatatgtttccaaaataggaacagggttgaaattaaaatttttgttaataggcatacgcatgataaagttgacactcactttagatgctgctcctccattaataatggacttgacaaagattcccaaatctgcgtggttctcttttgaccggttacctttgacactgacaccaaggcctgcagatcctgaatcattaagtgggacttcaaatgtcagaaattccctggtgccatcaggtgtaagaacaatatcctcatcttctgctttctaatagggaacaaaattgcacagcacattatagtccaatgtttctttctcaaagttattt

SEQ ID NO: 4849 - DNA, 2300 bp, Homo sapien
agaaataggttgtaggactagatgtgccattcagtttttacttgaagagcctgtgccacgtgtctgttatgtggttggagcaagagtttgtgcttgaacaagcatcctagccttactgatttggacatgaccagtatagagatggtggaaatcttggtcatgggcgggattgctgaggaggaggagctcagaaggctgagtgcttcctcttctggagtgtaggctttcttaatgataggctgtcatcttaatgcattttattcagttctacattaagctttcatttcttcctctgttttaagggaggtgaacaataatttgtatatcctaaatgttttttattttaaaaagtcttccttctatgcttggtgactatgaagttaaatcttaactaattaaacaagattacctgaataatatttaccagctatattatgtatgctacaatattgtggaaaagttttctgtgatgttgtatatctctactttgtctcacagatgttgatgttagaattctttagaggctctctgaacccatatacctttttctgctgattttgtatgatcaggatttgttattttttgtgaataaacaccattagtgaacattaaatatattgataacttcagaatttcctcataaaaagggagataaatgaattatatttatttatttttactcccattgttactgtttttcttgtcgtttagaatatatgattacaccaaaaaaatcccgaactctagaaatctactagtctttagtccttccactacattttccctctatctttctcaaatctgatttaagtttggttcaatattgaataattgctacataaaaatattaacagctggttccaagaatcttctggagtgggtgcagatgtagtgttttcatggatcttgctgtggaaccttcatggaaatattttgcctcttatgattaaggaactgctcattagcagtctttaaaaataactttgagaaagaaacattggactataatgtgctgtgcaattttgttccctattagaaagcagaagatgaggatattgttcttacacctgatggcaccagggaatttctgacatttgaagtcccacttaatgattcaggatctgcaggccttggtgtcagtgtcaaaggtaaccggtcaaaagagaaccacgcagatttgggaatctttgtcaagtccattattaatggaggagcagcatctaaagtgagtgtcaactttatcatgcgtatgcctattaacaaaaattttaatttcaaccctgttcctattttggaaacatatacagttaacagaagttttctcatttctttatggtacccacattcacatttaaacaactaggtgtatcagtgatgtgtcacgtggggatggagtccataacttcaacctttcattttttctctcacagaacatacaacccattgacatgctagttaaatgaagttaatcaatgcaaagacttggcataggtcctgtcacagaatgggcgtatagtagacgttaatctttcccctcccctcccctgtttgtgggtcacttactctatttctcagcctagagaaaatttcctggccatttgttaaggggacagttctctgcaactgtctaatagccttgagcttttacatgtcttggtttctaaataacctctatgggtgtttctggaagcaagaaagtaatcactttgtgtcctttgaattagtatgctattttggtaaacagattatgataatgacttgatttacaaatgtataaatgattgaaatagacacaggctacaatagctgcttagacgttattatgccagcgttcaattgggcataatccattaggattaaagctccccactttttttttttttgctttgtttttattttatttattaactaaaggaaaagctacttcttttatagcagtctgtttaatagcacttatttttacctgttttcttcccaggatggaaggcttcgggtgaatgatcaactgatagcagtaaatggagaatccctgttgggcaagacaaaccaagatgccatggaaaccctaagaaggtctatgtctactgaaggcaataaacgaggaatgatccagcttattgttgcaaggagaataagcaagtgcaatgaggtaagaaatgcaaaaaagtgctagtatctaaaattgtaaataaactacatttctgtcctaattttgggcaaagggtattaggttccaggaccttacatcaaaagaccataaattatctttgcttattgtagttttattattttgtaggtgg

SEQ ID NO: 4850 - DNA, 2300 bp, Homo sapien
aatattgacaataaatgacttacttttgggagacctgacaggttttgaaattcacaatactaagcactatcaaattcaaatgcaaagcatggaaactcctttattcctgaaatctttcctattatcattctcaaacctgcagtgcaatgaggttagcttttcctcattacctttactttcacagaaagatgggagttgcagtcgtcttttaagctagcgtgccagctggcttaaaacagaaaattgcccaagccattcaaaaatacatgcttatccatcctccacactgcaatacccactcaaccattaggcgggctctgtttggggcatttgtaaacagagagagtgttatagcttgttctagaaacataatactgaccagccagaaactgattttttacatttatggaagggatgcatttttacatgtcattttaacgttgtggtttttgtctgtcatttaaaaatgtatgaatagtcattttaacatgctcctttgtaaggacatctttgtaaatataataacagcattaaagtggtaaggcagtgtgcatggtggagatattacatgtgtaatcatttgcattcttaatgttccagaaccctggggttattagtaaaacgattggagaaaggtggtaaagctgaacatgaaaatctttttcgtgagaatgattgcattgtcaggattaatgatggcgaccttcgaaatagaagatttgaacagtaagtgtgtgctcgctgcacttctgttcttacttgcattaggcatgacagagtgcagtcagttgaaatgcttcaaacatgtctgtgatctcagtctgtatactggagaggaatattttctgccattagcttttaaaaatttaaacatactcagtaattaataccattagactatatttcaaaatgtcctctgatggatatagctcttcttaagtattatggcccccatttcaactttacaattttgctggttcctctccttttggaaaattgacagtgtgcccatttttatcatactttaactcacccgtccacctttgctgcacacagtttctctagatacaaacaagcagataaagctgtttgtatctgcttgaggttgtattcagatacactttatcttgggttgtattcagatacaatattgggttgtattcagatacactttatcttgattcaggcccttagtcaatgaaaaacataacagttggccagttcttataaaacaaggcaggagcaaacagaactcttaagaacttgaggtcctgaccagggaaccagcatgagaaagagctgcttcccaggctggttgtatgggtgcactgtgacccacagctgtcaacattttgaattattgagcctggattgctgttcttgagatttttacatataccaacttaataaataattaatagttactttctatagtcttctaagtgtgtgtgtgtgtgtgtgtgtattttaaaaattttaaatacacatctaacccaatccaatattctaaatataattataaagctctgtctttctttgaaaacttaaattgaagtattttgtaatgtctacaagttgtattagacaatgttgtagagagaatgttccatttggtttctattattgaaattataatacttgttatacttaaaacatgtttaatgatttacagttgagaggacagaattttatctgtagttgtagataatttttctatttttattgagagaatgagaaatttatatttgaagaaacagctattgatagatcagagctgcaaacttgattgataaatgggttattagaattttgcttttcaatttcaacagcctgtcagttcttattgcttaattagtaaacttaattaagctcataatatcttctagtctgccagtcttaatttgctaattttctattctttctcaaacccagagcacaacatatgtttcgccaagccatgcgtacacccatcatttggttccatgtggttcctgcagcaaataaagagcagtatgaacaactatcccaaagtgagaagaacaattactattcaagccgttttagccctgacagccagtatattgacaacaggagtgtgaacagtgcagggcttcacacggtgcagagagcaccccgactgaaccacccgcctgagcagatagactctcactcaagactacctcatagcgcacacccctcgggaaaaccaccatccgctccagcctcggcacctcagaatgtatttagtacgactgtaagcagtggttataacaccaaaaaaataggcaagaggcttaata

SEQ ID NO: 4851 - DNA, 2300 bp, Homo sapien
aagcttacataaaatttagcgttagtgtttctgcatgatttcctttagtttataatgtaggaaaaaaatagttcttacagtctctcaccccaccagtgatttgatttagcaaaaccactggctttataatccttcctggcccttttgtcccattggcagggctctaacctctttactccagagaaaacacagctgttgtcgtcttctttctgaacagtgaagggggctacatcattttcaactgtattttgaagaattaatttgtgcactaatataaatgagttttctaaatttaaatgtttgaaataaagacaatttatataattttaggcctcttttttcttttagagatgggatctcactatgaggcccagactgggtttgagtttctgggctcaaatgatcttgctgcctcagcctcccaactagctggaactgcaggcacacaccaccacacctggcttaagacatttttagcaataaagcaatttttggtaggtatttgtgagtagatgaagagcttttagttatgttgggctctttgcattgtctcttacgactaggcttattcataagaatcctataagtcatactgctttaaaatttttattatcactagagtcaggggaattgggagagattcttcctcagttagttgttctatcttgaagattggggaaatgctggaggtttgttgatcgggagagattcttcctcagttagttgtcctattttgaagatgggggaagtgctggaggtttgttgtgggatgatgtcgttttttgggagttgctcaccttgcaagagccttggtctaccggccttctctctcaggtagcatttgcccattgccatcacatattccacttcactgtccagctcccccattcctctacatggtgatatggtgtgtttgtgtctttgtgtctgtgctatgtagttgccacttccccctaccccttcatcgcctccacatatcgggggaacctgtccccgataattcaacgtagtttcttttatattttccctaagtgtcagccagtctgagaaataaagagaaagagtacaaaagagagaaattttaaagctgggggagacatcacatgtcggcaggttccgtgatgccccctgagcggtaaagccagcaagtttttattagcaattttcaaaggggagggagtgtaggaatagggtgtgggtcacagagatcacatgctttaagggcaacaaaagatcgcaaggcaggaggtcagggcgaggtcacaaggtcagggcgaaactagaatcactaatgaacttccatgtcccgctgtgcatgcattgtcattgataaacatcttaacagggttcaagagcagagaaccggtctgactagaattcgccaggctggaatttcctaatcctagcaagcctaggggcactgcaggagactagggagtgtttcatccctacctacgtctgcataaggcagacactcccagggtggccatttgagaggccccgcctgggaatgcattcttttctcagagctgttaattattaatattccttactggggaaagaattccgcaatatttctcttacccgttttcggtaataagagaaatatgcccggcccacaggcagccagactttcaggttatctcccttgttccctgaaaatcgctgttatcctgttcttaaggtgcccagatttcatattgttcaaacacacatgctctacaatcaatttgtgcagttaacgcaatcatcacagggtcctgaggcgacatacatcctcagcttacaaagatgacaggattaagagattaaagtaaagtcaggcataggaaatcacaagagtattgattggggaagtgataaatgtccatgaaatcttcacaatttatgttcggagattgcagtaaagacaggtgtaagaaattataaaagtattaatttggggaactaataaatgtccatgaaatcttcacaatttatgttcttctgccatggcttcagctggtccctccgtttggggtccctgacttcccgtaacatccacacgcctgggattctgggattgctcttcttctacttccttttctggttgtgactcatcttttaactgtaacttattgaaggtctcctacatttttaacactgaggtacttgtgaagaaaaaggacattcatttgaacaaatatttgccactagatattagtcttaaacttaagccgatatggtactattatttagaaatattttaacaagtaaattttttgaaataatcatgtaattactcattcttaagttgccta

SEQ ID NO: 4852 - DNA, 2300 bp, Homo sapien
atacttttggagagccttatttatgtttcagaatatccctcaatttgggtttgtctgatgtttcctcacgattagatggacgttatacatttttggcaagaataccacaaaagtaatgttatatacttcccagtgcattttatcagatggtacttgatattgctgcatcttactatgaatgacgttaacctgggtacagcagtggctgccaagtttctccacttcaacaatattactgttttgctttttagtcaaaatgactcttctggggagacattttgagctatgcaaatatcctgttattatcatattcacacccattaatgttagtatccattagtagattttacctgaacgatttttatggtggaggttgcctaatgatgatttctgttgccatcattccttctatttattatttggaatgctacagcagggaacagctgtttattctctaccatttatttgttcaattatttatatcattatggactcatggattttagtttattctttggataatgatccaatgccagtatgatttctttagtttgtaagttgtctccgctttgtccattgggagccccttcaggttgacacctgcttccatttgatgtgccttcatcatttttgagtacccctttttgacatcacaaggcattccaggcttaccatgtgtttccctgaccacagccctgaaatcaaccatttttcaaggagcccttgttcattaactggagaatggtattagaaaccacgatctgggtactaggcatgctcagtggcactggggatgccattgtttctaggatctctgtgtggacagagctgggaactctttatactcacacattcattaacatttattgatatacttacccatttgtcggtgtatttacttaactatgtacttataaaaactgtgagtttggccgggagcagtggctcacgcctgtaatcccagcactttgggaggctgaggcgggcagaacagttgaggtcagaagtttgagactggcctggccaatatgatgaaaccctgtctctaccaaaaatacaaaaattatctgggtgtggtggcatacgcctgtaatccccgctacttgggaggctgaggcaggagaatcacttgaacccaggaagtggaggttgcagtgagccgaaatcgtgccattgcattccagcctgggcgtctcagtgagtctccatctcaaaacaaaacaaaacaaacaaacaaacaaaaactgagctcatactgatgtcctggattccattctgagcaccagtttattctagctttttcttctctgtaacttctgtttctgactgtgaaaacatctgcttttattatcaaacatatttgcactcttttgttcattcttggtgtgtgtgtgtttgtgtgtgtgtggggggcgtgtagtagagtaagaattgctaaagagaaacaaatttactaactggaatatttgtatgacaggtttgtctttagcatgtatcttatgcacaaatgagaagatacatgtttagtttttaatatcccctttttatgtgaatagtagttcataccatgtgtgtatacacacacacagatatatatgtatactcatatatatacacacttttgcatttttcttttccatttaaatatcctatatttttaagaagatttatatctgtccctgacttagcatgctgtgatagcaaacaattttattattttttcacccatagacttttgaatgtgaaatgtacgacttagaattatacaagtaaagcatcaaaatttagggaaacactgtttctttgaggtttttcttcgtaaaacttaccattctagggtcatttatatcagtatttttgcactgtagaattatgtcaaaatagtacaaaattttggtagttaattaagtgcctttatttataagtgcacatttacctttcatttctagctggtagcagtgtttgatgagcaggatccacatcacggaggtgatggcaccagtgccagttccacgggtacccagagcccagagatatttggtagtgagcttggcaccaacaatgtctcagcctttcagccttaccaagcaacaagtgaaattgaggtcacaccttcagtccttcgagcaagtaagtgaaagctctttcttctcttccatttcatcttaatttacaggaataccaacttttgttattcatccatgaccctgtaaatggaattaattatctgttttattcaaaaattaagtttaggacccaggcaaatgttctttgcaagagaagtaggcagttctttacat

SEQ ID NO: 4853 - DNA, 2300 bp, Homo sapien
cttccctcgatttaaaaaaatattttttttcattctcatattgtcaagagagtgctctgaaaagttacagtgtaacagtaattgaatattctatttatttttgcctttgaatactaagatatataagtcaagggtggactattccttgtcataaagctgaaagtttaatttcaaactgacatctgctgccagttctgtgtttcagtattttatttatatttaaaattccaccttccctatatttgtaatatcatttttttgtggtaattgtgtctttgtgttcttcctttcagtaggtgttatttattaggctcacttttattctgcgggcaacttcagagatcccttgttcctcagaacatgctagaattccttctcttcttcagtgtcctaagtagatgatatgaatgtgcataattaactacgttctgcagttctcagctcaggaatacttttcagctcttacagatagacacttaggcgtaacagttgttacttatgagctcattttaaaagtagataaatgtctgaattttcaaagacaaagggtttcagagttcttgatagtttcttatagaggtgggtttagagcctgtgagaaagccactacttcagaatcttaacaaatagtaattgacacccagtggcaaaaatcagaatccgcttttctttcaacagcagatatttaaggcttaattgctgactgaaagtgcagttcgccctcctgcttctggagacagtgatgcccccagcccagctcactggacaatcagccagggtcaaggtgtggtccccatacccagagacgtcatcttctcctcttccgatctccacgtgtaccccagcttaccccagcttcatcttccctatgcacagaaaattaggataattctaagaattgtttttcttggaaacaatgttttcaatatggcaaagtgaaaattgtttttctaaacaagatattggctggatgtggtggcttacgcctgtggtcccagctacttgggaggctgagatgggaggatcacttgagcccaggagttggagggtgcagcgagctgttattgtgatactcctactccagcctgggtgacacagtgagaccttgtctcaaaaataataataatagtaaataaataaaaatttaaaaagttaaaaaagtaagatgttgatgccagcaaaacttattggtgatgattgaaagccaaaaatatattataaaacacacaagcagtatatcaatattatattatatataaatataaacaaaaacaaaaaaaagcgctaaaattatactaaaggaggaggtgcagttatgcttcttgtaggtcaggtgctctgagcagcagctgccatgccggtcctgccatcaccacaaatccaaggcgactgacaacaccaaacccttcccaactgttcttaactctagtatattcttgctaatgcctttcagtactaatgttttccctgctccagcgtaacacccagaatcttttccttgaccattctgataggagcctagaaccttctgtagttttcagtgtttctttggtgaggcaaattcttggaatatctttggcacgggggtgtaaaatttccactcgctatatttaagtctacagctgggagcaatttcttattgatgtacctaaaactagttaaatccccactctccttagcagtccctcttgagagttatttaagatttaggtaatatattacaaattgtgagtgcaaatctctgccactctctgagattgctgcactaaggaatcactagccctgcccttccctgtctcatcctcccagcgcctggaattggattagcacctgtggtgtgtgttggcattttctgcagggctgatatggtctggctctatgtccccacccatatctcatcttgagttgaaatccaaattgtcatccccgtgtgttggggaagggaactcgtggagggtgatgagatcatgagagaagttcccctatgctgttcttgtgatagtgtgtgagttcttgcgagatctggtggttttataaggggctttccccactttgctctgcactaattctctctggtgctatcttgtgaagaggtgccttccgccatgattgtaagcttgctgagtcctccctagccgtgtggaattgtgagtcgattaaacctcttttctttataagttacccagtctcaggtatttcttcataacagtgtgagatcagactaatacaagggctttaaacatttgtgtgtttgtgatagaaggaaattccatatgcaggtatggtcaactaagtgagta

SEQ ID NO: 4854 - DNA, 2300 bp, Homo sapien
ctagtatacattctctgccgcgcggtggctcacgctgcaatcccagcactttgggaggctgaggcgggcggattgaccagcctggccagcatggtgagaccctgtctctaactgaaaatacaataattagctgggcgtggtggcgggcacctataatcccagctactcgggaggcggaggcaggagaatcatttgaatccagaaggcggaggttgcactgagccgaaatcacgccactgcgctccagcctgcgcaacagagcgagacttggtctcaaaataaataaataaataaataaataaaaataaatacataaataaatgtaaaaaacacaaaataaaataaagtagtatacattctaaactagtagtatactctcccaatgcatgaaaacagaaacaacacctataattatcagtaattgttgttgtggatccaagtatctatgtaagaagcaaaaaacccacatcaacagttgttgtcatcgttgtcacaaacttaattactggctagaaatgtctagtgctgcagccaaacagcagtaggaggagcctttcccatggctgagtggaaggagggaaacctagactatttctgggtctgccttgagctttctctgccgccttgggcaagtgactttggccctgggtcaatgtcctggagtaagatggggctaacaccactgcactgatttgctgggacaggtggtggaaagtggtggtccagggctgggagaggagaggaagggcaatgtttcctaggagaaactgcactatgctggggcagctgcggtgctgcaaagcgcagggagtgtggcaagcggacgaacctcgtgtcttgtttccttgttttaagattggaggtggagtgggatggatggtcgatcgccagctcttccagctcttaagtgctcaagttctgcgccaacccaggggagcttgattgctttcacgtgtcttggaaacaactggcaaaaaagaatttcacatagtctggaaagggcttgggacagggaccactctttgcagacatttgtcattctttaaacataatgacatacatttattaaggactcatagtccataactaagacaaaatgagcttcagttacgttccctaactcggtccacgttcctttagaacgtctcaagcccgcatgtcactcatcgcggagtcgcagccttcccctgggttcgggcgtctgcgttaagcgccggcacatcgtggggatccccgcgtgagatttctctgcgccgtcggaatagactgttcacggattcgcgttaggattccttatgctgcagaacttcaaagaaataaatgtatcagaattgcgatgtttaagttctaatctatttaagcgggtgggtcagcagagggtcaacaggaaacttcaaggtaaatagtggcctctggaaaaggcccggtcgctcacggcttccccactgtctccccagagcagactattaattcttgcgtttcaggcagaactgccgctgccggccctgcagcagagctagggagcgggcagggcagaaacccagccgagcaagctgcaggctcgagtccccgcgggcggagaggctcgggctggagcctccggggcggtgaggaggggactcaccgcactgagcacaaactgctttccccgggagcgcctgcacccaaaaccctccagttcgaggaatgggattaaaagtgacaaagaaaggggaaggggggctccgtggagacttctggaggcgtggaaggggcgtccccgaggaggggcgacgcagccctgcagggtgctgggcgggcggggtgaagggggctggggggcgcctgggccagggctggtgggggcagacggccgcctgcccgtgctggcactggggcgaggggtcccgcgcccccggagggagggagggagggagggaaggagggaaggaggtcggcccccgagggcggtggcgggggcgcgagctgcggtcctgcgctccgccccgcgcgggtagccggccgcgcctccccctgccgcatgtgcgcggtgttgtgtgccctgccctgctcctccccctcccctcccctcccctcccctcccctcccgccgtcccctcccccagcggccccgagcgagcgccagcgccacacagccccgggcagccgccggcgagcgcgccgcgacgccgaacaggtggccggaggctgcgggcgccgcggcggggagaggcgaggcaagccccgggcgaagcgaggcgaggcgagggcggccgggccgggcatgcgagctgagcggccccccggcgtcgccgccgcct

SEQ ID NO: 4855 - DNA, 2300 bp, Homo sapien
atttaataaaattaatgcttccgcttcatccaggatattcctaaatcaatagccttaaaaactgggaatgtatggcagtgaagaatacagcgatccaatgaccacccggacaggttggtggcactgtcttgatccctgctaaggcatcaatagtgtccgtattcctttgcaccatcagtacaaaaacaaactcagtcaaaaagacagaggaggccaggcatggtggctcactcctgtaatcccagaacttttgggaggctgaggtgggcagatcgcttgagctcaggagttccagaggagcctgggcaacatagtgagaccccatgtctaccaaaaatacaaaaattagctgggtgtggtggcgcacgcgcctgtagtcacagctgcttcggaaactgagatggtacactcgcttgagcccaggagtttgaggccgcagtgagctatgatcaggccactgcactcctgcactccagcctcagcgacagagggagaccctgtgtcaaaaacaaaaacaaaacaaaacaaaaagcagggggggcctgacacggtggctcaggcctgtaatcctagcactttgggaggctgaggtgggtggattgcctgagctcaggagttcaagaccagcctgggcaatgtggtgacatggtgaaaccctgtctctacaaaatacaaaaaattagccgggtgtggtggcgggcttctgtaataccagctactcgggaagctgagacaggagaatcacttgaacccgggaggtgcaggttgcagtgagctgagattgtgccgccactgcattccagcctgggtgacagagcaagactctgtatccaaaaaaaaaaaggaccagacatattgcattgttaacaaactagttgttaaccttatgacctctgtaaaggtctcagggatttccagaggtctggggaccacactttgagaatcactagattaaaagggggaaaacatgggaggaaaaaaaggtcacataatggaaacatactgttggattgaatttcgtatataaaaaccctttactgaaataaagagtagagacttcaagtaccaagagaagcagattagaagaggaggaaggctctagggactgatcaggtctggaggcagggttttaaatgggccttgaagggttcgtgcagtttggaaggaagggatgggagggaaaagcttgctgaatcgtataaatgaacaagaccctgatggtgagctcttgaggatatgaaaggcaaaaagcactaaggccgggcttttgttcctctgtggccctgcatatatgaggaggtgatgagtaattctatatttttatcagctttaccgtttaaaactccaagggaggaaaacccttcaaactgataggcttggggcttggtgaaggtggggtattagtgaaaaagatgtgaagtttctttatcgaaaatacatgtatgtccaagaaattctctgtagataaaaactaacaagaaaaagagtttgtcagagaggaaaagtagttttgctaatttatttttgatcatttgcaaagcccatggaagtgtgtggcaagaggattgtggtgtcttaggatattcacataggtctgaaacaaggaaaacatacttctgttgaaagcaccattccaacatattgttattagcagtccctgaactaacgggtagtgggtgggtactgtgtccatcagctcagcgaaccgcaattgcctcattgacagcaagcccagcaaggaatcacttggaatattaatttccgtggcctttcgcaatcacacgaagcttggctccctgcgcttgccgtaacgcggcctgtaccattgctttccgggtggcgggggggatttggcagcagcggaagaaggagaccggagggtgtgtgttgggcaaagccggaggcagaggaggacgattgttttacggatcccgtgatcggcccgtccttctcccctttccccccctccctaccgcccctgtcccgccggggagcggcggcggccttggactttgctgtctttcctcgcggagacaggtgagtgtcggcgcgcgggctccccgggcttcgctccccaccccccgcgtctccggggccggtggcggcggccggccggggaggcggcctcggcgcacagtaatggcagcgctgtgagcaggggaacgcgagctgacagccgccgccgccgccgcctccgcccaccttcctcgccggggcttcgtctttcactccttcgggctgcctccccctccccttgtcccctgccccttgccctgcttctgcagaaggtaaccccgctg

SEQ ID NO: 4856 - DNA, 2300 bp, Homo sapien
taacttcctccccaaattaagttggcctatgcccaggaatgaccaggaacaccttggaggtcagaagcaagattaaatcaatgaggtcagattcctcttactatcatgttttgcaaaggcagtttcaccatgaaaaatgcaggtagttcagcctgtaagtcaaccacacaagtgcttttcttcaagacagccatcccactttggcatgcagaagtgcatgtgtacttcccatttcttcacacagagtattagaaagacttgtattcaagggccaaaatttaataaaattaatgcttccgcttcatccaggatattcctaaatcaatagccttaaaaactgggaatgtatggcagtgaagaatacagcgatccaatgaccacccggacaggttggtggcactgtcttgatccctgctaaggcatcaatagtgtccgtattcctttgcaccatcagtacaaaaacaaactcagtcaaaaagacagaggaggccaggcatggtggctcactcctgtaatcccagaacttttgggaggctgaggtgggcagatcgcttgagctcaggagttccagaggagcctgggcaacatagtgagaccccatgtctaccaaaaatacaaaaattagctgggtgtggtggcgcacgcgcctgtagtcacagctgcttcggaaactgagatggtacactcgcttgagcccaggagtttgaggccgcagtgagctatgatcaggccactgcactcctgcactccagcctcagcgacagagggagaccctgtgtcaaaaacaaaaacaaaacaaaacaaaaagcagggggggcctgacacggtggctcaggcctgtaatcctagcactttgggaggctgaggtgggtggattgcctgagctcaggagttcaagaccagcctgggcaatgtggtgacatggtgaaaccctgtctctacaaaatacaaaaaattagccgggtgtggtggcgggcttctgtaataccagctactcgggaagctgagacaggagaatcacttgaacccgggaggtgcaggttgcagtgagctgagattgtgccgccactgcattccagcctgggtgacagagcaagactctgtatccaaaaaaaaaaaggaccagacatattgcattgttaacaaactagttgttaaccttatgacctctgtaaaggtctcagggatttccagaggtctggggaccacactttgagaatcactagattaaaagggggaaaacatgggaggaaaaaaaggtcacataatggaaacatactgttggattgaatttcgtatataaaaaccctttactgaaataaagagtagagacttcaagtaccaagagaagcagattagaagaggaggaaggctctagggactgatcaggtctggaggcagggttttaaatgggccttgaagggttcgtgcagtttggaaggaagggatgggagggaaaagcttgctgaatcgtataaatgaacaagaccctgatggtgagctcttgaggatatgaaaggcaaaaagcactaaggccgggcttttgttcctctgtggccctgcatatatgaggaggtgatgagtaattctatatttttatcagctttaccgtttaaaactccaagggaggaaaacccttcaaactgataggcttggggcttggtgaaggtggggtattagtgaaaaagatgtgaagtttctttatcgaaaatacatgtatgtccaagaaattctctgtagataaaaactaacaagaaaaagagtttgtcagagaggaaaagtagttttgctaatttatttttgatcatttgcaaagcccatggaagtgtgtggcaagaggattgtggtgtcttaggatattcacataggtctgaaacaaggaaaacatacttctgttgaaagcaccattccaacatattgttattagcagtccctgaactaacgggtagtgggtgggtactgtgtccatcagctcagcgaaccgcaattgcctcattgacagcaagcccagcaaggaatcacttggaatattaatttccgtggcctttcgcaatcacacgaagcttggctccctgcgcttgccgtaacgcggcctgtaccattgctttccgggtggcgggggggatttggcagcagcggaagaaggagaccggagggtgtgtgttgggcaaagccggaggcagaggaggacgattgttttacggatcccgtgatcggcccgtccttctcccctttccccccctccctaccgcccctgtcccgccggggagcggcggcggccttggactttgctgtctttc

SEQ ID NO: 4857 - DNA, 2300 bp, Homo sapien
atgacatctaacttacagttggattcggagaggaaaaagaggtgctcctcccgacccagaaagggagggaaagtttaagatattttgaagtgaggagggaatataagggtgtgactgacagcccgtattttctcagaaaagtaggtgacctagttgtccctccccaacagagaattaactatcacctaggtgaggagccccaaaagctagacactggactaacgtaaacatgagtaggtttttaagtatttatcttatggcagatattttttaaaatctacaataatcctaacaggtaggtactatttttcttcccatttaaaaaccttatgcttcccctaagaggatatgacacttgcccacagctaacaagcatacatttaaacccagatccaactgcatggtttttaagtctattacatcttacagcaagggtatagcagaggccatgaactgatgggcttgtaagtatgtgtatctcacctccagtattgatctttgtaaaaaaacagatgaacaaaaaaatatggtttgtgctttctgaactttataattaagactacatacatatgggagtaaaatactggcaagaaaggaaaccgtagagcaaatactttgcaaataagaaattgccattcctttgattctttttgattcatatgaactcctgttacagagacaattgttgtggatacattccctttgacctacgaaaattagatttgaacaaaggttcagattggatttagattaagtcctgctcagtgaaaattatgaaaacactctgacactacagtaactgatatgaaataataaatcctcacttaacattgtcaatagcttcttagaaactggttttcagtgaaacaacgtacaatgaaaccgatttttgttatcatcaatattataacgaaatgaaaacaacactgaatgaaaatttttttgtggacctgctgtaagttgtttggcttaaagccatgatttctaagaacctatcgttaagtgaggacctactgtactctataaccatgctgctattctttattcctgatatcccattactttttttatttttgagatggagcctcgctctgtcacccagactggagtgcagtggaacgatctcagctcactgcagccttgacctcccaggttcaagcgattctcctgcctcagcctcccaactagctgggactacaggcgtctgccaccactcctagctaatttttgtatttttagtagagatggggtttcaccatgttggccaggctgctcctgacctcaggtgatctgcccatgtctgcctcccaaaatgctgggattacaggcgtgagcccccggccgacctttctaatctaaaaaaaaaaaaagagatgaagtctcactgtgttccctaggctggtctcctgggctcaagcgatcctcccaccttggcctcccgaagtgttgggattacaggcccgagccagcgggcccagcatgcggaccatttccagtcaaatactgggataaactgcaataaatgaccctaagaagcaggtgaattgtctcaggagctcaagcttcttttggagaaggactcaaccagctgtgactggctgtgaatatggaggaaaagggccactagtcaaggtatgtagatagcttttagaagtcagaagaagcacgcctgcagtcccagctactcaggaggctgaggccggaggatcgcttgagcctggggagatagaggttgcagagagccgagaccacgccactgcagcccagcctggacagaggtgagacgctcgcggaccttagcttggggttggcggcgttaggaagaaaccgacctcgagaccctgaagacctgacaacagccgttactctggctgacaagtcattggatttctggcgcacgcgcggcgcggcacgggcagcttccggtttccagccttgcccccgcccctaccttccgccccacctccaggctagttcctcctcttggccccgccccctgaccttccttctccctatccctaggccccgccccctgacccgcaccttcccgccgcccctccccggttccatttcattgttggattgtggcgcttcactcctgctggcggccggcagggggcggagttcgagcctggatttttttcctcggggcctcccccgggaggccgtcccggcgtgggggaggggaggacggggcgggaggacgcggttcggtcggctgcagcgctacttttggtccggggtcggcagggaggccgcggctaccgcatcacagctgacgtgaggactacgtggggccg

SEQ ID NO: 4858 - DNA, 2300 bp, Homo sapien
caagaaaggaaaccgtagagcaaatactttgcaaataagaaattgccattcctttgattctttttgattcatatgaactcctgttacagagacaattgttgtggatacattccctttgacctacgaaaattagatttgaacaaaggttcagattggatttagattaagtcctgctcagtgaaaattatgaaaacactctgacactacagtaactgatatgaaataataaatcctcacttaacattgtcaatagcttcttagaaactggttttcagtgaaacaacgtacaatgaaaccgatttttgttatcatcaatattataacgaaatgaaaacaacactgaatgaaaatttttttgtggacctgctgtaagttgtttggcttaaagccatgatttctaagaacctatcgttaagtgaggacctactgtactctataaccatgctgctattctttattcctgatatcccattactttttttatttttgagatggagcctcgctctgtcacccagactggagtgcagtggaacgatctcagctcactgcagccttgacctcccaggttcaagcgattctcctgcctcagcctcccaactagctgggactacaggcgtctgccaccactcctagctaatttttgtatttttagtagagatggggtttcaccatgttggccaggctgctcctgacctcaggtgatctgcccatgtctgcctcccaaaatgctgggattacaggcgtgagcccccggccgacctttctaatctaaaaaaaaaaaaagagatgaagtctcactgtgttccctaggctggtctcctgggctcaagcgatcctcccaccttggcctcccgaagtgttgggattacaggcccgagccagcgggcccagcatgcggaccatttccagtcaaatactgggataaactgcaataaatgaccctaagaagcaggtgaattgtctcaggagctcaagcttcttttggagaaggactcaaccagctgtgactggctgtgaatatggaggaaaagggccactagtcaaggtatgtagatagcttttagaagtcagaagaagcacgcctgcagtcccagctactcaggaggctgaggccggaggatcgcttgagcctggggagatagaggttgcagagagccgagaccacgccactgcagcccagcctggacagaggtgagacgctcgcggaccttagcttggggttggcggcgttaggaagaaaccgacctcgagaccctgaagacctgacaacagccgttactctggctgacaagtcattggatttctggcgcacgcgcggcgcggcacgggcagcttccggtttccagccttgcccccgcccctaccttccgccccacctccaggctagttcctcctcttggccccgccccctgaccttccttctccctatccctaggccccgccccctgacccgcaccttcccgccgcccctccccggttccatttcattgttggattgtggcgcttcactcctgctggcggccggcagggggcggagttcgagcctggatttttttcctcggggcctcccccgggaggccgtcccggcgtgggggaggggaggacggggcgggaggacgcggttcggtcggctgcagcgctacttttggtccggggtcggcagggaggccgcggctaccgcatcacagctgacgtgaggactacgtggggccgctgccggctccgggttgctgggcggcggcgccgctgctgagcggcggtcgggctcgccgtctccacctcctcgcgtccgtaatcagtgacgaggtccgctacgtaaatccctttgcggcgggtaagtggtgcgtcggctccggccccgagacccagcagcgggcgacgcggcgcaggaggtggaggtggaggcaggaggcggagcggagccgggtgcggtggagcagcagaggccgagcggagccgtgggcggcgggccgggaccccggggccgggccaaggactggcggggcagccgcgagttcacctgacgcggcccctcgctcggcgcccccgaggccgccggctcgccgccccacgcccgcttcgtgcgctcagctgccccgggacccgcctgcctcctcgcgaacttgggacgagttggaaaatcctccctgagagagccgtgcggctcaggggagcggtttaactcggaaaaggaaaaggaatccagaagtaaggacctcggatttgagtgcccccagcgcctctgccccactttacgagcgcagtttagacgaaagcggacgcagcccgttttcccccaa

SEQ ID NO: 4859 - DNA, 2300 bp, Homo sapien
gaatttgagacctgggcaacatagtgatacctatttctggaaaaaaaaaaaaaaaaaaaaaagagagacattaaaaaaaaatgagacaaagaagatagaacaaaaggctagataatttggaagaaaagcatgaaagtaatgtcataaagaattcaaagaggacaaagtttcaaatagagggggaaatgctgtaggggtattgaggaagatggggactagaaagcatccttttagatttggcaagcaggcaagcgttcattggtgaccttgtggagaatagttggaatgaagtaagtctctgatcatcctgagtcagggtcaagtttatcttgtcattattcgggtatgaggctagtttttctctttggtatcttgtggctcccatggccggaagttggtgctttcttcagtgctagttacctctaggaagaggaagcgggcggctgttcctggacttctctgaatacctttttctagttttaaagttttgaaccacaagaatgtattacttattcagcaaataaaacatttccaagtgaaatacagaaattggccttttttctatgatatagtgctgtgattatcattattgttcaagtgctattattattttgttgacatatctgcccccgcctttagattgcaggctcctggagagctgtctcctgcagtgccccagtgtctagtatgagggggtggcatctaatgggttatacagttgttaaggagcataagatgtccctacgtaaaatgctagtgtagcatacaatgaggtttgatgtcagaatggcatcagttctgctttttgttcctcttgtgaggagcctgttcaaatgccctactgtctcttgtccctatgctgggggcacatggtagcagtagtaaccatcgccttagtgcccttagtgaggtttgataaacctgcctgctgcctacagttccaaatttgaccaggattatatgacatcatttagaagaacccttaggagggaactctgaaagcaatgtgtctgtctaagcactgctgttgctggcagaggtatctagaggttacttagggatgagcacgattgttttctccagctctaaaagaaattaaggactctcagttttttttttttttttttttgggactctgtctcaaaagagtttaggtctgtgaatggtcttgctctgtcacctaggctggagtacagaggtgcaaacatggcccattgcagcctcaactttccgcgctcaagtgattctcccacctcagcctcctgagtagctgggagtccaggcctgtgccaccatacctggtcagttttcttgtagagacaaggtctcactgtgttgccaaggcttgtctcaaactcctggattcaagcaaacctgctacctcagcctcccgcagtgctgggattacaggtgtgagccaccatgtctggctcaaatgttcttttgtctttttctttgccagttttacttctttccacatgtcaaatatatatttttaaagatattagtaaaaaataaagagagtttaattgctacagtgtctaaactaggttttttaatggattgaaggctatcagaaggacgttttgaataaacttattttgtttggagtttaattttttaacaaaaacccaagttggaatttaaggtaaatgaaaacttttttgcattggagtgaaatataaggaaataataaattcattaattttattaagtgatcattaacttcttaaaaatagagctgatacctatgagctatacttagtattagatgatttagatagcactgctttctcttcagtagaaaataatcagaaaaatagtttatcatttaagttttgtcaatttttttccctaggaagataagaaaaatacagtagaagtaagattgacaaaaaaccgtacagggctgtttttagctttctagtcttttggttttttttggtgggggggagttattttttatttttagttttatagaaattagaatattcttcctggccttgttttgagaggttttaatttaaataaaatttaatttgagagtttttgaagtgaaatgttacgatctcccaattcaacattataattttactgcaggataaataaagaaaacaggaaaggaggaaagcattgattacaaatatcttaacaatgagcaaatgtgcaaggaaaaaatatattaagacaaatccaaggtaggtagatgtacgtttttctgttcttttgaaaattctacttagcttaaagttcatgatgaataaattgatatatagatgtacacatacatgtatgtatgt

SEQ ID NO: 4860 - DNA, 2300 bp, Homo sapien
actgtatcacgttttgtcaaaatgattctgattttgacatctacttttatgtaattcttctttcctgttgcataaaaagcctttttttggcttagaatcttactgcaaattctttatgtgtatttattattttgaaatacatttggctagtaaattatgatcagtttcagtcttactgaaaccaaatacgagattggctttcaaaagttccttccagagctaaaagagtttgacttctataaaggtcatgtccatttttatagtactttaatatatatattattataataagtgaaacatatctcatattggttagaatataaaatgatgccccaaatactataaataggaaatccaagatactgtacagattagctagaaaaaaaaaagtttagctagggcactgttctcaaaggataaagaaccctaattttaatttaagtgcttactggaagcattatcaaaatagattatttaaacccttctggataattaagaatgactgaattataacacttgctttgctttcaagaagtgaattttttagaaacatgaaatttgaccatttacgtttacagtatcagaaacaatgatccttttcccccttttcaattcagattatggatttcagcttatgcgctatacataaaaaaaaggattggaggcaacaacaacatctctttagaagataatggatagtaaatatagaaataataatcatacttggcttatctctttgtaacaaatattttcaacatatattcttaaggtaaaatttaaatgcattgaatttgcaatttgttagccacactatcttaaaaacaaaacaaaaaaaacagctaggccagacacagtggctcacacctgttatctcagcactttgggaggccaaggcgggtagattacctgaggccaggagtcgagatcagcctgacaacatggtgaaactccgtctctactaaaattacaaaaattaactgggtgtggtgacaggcacctgtaatcccagctacttgggaggctgaggcaggagaatcgattcaacccaggaggtggatggaggttgcggtgagcccagatcacgccacttccctccagcctgggcgacagaacaagagtctgtatcaaaaaaaaaaaaaaattaccagggtgtggtggcgggcacctgtaatcccagccactcgggagtttgaggctggaggattgcttgagcctggaaggtggaggttgcagtgagccaacattgtgccactgaaccgcagcctgagcaacagagctgaactctgtctccaactcaaaacaaaaaacaccttcatgggaaggaagtcactcaagataaccgaaatgaagaccaactacatttttcattttgtgtttgtcttactcagcacaatcaaatatgacttttaaaaattaaagtgggccgggcacggtggctcacacctgtaatcccagcactttgagaggccaaggtggatggatcacctgaggtcaggagttcaagaccagcctggcagagatggtaaaccctgtctttactaaaaatacaaaaatcagccagacgtggtggcacatgcctataatcctagctatttgggtggctaaggcaggagaattgcttgaacccaggaggtggaggttgcagtgagccgagatcgcaccactgcactccatcctgggtgacagagcaagactccgtctcagtggggggaaaaaaaattaaagtggaatattttacatctttattcaggtatttgatttataatattcttattattttcagctttaaaacatttgaaatattctaatattctcttaaatgctttttcccctatagaacagacttttgagaatcctgtcttaatacataaatatcaagatagttttcaacttcttgcttagcttgttagtgtatttttattgtagtccttaaactaggtagtacagagatttgatttttcaggagcagagttgatagagcagtctgctatattgtgaattcacattttaaaatcctttattgtcttgaatgcaggcctagtagctttgtgacatgtgcagctatactatgacatcataaaccccatcgtgagggaacctagctacgggtcagagctagtccactaggtgctaatcaaatgctgtgttacaacactgtgaggttttcccagttataagtgtcactattagggttttttttaattgcaaagccaaataaggctgtcaattgcatcatcttaccttatttcttcagattaagtactgtttatagtgggatttttggtggatgtggtggcatc

SEQ ID NO: 4861 - DNA, 2300 bp, Homo sapien
gaaaatgtaatcatttttcataaaatgttatttatggtagcacatacttattattttaaaataagttactatttttaaaatttctgttttaatttccagtatgttaaatatcaacatatataaccagtggtgtgcacagctggcttgtaccagtgaaaaccaattgtataatctttatccggctttgtgttcaatgtcatccattggcagcttgaaatcagccatagtaggagtacttacatcacagaagtgagcaaacgctacaagtcagtgttcctccttcttaagatctagttaagtgtttaccagccctctactgaatatcaatcacagaaacaaaagctctttgaggtcatcagtaatttttaagagtgtaaagatgccctgagactaaaatatttgagaattagttgtgaggagaaagagttatcttttgagagttagtcactatagaggtgtataattcatacagagttgccttttgtgccggaaacatttgtagaataaatccaatgttttaaaacttgcagttgttaaatctactggttccataatgggaggatgtttttcttttccctggaatctaaactagatgataatactctgggggtaggtgagctgaattttccctgtgggctacatattggttgcctctgtcctggtttcacactatctgtccaactgttatctaggtttagatcaagccttcactcaagctctggcatctacataaagccctcacttactgtttgggcccatactgatctttctattctgtactcctgtgatattcatggcctctaaaatggagcaattcgttctgtactatttggtgtgccattgtttcttaggtgctagttttattaattctattttctaatagtgcacctagtacaaggctcaacacctaggttctcttacacggataaaacatgttttaacttttggattgccagagaagttagttttccaagggaatgatgatgtaaataaatcttagttatttgttataaacccagtttttaataattcttttcagatattaatataagttggaaatcattggtgttcctcaaagtgaagtcacacacaaagtcttccttgaaaaaattgttttagatgctgtggttctactaccactcatgatagacactggtgacttatttccaaggtctttgactcttgagtaagtcataatgaatggtgaatcttagtaaaatgaggcaaagtttctgcaattatgctagcctataggacagagttgtttactaattagaaaacctggcaggttttgagtccagaggagtggttagtatcgtgtttttctggtagggatctctgttgaaggaactcagggaagtagtgaggagatggctgttgtgctgatctctgcccaaagttaagtgatagttctggcctctctggatgctttagctagggagaggaaaagtgtccagaggcctcatcagccttcaaggcatgagctttctctgggtcagagacaccaggggcttgaaaggtcctggaatttcttcggcctatgcctttttagttattatgagggcataacagtgactgtgatttttatcagtctagagacaaagcatcagctcacatccagagtaacactagaatatcatatgtcacacatttaataaaaataattcactggccaggtacagtggctcacgcctgtaatcccagcactttgggaggccaaggtgggcagatcacaaggtcaggagatcgagaccatcctggctaatgggtgaaaccccgtctctactaaaaatacaaacaattagctgagcgtggtggcgggcacctgtagtcccagctactcaggaggctgaggcaggagaatggcttgaacctgggaggtagagcttgcagggagccaagatcacgccactgcactccagcctgggcagcagagcaagactccgtctcaaaaaaaaaagaaccatagttaagttctatctccaatttctctgaagaagttagagggtagtttatactctggcctaagaaaggcttcactgttagtaggcgtgaggtcgtagtgaggtagtttaactgctttagaactttgtgcttggaacattcttagccaccgaagtatgggcaccaaaagcgataaggagcatgtgttccttaataaatgtcacatcagaaaatgactgttccaggacagtaaccacctcccgatggtaagtatcctagatagtttgtcatttctcagcagcaggaaaaagagaagtaggccagtcatattagtgagtggtattacttaaaaatag

SEQ ID NO: 4862 - DNA, 2300 bp, Homo sapien
cagtatgatcctagaaattattctgatgagaagttatagttctgtatgtacagtctgcaggtaaaaattgccatttgttcacacaatgtgaatttcttttgttaaaaatgcattttggggacatttagtgaaatatatgtagataattctttgagaagtgaatactaacaacattcaaactttttagaagacgtttactttaattggagggtaaacatacttacacacacaacatccatttttattgatcttattttttatagaactaacttagcagatattaatgctttaatgttgtagcagaatgtctagaaatggaaacaattgccagtttcctttggtttttgaatagaggaacgtattttattagaatttctggagattttcctatttttttccttccctttgagctgtaaattttttttaatgctctttcataaccttttattataaaaaaaaattttaggtttaattgttcagcttttatccatggatggctttctcccaaactttgcttttatttctttttttccaatattttattagttatttttaatttggaataatgagttagctggtgtttaaaagaactaaatgtgtatcaaagttgaagaaataaagtatattcaagttttcccatatacaagcagttacatttttaatagttgaaagatatttggcagaagttggccttattatattgacttactattatcacaaaaactaaaaagtgaaagttggaataggctgctccctggggagtaggaaaaagcataaaatagacagggatccattattacaacaccaagtaagtgagctgtacctgcagaatcctcactggaagtacagatcttagtgataggtgtgttgcataacagttgagctggtcgaagaaagtcttttatttcagaagcatatacccgagagatggcgggagagagacagccttagaattaacaaagaatgttacttgctgcatgagacagttaagataggcagtaaatgagtgaatttgtaaaagcaaccgaggaaattaaaatgtttgaagcttcctaattcattaaatttcctcttgaaacaaaggttacttaaatcctccatcctactatacccaacctcttcctgtaccaattaaagactatcacccaagacttcagtttttttcccacaaatggcccttgtctctgcttgtgcctattgtattttacgaggaatcttattagagtattaactcatctttctggaattcttatacatgaaaggtaagtgggtcaatctaaactgcaccattatgaaaagaaaaatatgaactttgtggactccttataagaattcagaattctcaggaggctcacgaataagcaccaattcaacttcttcataaagggaattagaacataataggcttacacattcgaaagttaatccagttgcagttcttaatagtgacgttgtttacatttctctaaggcaactgtttcaaaattttttaaggcactacttaatgtaactctggcttttaaactttgatgttgctattgttgttatagcatgatttagtcttccttctgctataatgcacctcttggcttttaaggtacaagtactcataggtgctctcttatggtcactctgaatttaaacctgagaattcattggaacaaaggtctgtttgctgctgtttttaaagttaatgcagtgagatttcatttatgaatctttggattgcaatttggaacaagagtggttttaaatataaacatttacatgtgtatgtattttaattagctcatgtgtataaatttaggattagaagtatataacatgggccgggcgtgatggttcacgcctgtaatcccagcactttgggaggctgaggtgggcggatcacctgaggtcaggcattcgagaccagcctggccaacatggtgaaaccccatctctactgaaaatacaaaattagccgggtgtggtggtgcacacttgtaatcccagctactttggaggctgaggcaggagaatcgcttgaacccagcaggtggaggttgcagtgagctgagatcacacgattgcacttcagcctgggcgagaagagtgaaagtccatctcaaaataaatgaacaaataaataaataagaagtgtataacatcgccaggcttggtggtttgtgcctgtagtcccagctactcagaaggctgaggcagaaggattgcttgagcctagcagtttaagaccagctagaccaatatcaggatgtggggcaacacagcaagaccccatctcttaaataaatagctaa

SEQ ID NO: 4863 - DNA, 2300 bp, Homo sapien
ataagaatacgttccccgaggaagccttgcccatcctccacatctggcttaggcaaccttctgtgagttcctactgtacttccttaggcacatatcatgttgtgttgtggctctctgtcttgctagatggtaagttctatttggacaaatacctagcacagaccctggcatgtgataaatgttcagtaagcatttaccaaatgaaagtgaactgttcttcctctgaaaatgtgatttgttctgtgtgctgattgacttgagattaactggtccagggaatacattaaaactactaagagcagtaatcaactaagcaacccatttcccttctttctttccttccttgccttttttttcacaccaatatttattgagcatctatgtgccaatttaaagaaatgctgacataaaaatcaatttcttattgattttctgaaatttgaaataaaatttactaatagcattcttggacccaaaccctcaggtgtgactgggacagcaaagagtccctgctggagccccagattgaggttgatgtctaggtgaccatccagggttccttactcagccaagatatcttcagctgaattgaaaccctaaccccattgtcaggtatcctggagaattactagaaacatggacactccctgaaactttacctcctgagcatctgaggtgtaaagtccttacctttactggaagatgattaaattaaatacagctaaaatgtggtgggatgtcctttcattgacataaggttgggttgaattctaatcatacaagggaaagggctttgggtgcggtggctcacacctgtaatcccagcactttgggaggctgaggtgggtggatcacctgagatcaggagttcgagaccagcctggccaacatggtgaaaccccgtctctactaaaaatacaaaaattagccaggcatggtgggcacctgtaatcccagctacttgggaagctgaggcaggagaatcatttgaacccaggaggcggaggttgcagtgagccaagattgcacctttgtactccagcctgggggagaatagcgagacttcatctcaaaaaaaaaaaaaaaaaaaaaaaaaaagacaaaaggtctcagtggcatgtcacttatttttttgcagtggaaatgccaataatttttttccaggctatggtctgttctatggttgaacattcgcccatttttgtgtctaaccttataatcactgaatttcctataatgatccagctctctatgtgccaagccttcattaagtgatccaaataaaatttgacatttaaaaaaaatgtacaaatagtaattttgatttatttatgaattttaaaaatcccaaatgtcttttcagggggttttaatctgggaaaataaggtattagattgaatcacatgaaactgctatttttgtaggccagaaagttcaaatatcagcaagttcatgtgattcaatctagtagttatgggagaatactacataatacttgctccattggcacagtgaatttttaaaatttaattatctactccctttaagtgaaagtagcaaattctgtatcaccttaggaagagttggattttttgatggtgtagcaaatggctcagcaaataaaaatgttaagtgaacacaggtggctggatatttcttggtgagtttagaagtgactatgaaatatggtatttctttgctgatagtcaatgtgttttttttttttttaaatctccaagtgttttttctcttatgagttaggaaattatgttgggtttattctcccttagtttacctagaagccttggacacaacaataataaagaagtagccctgtaagatacaatcatgtaacttttaatgctaaaagagacattattattattattattattattatttgctagagcccacctcaaacagatttctatgtaaaaatgagaaacaagagcattaagatggtttattacaggaagagtttttatagggcttgggtttcagtgagctcgcctgtgacaaagcaaattgatggcagtgataggctagtgatgtcattgtgatgtcagtcctcctgcttatcctgcacatgcttgctaatttggaacactttatgttgaactgtggtagaggaaacaagacagttctgtctgcagaagcccattatggctgtaactggagatgacacaggtaagaatgttaaagaggggttttcagttaattgtgcagattgttttgaagtttaggaagtattcaggaacatctgagtgtttcagaaagtgttactctcctagtcacttag

SEQ ID NO: 4864 - DNA, 2300 bp, Homo sapien
catacaagggaaagggctttgggtgcggtggctcacacctgtaatcccagcactttgggaggctgaggtgggtggatcacctgagatcaggagttcgagaccagcctggccaacatggtgaaaccccgtctctactaaaaatacaaaaattagccaggcatggtgggcacctgtaatcccagctacttgggaagctgaggcaggagaatcatttgaacccaggaggcggaggttgcagtgagccaagattgcacctttgtactccagcctgggggagaatagcgagacttcatctcaaaaaaaaaaaaaaaaaaaaaaaaaaagacaaaaggtctcagtggcatgtcacttatttttttgcagtggaaatgccaataatttttttccaggctatggtctgttctatggttgaacattcgcccatttttgtgtctaaccttataatcactgaatttcctataatgatccagctctctatgtgccaagccttcattaagtgatccaaataaaatttgacatttaaaaaaaatgtacaaatagtaattttgatttatttatgaattttaaaaatcccaaatgtcttttcagggggttttaatctgggaaaataaggtattagattgaatcacatgaaactgctatttttgtaggccagaaagttcaaatatcagcaagttcatgtgattcaatctagtagttatgggagaatactacataatacttgctccattggcacagtgaatttttaaaatttaattatctactccctttaagtgaaagtagcaaattctgtatcaccttaggaagagttggattttttgatggtgtagcaaatggctcagcaaataaaaatgttaagtgaacacaggtggctggatatttcttggtgagtttagaagtgactatgaaatatggtatttctttgctgatagtcaatgtgttttttttttttttaaatctccaagtgttttttctcttatgagttaggaaattatgttgggtttattctcccttagtttacctagaagccttggacacaacaataataaagaagtagccctgtaagatacaatcatgtaacttttaatgctaaaagagacattattattattattattattattatttgctagagcccacctcaaacagatttctatgtaaaaatgagaaacaagagcattaagatggtttattacaggaagagtttttatagggcttgggtttcagtgagctcgcctgtgacaaagcaaattgatggcagtgataggctagtgatgtcattgtgatgtcagtcctcctgcttatcctgcacatgcttgctaatttggaacactttatgttgaactgtggtagaggaaacaagacagttctgtctgcagaagcccattatggctgtaactggagatgacacaggtaagaatgttaaagaggggttttcagttaattgtgcagattgttttgaagtttaggaagtattcaggaacatctgagtgtttcagaaagtgttactctcctagtcacttaggtgtaagactttttttgaaatatacatctatatattcagctcactttgttagggcatcttagtgtgattgtttctttgctcaatattctattgcttgcttgactgaggcactaatcctctcttcctccctctatcctccctcccctcctccccactcttcccctcctcttctcttcccctctcctccatctctgtgtctctctttcatatgcataccattctgccctactaaaataagctgttacttcataggcaacctgttgcaaattcaatctagccgcagattaaacatacagtatataccgttcatgttctgatttcattactgtggacaaatgcagctccaaacagaataggaaaaacccgcgtgttatggatgtttgtgtgcctacttgtttctttcctcctgtatttaaaatggtctgttcagctaattgagttcaaaaggctgatgtcattacatttcctggaatcgtatttcagcaggggaagtggaaaagttaaaactccaagcgagctgcacattgacgtcagctccgagtcatgttgtgatttagtcagttcctttccgctttgtaaaatgctgctgacagatttagagttaactagctcaccactgcctctgcctccaagctgccttttagactgaatagcttttcttgttagccctactttaacatttcttttgaagtggttgtctgcttgaagagggaaacacgtcatgaaactgtaatgcatgaacagaactcaggagttgtctggccagcttagtggt

SEQ ID NO: 4865 - DNA, 2300 bp, Homo sapien
catgtggtaattccatttttaactttttgaagaccttccatactgttttccataatggctgcaccattttacattttctcccaccatgcacgagcatgtttctaactcctaagtttggtgatctggtttctaggtgtggtgccgaggagcagcaggacattaggaggtgttagcaggtaaaacaacaggacaaagtatcatctggcaatctactactgagagacaagaattccaagaagcaaaattagtactagattattacgatattcaatcacgatgctttcagtggtgttctggagatgccatgaaaaaagttatgttgttttttcactgtacaaggaggcaggcatctatctatttcagaaagacattcattgattctcaattatgtaagtattgtcatacttaattttgttgtttaaaaaactaagacttctaacaaatatggtgaaattttcagccggatgcagtggctcacgcctgtaatcccagcaatttgggagggtgaggcaggtggatcatgaggtcaggcgttcaacactagcctggccagcatagtgaaaccccgtctctactgaaaaaaaatacaaaatgttagccaggcgtggtggcgggtgcctgtaatcccagcgacttgggaggctgaggcaggagaatcgcttgaacctgggaggtggagactgcagtgagccgagatcgcgccactgcactccagcccggctgacagtgcgaggctctgtctcaaaaaaaaaaaaaaaaaaaaaagcgaaatttccaaaggactggtggtcattttcatttatccagaaatgtcacttataggggatgtatcccttctctatgatgccccattagtgggatgttactgcttccatatacaataatgaatcatatggatacactcccgtattgttcattcttgaactgttataaatacatacttgagactgagtaatttataaagaaaagaggtttaattggcttatggttccacaggttatacagaaagcatgattctatcatctgctcggcttctggagaggcctcaggaaacttacaatcatggcggaaggggaagggggagcccacaggttacatggccggaggagcaagagcgagaaaggggagttgccatgcactttaaaacaacccgatcttgcgagaactagcaccaaggggctgggggtaaaacattctgccccatgatccaatcacttccaccggtccccaccgccaacactggggattacagtttgacatgaaatctaggcggggacacagatccaaaccataccacctcccaaatataaaatgtgatgctataaggacaaatactaagctacaatgatatttttagttcatagtgtttgtcattgtgaaatgtttattgattaagaggaaatctggccagacacagtggctcacgcctgtaatcccagcactttgggaggctgaggcgggtggatcatctgaggtcaagaattcgagatcagcctggccaacatggtgaaaccccgtctctactaaaaatacaaaaattagccgggcatgttagcacacgcctgtgatctcggctattcgggaagctgaggcaggataatctcttgaacccaggaggcggaggttgccgtgagctgagaacgcaccactgcactccagcctgggtgacggagcgagacgccatctcaaaaaagaaaaaaaaagaaaaagaaaagaaagaaaagaaggaatctatttagcaaagaaaagccttgggaagtaagttgatctttagacatgtgtgaaataggatacttgagggtgaggataaaaatcagggtattctaggtttcctgaagctgtatcctttttccattcaactcatctttcatcaacccaaatttacaggccaaatcattgaagaatgacaagtctaacctctaattaccatggcgggtagagcggggaggagatggtgcactgtacacagagcaccaggaacccaagggaagttaggggagatccaggccctgaggagggccatgacctagtgatgacacacaaggggcattattacagtgtacgcaggatgaccctggaagggatgggtgggtgggagtcaggagagatgtgagcctcgtaccaggaagatcatactgaggccaccaggttgagagccgcctggctggggggcttgtccggggacagcaggggcagaggcatggaggtgagctctgtgtgacaggagccaggcctgagaacgcttggggaggagggggactgaggagttaggagtcatgtttgtgaaaagcttgcttggg

SEQ ID NO: 4866 - DNA, 2300 bp, Homo sapien
gaaagcacaggttaaaaaatggctagatgtagagaattaaatgaaatgtttataaagccgttcacacgatgtccacacattgctgatgctagataaatatcaagtcccttattccttctcttaccttttagtaactggatttgtcacgaacaggtactgaggtctgcataaatcaaggcatgatttcatctctgggcctcagtttcctcatatataaaattaagacagttgtactattgtactagtttttttttcaagaactagttcaaaaacattcccagctcccacccccacccccccaccccacaagactctcctcaagactccttcagtaaatatttggaaaaagggtgggaagtttgtttctgccaccttatattcttcccaataaaggcaagaaaagtcagggatggctggcattgtgggcgtcgggagggaatgcgaaccaacatttactctacttctctcccagccaggcatgttcacataccttgatcttagtcaactggcctaagttaacttgttcccaacatgacaaaacccgatggcattctaaaagcaaagcaaagcaaagcaagggcagtcgatgagttgtgttaacttagttttctatctcatgttaacctccaaggaactcaaaacaactccacagcgaattcaatattaaaatagctctgggaccccaagatttatttcacagcttaaagcaaggtcactatcaagtcctcggcaaagctcaaaatacaatagaaaactcccaaatcaagccccagcttatttaaatgcttagaaaaaaaaaatagccaggtgccgtggctcatgcccgtaatcccatgggaggagtccagacgggaggattccttgaagacaggagttcgataccagcccgggttacgaagcgagatcccatctctacaaaaagttaacacacacacacacacacattcaccaccttagcctggcttagtggcgggcgcccgtgttacaaagggagatcccatctctacaaaaagttaacacacatacacaccctaccttagcctggcgtagtggcgggagcctgtagtcctcgctactttggagacacacacacacacacacacccgtagtcctcgctactttggagacacacacacacacacacacacacacaccttagccaggcgtggtggcgcgcgcctgtagtaccggctactttggaggctgaggcgggagaatcgcttcagcctaggagttcgaggctgcagtgagccgagattgcgccactgccctccagcctgggcgacagagcgaaatcatacctctaaaaaaataaattagaaaaataaaaagacaaaaagagccagcccggtttcggagaggcaggtgcagcctcagcgccctgggcctgcgtccccgaccgggccctggctgcgctcccgcccgctgcgggccccggggacgcacctcgcatcccgcgctgggccccgttccgtccagcccgggggagtggaggaggcagaggccgggtggggaagggcctccagaaaccgagctcccgacgacgtctcccgcgaccccagtgcccgagagaggagcggcccccgggagcgatcccacaaccgcgcggggctgcgccgccccgaacctccccgcggccgccgatctgcttccagggcagagggaaggggcggtgacggggcggggcgggggctgcggcgagggcgggcgccgctggcgagggagggccgccagcatcctccctggccgcgccgcaccgcgccgcgaggagtccgggggctgcgcccacgcccgctgcccgcccgctcgtcggctagtcccgccgtccggcgcggacacgcgtgcccccggcttgaaccggaacctcttgccgaggcggccgccgtcgccgcagccgccggggaagcggacaccaactggggaagcgcgggggggaggcggcctgcgcggcgccgcccgccatggccgcggcggggtgaggtaggcgcggcggccgcagtcgcgcggacccgagcgctcctccgccgcggataggccggccgagggggagccggggccgtcgcccgctcgtcgccgccgccgccgccgccgcccatggcgaggccccgccgccgccgccgctgctgacccggcggccggccgccgttccgccccctcccgtggcggcgagcgggcgggcctccccacacgcccccgccgcccgcgccccgcgtccacccgcgccccgctcccggggactgggagaacaggatagcagcaggagtcggggggccgccgaagatggggaacactacctcgtg

SEQ ID NO: 4867 - DNA, 2300 bp, Homo sapien
ctggagttaggatttcttttcttttttgagatgtagtctcgctctgtcacccaggctagagtacagtggtgtgtgatctgggctcactgcaacctccgcctcctgagttcaagtgattctcctgactcagcctcccaagtagctgggactacaggtgcccaccaccatgcccggctaattattgtatttttagtagagatggggtttcgccatgttggccaggctagtcttgaactcctgacctcaggtgatccacccacctcagcctcccaaagtgctgggatttacaggcgtgagccaccgcgcctgaccagagttagatttccaagtaaagcaaaatgtcacctagcaggagagaggaaaaaaagagaaagagaaaaaagacaaggaatggggatggggtagacttcaaggaggaagagcaaaggtgaccaggatgagaagggagatgggtgggcatgggctgctcagaagatgccctgaagggtgggaccagaggagccaaccctgagaagcgcctgtcactgacactgggtcattctttacatttcaaaatcattttcacatctctggtcacatttgcatatcacagtcactgtgagtgggtgaagaacacattctttttttctgcttcactgatgagaaaaccgaagcatgaaaagctgcagtgatttgctcatggtcgcgcagggctaatttattccacatttgggatgggctatttctatcacacagcaagagtcagtaattgctttcctgatatttcattttttttttaaagccaataccatgagcagtctattaggagacaaattctcctttattttatacttacaccctgtgactatttcaatatttttacttaactacaatttctcaaatttccttgctcatgtcgaagcatttgactaaaatatagcaaaaccactgttcctttcaagggggtcaaaacgttttccgtggatgggagcatgtcatgtgagcaaagatgaaagtagctttgttgcactcttctgggaatctttctagggatattactaaagtcaagaatagatcagaaatgaagaaaagatggggatataaagaatagctttcatggaaaattgaaatcattccttttaaagtttacaatttccaccctgatcatagatccccaaccctgcaggatgggttcttcccagatatgaaggtggctgcagcgataggattttgacgcaactgtgattgatgtcagcaggtccagaccgtgatatttcatgacagatttaacagacatttattaagtagattcaatgggaacagctccaggctagatggggctgggagatacaaagggaagatgtaatctgtgaaggtcgtagaggccaattagggattgaaatcccacggatatgggttgtcgtacacccacttcacaccagttgctcttattctacaccatcatttcacataagcctcccacaaatggcaagtggaatggcatgattctccttattgcaagatgaggctatctggaaggatccaatgacttccccagtgagtagggggctgccccgggctttgcacccaggcttttgtctccaagcgaagagttgtcactcactgcacaggaagcagcaggagaataaccaagtcacggtctaaagttgggacacccaactgagtttcagatttctgcctgcaccaatgacacaggaattcagaataagggcgagatccttgtgggttcgtgtgatggtggcatggcgattcatgcttgattgagaagacaaaacgtgaacactttaagggcttcttgcacaagtgaagtggttgtggaaatgttttcaaggaggaaatgcctttttaatagagaaatttacttggctagttagcagaagttttctttcttgggttaaaagtagttgctgctattatatcctgaagcatctggctgtcctggtggggacatatgagcgctgccacaggccgggaatatcccaggcgagtaagaatagcccacaataagagatgactgctgcttgctctgctggtcactgcagttgtcaggaatgtttcgcctcagaggcaaacggcttagggccgtctcaacttggagacagaaaaacccacctcctactcctggctcagacctttgctttcttatctccagctcacacctttaagtcttatgtagttaaaggacatttatccgcctccttggagaacacagccctccagtgtctcctgcagcctggagcctgggacattctggaagcatggaaggcgtggacttgctagggtttctcatcatcacatta

SEQ ID NO: 4868 - DNA, 2300 bp, Homo sapien
acagcacatcaattaaaaaataaacactccattctaggagaaagacagccccctgggacgccctaacaagcgtaaatgaacctgccaggccgccggcccgggccgcccgcagcccccctcccggcccgtcttaaggtggcggcggagccggcgggggcagcgttcgctggcggtggcccaagcggctgctaaaagcagcccgggtccggctccggcctcgtgcagagagcagatacgtgtcgcggagtccacgccagagcgcagcgccgcctcccaccagagaaaaggaggctctggcaaaagcctgtgaacttgggatggatgaatagacgtcctgaaagaacgaagggaagacagggaatccagccccagagtttccagcctgtcctatttataagtttcgaggtttgttttgaattttagaaagaaattgaatgatttttcctaagaaagcacggcggctcggggcttcctatattttatctcacctaattatcaaagcccccttggagatctgtgctatgatcacccaactctctaggtggggaaactgaggctcccccaggtcacgcagcggaggcgggaggagagtctctggcgggcatttgtcccccgcgcccctcgcgcgcccaaggctgggctccggggcatctcacccgggccgtcccgggtccagccccagtttagaatgactccacaccccccacatctccaagtctcagaaaccatcgttctgagaaccccaaggaggacaccctttcccgggtcttctgcagcgccgagccccggcaggcctccccggcgctcgcctgctgcgagaccttcctgccgccccgaggagcacgagaccccagccgcctgcagatcacccacatttgcggagggtggcagcaggggcttggctggtttgaaacgcgccggggaggcgcgcgctgcaccaaaccccgtccctgtccccaagggcagactcggggtaaggggaccaagacctccgacgcactcagcgccatggggacagccatggccaacactctgtctctgcggtcaatcccaaggttaccaaaactctccatccgcagagagcgcgcacagcagtgcggacactcggggactgccttaaggaaggctgagccctgggagcgcgtggactccgccctaccgcccggcgattggctcgcggggctgggggcggagaccgagtccgcgctgtataaatattcatgagccggcagcgcggcgcgagcggggctggagccgggaagttgggctaagggcgctgctcccgccgaggaggaggcggcggctgggcgcgggccgcgccactcaggtgtccgctccgccttccggtctggatttgctcctgggtgtccagcaggaaggagactgtgtgcacctcgcccgactgcggccggagcgcggcgctgacttttccaggcggcgggggtccgtctgtcccggcggcggacggacgaaggacggacgccggagaaagagggcggcggcctgggccgaggcgggtccccaactccggcggcggcggcggcggcttggccttgggggcgggcatgagcccccgggggccgagtggtggccgccagggctgacccggcgcggcaagcggcccggcccagccatcttgactgcgcaccgcggccccagaggaaacttgcggcgcctccgccctctctgtccggcggagtcaccgccgcccggcgcggcggggagaagtggtcgggcgcgcggagaggaggcgagcgagcgcgggacgatgagccgaggcccggccgctctgcgccgcgagggctgagcgcgacccggggccagcagagcggacctacggactgtggcgcgcgcctgcagccgccttcaaacccccggagcggcggaaaggagtgcggaagggccctgcccaggctgcgggccgcgccgctgcggacgcgcccctagaaggggttagattatcggcagacccccctcccgggcgaagcataagggagaccccagatcacccgctgtacccgtctgcggctctctcgtgggccccccccccggcacccctctgcgcgccgcctggagggcgagggcaccgggccgaggcgcacagcatggagtggggttacctgttggaagtgacctcgctgctggccgccttggcgctgctgcagcgctctagcggcgctgcggccgcctcggccaaggagctggcatgccaagagatcaccgtgccgctgtgtaagggcatcggctacaactacacctacatgcccaatcagttcaaccacgacacgcaagacgaggcg

SEQ ID NO: 4869 - DNA, 2300 bp, Homo sapien
gcctgtaattccagctactcaggaggctgaggcaggagaatcgcttgaacctgggaggcggaggttgtagtgagccgagatcacaccattaccttgtagcctgggcgacaagaactaaacttgtctcaagaaaaaaaaaaaaaaaagaaagaaattggccaggcacggtgtttcacgcctgtaatcccaacactttgggaggccgaagcgggtggaacacgaggtcaggagatcaagagcatcctggctaacacggtgaaaccccgtctctactaaaaatataaaaaaaaaaatagctgggtgtggtggcgggcacctgtagtcccagttactggggaggctgaggcaggagaatggcatgaacccaggacgcggagcttgcagtgagctgagatagcaccactgcactacagcctgggtgacagagcgagactccgcctcaaaaaaaaaaaaagaaaaaggaaaagaaattacagaggggcacattggctcatgcttgtcttgtagtcccagcactttgggaggccggggcagatggatcacgagatcaggatcaagaccagcctgaccaacatggtgaaaccccatctctactaaaagtacaaaaattagctgggcgtggtggcacgcacctgtaatcccagctattcgggaggctgaggcaggagaatcgcttgaacccgggaggcagaggttgcagtgagccgagatggcgcccttgcactacagcctgggcaacagagcgagactccgtctcaaaaaaaaaaaaaaaaagtaaccaatgcaggaaaccgagaggagaggtttggaaggtggtttagtgaggtaatccatcttttctagtgataaactggcacccagtcaatttattcatcagaagggaatacatcagcctggcgtggtggctcgcccccgaccctgtcagcgtcaccagcagcgcggatccatgggccagaagcctctagggcgcctaagtcagggggtgggtccccggctgcaggagggcgggaacggacactcagtgccaccgcggaggctgcacggtgcccagcgccagggtccagctcctggatcgcaggtcgaggaggggccacgggcggctcactgaaacctccgcctcccgggtccaagccatttccctgcctcagcctcctgaatagctggtattacagggatgtgccaccatgcccggctaattttgtattttttttttttttttttttagtagagacaggatttctccatgttggtcaggcagttctggaactcctagggtcaagcgatctgccccgctcagccttccgaagtcctgggatcaggactttgcgatcctgggcagatcgcttgagcctaagagttccagaccggcctcaccaacatggagaaaccccgtctctactaaaaaaatacaagattagcctccaccgtggactcaggtgcagctcccacctgaacatggcacgcggcagcaggggctgcaacctcgaccctgtcagcgtcaccagcagcgcggatccttgggccagaagcctccagggcgcctaagtcagggggtgggtccctggctgcaggagggcgggaaccgacactcagtgccacccaagaggctgcaccgtgcccagcatcagggtccggctcctggatcgcaggtcgaggaggggccaggggcggctatgtcaagcgggccatgtggcatggcgccccccactttccgctccagggaggcccgccagcctcgcagtgcctcagcggcagttgccacctgcacgcggtgcccggagaacgcggccagggcgcgtgtctcctcagcctgctgagctgcgcatgcgctgctggctaacggctctgctcagcgcgattctactgagagaggcctgagtgtgcaagagcttggcgaacacagaactttttacgggtatcgaggcggtgcgtggactgaagaagggcgagggcgattggggaggggtggggggtggtggctgggaagggcgatcgggaggcgcgggcactctctagcaggtggccgcagccatggaggagatctctgccgccgctgtcaaggtcgtgccgggcccggagcgcccgagccctttcagccagctagtctataccagcaacgactcctacatcgtccactctggggatcttagaaagatccataaagctgcctcccggggacaagtccggaagctggagaagatgacaaagaggaagaagaccatcaaccttaatatacaagacgcccagaagaggtaccaggccctgcctgagccggggctgcaggaggaggtgggggcggt

SEQ ID NO: 4870 - DNA, 2300 bp, Homo sapien
taagagcacagcgggagggacaatgatcgggatagaaacccaggcattggagccggcaacagctacccactttgggtcccctccctttgcatgggagctgtgttttcattctattaaatcttgcaactgcactctcttctggtccgtgtttgttacggcttgagctgagctttcgctcgctgtccaccgctgctgtttgcggccttcgcagacccgccgctgacttccatccctccggatctggcagggtgtccgctgtgctcctgatccagcgaggtgcccattgctgctcccaagttgggctaaaggcttgccattgttcctgcacagctaagtcccaggttggtcctaatcgagctgaacactagtcactgggttccacagttctcttccgtgacccacggcttctaattgagctataacactcaccacatagcccaaaattccattccttgtaatccatgaggccaagaaccccaggtcagagaacatgaggcttgcccccatctcggaagcagcccaccaccatcttgggagctctgggagcaaggacccccggtgacaatatccttgattggttgctggaacagaaaaagggcattagtggaagaactgcttaagtctgaataaactctgcagttcagttaatagtacttgtacctatgttattttcttagttttgataaatataccatggtcatgtaaaatactaacactagtggaatctgggtgaaaggcatataggaactattttgcaactcttctgtaaatctgaaattatgagcaaatgaaaagtttaaaaaagtggacaatgacccaggagttgattttttaaatgaaaagttgtaacacacgcacatgctcatagtgtgctgaaaatgccagatgtgcacgtaaaagaatgtacgtgtagtgtagttctgggtaaagtatggttggttttgggaaatgagtgcgtgctttcttcttcaaatttgttactcaaacggcttttttttttttaaacatataaacaattttatgtttgggtcttgaattgctagcttctgtttttccttattccagagaataaccatactggtcacagattttagttttctcttccagtctttcagttaaacgttaccatgcatgatcgtgaatgaattcaagcacacctttccttctcttggcttgtgtctaacaggcacattgatttgatccacaacctctggggacactgacagaatcctggttccaagcaggagtgggtaactgagacagtaatctctcaacccactatacaaggctgttttgcaggagagccttatgatgaccagcatgatatataattgtgagaaatatactgaacaatttatgtgtcagacaccggtttaaatgcttttacaacgtaagcgcctccaattctcataaaacccctgctaggtaggcactatcagcctcattttacaactgagggttgcggccagagctgacaggcaccgtctagcgccgcttccaagccccgcatcgcatccaccagcctaactcgggcgctcggcctctccctctgcgcatgtgcatccccgcctcccgctccaggcgagtccttccctggactccagtcccttgtgggaaacaatccctcgcctccggaggcggcgaggagcggcgggtgagccccggagcactgggcgagggccagggggtccccgcgctgccctgaaggcgggcgggcggcggctagacctcggcggtggggagggacccctggcgcctgcggcgacggtgggacgagggcgtctctgtcagaaggggatgaggtctggcgtgggaacgcgagttccggggctcccgggggtccgtatgcgtccagtccctgcgcctggcgctcagcgaagtcctgtagcacggggtaggcaatgcgcactggcccgaaggggagggaactggctgcggggaggggacagcacgcgcgtgcgtagcgtgtgacgtttgttgtgcgcgtgcgcatggcgtttgatgtgtgcgtgtgcgctttttgtgccctgagcccgcggggaggaggcggggctgcgggggagagcgactgcgccaggtccgcgacaaatgaattagacacaattatccacgggagactcggttttcctctctgtaaattacggatattaggaatacttgccgcctggggttgttttgagcactttcattgtttaggtgctgtatttattgggtgtgcgttccctgggagagcccgagggagacggctcctgcaccggccccaagggcctctctgcccgtggagtgcaggagcgaagggg

SEQ ID NO: 4871 - DNA, 2300 bp, Homo sapien
gtggctcctggtttctatattttcatctacacagtgaatggtgagcatcccagagatatataagacatttcacatagtatgaaatgacagaatatctatttgtgttttgtcttatataaacaaaaacaaacttgttaaatttattattatttttgagatggagtttcactctgtcacccaagctggagttcagtggcacgatcttggcttactgcaacctctgcctcccaggttcaagccattctcttggctcagcttcctgagtatctgggactacaggtgtgtgccaccacgcccggctaatttttgtattttttagtagagatggggatttgccgtgttggccaggctggtctcaaactcctgccttcaggttatccacctgcttcggcctccaaaagtggtgggattacaggcgtgggccactgtacccagcctaatttttttttttttgatagagtcttactgtgtctcactgcagccttaacttcccaggttcatgcgattctctcatatcaccctctcaagtagctggtgttacaggcctgagccaccacacccacctccttaattcttaataaacattaatacatgcaaaggtatgtattatattaataagcagagatgtatttgttaagtgtgtatgtaaaatatattttactggtccaaaagacagattcagaatttcttcttgtcctgtcccttgacttttcactgtaaccttctaactaatcttggtcctatgccttaccgtaagtacatacctaccaacctatggtatatacctaccattatgtacccacaataggtatcatacctaccaaattatatgtggtttcctaaacttaccatttctcatgcatccatgcctttgccagttgtgttttctttattcctaaagttagtcagtttgaccacctaataaaatctaacatgataatatgaaatgcaaataattacccccatttgtgaccatctcatgttgtatacatgtttctgtaatggcacctgcttcacatactgtattttagcattttcacctttgtctccctggcaaaaatataagctcctcgatatcaggaatagagtcatgtgtcacttagtgacagggatatgttatgagaaacatatcattaggtgacttcatcgtgcaaacatcatagagtgtccttacacaagcctagatggtacagctgactgcacacctaggctatgtggtgtagcccattgcttctaggctacaaacctgtacagtgtgttactgtactgaacactgtaggcaacttgtaacacaatggtaagaatttgtgtatctaaacatagaaaacagacaataaaaatactatatttttttataggatcatcatcatatatggaatttgtcattactgaaatgtcattatgtggcatatgacactcattttttttcttcatctttgtatcttcagcagagttccaggcatggagtgggagctcagtaaatatgtaatgaacaaatattccttctatgaataaagcagggtacagcatggcaaatatcctaactctccagaatgaactttgcagttagtacactaagagctagttcacatgtcttttcaatggtatgcaatctattctggttacttcaaattgaactgaagtatgttattccagggacccgtgacattaaaggatgttattgtggaattcaccaaggaagaatggaagttactgacccctgctcagaggactctgtataaggatgtgatgctggaaaactatagtcaccttgtctcagtgggtgaggaaaacttccccaggtgtaaatcccagtagtttgcatctatcttctcagttactggagtataaaatgtccctatagggttgaatgattgacattatctatgattcagaggtcgaagttaataaatccattttgggtactagaaaaaatatttgtgtccctctctccccgctgaaagaatctaaatttgccaagcctaactggaaccttcattattatcctgaaactccacttcctcatctttcacagtccctaaattccaagcaatttgtatcatttccttgatattttccattcataggttaccatgtgaataagccaaatgcagtcttcaagttgaagcaaggaaaagagccatggatattagaagtagaatttccacatcggggcttccctggtgagttagaagaaattatatcccatgttactggtgagtagttggtgcctcttgccttctgaagtacttttcggcaatctctcactttttttttttttttttttgaaacagagtttc

SEQ ID NO: 4872 - DNA, 2300 bp, Homo sapien
agtaaaacaaaactaagctccccgttaagattttttaatttaaattttgattgaaattgtgttaaattttatagtttctctaagggtaaatataaatataaaaatttgggctgggcgcagtggctcacgcctgtaatcccagcactttgggaggctgaggcaggtggatcacgaagtcaggagctcaagaccaccttggccaagatggtgaaatcccgtctctactaaaaatacaaaaaaaattagccaggcgtggtggtgggcgactgtaatcccagctactcaggaggctgaagcagagaattccttgaacctgggaggcagaggttgcagtgagccgggatcatgccactgcatcccagtctgggtgacaaagccagactctgtctcaaagaaaaaaataaaacaactgaattttccttcttgcaaaaagggaaaaagacctttactcctctcttttcttacagcatttccttaagaaaacttgtaattgtaaatcccttctctgtccctgtgagatatagcaaaactttttaaaaagtaaataagcttcttgctagtttaacaacccaggaaggtctttcttaatggccttgggtcatgtctttgaaatgtaagcatcaaggaagattgcaccccatctccctgcctctgtggtaaactcctaggctcctggctacccgcggttaactacctgcgtgtcatagagataccagaaactttacttttcatttgcataatggcaattaactaacactgatggctaccctaattatcaggtgaatttcagatgaattatgcatagcaaatgttgctgtacagtcatcttacttgaggacaagttatttttaccttgaggaaatagaatgcgttgtaccagaccggctaatacaaaaaatgatagttcttcctgtcttcataaactcattagtgggttgcctgtgacgcacatcgcagtctggtttaatgtttattcaataatgtaactgttttgttcttttctccatctgtggagagaattttctgggttggcaagaggctttattttaaattatttcctcaatacttcccatccagaaaggtggtgtgtgtgtgtgtattatgtgcgcatatttttatatgtatatatatgtgtgtttatacacatgacaatatatacgtttttttctagatgattctacatgttttaatgtaataaagttattgaccaggaaatatataatttgttttacatatacagccaagtcctctctctgtatccgcgggggattagtaccaggacctccctggattactcaaatccagggatgttcaagtctctggtagaaaataacctgatatttgcataacctacacacctcctcctgtatattttaaattatgtctagattaattgtacacctaacacaatgtaaatactatgtaaatagttttattgtattgtttagggtataatgacaagggggaaactttgtacatgttcagtaagatagaatttttaagtattttcattctgagcttagttgaatccatagatatgcacccccaggataaggagggatgactatatatattccttagtgaaatgatagtcatgatactctataccattaggttaaaatttgtgtaaattcatgagaaggatgttcacctaacattaagcgcttttgcttttgggaagtggtatactcgttttctgttttagcttatacatattttgtagtttattacgtttcgcgtaccgtttgcacaattgtgaaagctagcattcctaagaggaagcggttacagggcattatccttcattactccacgtactcctgtacccacggagttcaatcactttaacaaaactgcccatcagtgttccttggagcacctcacggtggatttctgtcttcaagcccagacgtgcagggtgcagctctccggccatcactgagcaaggacagcgccctctcccggaaacccgacagcaatcactcaggccgctggaggcggccgcgcctcacgacgtcatccaagatggagtcgcagccgggccttctgggaagcgtagttctggagtagggctagggaaacgttctgcgcatgtgcagtgtcttctttctggcattggcgtttttttggtcttacgccctagggtggggagaggactccggtgcctccgggtctgggctgggccgcaaagggcggggcctgggcccggcgcgggccgggagcagaggccgagaccctgcaggtgtgtcgaaggcttttgcgggcgggcagggcctgggaggcggggtctcgagcctgga

SEQ ID NO: 4873 - DNA, 2300 bp, Homo sapien
aaggatctcaattgcattgtgttaagagataccagattcaacaactacatactgtgtgattccatttatataatatcctaaaaaaggcaaacatataggcccaaagaatagatagcggttgcaagaggctaagagtggtgagagaatctgactttaaaaaggtagcatggaggaattttattgacagagatgaaacaattttgtgtcttgcttgtagtggtggttacacaaatctatgcattgtcaaaactcataaaattatgcatcaaataaagaacttttcagtatataaagcataaattaaaaaatgtaaatttcaataaatgtttcacgtatttttactcaaatatttgcatttctttctttttttttttttttgagacgcagtgtcgctctgtcaccaggttggagtgcagtagcgcaatcttggctcactgcaacctccccatcctgggttcaaacgattctcctgcctcagcctcctgagtagctgagactacaggtgtgcaccacaacgccccacctaatttttgtatttttagtacagaaggggtttcaccatgttgggcaggatagtctcgatctcttgacctcatgatctacccgcctcagcctcccaaaatgctgggattacaggcgtgagccaccacgcctggccatatttgcattactttcaattctcataatggacttaaaaagttttgctggaatggagttgcttatttttctctattataaaatgtgactgatattaaatttatagtttctgtctttggcatcacatcccttgttgttttttttgagacaaggtctcactttgtcacccatgctggagtgcagtggtgccatgatggcttactgcagcccggggctcaagtgatcctccaacctcagcctcctgagtagctgggatcacaggtgcctgcctacatgccaggctaattgttatttttagttttttgtagagatgggggtcccactatagtgcccaggctggtcttgaactccaaggatcaagtggtcctcctgcctccgcctcccaaagtgctggggttacaggtgtgggccactgtgcctggtccacttgtcaattttcaaaaatttttactcttttagtggtttaaatgtttaagtattgtatacatgtgagattttatcatgtgtgatctatgtatatctctacattccaaattgctcggaatgacatgctctttggaatactccattctttccctcactgttttgaaatgctgtatctactacacattaaagaatactcttaagctgtcttatttccatggagcaggtgccaaactactttgaatagagcaatattatatagatagatgtagatagatacagatattccttaggcatttttttcctgctttttaaaatgtatactggctgttcatttgggtttttacttattctagataaagttgagaatgcttttgtgaagtacagaatacactaaagatcaaagagaaaaaatacataacaaaaatttgttgatattcttttaggaattttgtcttcctaagaaaggtacagatagactaaaagtatttccatttagtcaagcaattttaatgtcacagaggaaatcatacgtgacatttattttcttctttcagattatgtctagttccttactgagctacaatttccgtttattgctttaaccattttgatgaagtagctttccggccgcaccttccccttttttcccccgctcccaaagaaccgctgatagcatgaaagtcttttaaactgtatggacgagatctatttcctaacatttaaacggaaaatgacacgcagcggtcctttccttgagcgtctgcgtctaaactgcccacagacctcccccgcagtatatccctttggagtgccccggggaaagccagggctgcaggcagttccagcaccaactcagaccgcatctgcccactgcctagcggggcacttctctaccaatccgaagggctgctcgcccggcctcacgggaaaggtagtttccaggtagggcgccaacagcatcaagctgtgcgcgtgggctctgcgcatgcctcgtccgccggctacgtctgcgtttccgcctttccttttgtttttctcaggttttgcgtgggaggcggtcccgggatttcaagggtctacgcgcttttctatggcgaatgcaacccgacgagggagtggggtaagccccagtgggttgggcagggagagagagggagccccgcgcgactcctggggcgggcggcagggggccggtaccaagtggtggggaggaggcc

SEQ ID NO: 4874 - DNA, 2300 bp, Homo sapien
tcctggctcttcctagttccttgcatttccatacaaatattgttagtattaataaaataacttgctgagactttctttggggttgaattgaacctatatataaatttgggaagaattacttacctttttttttgagacagagtcgcccaggctggagtgcagtggtacgatctcagcttatgcaacctccacctcccgggttcaagtgattctcctgcctcagcctcccgaggaattggaattacaggcacctgccaccacacctggctaatgtttttgtatttttagtagagacacggttttgccatgttggccaggctggtcttgaactcctgacctcaagtgagccacctgccttgacctcccaaagtactaggattatagatgtgagccactgtgcctggcctccaattccattcttgattattttctttccccagttttctgacaaccttctgattttctcttgatggctttgaacaccactatattataaatgtctttgtagtccttgtttcattcttgatcttcatattatgcttcatttttttttgagttggagttttgctcttgttacccaggctggagtgtagtggtgctgaccttggctcactgcaacgtctgcctcccaggttaaagggattctcctgtctcagcctggtgtctcagcgggtgtctcagctgggattacagacacccgccaacacgcctggctaattttttgtatttttagtagagatggggtttcaccatttttgtcaggctggtctcttaactcctgagctcaggtgatccacccacctcagcctcccaaagtgctgagattacaggtgtgagccaccatgccaagcctatgcttcaaatttaatataattaggatgtttcttactagaatactgtgtccaacctatatagccctaactttcctggtttacattgtggccctagtatctgggcagctgtgcatggagatagccagaggaaacattttttttcttaatgaattggtgaccacattttgttgttcttgcctcctattatccgtgccctatttgcatcctggtttcttctacagtagtttatgtaaatgttgttttgtcctttgtcgttctcagtagaattggttctgtaaacgaaacctggtcctgtaatttcagtatatgctcatatctcatctttggctctcccattttcacagcagtgatccctaaaagatgtgccctagaggatatccagaacaatccaattggatgtcttctccgctgtactccacagaggtttcaaatataatggttccaaaatctttccattttctacacatccttattattgtctctgaattaaaggattagaacccagaatatgtattgcgatgaagaaaatgtcaggctctttttctacatttttaaatccaaatgagagttaaattagaattcataatgaatgtactgacaatttatttctgtgatttgtaaatataaatctgtagttctcagtaatattcttgaaaatggtaaatgatcaaatactttggagaccattggtctaaaattactctataacccatttccttggctttttttctcaagacagcaccaggccatctcctgtgctgtctgccattttgttgatgtctgcagtgtgttggaggccctcacctttgcttgtatcatggccctatgcttatgaagaacgtaatagagtgtttttcataattcaaccaacagctgtacttcctcagttaagctcaaaacagagccaactttgctcctaatgttagtctactgtgtttgtactttcaccttagtacttgtaacatattaccacacatattttcttaccactctgtgtgttctttgaacacaggaagatttttattaatcttagtatttccagcagtgatgatagttccaggtactttgtaggaacttgataatttcttttgcatgaattaatatcttaatgcattaatggcagaatatttctgttatgatttctttttccctaaaagtataaaacaaaacaatattctgtgaataataatcatggtaaggattagcccatacttcttttttcatgccacctaattctgaatgtttcaggtagaacagaagtcccaggagtcagtatcatttaaagatgtgactgtgggcttcacccaggaggagtggcagcacctggaccctagtcagagggctctgtatagagatgtgatgctggagaactacagcaaccttgtctcagtgggtaaggtctgttcactgtatcattctaaatagcatttgtttattcttttgatt

SEQ ID NO: 4875 - DNA, 2300 bp, Homo sapien
aattttacttctatatattagcaatgatcaattggaacttgaaatttttaaaagttccatttgcaatagtatcaaaaatattttttttgcagctatgtctggcaaaagatgtgaaagaccacactagaaacaataacccactgcagagagaaattgaagacctaaacaagtggaactccctgcttatgtcagaaagctcaatattgctaacatgttttgttgttaacatgacttatagattcaaaataatataattccatgtagtaattagcaggatttcttgtagtaattgagtacgtaattctaaactttatgtggaagtagacaggaaacttgtctactttagttactctacttctagagtaactaaaactttgaaaaataaaagctgagttgtatggataggattacctgatttcaagactcaaagtaaaagtttgctgagacttggtctttttgtccagagtactttttcttcaattttcacatctagtagttttattaagctatgttttggagaaaactgttgctgaacatttttcccaggttcatgatggttcctttgaatatgtggatcaggtcttttatttttggacagttttcttagattatactttttaatattagatttattctgttgttttttcttctttaaggactgcaataacatatatactatattataattttatttatttatttaattgtagaccatctttatccagaactttctttctgatccaattttcttttttcttactcttttaaaattattgcttcttctttttcttgtttcattctcctttgcaatgctgtttattcaagtttcagtcaagtgtagtttcccctttggctctgtattagttgactcaggctgctgtaacaaaattcaacagactgggtagcttaaataaattttctcacaattgtggaggctggaagtctaaagtcaaggtgccagcagggttggtttctggttaggtctcactccttggcttgcagatggcattttcttctggtgtcctcacacagccttttctctgtgcatatgaccagtggttgggggtggtgggttgggggagaaagagagctcatgcatgtgctttccagtatcctcttcttcttataaggacaccaatgccattgtatttgtgtcttacccttatgacctcatttaaccttagttaatctccttaaagtccccatcttcaaatacagtcacactggaggttggggttttaacatacacatttttggggggcacagtttagtccataacagattccttaataaggaatgtctttaataagtcttaataagacttgaattacaagtcttattttctgtgattactctgccctctttacaacttcattcctgagtttgattaccctttgcctctttagtttgcatacagtccaagtctcttctcttggatttcccactaacctgagctttaatctacgtgaactcagacatcttctgagtattttcccactcatagtgaaactttccctttctgggagtagttttgtgtttcatcctctctgggctgtgtgtctcctctattccatgtaatcaccacagtctctggctgactctctttgtaggcatgggctgtcacttttttctgtatttgagtatctgttgcttagtggtgatttgaaattagtaatattctccatctcctagttatgttaaagtcatggattgtttagatagtgttatttgctccacttatggtgacctttataattcttgggaggatgcatggggaaacgcagatgtaagcagctgctattattcttcttacactagaaaccaaatgtgtgccttcaatagttaaattcctctctgtttttccactagcctaggacttttgtttctggtttttgtttttgttttttgaccccaaacccatgaaatacaaaaaatatgcacttgcaattatgttcatctctggaaactggccaaaaaaccagtcagctgcaacatggggcatttgtttagcgatttcattccctaagaaatgttttggtatttatgtggtaagattaattttgcttgtttctagaagtctggacagctgatcacctgaaagagaggagccaagaaaaccaatctaaacatttgtgggaagttgtattcatcaataatgaaatgctgactaaggaacaaggtgatgtaataggaataccatttaatgtggatgtaagttcttttccttccagaaaaatgttctgtcagtgtgattcatgtggaatgagtttcaacactgtttcagaattggttatcagtaa

SEQ ID NO: 4876 - DNA, 2300 bp, Homo sapien
gggcaggagaggtggctcacatctgtaatctcagcactttggcaggctgaggcggatggatcaattgaggtcaggagtttgagaccagcctggtcaatatggtgaaacctagtctctactaaaaacaggaaaaattagctgggcgtggtggcatgtgcctgtaatcccagctactggggaggctgaggcaggagaatcacttgaatctgggaggcggaggttgcagtgacccgaggtcttggcactgcactgcagcccaggtgacagaatgagatccagtctaaaaaaaaaaaaaaaaagaaataatggaatattcacaagtgtcaagactgtttcttaaaatgcaaaagcattaggctgggtgcagtggctcatgcctgtaatcccagcactttgggaggccgaagcgggcggatcacgaggtcaggagttcgagaccagcctggccaacacagtgaaacccgatctctactaaaattacaaaaattagccgggtgtggtggcacaagcctgtagtcccagctacttgggacgctgaggcaggagagtcgcttgaacccaggaggcggaggttgcggtgagccgagatcatgtcactgcactccagcctgggttacagagccagactccatctcaaaaaaaaaaaaaaaaaaaaaaaacattatgagcaggaaaataaattgtgtctcgaagtgataatcattgttgtacttaccatgactgtcttctgaaatgcatctcaacccttgaataatttgattcttttacatggatggtactaaatgcttttccagcatgggaacaagtgggattatcatcagtggtggtaaagaagggaatagaaatggagaaaaatgcttcttttttggtcagtggacatttattttttatttttattttaacttaaacttcaatagcttttggagtacaagtggtttttggttatggatgaattataaagtggtggattctgagattttagtgcacctgtcacctgagtagtgtacactgtacctaatgtatagttttttttttttcatttttgagatggagttttgctcttgttgcccaagctgaagtgcaatggcgcgatttcagctcactacaacctccacctctcgagttcaagggattcccctgcctcagcctcccaaatagctgggactgcaggtgtgtgccaccacgcccagctaattttgtagttttagtggagacggggtttcaccgtgttacctaggctggtcttgaactcctgacttcgtgatccacccgcctccgcctcccaaagtgctgagactacaggcgtgagccaccgcgcctggccatgtgtagtttttttaacctccggcctccttcctaccagccccttctgagtctctaaagtccattatatcactctgtatgcctctgcgtactcatagcttagctcccacttataagtgagaacctacggtttttggttttccactcctgtattacctctgcctgtgaactttaaaaagttatcgtgatcaagagatcctgcatactcctgaagaatggaaaatgcatgtttgccatgcaagatggtattacgtggtttaacaaataaaatttgaagagcaattccgagttatctttacgacagcttacaggctggtaatgctcatgtccagcgtgttttctcacggttagcgtccaatggaccagaaaggagcaagtgaagctctccacactggcgcaagtgtaggtggtgctgcggcagcgtcgcggggccacaggaaccgacctcgtctggagaaattccactcgtgaattctgccaaatgaggaagtgttgaggacggccaaatcatcagggggatgtaattcatgagaaagctgtgtaatttaaatactcataatttatttcagctaacgaataaaactgcagtactgcacttgccgcatctgggaactaactgcccaatgcggctgaaacctcatgccctttcaaaaggagtggcgcgagggcttgtgggaaatgtagtctgcactttctaagggagcggcgcgagggcttgtgggaaatgaagcgtgcactttctaagggagcggcgcgaggacttgtgggagatgtagtgtgcacttttcggcccccgtcgcgggagccgcttcgggccttctgggcatgtctgccatatggctccaggtttgtttttctccccggcactctgacggggagggctcccggcatctcctggcgtccgggtagaggacgcggagggtgagtaagggagggcaggggcgagggtggactgggggttccgcgcggcctggggg

SEQ ID NO: 4877 - DNA, 2300 bp, Homo sapien
tttatattcaacttttgaccatagaattccattttatgtgacactgagagtaaaaaactatcttttcctccttacctatttctcttcctacattctctgccaggaggaaggcaccgctacatactcagtcttccccagcagagcctgagcgctctgttttccctctgcttcccctcttctttcacatctcatgaccaagcacttcctattccatctcccaaatgatcagaaaactttttcctcaacttttgtcactgccactgcctttatcattactcttcttttagataaagtctcttaattggtcttgttgcttcctttagtccttcattattatacagaccactatacacacatctgacagagatgcctcacctttgtatgattcaatgactcaaattttcagaataaaattaaaaccatcccagcaacaaatttgggatcaaatatgggtgggtctgtatcctaggttcataccctgtccagcagtgtagtctcagaaaactgaactccttaagcctttgtttgtgtatctgcctacactaattgagagttaggactgtttcacacatacagtgcctggtatgtagaagggacttaatgttgaatgaaggggaggcattttaaaatccacatcaagaaatgtttttcttttaaaaatatactaatctacaatgtcactttccctccaagcttgacttctacctttactttctgatatggtttgggcatgtccccacccaaatctcatcttgaattgtaatctcataatccccacgtgttgagggagggacccagtgggagataactggatcatggggacagtttcgcccatgctgttcttatgatagtgagtgagttctcatgagaactgatggttttatacatgtttgatagttgctccttcacatgctcacactctctggcctgctgccatgtaagaagtgcctgcttccttttccactatgattgtaggtttcctaaggcctccccagtcatgtggaacatgagtcaattcaacctctttcctttataaattactcaacctttataaattacctgtcaacctcaggtatttctttatagcagtgtgaaaatggaccaatacactttctgataatcctgcttgagaaattgggggaattcatactacctgggatcaaattgtggccccagcctgagcagtcgtgtgaccttggggagataacttactttctccatttcagtgtcttctgtaaaacctgtaaaatgagattgtttctgagggttaaatgagcatagcacagttagaatactgtcaggcacatactgattgccagatgttgagtattcatctttattgaattaggactgtggtaccccactttatggctctctattttgtatgacaaaatcatgcttagtgctttgttagtaaaagagagaataatctgaaagtttttcctgtggaaggaagaaacagaggggagaaaagggagttggtaagtttcagcatttcagaacttggagggacaagtcaggtttctattttttggagaaagaggtggaggcaggatgggtcctaaggtgtcattcaagacacacagccataactctttattgagagtagagctagagccccagggactgctatggtcaagttgcagacaaaaactaccactcattggaagacaggagaggaatatttagttacaaaagcagtcaacaattcaggtgtatctacattcagtcagcaaataaaagttgctcaacttggttgctaatgggacccactctactaactgaggatttgtatagaactcatagaggaagatggcttcaagtaaggaaccaccttgtgcttttcttgggactaaaaagctcaggaagccggtgatgaatgaaaatcttagtcccactggcactgtgcaaggggccaggagagcagcagcatcataagcctcagggtgaggcagcccaggcaggggcattctgagctgtaggggaggtggggcagccagggtggggcattgtgagctgtcagggagggcattgtgaagtgtggggtggggcattgtgagccacaagcctgggcttccacctgggctagtgtgcttcagtctgtaggtgactgcagaaggaggaggagctccatctgtactctcttcaggcagttgtgtctctcagtgcttgttgggttcacacctattaaataagctggctggtcttcaccctccaagagaagtcaactcatgggaggtggcagggtacaggcattggcccaagctgtggctggggccaggctgtggtgtcggcaggca

SEQ ID NO: 4878 - DNA, 2300 bp, Homo sapien
gtgagtcatccaggtttttggccatttggaacgaaaagttggacaaaatgcacaaagtaacaaaggtgaagctgcgaaagcaaaagcagggatttattaaactgagaaagcactccacagggtgggagtgggcctgagcaagtggctcaagggcccagttacaaagttttctgggttttaaatagttcttttgaggtccctatgcgctaccccttatctggatgaaggatttggtttatggctaagtaaaggctgaggtgaatttgtgccctatgcagatgatggcatggcccatgcttagtggttggcccacagccaatccaaggcactttccctttccatctgagacacggtggaagtgtggcaggccacgtctcactaacaactgtttcagtactgactaagtggttaaatattgaaagccagtgcccttatacaaaggctggggtgtaacaaaagcccattaagaattttgcctaggcctttcctgggcctcttaaagcatacaaaataaagaaagaattcttaacaggacccctttaggattaaacaagttttattgtggtctgaagaaactccccaggcctccacaaacaagtttattggggggtctaagagaactcctcaaacctccaccacttagcaggagagaatacaaggataatcaccccagcacctggacccatttaggttaagtaaatttactgaggctccagaggaaggttttcaggactcagaccttagttacagattaaaagaagttaatcacttatgtctttagataaatgcacacttacacgtagacagttcgcttagaaggtatataagctctgaaaaactgtaattttgagttggtctggcgataatttccaggccttctccctgcaaccggttacagaaataaaaactctcttcctccccagctcatctgcatctcgttattgggccttgaaaaatagcagcccaaccctcagtttggtctgggaacagaaggttgtagggagagtagcctttgatcctttgctactggggagtggggagatggggtttttccttctggtttagctttaggaagttggtgttaattggccctaggctctcggcccccagacccaggtgttttccttttgatccagctttgggaagccagcaccaactggtctcagattccctacttccagcccttgctgtttttccttgattgagctttaggaagtcagcacgaagtggccttaagtaccctgcctccaaaccctattctgcctcattttggcagagtacttttatatgtcttggatctaataataaaatatcggggcttgtgttttgtatgccttttgcttttctttttctagcactttttttttttgtattttctaaaagcacccatctggaatggcttggagacaaaaacaggtcctttagcacagtttgagatgcactgatacagaaggttacagcacattctcagtacttcggcgaatgaagttctgagattctggttccacgccacattccaagttttgaatactggtaatttaggtctgattctacataaagttcttaataaaatcagtgctcattttctcaaataagtttctttagaggaggaggtctgggatcaaaagttgggctgtgaagtggcacaatgcctggatctgtacatccaaaaaggagtggaaaattagataataatcgcccaactttggctcctagacccaaaccttttctctagaatgggcactggtgcaaataccgtgaggccttcctgcaatgaagtgccaatctcaggcgccagggcacagacccagtgcgtgtcacagatcctgtcctgagtgctaggccgggtgacgcccccaccaggattaaagatcaggggtccgctgagccctaggaagcagtgacagacacctgcgccaaggcggagcgagaagagcctggaatggctccgggctttgcgtcacgcagctccgcccctcggcctatctcacccgacgccgtctccgagggcagggaacggttggcggactgagattggagggatcagctcagactcgatgacgcaacgggaggcggggcgtggccgtactctgattggtgacgggtgaggcggcccgaaatcgtaggacttccgaaagcagcggcggcgtttgcttcactgcttggaagtgtgagtgcgcgaagatgcgaaaggtggttttgattaccggggctagcaggtgaggctcctttgtgttggcagaggcggcagcggatcaggggtccgagagagcaggggtctgcgaccctccacgaacgga

SEQ ID NO: 4879 - DNA, 2300 bp, Homo sapien
ctttgtgggtaactccactagcctaccagggtgcctctcataaaggtaagaaatgtaaatttggcctaatatacaaagttgccagggcagcactgggtcaattctacatacagtacttctatgttcatcaagggaaaccttaagggaaagtgaaaatgcttctagaaggtgactggacaccagcgcctttgcttgttgcctttgggctcttcttctaaggccaacagtgacctgaaattattgactggcttttccaatcaagtggacaaaatggtaccaaggtcgccaacatcagacaaattcacttgagggccttatctatgtgctttgaacgacaaaactgcttttgtaaaggacactgtatttcagaaaaacataatcatattaacaaataataacactgtaaaatgctgatgtgttgaatgctactttagaaaaacatgctcaaatctagggaaaaaatttgatacaaaactacatatcaattatctagctagctagctagctagagacatgctttcattctattgctcaggatgggaagcagtgggattatcatagctcactgcagccttgagctcctggactcaagtgatcctcctgcctcagcctcctaactagctagggccacaggtggacacagttatgcctgggtttttgtttgttttgtagagacagggtgtcactacattgcccaggctggtgtcaaactttggagtctcgctgtgttgcccaggctggggtgcagtagtgcgatctcagcccaatgcaacctccgcctcccgggttcaagtaattctcctttatcagcctcccaagtagctgggactacaggcatgcgccaccacggccggctaatttttgtattttttgtagagactgggtttcaccatggccaggctggtctccaactcctgacctcaggtgatccacctgccttggcctcccaaagtgttgggattacaagtgtcagccactgagcctggcggagcactttcttatgttattaagtagcctaacccaggtggggcgctgtccctcacgcctgtaatcccgacaactctgatggccaagctgagaagatcgctacaactcaggagttcgaaactggcccgggcaacatagcgagaccccccgcccaccccatctctagaaaaaaatacaaaaattaggccaggtgcacacagcacccggctaatttttgtatcttttgtagagacggggtttcgtcatgttgcccaggctggtctcgaactcctgagcccaagccatccatcctcccgctttggcctcccaaagtgctgggattacagtagggcccagccagcctcatgttttatttagcagtccctccctgttgcacacttggatagtttttttaatttttttagacacggtttacctcaatctcgcaggctggaatgctgtggtgggatcatagctcactggagccttgaacctttgggttcaagtagctggggggctgaggtaggactacagagatggggttgcgccatgttgctaggctgctcttggcctgaagggtcctcctgcctcggccgcggcagacatagttttctatttttgaccaacataaacactgtgctgggtctgaatttttcagctacccttcttcagccggcaacacacaggacctggcggtgaggtcgctcttaccagtccccactctgacgagaagactgcccagctccaggcaccgtagcgccccagtgacgtagccgaacacccgcgcctgtgactcgccaaaggcccacctctatggtgtcggcgaaggcgcgcccttgcggcgccggggaaggcgcgcccgtgcggcgccggggaaggcgcgcccgtgcggcgccggggaaggcgcgcccttgcggcgccggggaaggcgcgcccttgcggcgccgcggaaggcgcgcccttgcggcgccgcggaaggcgcgcccttgcggcgccgcggaaggcgcgcccttgcggcgccgcggaaggcgcgcccttgcgacgtcacaggggaccgccactcacgcggagccaatcggaactcatggcggggctgctgggtcttccaggagcgcgcatgagcggacgctgcctatgggttgccgggcgagatgtaaccggctgctgagctggcagttctgtgtcgctaggcttcggcccggccgccgccacacataagctgcgatgaggagctttacgacttcccggtcttcggggccgggcgcagcaagggccagactctgcgctagcaggcgctgcgcgccaaccggccggcacctgtcgcagaaggtgca

SEQ ID NO: 4880 - DNA, 2300 bp, Homo sapien
tgtctccccagaagtaagattactgtgagacatggtgaatggacattctcattacccttgatgtaaattgacagggttttgggtgcctcccagctataatcttagcactttgggaggctaagagaggaggattgcttgaggccaagagttggaggaggctgtatggcagtatggtgagaccctgtctccattattttaaaaaattgacaagctttacccgggaaggcttatacacaatttaaacacccctcatagtataagagagtgcccatttcactgcacctttgccagcacagggtattataatttagtaagtcattttttgtttgattattttaaatagataaaagacctcatattactttacttgtctcatttcaacatctttccttagcttattagctgtatttcttttctgtctgtaaatgattgttgttttgttctttgagacagggtcttgctctgtcaccaggctggactgtagtggcataatcatacctcactgcagccttgacctcccaggctcaaacttcagcattctgagtagctgggactacaagtgtgcaccaccactcccagctaacttttttcttttttttggatagagacagggtctcactgtgttgtccagaccggtctctagctcctggccttaagcaatcctcctgcattagcttctcaaattgctggaatttcaggcatgagccaccatgcctggcctgggctagtcctgtattctctagagttttctttactttgtgctagccaatctctcattatgctgttcacctgttctaatgaataattctccatattaaattttaccactttaaactcttgagtgttttatgcttcctgattggactctgactaatatgttaggaagggtcccaggagataaacccacacatgggatttgggcataggtttggtttcccagggggcagtgctgagctctttgccagtgggaaatgggatgctggtgatttccaggaagtgacctcacagtgactcaagctaccacttactgttgattgtgatgaaatgccagctgaggcacatgccttgggagctaagtggttgctgcccttgaccactatgaagactggtgtgggaagggtcgctttggatgcacttgagcaggggtccccaacccctgagccatggagccgtaaggagccacacagcaggaggtgagtggtgtcgagtgagggagtgaggaaagcttcgtctgtatttacagccactcccctttgctcacattcccgcctgagctccaccttctcagatcagcagcagcattagattctcataggagaacgcaccctgttgtgaactgtgcatgtgagggatctaggttgtgctgtccttatgagaatctaatacctattgatctgtcactttctcccatcacgctcaggtgggaccatccagttgcaggaaaacaagcttaacatgcccactgattctacattatggtgagttctataattattttattatatattacagtgtaataatggaaataaagtgcctaataaatgtaaacgtgcttaaatcttttggcccagctcctacctcccggcagcatctccaggcccagaactttctccagtcagcctctacagaccaagctcatgactcacaatggcctatttaggcccataccctacctcacggcagtctccgcagatgagcctactgcctcacaacagcctccacaggcacagctccgtcgttacaatggcctctttagacccagctcctgcctcccagccttctctccaggccctgaactttctcaagtcgacctcaccaggcccagctcatgcttctttgcagcctctccaggcccagctcctgcatcttggtgacccctccaggcacagcctctgcctcccgtcggcctctacagtcccaacatctgcctcacagcagattcttcaggcccagcatctgcctcactgtggaccccccaagccaagctcccaacctttcagcagcttctacacacccagctcctgccacccagtggcctctttaggccaagctcatgcttcacaagggtctttccaggcccaatttttgtctcatggcaaccttccctggccagattcctgcctgtctcccagcagcctagacaggcccaggtcttgcctcacactggcctctctacatccagctcatgcctcacggtggcctctccaggctcaactcctgtcccaggacgtcatctccgggcccaaaacttaaagtcagactctctagtcccaactgctgcctcctggtggattatgaag

SEQ ID NO: 4881 - DNA, 2300 bp, Homo sapien
aaagtgtggtgctctccagtccagtgttctggaatttattctgcagtggcccccaacagcaggtggcagccttgtccatgattgtattcttaagtgacatggtattactctttctatttgcaatccatttcactgatggatagttctagagatctgaaatattgagatttagctcagtgttgtttatatgaagataaattccgctttccaacaactctcttgtatgtgtctaacgtctgccgcatggaatgtcacagattatgcttcatacttgtcttcctgagtcttctttatcccgaacaccctgagtttttgaatggttgacatgccagctggctttctgcagatgtacttctcgtgtgtaaatttccttctctgtgaggtattcatattgaacatgacctccaagtgtgtttgggtctgtgcagaagacaataggactgtgatttctgatgattaaaacctggattgtatgttactgtgatcagaccctgagactgagttagcaagttttatagcatctgagtcgttctgttggaggaaagtgcatgtgatgggcatttgcttgcttccccacaagattctctaccttcacccttcctgcaagattccctaggaagctgacttctgctgaatgcaacactcaggttatctgcttcctagattctagttgagtttggtccatgggaggccttggcagaaattttgagagtaagagcaaataattacttaaccattagaaaaaaataacatgaatgtgtccttctatccatggcctcagttcctgttggggagcctcggtgccaatccctcggtgcatcaccatttctaattagttcctgttttagtctgcttttgcttgtgtgtgtgtgtgtgtgtgtgtgtatgttgttataaaggaataccagaggctgagtaattttaaagaagagaggtttatttggttcacagttctgaaggcgtgcaagaagcatggtgccaccatttgcttctggtgagggctttaggctgtttccactcatggcagaaggggaagggaagctggcatgtgcagagatcacatggcgagagagagggttttgtgccaggctcttgttaacaaccagctcttgtgggaattaagagagctagaactaggtgggcacggtggctcatgcctgtaatcccagcactttgggaggccgaggcaggcggatcacctgaggtcaggagtttgagaccagcctggccaacatggtgaaaccccgtctctactaaaaataccaaaaattagctgggcatagtggtgggcacctgtaatcccagctactctggaggctgacacaggagaatgggttgaacccgtgaggtggaggttgcagtgagccaagatcgcaccactacactccaacctgggcagcaagagtgaaactacatctcaaaaagaaaaaaaagagccagcaagaactcacttggatggcaccaagacattcgtgagaggtccacactcaggaccaaaacacctcccattaggccccccctccaacaatggggatcacatttcaacatgagtttggagtggtcaaatatctaaaccctagcagttcccttaaatggaatggaatggtctcgaatggaatggaatggaatttaatggaacggactctaatcgaaaggaatctcatggaatgcaaagaatggactcgaatggaatagaaaggagtggacttgaatttaatggaatgcaatggaaaggactgcaatggaatgaaatggaatggcctcgaatggaatgcagtggaattgaatggtctcgaaaggaatagaatggaatgcaatagaatggactcaaatgaaatggaatggaattcactccaatggaattgaatggaaaggaatggaaaggaatggattggaatggaatggactcaaatggaatggaatggaattgacttgaatggaattgactcgagtggaatggaatggaattgaatggaatggaaaggaaaggcatggactagaatggatttgaatggaatggaaaggaaaggaatggactagaatggaatggaatggaattatcacaaaaggaatggaatgaaatggaaagaaatggactcaaatggaatggaaaggaatggaatggacacatatggaatggaatgaaaagactgaaatggaaaagaaaggaaaggacatggactcgaattgaatggaaaggaatggactcgaatggaatgaacttgaatagaatggaatggaatggacacgaatggaatggaatggactagaatggaatggagtgtagtggaattgactcg

SEQ ID NO: 4882 - DNA, 2300 bp, Homo sapien
ggactcgaatggaatggaatggaatggacacgaatggaatagaatggaatggaatcaaaaggaatggagtggaatggaatggactcgaatggaatggcatggaagggactcgaaaagaatggaatgcacttgagtgaaaggcaatgaaatgtaacaaattggaatggaatggaaggtcctggaagggaatggaatggaatggaatgcaatggacttgaatggaagagaaaggaatggatcggaaaggactcgatgggaatgaaatggaatggactcgaatggaattgaatggactcgaatggaatggaatggaatttcattgaacggactctaatggaatggaatctaatggaatggaatggaatggactcaaactgaacagaatggaatggactcgaatgaaatggaatggaatggactcaaatgtaacggaatggaatgtattcgaatgcaatggaatggaattgaatggtgtagaagggaatggaatggaatgcagtggaatcgactcgaatggaatggaatggaattgactcaaggggaatagaatggaatgcacctgaatggaatggaatggaatggaatggactcgaatggaatggcatgaagtggaatggactcgaatggaatggaatggagtggaatggaatggacttgaatggaatggaatggactcgataggaatggaaaggaacggaaaggtgtggtctcgaatataatggaatggaatggaattgcatggaatggaatggactcgaaaggaatggaatataattgcaatgacgcgagtggaatggaatagaatggaatggaaacgaatgtaatttaacggaatggaatggacttgaatggaatagaatggaatggacccgaacggaatagaatggaatggatcttaaaggaatgaaatccaaaggaatggaaatgagtcgaatggaatagaatggaatgcaatggaatggaatggaatggaacggaatggactcgaatggaatggaatggaatggaatggactcgaaaggaatggaaaggaatggactcgaatggaatggaatggacacaaacggaatggaatggaatggactctaatggaatacaatgcaatttactggaatggactctaatggaatggaatggaatgcacacgaatggaatagagtggaatggactcgaatggaattgaatggaatggaatgcacacgaatgtaatggaaaggaattgtctccaatgcaatagaaatgagtggacttgaacagaagggaatggaacggaatggaatggaatggaaaggactcgaatggaatggagtggaatggattggaatggaatgaagtggaatggaatggaatggaaaggaatggaatgggatggaattgaacggaatggactcgaatggaatggaattcaatggacccgaatggaatggtatggaatggaatggacttgagtcgaatacaatggaatgcaatggaatggactcaatggggatggaatgcaatgtactcaaatcgaatggaatgcaacggaatggactcatatggaatggattagaattgattcgaatggaattcaatggattgggcacgaatggactggaaaggaaaggaatggaatgggctcgaatggaatggagtggtatggaatggagacgaatggaatggaatagaatgattggaatggaatggaatggactggaatggaatggctttgaatggaaatgactcgaatggaatggaatggactcaaatggaatagcatggaatggaatggattcgaatgaaatggaatggaaaggaatcgaagggaatggagtggacacaaacagaatggaatggagtggaatggactcgaatggaatagaatggaatggactggaatgtaatgcagtggaatggaatggactagaatggaatggaatggaatggacttgaacggaatggaatggacttgattggtaaacaattgaatggagtggaatggactcaaaagtaatggaatggaatggactcgggtggcatggaaggagcacgaatggtatggaatggaaaagaaaggaatcgaatggagtacaatggaatttaatggaatggaccctagtggaatgtaatggaatggacaccaatggaatagaatggaatggaggccaatggtatggaatgtaatgggttggactcgaatggaattgactcgaaaggaatggaatggaattgaatgatctcgaaaggaaagtaatggaatgcaatggaatggactcgaatggaacgcaatggactggactcgaatggaatggaatgcaaag

SEQ ID NO: 4883 - DNA, 220 bp, Homo sapien
gaattcaatggactcgaaatgattggaatggaatgtgatggaattgactcaaatggaattgaatggaattgactcgaatggaattgaatggattggagcctaatgcaatggaatggaatcgaatagaattcaatggaatggaatggacaggttcggaatggaatggaatggaattgaatggactcgagtggaatgggttgggaaggaatggtctcgaatg

SEQ ID NO: 4884 - DNA, 2300 bp, Homo sapien
ccattccattcgtttccatttctttcgtgtccataccactcctgtccattccatttgcatccattccactccagtccattccattcgagtccattccattccattccatgccattcgatatctttctattacactccatttcattctattcctttcaattccattccattcggttccattccattcgactctattccgttctaatccattccattccattccattccattccattccgttctgtatgattccaatgtgttagattccattttgttccagtccattacattcgagtccattccattgcagtccattccattcgattccattgcacttgattccattccgttccattccatttcattccattctattccattctattgcattccattctattccatttgattacattccattcgattccattccatttgaatcaattacctttcaatccattgcattcgattccgttctattgcagtcaactccgtttgattgcattccattcgattccattccatactatttcattccattcgattccattctattcgactaaattccatttgagaccattcctttcgagtcccttctatctgaatccattccattcgagtccattacagttttgtccactccattctattgcattccattccattccattccattgcattccattccattccattacattccatgccattacattccatgccattacatttgattctattccattcgagtccattccattgaattccattccattccattccattctatgccattccattcgattttattccattttactccatcccattccattcagttccatccaattccattccattctattcctttcccttccactccattccattcctttcatttccattccattctagtccattcgtctctagtccattcatttgggtccattaaattgcactctattccattcgagtccattccattacattccattcgatatctttccattacactccacacctttctgttacttcaaattcattcaattccgttccattcgattccatttcattcagttccattacattcaaatcctttccactcgagtccattccattccattctgttccattcaattccaatccgtttgattccattttgttccagtaaattccattcgagtccattccattcaagtccattccattcgattccattccatttgattccattgcactcgattccactccattccattccattgcattccattctattccattccattgccttccattccattccatttgattacattccatttgattacattccatttgattccattccattcgaatcaattactttgcaatccatttcatacgaatttgttctattccagtccattctattccattccattccatttgatttcattccattctattccaatccatagtactgaattaaattcgattccattctattagaataaatttcatttgagaccattccttttgagtccattctatttgagtccattccattagattcctttacatttgggtccactccattccattcaattccattcgatgccattccattctattctattaaatttgagtccattccattaaattccattccattccattcgatgccattccattaaattctgtttcattcgactccattccattccattctgttccatctgattccattccattctattccttaccattccatacaattcatttccactcttgtccattccatttgattccattcgactccagtccattccattcgtgtccattcaattcctgtccattcctttcgagtccaatgctttagactccattccattcgtttcaattccatactattgcattactttcgattccattctattcgaataaattccattcgagaactttcctttcaagtccattcaatttgagtccattcttttctagtccatgacatttttgtccattccattgcattccatttcattccatttcattctattccattctattccattccattccattctatgacactccatttgactctattccactcgactccattccattcgagtccattccattccataccattcaattcgatggcattccatttgattctactacattcgacaccattccattccattatgttccatcatattccattccattctattcgtttccattccattccattgcattccattccactccttttctttccattcatttccattccattccattgcattccattcc

SEQ ID NO: 4885 - DNA, 2300 bp, Homo sapien
tccattacactcggttccattccattcgattccattccatttgattccattaatctcgagtcgtttacattccattcctttctgtgcgattccaatatcttctatttcaatttgttctggtctattccattcgactccattccattctattctgttccattccattttattccattcgattctattccactcgattccactctattccactccattgcattccattctattccattccatttcattccatttcattccatttcattctgttccattcaattcaattccattctaatcaattacattgaaatccattatattcgagtccgatctaatccagtccattccattccggtccatttcatttgattcctttccgtttgattcctttccatactattgcattccattcgattccattccgtttgattccctcccatactattgcattccattcgattacattgtattcaaataaattccattcgagaccatttcttctgagttcattctatttgagtccattccatttgagtccattacattttgttgcattccattccaatctattccattccattcgatgccattccattcttttctgttccattcgtgtccattctttacaagtccattccattcctttccatttcattcatttccattccattccgttccattccatgccattccattctagtaaattccattccattccgttctatccgattccattaattccaaacaatttgatgccattccattcgattctgttccatttgattccattccattccattccattccgtccgattccattccattctattcctttacaatatgttcctttccattctattcgtttccattccattatagtccattccactgcagtccaatccgttcgattccatttgattcgactccattcctttcgagaccattcagttcgattcctttgcattacattccattcctttccatttgatgaaattccatttgattctattccatgtcactccattccattccattccgttccatccaattccagtccattcaattccattccattccaatccattccattccattccattggtttccattccattcaagtccattccactccgttccactccactcgattccattcctttcaactccattgtgttcgagttctttccattccattccatccctttctgttccgtttgattccaatccattccattccattttgttccagtcaattccattcgagtccatgccattcgattccattttattcaattccattccattcgattccattagactcgattccactccattccattccattgcattccattctattccattccattgcattccattcctatccatttggttatattccattcaattccattccattcgaatcaattactttgcaatccattacattcgagtctgttctattccattccattccattccaatccattctattcgattccattccattcgattccattccatactattgcattccaatccattccattcgattggaataaattcctttcgagaccattcctttcgagtccattccatttgattctgttccttttgagtccattatatttgggtccattctattcctttcatttccattccattctatgccgttccattcaattctattccatttgtgtccattccattcgagaccattccgttccattccattccattccattcgatgccattccattcggctctattccattcaactcaattccattccattccattccatcagattccattccattgtattcattccgttccattcaattccattccattcatttccattccatttgagtccattccattccagtcaattccttttgagtccattacaagtcattccaattgacatctttccattatattcccttcaattctattcctttcaattccgttccattcgattccattgcattcgactccattccattcaagtccagtccattctgttccgttacttccattctgttcgattcaaaatcgtttgattccattttgttccagtccattccattcgagtccattccattcgagtccattccattgaagtccattccattcgattccattccatttgattccattccattcgattccattccacttgattccactccgttcctttctattgcattccattctattccattcctttgcattccattccattacatactattgcattccattggattccattttattcgaataaatacaattcg

SEQ ID NO: 4886 - DNA, 2300 bp, Homo sapien
tggaatccaattgaatggaattgaaaagaaaataatggattggggtgtaatggaaagatattgaatggaatggaatggactcgaatggatcgactggaatgtaatggactccaatgtaatggactggagtggaatagactcgaatggaatggaaacgaatggaatggaatggaatggaatggaatggaatgaaatgaaaaggaaaggaatagaaagtaatggaatggaaaggagtcgaatggaacggagtcaaaagaaacagaattgaatggaatggcatcgaatggaatggaatggaatggaatggactcgaatggaatagaatagaatggaatggcatcgaatggaaaggaatggagtgaaatggagaggaattgaatggatccaaatgtaatggactcaaatggaatggacccaaatagaatggactcgaaaggaagggtctcgaatggaatttatttgaatagaatggaatcaaatagaataaatagtatggaatggaatcgaatggaatgaaattgaatgaaatgaactggaatggaatggaatggaatggaacggatttgaatgtagtggattgcaatgtaattgatttgaatggaatggaatcggatggaatgcgatggaaaggaatggagtcgaatggaatagagtcgaatggaatggcatcaaatggtatggaacggaatggaatggaatggaatggaacgcaatggactcgaatggaaaagaatggaatggaatggcatcgaatggaatggtatggaatggaatggcatggacccaaatgaaacggacttgaacggaatggactcaacaataatgaactcaaaaggaatggtctcgaattgtatttattcgaataaaatggaatccaatggaatgcaatagtatgtaatggaatggaatgcaaaggaatggaatagaatggaatgcaatagaaaggaacggagtggaatcaagtggaatggaatcgaatggaatggaatcaaatggaatggaatcgaatggaatggacttcaatggaatggactcgaatggaatggactcgaatggaatggactggaacaaaatggaatcaaacgattttgaatcgaacagaatggaagtaacggaacagaatggactggacttgaatggaatggagtcgaatgcaatggaatcgaatggaacggaattgaaaggaatagaattgaagggaatataatggaaagatgtcaattggaatgacttgtaatggactcaaaaggaattgactggaatggaatggactcaaatggaatggaaatgaatggaatggaattgaatggaacggaatgaatacaatggaatggaatctgatggaatggaatggaatggaattgagttgaatggaatagagccgaatggaatggcatcgaatggaatggaatggaatggaacggaatggtctcgaatggaatggacacaaatggaatagaattgaatggaacggcatagaatggaatggaaatgaaaggaatagaatggacccaaatataatggactcaaaaggaacagaatcaaatggaatggactcgaaaggaatggtctcgaaaggaatttattccaatcgaatggaatggattggaatgcaatagtatggaatggaatcgaatggaatggaatcgaatagaatggattggaatggaatggaatggaatagaacagactcgaatgtaatggattgcaaagtaattgattcgaatggaatggaattgaatggaatataaccaaatggataggaatggaatgcaatggaatggaatagaatggaatgcaatggaatggaatggagtggaatcgagtctaatggaatcgaatggaatggaattgaataaaatggaatcgaatggcatggactcgaatggaattgactggaacaaaatggaatggaatggattggaatcaaacggaacagaaagggatggaatggaatggaaagaactcgaacacaatggagttgaaaggaatggaatcgagtggagtggaacggagtggaatggacttgaatggaatggaaaccaatggaatggaatggaatggattggaatggaatggaattgaatggactggaattggatggaacggaatggaatggaatggagtgacatggaatagaatcaaatggaatttcatcaaatggaaaggaatggaatgtaatgcaaaggaatcgaactgaatggtctcgaaaggaatggagtcgaatcaaatggaatcgaacggattggactgcagtggaatggactataatggaatggaaacgaatagaatggaaagga

SEQ ID NO: 4887 - DNA, 2300 bp, Homo sapien
aatggaatggaatggaatggaatggaatggaatggaaccgaatgaaatgaaatgaacccgagtagaatggaatggaatggaatggaatggaatggaatggaatggaatggaatcaacccaagcggaatggaatggaatggaatggaatggaatggaatggaatggaatggaacgaaaaggaatgaaggcgagtagaattgaatgtaacggaatggaatggaatcaacccgagtggaatggaatgggatggaatggaataaacacgaatggaatggaatggaatggaatggaatggaatggaatggaatggtacggaatggaatggaatcaactcgagtggaatgaaatgtaacgtcatggaatggaatggaatggaatggaatggaatcaacccgactgcaatggaatggaatgcaatcatcccgagtggaatggaatggaatggaatggaatacaatggaatggaatggaatggaatacaatggaatggaatggaatggaaggcataagaatcaactggaatggaatggaaagaaatgaaatggaatggaatggaatggaatggaatcaaccccagtggaaaggagtggaatggaatggattaaaatggaatggaaaggaatcaatccgggtggaatggaatggaatggaatggagtggaatggaatggaatggaatggaatggaatggaatggaatggaatcaaaccgaatagaatggaatggaatggaatggaaatgaatggaaaggaatggaaaggaatggaatggaatggaatcaacccgaatggactggaatggaatggaacggaatggaatggaatggaatggaatcaactcaagtggaatggaaatgaatggaatggaacggaaaggaatgtaatggaatggaatggaatcaacccacgtggaatggaatggaatggaatgcaatggaatcaacccgagtgaatggaatggaaatgaatggaatggaatggaaaggaatggaatgaaatcaacccgactggaatgcaatggaatgaaatggagtggaatggaaaggaattgagtggaatggaatgtaatggaatcaacccgagtggaatggaatggaatggaatggaaaggaatggaataaatacgagtggaatggaatggaaaggaatggaatagaatggaatggaatcaactggagtggaaaggaatgtaatggaaaggaatggaatggaatggaaaggaatgtgatgcaatggaatgcacgggtatggaatggagtcaatccgagtggaatggaatggaatggaattgaatgcaatggaatggaatggaatgcaatggaatggagtgcaatggaataaacaccagtggaatggaattgaatggaatggaatggaatggaatggaatggaatggaatggaatggaatgaaaaggacaggaatggaatggaaaggaatggaatggattggcacggaatgtataggaatggaatggaaacaacatgaccggcatggaatggaatggaaaggaatggaatggaatggaacggaacgaaaagtaatgaacccgattaaaatggaatggaatggaatggtatggaatggtatcaacccgaatggaatggaatggaatggaatggaataaacacgaatggaatggaatggaatggaatggaatggaatcaactcaagtggaatgaaatgtaacgtcatggaatggaatggaatggaatggaatggaatggaatggaatggaatagaatggaatcaattcgactgcaatgtaatggtatagaatggaatggaatcgaatggaatgaaatcaaccagagtggaatgttatggacaggaatggaatggaatagaatggactggaatggaatggaatggaatggaatggaattgactagaatggaatggaatggaatgaaatcaacccgattggaatggaaaggaatgcaatggaatggaatggaatcaactggaaaggaatgaaatggaatggaatggaatggaatggaatggaatggaatggaatcaactggaaaggaatggaatggaatggaatggaatggaatggaatggaatggaatggaatgcaatggaatcaactcgagtggaatggattggaatggagtggaatggaatggaaccgcatggaatgcaacggaatcaactagaatggaatggaatggaatggattgaaatagaatcgaacggaatcaacctgagtggaatggaatggaatggaatggatggaattgaatgtaatggaaactaatggaatggaatggaaatgaaacaaccagagtggaatggaa

SEQ ID NO: 4888 - DNA, 2300 bp, Homo sapien
tggaatggaatggaatgaaataaacccgattggaatggaaaggaatgcaatggaatggaatggaatcaactggaaaggaatggaatggaatggaatggaatggaatggaatggaatcaactcgagtggaatggattgaaatggagtggaatggaatggaacggcatggaatgcaatggaatcaactagaatggaatggaatgtaatggattgaaatggaatcgaacggaatcaacctgagtggaatggaatggaatggaatggaatggaatggaatggaaactaaaggaatggaatggaaagcaaacaacccgagtggaatggaatgcaatggaatgcaatggaatggaatggaatggaatggaattcagtgtaatggaaacaaaccgagtggaatataattcaatgaaaaggactgggatgtaatggaatggattggaatcaacccgattgcaatgcaacggaatggaatggaagggaatggaatggaatggaaaggaatggaatgaactggaatgcaatggaatttaatggaatggaatggaacggaatggaatcaacccgagtggagtggaatggaatgggaaggaaatgaatggaatggaatggaatggaatggaatggaatggaaccgaatgaaatgaaatgaacccgagtagaatggaatggaatggaatggaatggaatggaatggaatggaatggaatcaacccaagcggaatggaatggaatggaatggaatggaatggaatggaatggaatggaacgaaaaggaatgaaggcgagtagaattgaatgtaacggaatggaatggaatcaacccgagtggaatggaatgggatggaatggaataaacacgaatggaatggaatggaatggaatggaatggaatggaatggaatggtacggaatggaatggaatcaactcgagtggaatgaaatgtaacgtcatggaatggaatggaatggaatggaatggaatcaacccgactgcaatggaatggaatgcaatcatcccgagtggaatggaatggaatggaatggaatacaatggaatggaatggaatggaatacaatggaatggaatggaatggaaggcataagaatcaactggaatggaatggaaagaaatgaaatggaatggaatggaatggaatggaatcaaccccagtggaaaggagtggaatggaatggattaaaatggaatggaaaggaatcaatccgggtggaatggaatggaatggaatggagtggaatggaatggaatggaatggaatggaatggaatggaatggaatcaaaccgaatagaatggaatggaatggaatggaaatgaatggaaaggaatggaaaggaatggaatggaatggaatcaacccgaatggactggaatggaatggaacggaatggaatggaatggaatggaatcaactcaagtggaatggaaatgaatggaatggaacggaaaggaatgtaatggaatggaatggaatcaacccacgtggaatggaatggaatggaatgcaatggaatcaacccgagtgaatggaatggaaatgaatggaatggaatggaaaggaatggaatgaaatcaacccgactggaatgcaatggaatgaaatggagtggaatggaaaggaattgagtggaatggaatgtaatggaatcaacccgagtggaatggaatggaatggaatggaaaggaatggaataaatacgagtggaatggaatggaaaggaatggaatagaatggaatggaatcaactggagtggaaaggaatgtaatggaaaggaatggaatggaatggaaaggaatgtgatgcaatggaatgcacgggtatggaatggagtcaatccgagtggaatggaatggaatggaattgaatgcaatggaatggaatggaatgcaatggaatggagtgcaatggaataaacaccagtggaatggaattgaatggaatggaatggaatggaatggaatggaatggaatggaatggaatgaaaaggacaggaatggaatggaaaggaatggaatggattggcacggaatgtataggaatggaatggaaacaacatgaccggcatggaatggaatggaaaggaatggaatggaatggaacggaacgaaaagtaatgaacccgattaaaatggaatggaatggaatggtatggaatggtatcaacccgaatggaatggaatggaatggaatggaataaacacgaatggaatggaatggaatggaatggaatggaatcaactcaagtggaatgaaatgtaacgtcatggaatggaatggaat

SEQ ID NO: 4889 - DNA, 2300 bp, Homo sapien
taatggaaaagaaacaacccgagtggaatggaatgcaatggaatgcaatggaatggaatggaatggaatggaattcaatgtaatggaaaaaaaccgagtggaatgtactggaatggaaaggactggaatgtaatcgaatggattgaaatcaacccgattccaatccaacggaatggaatggaatggaatggaatggaatggaatggaatggaatggaatggaatggaaaggaaaggaaaggaatggaatcaactggaatggaatggaatggaatggaatggaatttaatggaatggaatggaatttaatggaatggaataaaatggaaacgaatggaatggaatggactagaatgcaatggaatgcaatgaacccgagtgacatggaatggaatggaatggaatggaatggaattgaatggaatggaataaacacgagtggaatggaatggaatggaatggaatggaatggaaaggaatggactggaatggaatggaatcgaatggaatggaattgaatggaatggaataaacacgagtggaatggaatggaatggaatggaatggaaaggaatggactagaatggaatgggaaggaaaggaatggaatgaaatggaatgcaatggtatggaatggagtcaacgcgagtggaatggaatggaatggaatggaatgaaatggaacggaatggcatgcaattgaatggagtggattggaataaacaacagtggaatggaatgcaatggaatagagtggaatggaataaacaccagtggaatggaatggaacggaatggaatggaatggaatgatcaggaatggaatggaatggaatggaatggaaaggactagaattgaatggaatagaatgaaatcaacccgattggaatggaatggaatgcaatggaagggaatagaatcacctggaaaggaatcaaagggaacggaatggaacggaatggaatggaatggaatggaatggaatcaaatcgagtggaaaggaatggaatggaaaagaaaggaatggaaaggaaaggaatggtatgcaaaagaatgcaaaggtatggaatggagtcaacccgattggaacggaatggaatggaatggaatgaaatggaatggaatggaatggaatgcaatggaatggagtgtaatggaataaacagcagtggaatggaatgcaatggaatggagtggaatggaatggaatggaatggaatggaatggacaggaatggaatggaatgcaatggaatggaattgaatggaatgaaatggaatggactagattggaatggagtcaacctgagtggaatggattggaatggagtggaatggaatggaacggcatggaatgcaatggaatcaactagaatggaatggaatggaatggatttgaatgtaatcgaacggaatcaaactgagtggaatggaatgaatggaatggaatggaatggatactaatgcaatggaatggaaaggaaacaactcgagtggaatggaatgcagtggaatgcaatggaatggaatggaatggaatggaatggaatggaatggagtggaatagaatcaacccgagtggaatggattggaatggagtggaatggaatggaacggcatggaatgcaatagaatcaactagaatggaatggaatggaatggattggaatggaatcgaacagaatcaacctgagtggaaaggaatggaatggaatggaattgaatgaatggaatggaacggaatggaaattaatggaatggaatggattggaagcaacccgagtggaatggaatgcaacggaatgcaaagttatggaaaggaatggaatgcaattcaatgtaatgtaaacaaaccgagtggaatgtaatggaatggaaaggactggaatgtaatggaatgtattggaatcaacacgattccaatgcaacggcatggaatggaatggaatggaatggaatttaatggaatggaatggaatggaatttaatggaatggaatggaatggaatttaatggaatggaatggaatggaatggaatcaacccgagtggagtggaatgaaatggaatggaaatgaaaggaatagaatggaattgaaaagaacggaacggaatggaatgaacccgagtggaatggaagggaatcgaatcgaatggaaaggcacggaatggaatggaatggaatcaacccgagtggaatggaatgcaatggaaacaaactgagtggaatggaatgtaatggaatggattggaatcaacccgattccaatgcaacagaatggaatgtaatggaatggagtgga

SEQ ID NO: 4890 - DNA, 2300 bp, Homo sapien
tggaatgcaatggaattcaatggtatggaatggagtcaacccgagtggaatggaatggaaagaatggaattaaatggaatagaatggaatgcaatggaatggagaggaatggaataaacaccagtgcaatggaatgcaatggaatggagtggaatggaaaggagtggaatggaatggaatggacaggaatggaatggaatggaatgaaatcaacccgattgcaatggagtggaaaccaacggaatgtaatggaatcaactggaaaggaatgaaatggaatggaatggaatggaatggaatggaatggaatcaactcgagtggaatgcaatggaatggaatggaatggaatggaatcatcccgactggaatggattggaatggaatggaatggaatggaacggcatggaatgcaatggaatcaactagaatggaatagaatggaatggattggaatggaatcgaacggaatcaacctcagtgtaatggaatggaatggaatggaatgaatggaatggaatggaatggatactaatggaatgtaatggaaaagaaacaacccgagtggaatggaatgcaatggaatgcaatggaatggaatggaatggaatggaattcaatgtaatggaaaaaaaccgagtggaatgtactggaatggaaaggactggaatgtaatcgaatggattgaaatcaacccgattccaatccaacggaatggaatggaatggaatggaatggaatggaatggaatggaatggaatggaatggaaaggaaaggaaaggaatggaatcaactggaatggaatggaatggaatggaatggaatttaatggaatggaatggaatttaatggaatggaataaaatggaaacgaatggaatggaatggactagaatgcaatggaatgcaatgaacccgagtgacatggaatggaatggaatggaatggaatggaattgaatggaatggaataaacacgagtggaatggaatggaatggaatggaatggaatggaaaggaatggactggaatggaatggaatcgaatggaatggaattgaatggaatggaataaacacgagtggaatggaatggaatggaatggaatggaaaggaatggactagaatggaatgggaaggaaaggaatggaatgaaatggaatgcaatggtatggaatggagtcaacgcgagtggaatggaatggaatggaatggaatgaaatggaacggaatggcatgcaattgaatggagtggattggaataaacaacagtggaatggaatgcaatggaatagagtggaatggaataaacaccagtggaatggaatggaacggaatggaatggaatggaatgatcaggaatggaatggaatggaatggaatggaaaggactagaattgaatggaatagaatgaaatcaacccgattggaatggaatggaatgcaatggaagggaatagaatcacctggaaaggaatcaaagggaacggaatggaacggaatggaatggaatggaatggaatggaatcaaatcgagtggaaaggaatggaatggaaaagaaaggaatggaaaggaaaggaatggtatgcaaaagaatgcaaaggtatggaatggagtcaacccgattggaacggaatggaatggaatggaatgaaatggaatggaatggaatggaatgcaatggaatggagtgtaatggaataaacagcagtggaatggaatgcaatggaatggagtggaatggaatggaatggaatggaatggaatggacaggaatggaatggaatgcaatggaatggaattgaatggaatgaaatggaatggactagattggaatggagtcaacctgagtggaatggattggaatggagtggaatggaatggaacggcatggaatgcaatggaatcaactagaatggaatggaatggaatggatttgaatgtaatcgaacggaatcaaactgagtggaatggaatgaatggaatggaatggaatggatactaatgcaatggaatggaaaggaaacaactcgagtggaatggaatgcagtggaatgcaatggaatggaatggaatggaatggaatggaatggaatggagtggaatagaatcaacccgagtggaatggattggaatggagtggaatggaatggaacggcatggaatgcaatagaatcaactagaatggaatggaatggaatggattggaatggaatcgaacagaatcaacctgagtggaaaggaatggaatggaatggaattgaatgaatggaatggaacggaatggaaattaatggaatgga

SEQ ID NO: 4891 - DNA, 2300 bp, Homo sapien
atggaatggaacggaatggaatggagtggaatgtaacggcatggaatggaatggaatggagtggaatcaacccgagaggaatggaatgtaatggactgtaatggcatggaatggaatggaatggagtggaataaacccgagtggaatggaatggaatgctatggactggaatggaatggaatggaatcaatccgagtggaatggaatggaatggaatggaatcaattcgactgcaatggaatggaatggaatggaatggaatggaatcaattcgagtgcaatgtaatggtatagaatggaatggaatggaatagaatcaaacacagtggaatagaacggaaacggatggaatggaatggaatggaatggaatggaatggaaaggaatggaatggaatgtaacggcatggaatggaatggaatggagtggaatcaacccgagtggaatggaatggaatggactgtaacggcatggaatggaatggaatggagtggaataaacccgagtggaatggaatggaatggtatggactggaatgtaatggaatggaatcaatccgagtggaatgtaatggaatggaatggaatggaatggaatcaacccgagtgcaatggaatggaatggaatggaatggaatggaatggaatagaatggaatcaattcgagtgcaatgtaattgtatagaatggaatggaatggaatcaaccagagtggagtggaatggaatggaatggaatgcaatggaatggaatggaatggaatgaaatggcatggaatggaatggaatggagtgtaatcaacccgagtggaatggagtggaatggactgtaatggcatgcaatggaatggaatagagtggaataatcccgagtggaatggaatggaatgcaatgcactggaatggaatggaatggaatcaaaccgaatggagcggaatggaatggaatggaatggaatcaacccgagtgcaagggaatggaatggaatggaatggaatagaatgaaataaacacgagtggaatggaatgaaatggaatggaatggaatggaattgaagagaatggaatggaatcaagtcgagtggaaaggaatgggatgaaaaggaatggaatggaatggaaaggaatggaatgcaatggaatgcaatattatggaatggaatcaacatgagtggaatggaatggaacgggatggaatggaatgaaatggaatgaaatgcaatggaatggacaggattagaatggaatggaatggagtagaattgacaggaatggaatggaatggaatggagtggaatggaatggactagaatggaatggaatggaatgaaatcaacacgattggaatggaatggaatgcaatggaatggagtggaatggaataaacaccagtggaatggaatggaaaggaatggaatggaatggacaggaatgcaatggaatggaatggaatgcaatggaatggaatggaatggaatggaatggaatggactagattggaatggaatggagtgaaatcaacccgattggaatggaatggaatgcaatgtaatggaagggaatcaactggaaaggaatgaaatggaatggaatggaatggaatggaatcaacccgagtggaatgcaagggaatggaatggaatggaatggaatgaaatcagcccgaatggaatggattggaatagagtggaatggaatggaacggcatggaatgcaatggaatcaactagaatggaatggaatgggatggaatggaatggaatggagtggaatggactagaatggaatgtaatggaatgaaatcaaccagattggaatggaatggaatgcaaataaatggaatggaatcaactggaaaggtatcaaatggaacggaagggaatggaatggaatggaatggaattgaatggaatggaatcaactcgagtggaaaggaaaggaatggaaaggaatggaatggaaaggaaaggaatggaatgcaatggaattcaatggtatggaatggagtcaacccgagtggaatggaatggaaagaatggaattaaatggaatagaatggaatgcaatggaatggagaggaatggaataaacaccagtgcaatggaatgcaatggaatggagtggaatggaaaggagtggaatggaatggaatggacaggaatggaatggaatggaatgaaatcaacccgattgcaatggagtggaaaccaacggaatgtaatggaatcaactggaaaggaatgaaatggaatggaatggaatggaatggaatggaatggaatcaactcgagtggaatgcaa

SEQ ID NO: 4892 - DNA, 2300 bp, Homo sapien
cattagattcgatttgatgatgagtccattcgatgatgattccattcgattccattagatgatgattccatgtgattccattagatgatgactcctttcatttccattcaacgaggattccattcggttccatttgatgttgattcctttgaattccatttgatgacaattccattcaataccaattgatgatggttattttgattccatttgatgatgattacattcgattccatttgatcgtgattccattcgattccactcaatgattccattcgattccattcaatgatgattccattcgagttcattgactattccattccattccattcgatgattccactcgagtccattcgatgattctattcgattgcattcgataattccattctattccatttgaggataattccatttgggtccattcgatgattgttccattcgattctattcggtgattccattcggttccatttgataataattccattcgagaccattggaagattccattcaattccattcaataatgattccattcgagtccatttaatgattccattaaagtccattcgatgattccatctgattccattcaatgaatccattcgattccattctatgatgattccattcatttccatctgatgatgattccattcgaatccattcgctgatgagtccatccatggaatggtatggagtggaaaggaatggaatggaaagtaaaggaatggaatgcaatggaatgcaatggtatggaatggagtcaaaccgagtggaatggaatggaatggaatggaataaatggaatggaatggaatgaaatggaatggagtggaatgtaataaacaccagtggaatgtaatggaaaggaatggagtggaatggaatggaatggaatggaatggaatggaatggaatggacaggaatggaatggaatggaatggaatggactagaatggaatggaatggaattaaatcaacccaattggaatggaatggaatgcaatggaatggaatggaatcaactggaaaggaacgaaatggaatggaatggaatggaatgaaatggaatggaatggaatggaaaggaatggaatcaacccgagtggaatgcaatggaatggaatggaatggaatggaatcaacctgagttgaacggattggaatggagtggaatggaatggaacggcatggaatgcaatgcaatcaactagaatggaatggaatgcaatggaatggaatagaaaggaatggaatggaatcgaatagaatcaacctgagtgcaatggaatggaatggaatggaatgaatggaatggaatggaatggatactaatacaatggaatggaaaggaaacaaccccagtggaagggaatgcaatggaatgcagtggagtggaatggaatggaatggaatggaatagaatggaatcaacccgagtggaatgcaatggaatggaatggaatggtatggaaaggaatggaatcaacccgagtggtatgtattggaatggagtggaatggaatggaatggcatggaatgcaatggaatcaactagaatggaatggtatggaatggattggaatggaatcgtacggaatcaacctgagtggaaaggaatggaatggaatggaattaaatgaatggaatggaatggaatggaaacaaatggaatggaatggaaaggaagcaaccagagtgaaatggaatgcaaaggaatgcaatgttatggaaagaaatggaatggaattcaatgtaatggaaacaaaccgagtggaatgtaatggaatggaaaggaatggaatgtaatggaatgtattggaatcaacccgattccaatgcaacggcatggaatggaatggaatggaatggaagggaacagaatggaagggaaagtaatggaatgaactggaatgtaatggaatggaatggaatttaatggaaaggaatggaatggaatggaatcaacccgagtggagtggaatggaattgaatggaaatgaatggaatagaatggaatggaatgaaaacgaatggaatggaatgaacccgagtggaatggaatggaatggaatggaatggaaaggcacggaatggaatggaatgaaatggaatggaatggaatggaaaggaatcaacccgagtggaatggaatggaatggaaacaaactgagtggaatggaatggaatggaatgcagtggaatggaatggggtgaaaggcattagaatcaactggaatggaatggaatggaatggattataatggaatggaatggaatcaatctgggt

SEQ ID NO: 4893 - DNA, 2300 bp, Homo sapien
tctttgtaaagtgtgcaagtggatatttagacctgtttgagcccttcgttggaaacgggacttcttcatataatgctagacagaagaattctcagtaacttcttggtgttgtgtgtattcaactcatagagttcaaccttcctttagacacagcagattcgaaactctctttttgtggaattttcatgtggagatttcaagtgatttgtggccaattgtagaaagggaaatatcttcctataaaaactagagagaatcattctcagaaactactttgtgatgtgtgcattcaactcatagggtttaacctttcttttaattgagccgtttttaaacactctctttgtaaaatgtgcaagtggatatttagacctgtttgagcccttcgttggaaacgggacttcttcatataatgctagacagaagaattctcagtaacttcttggtgttgtgtgtattcaactgacggagttgaaccttcctttagacacagcagatttgaaactctctttttgtggaattttcaggtggagatttcaagcagtttgaggacagtggtagaaaaggaattatcttcgtataaaaactagaaagaatcattttcagaaactgctttttgatgtgtgcattcaactcacagaatttaacctttcttttcatagattagtttggaaacactctgtttgtaaagtctgcaagtggatatttggacctctttgaggccttcgttggaaacgggatttcttcatataatgctagacagaagaattctcagtaacttctttgtgttgcgtgtattcaactcacacagttgaaacttcctttagtcagagcagatttgaaacactgtttttgtgcagtttgcaagtggagatttcaagagtttgaggccaatggtagaaaaggatatatcttcgtataataagtagatacaatcattctcagaaactactttgtgatgtgtacgttccactcacagagtttaacctttcttttcatagagcagtttaaacactctgtttctaaagtctgcaagtggatatttggacctctttgaggccttcgttggaagcagggtttcttcgtataatgctagacagaggaattcttagtaacttctttgtgttgtctgtactcaactcacagagtttaaccttcctttagacagagcaggtttgaaacactctttttgtggaatttgcaagtggagatttcaagtggtttggggctaatggtagaaaaggaaatatcttcgtataaaaactagacagaattattctcagaaagtactttgtgatgtgtgcattcaactcacagagtttaacctttcttttcatagagtagtttggaaacactctgtttgtaaagtctgcaagtcgatatttggacctccttgaaagctttgttggaaaagttagttcttcatataatgctagacagaagaattctcagtaatttttttgtgttgtgtgtattcaactctcagagttgaaccttcctttagatagagcagatttgaaactctctttttgtggaatttcaagtgtagatttcaagcgcttttgggacaatggtagaaaattaaatatcttcctagaaatactagagagaagcattctcagacactattttctgatgtgcacgttcgactcactgagattaacctttcttttcatagagcagtttttcaacactctgtttgtaatgtctgcaagtggatatttggacccctttgttgccttcgttggaaattgtggggaaaagcaagagagatcagattgttactgtgtctgtgtagaaagaagtagacataggagactccattttgttatgtactaagaaaaattcttctgccttgagattgttaatctataaccttacccccaaccccgtgctctctgaaacgtgtgctgtgtcaactcagagttaaatggattaagggcggtgcaagatgtgctttgttaaacagatgcttgagggcagcactctccttaagggtcatcaccactccctaatctcaagtacccagggacacaaaaactgcagaaggccgcagggacctctgcctaggaaagccaggtattgtccaaggtttctccccatgtgatagtctgaaatatggcctcgtgggaagggaaagacctgaccgtcccccagcctgacacccgtaaagggtctgtgctgaggaggattagtaaaagaggaaggaatgcctcttgcagttgagacaagaggaaggcatctgtctcctgcctgtccctgggcaatggaatgtctcggtataaaacccgattgtatgc

SEQ ID NO: 4894 - DNA, 2300 bp, Homo sapien
gtctgtttttttctgattttatttagttacctgtgttcccatttaggttaaatttttaaaactaatgtgtacatctttattttcatggttgttttctgacagttttaagtttttttttttacttaggccatgtcactgtaatattttgtatgtattgtactctttggttgagatttggacattaacaaacagctatgtgtcacaatctttataatgcggtgttgtcctaacatagtctgaaaccaagtgtctcaactagagattctgggagcctatcaaatatgttatgatttgtcatgtgtggaattttgtgttgattactcagttaaaggggtttgcctgtgtttcttaaacagtctgtaattacttcctatacatatttcatgtctgtggtactgtagttggttgctgtaacatttacctttggtctcagcagactcaagctgttatttcaaagtataccataatttctttcagcacattttgtcattggagacagaaacaagtctctgtaaaagtgtccagaagccagaagtaaaaatacatgagccagtttttttttttttctatattgaggaagatgccagacattgcagtttacttctaaaagtgccatgctgcattatggaggaggaaaggtgttgggcaaatgtaacaaacttttctatccattcagtatggcttgtggcattttgctcacctggtacactgaacacacttaactcatttctagattttccataaggacattttggtcagtagagttttgttataactctataaaagaattaggacctgtggtatttttgttatgccatgttgctaatgtactttgtataattttatgtattagatttgtaaacaatagatttgtatattcacatgggcctactgagataatttatttttatttctttcagctgtgttctcatttcacccaagacctttggctagatcagaacataaaaaattcatttcaaaaagtgatactgagaagatatgagaaatctagacatgagaatttacaaataagaaaaggctgtaaaagtttgaatgcatctaagttgcaggaaggaggttataatggacttaaccaatgtttgtcggttactcagagcaaaatacttcaatgtaatacatgtgtgaaagtctttaggaaattttcaaattcaaatagacttaggagaagacatactggagagaaacctttcaaatgtaaagaatgtggccaattctttcacaggttctcacacctaagacaacatgagataattcatactgaagagaaaccctaccaacatgaagaatgtggcaaagattttaagcagtcttcaggtcttactatacatgagagaattcatactaaagagagaccctacaagtgtgaagaatgtgacaaagcctttaaacaatcttcaaaactgaataaacataagaaaatttatactggagatacaacctacaaatgtgaagaatgtggcaaagccttttcctattcctcaaccgttactcaacataacatagttcatactgaagacaaaccctacaaatgtgaagactgtggcaaagctttgaagtagtcttcaaacctgactatgcgtaagattattcatatgggagagaaaccctacaaatgtgatgaatgtggcaaagcctttagaatatcctcaaaactgaaagaacataaaagaattcatacttgagagaaaccctataaatatgaagaatgtggcaaagctttttactgttcctcaggccttactcaacataacatagttcatactggagacaaaccctacaaatataaagattgtggcaaaatttttaagtggttttcagaccttactatacatcagagaattcatagtggagagaaaccctagaaatgtgaagaatgtggcaaagcctttaaacaatcctcaaaactgaatgaacatatgagaactcatactggagagaaatcctacaaatgcgaagaatgtagcaaagcttttaagcaaccttcaggccttactctacataagagaattcatactggagagaacccttacaaattcgaagaatgtggtaaagccttttattggttgttaagctttactaaacataattgataggggagagaaaccctacaaatgtcaagaatgtggcaaagcttttaagtggtcttcaaaccttactatacacaagagaattcatacgggagagaaaccctgcaaatgtgaagaatgtggcaaagcttgtaagcagtctttgggccttactatacaaaagagaattcataatgaagagaaaccctacaa

SEQ ID NO: 4895 - DNA, 2300 bp, Homo sapien
ttcaaatttctcctatgatgaaaaataagtaagaggttgttgggctttgatttccttaacttctccctcagtcatttccccagactatttcatgtccttctaaaatacttctgcagttttttgaggggattattcccagtggtaaacagtactacttagcatgaatataaaaggagtctgacctctattacggaagtgtcacacttcagtatttccaaggtcgaggaaagctagttgagtggtgcagtctgtggaggcacatgggctttggagtcaggtagagtttatccagagtcccagtccagccacttagtagctgtgggtcttcggacaagttttttgatgtaaaagaattctataaacctaatatgcaaggaaaggcagggtgatactgacagcaaaaatggcagcaattcttcatcccttctgtatttatgcccatagcaaggtgcttttacagctattagcatcaagtgacaggatctgttttccaaactttggatctggctggacttatctgcttagggcaatagaaacctgtgaacatgacagtgtgctagttttgagcctaggctcaaacgatcttgaatccttctgtttttgttttggaatgctgccatctccatgagaacaagcccctgttacccagctgaaggctgagatattatggggaggagaagcgagatgcccctgttgacagtcagcttacccctggaagcaagctgcctactcaaccagcagcttaccatacatgcctgatggagttcatctcagaccagaagaatggctcagtgagccaagcctaaatggctgagcatgtcaatcatgagctactaagttttttgtggtttttatgcatcaataactaactaatccatgcacccagtgtagacagcctggtaggattcaaaaacagattgattactattacttgaaaacagtgagcatctcataggtatcgattttcttgtcccttatttaaagttggatatcttgtaagataatgttgagtaatgcaaaaatgcatgtagacatgtacacatgtgattggtacttatacttacacgatccccacactacaggagaaaagagaaaaccacagcctgattattagggccatggccaaatagcaaattacgtttgccattaattcattttctccatatctaaacattggaggtcaagtctgtgagccagatctaaaaacatggggttcccctctcctgtggccctatcatcctttgtttactgtctgatttctggaaagaaggcaggcaggcagcaggttggcagcaatggtctacctgtgaacattttattttttccaccctcttctccctgtatgggcactgtctcctatacccttggatctgaggagagaagttggtgaggagaggctgttttttcacctctgacagaaaagggatgttttactggcccttcaccccactgaaatcagagctgcactcctatgtggcagctgcttgccatttgtgggtacttagtgcctggaaactcactggtctaaactgagagtgctagaaaggtaaaatatggagtgagtttcaaatattttgtaccatatatatatatattcttcatgcttattgattacatattaaaatgataatattttgaacatattgggttaaataaattgttacagtcagttttacctatttctttctactttttaaaaatatggctactagaaaatttaaaattcacacatggctcacgttttactccagaggaatacctcctccttgtaatctcaggctgcttgctcaaaagactagggccaggaagatcatgaaatccaaaattctaaaataattctcattatactctttccacttgtgaataacataaaacatattatttataaatggatatgaccttatacacaaggttaaatgcaaataccctgtagggtaggccctgctcagagcagggataaaggcctgccaggaaaggctgcagcctaggttgtcactccgtcctcattgagtccagtgtttggtcacatcttctgtcactcacggactggggacggggcctgaagctttatccaataaggggcacggggccgaaaaccgggcaatcaggctgcagctggagaggacaagggcggcttccgggtgttggcgggggcatttgtctcctgccgcagctggggctgcagatctagtcttcagttcacagagaactgccccccaactgctcccccgtactctgctcctacaggcccagctgctgtggctgtgcgacctgcagggactggcagacccgtagctaag

SEQ ID NO: 4896 - DNA, 2300 bp, Homo sapien
ttgcctttccattactctaggccctcatggtttcttcactgttagactaatgagctatgagtgtttaccctcctaatcctgcatactccttaaaacctcaggcagaaaatggaaattaaactcgtgggcattcaaggacacccccacgattttcagggtaaagtttttatggcttagcttaatgcccaacgactttcacattcctctgttgataatttcaatctcttgaaattctctcaaacaaaaataactaacacttgttaacaacttcgtgtttccaggaaatactttaagcaattaaagtcataattaaagtaacatatgcaaaaaccctatcagtactgcttttatacttaaagttttgtttaaacgtaaccctgtttacttgtttatgtgttgtctatggctgctctcatgctgcagaggtcgagtagaatatggaatagatgatgtggaccacagctccaaacatgtttactgttttgccattttcaggaaaagttgctggatgactcctaatctagttgaatgtctgtgttactagtacagggagatccttgccagccaatgtcagataaacaagttgattttatggacaatttgtctcatatatacaagcacatttccagtttttgtaactgttaacgatttattttcccacttagtttgctccctgtaactttgagtggctcaactattcatcctgttttgatttcttcataccatttaccctccttccagattatttaatcaggtgtttttatattatacctcagcagggttctgagcttcttgtttgtttacatgtctctatgaccctctttgttgtttcataaatggattgatgatatgtaaaatgtacatattcatggaaatagcatttgttccaagtgacaaaactatttataaaatgaggattgtaattatgtgtgctatttgaattctgtacatgtatatttctgtccttggattggaggcagaaaaggggtggattttggcttcaggcatggttttctcatcagaatcctaaggttagttcctctaggcatggggctgtaggatgaatatcccaaggtgacagtcattgttgatccttagaccttattctcaatgggatttttaataagtgtactaacattttaagagctgtattagttataagaagaaatagaatcaatttttattttaaaacgtttcaatttgaaataattatatacttcagaaaaattgaaataatattaacagtatttctgcatacccttcacctatccctaatgttaatgtttagcataatcatagaacaattattaaaggtgaaaaactcatactgagtcagtacagtcaactaatgttcagagcgcatctgaattctccctccagtacccattttctgtcctcattgcatgtagttctcatttttcgtcagcctcctccagtttgcataattttctcattatttcttttgtattcatggccttgatactttttaagaattatatttattttgtaaatattttgtagactgcacttccatttgggtttgtggaatgtttcatcatgaagtaaccttccatctaatcatgaggcaacatcagacaaacccaaatgaaggtacagtctatgaaataaatacgattcatgtggcaggaatgtcacagaagtaatgttacatacttctcagggcattttatcagatggtacgtgatgttgccattactggtgatgttaatcttggtacagtgggggctgccaaatatttttccctttttagctgaaatgtatcatacggggagacatttagagatatacaaatatcctgtttgatattgtattctcccccattagtcctaggacccatgagtagatttttacctatagcagttattacggtggaggttgcctaatgatttctttccatcattacttctgcatttatttggaatgttctagtaggaaacagctgttgcttctacaccacttatttattcaattatttatattattatggactcatggctgtttagtgtattctttggattatgatccaatgctaatattatttattttattttcaggttgtctcaactgttggagtgatcagacccaacaccaggccatgggggctactaagtctggcggagtcaaaggaacgagaaaagacaagttaaaagagaaagtgggaccatgcagccaatgctagtgtggaggctgcaaaggccctgagctctgggatcccacactatttattgatgatcaaacaaagaaacaggcagtgaagatgtgggggttgaaaggaagcg

SEQ ID NO: 4897 - DNA, 2300 bp, Homo sapien
atagttttgtcacttggaacaaatgctatttccatgaatatgtacattttacatatcatcaatccatttatgaaacaacaaagagggtcatagagacatgtaaacaaacaagaagctcagaaccctgctgaggtataatataaaaacacctgattaaataatctggaaggagggtaaatggtatgaagaaatcaaaacaggatgaatagttgagccactcaaagttacagggagcaaactaagtgggaaaataaatcgttaacagttacaaaaactggaaatgtgcttgtatatatgagacaaattgtccataaaatcaacttgtttatctgacattggctggcaaggatctccctgtactagtaacacagacattcaactagattaggagtcatccagcaacttttcctgaaaatggcaaaacagtaaacatgtttggagctgtggtccacatcatctattccatattctactcgacctctgcagcatgagagcagccatagacaacacataaacaagtaaacagggttacgtttaaacaaaactttaagtataaaagcagtactgatagggtttttgcatatgttactttaattatgactttaattgcttaaagtatttcctggaaacacgaagttgttaacaagtgttagttatttttgtttgagagaatttcaagagattgaaattatcaacagaggaatgtgaaagtcgttgggcattaagctaagccataaaaactttaccctgaaaatcgtgggggtgtccttgaatgcccacgagtttaatttccattttctgcctgaggttttaaggagtatgcaggattaggagggtaaacactcatagctcattagtctaacagtgaagaaaccatgagggcctagagtaatggaaaggcaatgaagtgaaaagacagttaaaatgtgtaattttccaaatacagaactgagatatttaaaaggattgtatgtggtggttgggtgccattacaaaggaggtggatgaattttaggcgtctagatttgtggtgctgatggttgggcaggggacaagcacacagggaaacaaggaaaaaagatgtatttaggtttaggtaaaaatatcacatgctcagtatccaattcctgttaaacacctggagatgggagtctgtggtgcaaagggagttcgagtttaactatacacgattgggtgatgctggcatgcaaggagagatgaagccatggatttcattaaggaccccaatctgaatgtggaccgcacacaagaatcagaaccaaaacctggacacagccaagactgcaggtttctcttcccttgctccaaatccactttcagaagaattagagaagaattgactaaagaatgtaagtaaactccaggaaacagggttccacagaagctggggaaaggtcagtacgtggaagagagagatcagtagtacctgctcgctacaaggaggcgcctccaaatgtcaatgcctattttcaacaagtgggacccaaagtgattcatgccagtgctctaaaatacacctgacccttgaacaatgtgggggatatggatgctaaccccccacagtcaaaaatccaagtttaactctcaactcccccaaagcataactcctaacggcctgcggttgaccggaagtctttgtcactaataatacaaaaaattaagacctattttgcctgttattcacattacacactgaatatgctgctcccagcggaggccgagactcctgcccgggcaccccctcacagcccccactccagcctccccagactcaccctcggcggggccaccttcttctcatttcagtctggggccacattctccgggcctgcggggcatggcaggaggcaaagccaaaggcgaagtggccacaaattccggtgggggcgctggctcctgccccaccccagcatctataccctgagtctgataggacgagaaggaacatttcagccagccctgattgggtcatattatccaatcagagttgttttgcacagtggctctcatccaatccgaacatgccttacaggatatctagttaaataagtcattataaatagttgctccgtgggctttccgcatttcaccctgctccaggcagcgtggtctgtatggctccgccctgggcaggaggagaaagaagagggccaggcaccacgtgcctgcactctccctggatgctggaggctgctccgccgtgggcaggaggagaaggaagagaactgggtgccgcctgcctgcactctctccggatgctggaggctggaggcagtgag

SEQ ID NO: 4898 - DNA, 2300 bp, Homo sapien
gaaaaacattaggccgggtgccgtggctcatgcctgtaatcccagcactttgggaggccaaggcgggcagatcacaaggtcaggagttcaaaaccagcctggccaacatagtgaagccctgtctctactaaaattacaaaaattagccaggtgtggtggtacaagcctgtagtaccagctacttgggacgctgaggcaggagaatcgcttgaacccaggaggcggaggttgcagtgagccaagatcatgctactgcactccagcctgggtgacagtgagactccctcaaaaaaaaaaaaaaaaaaagaaaaagaaaaaaaatcatgagcaggaaaataaattgtgacttgaaatgataatcattactgtacttgccatgatgtcttctgaaatacatctcatcccttgaataaactgactcttttacgtggatggtactaaatgcttttccagcatgggaacaagtgggattatcatcagtggtggtaaagaagggaatagaagccgggcgcggtggctcactcctgtaatcccagcactttgggaggctgaggcgggcggatcacgaggtcaagagatcgagaccatcctggccaacatggtgaaaccccgtttctactaaaaatacaaaaaaattagccaggcttggtggtgcacgtctgtagtcccaggtactcgggagactgaggcaggagattcgcttgaacccaggaggcagaggttgcagggagttgagattgcgccactgcactccagcctgggtaacagagtgagactccgtctcaaaaaaaaaaaaaaaggaatagaaatggagaaaaatgcttctgttttggtcagtggacatttattttttatttttaacttaaacttcaatagctgttggagtacaattggtttttggttatggatgaattataaaatggtgaattttgagatcttagtgcacctgtcacccgagtagtgtacactgtacctaatgtgtagttttttgttttgttttgttttttgaaactgagtttcactcttgttgcccaggccggagtgcaatgacgcgatttcggctcactgcaacctccacctctcgggttcaagcaattcccctgcctcagcctcccaaatagctgagactgcaaatgtgtgccaccacgcccagctaattttgtatttttagtagagacgtggtttcaccatgttggctaggcttgtcttgaactcctgactcccgcctccgcctcccaaagtgctgagattacaggcatgagccactgcgcctggccatgtgtagttttttaaatctccggcctccttcccaccagcccccttctgagtctctaaagtccattgtatcactctgtatgcctctgcgtactcatagcttagctcccacttataagtgagaacgtacgttttttagttatccactcctgtgttacctctgtcagtgaacattttaaaaagttattttgatcaagagatccaacatactcctgaagaatggaaaatgcaggtttgtcataaaagatggtattacgtggtttaacaaataaaatttgaagagcaattccgagttatctttacaacagtgtacaggctggtaatgctcatgtccagcgtgttttctcagggtgagcgtccagtggaccagaaccaagcaagtggagccacaggcgcaagtggaggtggtgccgccgcggcgcagcggggccacaggaaccgaccgtgtctggagaaattccactcctgaattctgccaaacgaggaagtgttgaggacagccaaatcatcagggagatgtaattcataagaaacctgtgtaatttaaatactcataatttatttcagctaacgaataaaattgcagtattgcactcggtgcatctgggaactaactaccgaacggcgctgaaacctcaggccgtttctaaaggagcggcgcgaggacttctgggaaatgtagtcttcactttctcagggagcggcgcgagggcttgtgggaaatgtagcgtgtactttctaagggagcggcgcgaggacttgtgggaaatgtagtgtgcactttttggccccggtcgcgggagccgctttgggctttctgcgcatgtgcgcggtgtggctccaggtttgtttttctccggtacagcctggtagggagggctcccggcatctccctgcttcggggcagaggatgccgggggtagagtacgggagggctggagcgagggtggactggaggtgccgcttgtcctggaggtgggagagagggagcggctttgccgcctggcctgcgtcctaatcctgtc

SEQ ID NO: 4899 - DNA, 2300 bp, Homo sapien
aacacggaaggatctcaattgcattgtgttaagtaaaagataccagattcaaagactgcatattgtatgattccatttatataatattctaaaaaaggcaaacatacaggcccaaagactagatagtggctgcaagaggctaagagtggttagagaatctgactttcaaaaggtagcatggaggaattttattgacaggtgaaataattttgtatcttgcttgtggtggtggttacacaaatctgtgcgtttgtcaaaactcataaaattatgcaacaaataaagtgaacttttcagtatataaagcataaatttaaaaatgtaaatttcaatatgtttcacatatttttactcaaatatttgcatttccttttttctttttttcttttttgagatgcagtctcactctgtcaccaggctggagtgtagtagtgcgatcttggctcactgcaacctccacctcccgggttcaagcgattctcctgcctcagcctcctgactagctgggactacaggtgcgcaccaccacgtccagctaatttttgtatttttagtacagaaggggtttcaccattttgggcaggatgttctcaatgtcttgacctcatgatctgcccgcctcagcctcccaaaatgctgggactacaggcgtgagctgccatgcccggccatatttgcatttctttcaattctcataatggacttaaaaagttttgctggaatggagctgcttatttttctctattataaaatgtaactgatattaaatttatagtttctgtctttggtatcacatccctttttggttttttttgagacaaagtctcactttgtcacccaggctggagtgcagtggtgccatgatggcttactgcaacctggggctcaagtgatcgtccaacctcagcctcctgagtagctgggatcacaggcgcctgcctacatgcccagctaattgttatttttaattttttgtagagacaggggtcccactataacgcccaggctggtcttggactctaaggatcaagtggtcctcctgcctccacctcccaaactgctgggattacaggtgtgggccactgtgcctggcccacatgtcaattttcaaaaatttatactcgtttaaatgtttcaatactgtatacatgtgaattttatcacgtgtgatctatatatatctctatattccaaattgttaggaatgacatgctctttggaatactccattctttccctcactgttttgaaatgctgtatttactacacattaaagaatactctcaatcatggtgtcttatttccatggagcaggtgccaaactactttgaatagagcaatattatatatatagatagatatagatatttctcaggcattttttcaagctttttaaaacgtataatggctgttcatttagttttttacttactctggataaagttgacaatgcttttgtaaagtacacaatacactaaagatcaaagagaaaaaatacataaaaaaatttgttgatattcttttaggaattttgtcttcctaagaaaggtacagatagactaaatgtatttccatttagtcaagcaattttaatgtcacaggggaaatcatgtgacatttattttcttctttcggattatgtctattttctgacttttcaatttccgtttattgcgttaacgattttgatgaagtagctttcctgtggcacctcccccatcccccccatccctgctctcaaagaatcgctgatagtgtcaaagtcttttaaactgtatcaataagatctacttcctaacatttaaagtgaaactgacacacagctgtcctttccttgaggcgtctgtgtctaacctgcacacttgctgcacacagacctcccctgcagtgcatccctttgggtcgccccgggagagccagggctgcgggcagttcccacaccaactcagaccgcatctgtccactgcctagcggggcacctctctgccaatcccgaagggctgctctcgcgtcctcacgggaaaggtagtttccaggttgggcgccaacagcgccaggctttgagcgtgggctctgcgcatgcctcatccactggctacctctgcgtttctgcgtttccgcctttccttttgtttgtctcacgttttgcgtgggaggcggtcccgggatttcaggggtctaccggctctcttatggcgaatgcaacccgaagagagagtgaggtaagcctccgcgggttgggcagggacggagagggggccccgcgcgactccaggagcaggcagccgggggccagtgcc

SEQ ID NO: 4900 - DNA, 2300 bp, Homo sapien
gtgaggcagatcaccgtacaactagaccctgtgttacagtcgcttggtttcctgccatgtgagacttccctaagggagagtccactactatcaagactcctttccaaggacactgggaattagcatgctcagcacgtgttggcactttcctgaacttccaggatttataaaggggctgtgaaattctcctgaggccttaggagttaaaagaagttttgcagtgtaccagatggagaaacacatggaagctatttggggaaataaccccaaagcagtcatttgtctttgtttttgtaacagaaaaggattgcggcatactcaataagccataattctcttaagaatttttaaaactctgtattcaagaaggatgaatcaattttaattttcttataatcaaggtgtagtttattcattaggttgcttccgtgattatgctgacacctttttctcagtaaataaacaagtagatagaggaagacaataatattgtaaatagtatgtaatcatccatactgtcaaagtgttgctgagttctgtgttatccgaaaatttaaagaaaagcaggctgggcttggtgctgtggctcatgcctagaatcccagcactttggaaggccaagacgggtggatcatgaggtcaggagatcgagaccatcctggctaacacggtgaaaccccatctctactaaaaatacaaaacattagctgagcgaggtgatgggcgcctgtagtcccagctactagggaggctgaggcaggagaatggcatgaacctgggaggcagagcttgcagtgagcctagatcatgccactgcactccagccttgatgacagagcgagactctgtctcaaaaaaaaaaaaaaaaaagtgtgctcttaagatagataacttgattttctctaacctctatagtctggaatattgtctatttggctcttctgtaaatgctatatagaccagtaatattcttaactttaattttgaatttcttcactcatgagttctaattccatatacccaacctagctagtcctctcacctgataccccagatgataaatctttttttttttttttgagacggagtctccctctgttgcccgggctggagtgcagtggctcgatctctgctcactgcaacctccacctactgggttcaagtgattctcctgcctcagcctcctgagtagctgggattacaggcgtgcgccagcactcctggctaatttttttttgtatttttagtagagacggggtttcagcacgttggtcaggctggtctcaaactcctgacctcgtgatctgcccgccttggcttcccaaagtgctgggattaacaggcctgagccactgcaactggccccctagatgataaatcttattgcttggtggataaagaaaatgtagcacatatgcaccatggactactattcagccataataaagaatgagttcatgtcctttgcagggacatggatgaagctggaaatcatccagatcctaccgctcctgccatgctgcatcactgccactcactgcagcaagcccagctgtggagctgcaggctacagcctccagcatgcagcaggtggctcttcctttcccccttccttttttttttttttttttttttagatggattcttgctttgtcacctaggctagagtgcagtggcacgatcttggcttactgcaacctctgcctcctgggtttaagcgattgtcctgcctcagcctctcaagtagctggaactacaggagcaccacgcctggctaatttttgcatgtttagcagagacgggggtttcaccatcttgcccaggctagtctcaaactcgacctcgtgatccacccgcctcagaattacaggtgagtcaccatgcccagccccttccccccttctaagcctggcacacaccagcttagcagacagaagcagaagagtctggaatggcctgactcccccttagcatgctttatataccgaggttcctgggttacatgttctgattggatgagagtaagccttaggctaaccaatcagaacatgataataaagtccaatcagaataagcctagaggttttctctcatccaattagaacattggctgcgacgacagcgactgaagcgcagctggagtggtaagatggcggacgagcagctgcagcagctccgtgcggtgctacagggggaggggaaggtggtttctcctgacacaagctggaggccggagcctgtggcaccctggcttgcctcactgaagctggtggctgtgacagggactgcacggctgctgg

SEQ ID NO: 4901 - DNA, 2300 bp, Homo sapien
gaccatatgtacctatgttagagccatttgactcccttcattattggtggtctccaagcataagaagaatattgtaggccaggcatggtggctcatgcctgcaaactcagcactttgggaggccaaagaggaaggatcacttgaggccacgagttcgaggccagcctggacaacatagggagaccccatctctacaaaaaatttaaaaaattaattgtacatggtggtgcatgcctgcagtccaagctacttgggagactgaggcaggaggatcacctgagcctgggaggttgaggctgcagtgagctatgatcacaccactgcactccagtctgggcaagagagtgagctcctgtctcaaaacaacaacaatagcctcaacaacaaaaagataaaaagaatattgtagataaatgggagaatgtgttcttagaactcacccactcgaaactcaaggacatcaaattgatagtcttggtgactttctaggtaaaaatcttcaaaatgaatataaatagatgaatttccctgatttggattgctgagagtccattcacagtttaggtttctcgagtaattcctgactccgtcatagccaggagaagtaaagtttccttcaggagtatttggaagagacccaccacatactaagaaaacagaaggcagcagaaagtagtagtaagattcaggccacaacagaagagataaacaatagaggaacagtaactaaaacatcaacattactgctttgatttgtttttctagatgcaatcaggattatgggtaaaaggcatgcaaattatggaagtttctgcacgtttatagaggaaacatgtgcaaaagtcgacaacttctctattttcctgttggtgtagattaggtggctggggtttggctctgtatcaatatgtccaaatattgaagcctactgctcattaatatttaatttaaaggaatacccaaatataatggtggcaggtcctaatggcttgatagcaattctccacttgatctaataatttaatttaaatcaaacagataataagacattgacctaccaatgaatttgcccccttttaataaaggaacagatgcttcttgtaccaatgaaataacttagtgtttttttttaatattcactcccacttctaaattttaaaacccttagataatagcaccaatccaggaaataggaggatatttacaattagaggccatatcttgcttaattttggaatattctatatcaaatcaaacctcccatttattttcgctggaaatatgtgtgtgaatagatgaccagaaacagtaaagcctgttctgtcccaagcaaaattaattactctccgagactaagttaccttctaggaggtagatggtttctttcagcaccaaataattgaccaaggactacggaacaggtcaccaatcctttgggtaacatgactgaaactgtgcaagaagctcatctaatggcattaaaagtttaccacagcagtttcttcctgaaatcagaaagcttttttctgtctgcagtaagtttttgatctgcttatatgtgtttgtcttatgtcaaatattccaagtgaactttgatcactaaagggaaaatggatggctctgctgacattggcagtagctggggggcatctgcagtgcacctgattaaaatgaagtacatttacaatatcctacattatctgcatcttcaccggaggtataagaagcagtgaagcctccatatggcctagatccatccgtgaaaaaaatgactttcattgtgtttcctgaagatttaatctcactgcttacattcacactactacacagtttctctagctggggtaagttacttctaatgctattgaatacctattggaaaaagagtttaacctttagacacacaatccatcttactgcatatttcctaggaggtgatattcctagcccagacccacttccttctatgggaaccctgccctaaaatgaatgacctaacaatgcaggtttctaacccagtgccacaagccactatgttaccctgaacacattttgtgacctcagggtgatttcactagaatgaaagtattgcagtaatgccttcctgccatgtggtgacagattaaaagctgctatacactttggaactggaaactgagctcccaatataaaggagataagccatcatgcttacaatatgttgtgcagagctcactggtgggcagtttttcttaacaatgcatcaggacttttgctatttgtaaaggaagcttaaaggttagtttctgatgatttgatat

SEQ ID NO: 4902 - DNA, 2300 bp, Homo sapien
tgggatccagcagtccagtgcaggattctttgggtggacctagcagttgttcatccacagtcacagggaggcaataagaggcggatgggtggaggtggacgtgggagtctgtggaagacttttaccacttctattctcttagcaaagcaggaggcaaggaagggagaggcagtgggaaggattgaacagagaggaggaagtgcgaaatactcacttggaacaatgggagattgaatagaccaggcaaagaatgattaaagtgaggacggctggcatggtcctgttttcctccagccatgtttagttgcatcgtcgtggcatggaatagatggagagctgggtttatccagggctcccatcttaccaagcagataggagatgacagggaggtgcatgagttgaggaggtgtgcaagggatcaatgagaatggttggccattgagtttaagctggctcactagagagggtcataaaggaagaaacagtgaacaagtagtaagatcttgattggaggtgctggtaaggttgcaggagttttgtttcagggcagtatagggagtgacctggacagataggaggatagatagacctggtcagagtgggatactgtgggggttgcagtccttggacctgacaaggtctaaggtctgatcatggagggagggggaagctgaggtagggcagaggacaggagtgggcttcatgagaccaaaaggatgttggaaggattatctacctggatactgaaatcttcaagaagtaagaggtgtagtgtgaagaagttacaacactctaagctcttcagggataagggaagcatgtgccacgtgggtagcctcccaagtccagcacccagtatctagaatatgcagagtgaatacctgggggctgctgagggcaagaacaaggtgcctgtgagaagacctgacgcctggggttctcgtgacaggagtgggcctagtttttggtgtagaattgagccttgaatgcaccagcgggatcatattgaaaagaaaccctccaagactaaaggaagatgcatcctctgacaatgtacgctctgtaggctcccaagtagctgggctggggattagatggactccaaggcatttcctcaggtggcaatgggcggatccctgggaaggtaaagctgtgcagtaagaaaacggcaagatgctacgttcactcaggtaaagcccctttcccgggtttagggagggcgaggcagtttaggctgggtcagtttgtccctgccctcacggtttgttggtcctggcaaaagagggccttatgttatttatttttcttagagacagtgtcttgctctgttgcccaggctgaagtccagtggctcatctcagttcactgcagactccgcctcctgggatcaagcgatcctcccacctcagcctccagagtagctgggaccacaagcaccacaggcgcccggcacgatgccggctaattttttttttttttttttttaagagagagaggtaggctccctatgttgcccaggcttgtcttgaattcctgggctcaagcaatcctccctcctcggcttcccaaagtgtagggattacaggcgtgagccactgcgccctgccaaaagagggctttagggcaccccagaacgcgagatccccctcatctgtaatctttaaagaggaggaagtgtactccaaatcaagcgatagtccatccgtccttggcacggtgactgccgggaggccaggaccaaatgtgtctccttccggcttttgcaccacactaactaaccggcgccaggccgcagagccgccctggccttcggcgagaactcaggcgagcgcggcgcacgctgctccggagtcccaccgcggaagttgaggccgcggattccgagggcggggtggagaggaatctggaaggacctggacccggtggaacgcactgcgcggacggcgcctgcgtccgcactcagctgttcagccctctttcttcaggctctcccctgaaagccgtccccatgccggtctcttttttctgccttcttgtttccctccggcgagtcagcgcgactgtgaatttccgtttccggcggtgtccatgctgacctgaggagtcgcggctgcgagcaggttcggtgctgcgggttggggtaggcggcggtggggtccctggttctggggcactgggaagatcgcgagtcgtgcgtgtgggaaggtcctcccccggtcctccgggtcatctttgctcccgaggagcggcatatttctcatctggcggaggtgtcctggggtagttgggtgagtgacgtg

SEQ ID NO: 4903 - DNA, 2300 bp, Homo sapien
cacgtgtgtgtcctgccgtcactgtctctaaggagtctggctcacactaagtgagccataaggccttgttcaaggtcatctgtcccactgatttcagacgcatggtggagtctgaaatcatctgtcccccacagtgcattcagagccctgtctggactagggcacacacacatgcatgctcatatatgcatatgcacatacgcacacacatatgcatatgcacatacgcacacacatatgcatatgcacatacgcacacacatatgcatatgcacatacgcacacacatatgcatatgcacatatgcacacacatatgcatatgcacacacatgcaaggctgcaaggctcatgcacacacacacatgcacacacatgcacacacatgcacatgcacacacatgcacatgcatgctcacatgtacaggcactcatgcacctagagccttctcatccttcactttgagtcccccctccccttgcccatccttgcccatccttcaagggctcagtcaaaagccatcttttacaaattgtctctggttgactttcttttttttcccctcttagaagaagcgatgctgtcctcagtcatcgagcattcactgggcgcttcatgtgtgccaggccccgacatgggtcttgggcatgttccagttctcatgtcctcagggctccttggtgagtcgagggtgaggaggacacggaggcacaggaggccacggggcaggtctaggtccactcagcctccagagttcagccctccctgctgagtcggggtgagcaggacagatgcctgctcctggaacttggtgggtgaggtggacaggcatgcagggaggcgccaggctcaggggctgtggaacagagaaaggaagcttccaggacatcaaacaattcctggagtgccagggcaagaggggaatctgggtggaggaaaacgtgaacagggcagaggttggaggtggatgtggcccccgagcacgttggaggcgactgaggtgcttcttgactttgggcatcttcgttcatccctgcatttgcacatttgttgaacacacctactgagacacttgttttctttccatggtccatacattaggaacatagagttagcttcctggggaactttttaagaagtattcttagagaagaaaccaggaggcatcgttgtgggatgttggtccaggatcttgggtgtgtcctttggtcttttgtgggtcaggttagcaggaattgtgtcctgaggtgttgggactgcaaagtacaggttccctcctgcccacactgatgccttcagggaatgacctgtctgctcttctaagaagaacacttaactcagccttggctgacctcagctacctgtgctttcttcagccaggctctgtgttttgtgcttttactctcaaaacaaccctattattatccctgtcccacagacgagatgctgagcccctgagaggctcagtaggtgcctgaaggtcttccagccaggaggtggcagagccagggccggcctggcctgaggactccgaagctcccatgggcacagctccttcatgccagctctgtgttgggattttctgtggttgtcacagccatcttcctggtcagctaagttacagacagggtgaaactaggatggccgagctggaaccagagctcattcctgagcagggcacctgggccctgcctacggtgctgggcaggctcctggtgtggaggtcaggctcagatcctgcagtccctgtggccgtggggcttttctaggcaccctcctgactgctaacaccaggagggcctatgatatgggaccgctgccccatgacgtgtgccaggtttctgcacgtgaccactgggaaaggctggccctgggctgggtggatccgcactgcctgctggcccctgcacccagatggtgcagcccacacccctctgatgcccacccacgcccggctctgggacttccctccttccgctgtgtctgaccctggttgcccttgttctgccactggcttgtagcagcccttccggaagccatgtcctccagggagatttgattatgtcctggtggtgcgacctcgctaatgcaatcaggaagttttctcaagacttcagctgctttgttggcagccaggcctggctctcagcagctctgcaggctggaagggcccaagagacccttcacccacccggtgtctccagcagcagggaggggtccggggcacagcctattgctgctctgctctcctcccttcttggggtaagctcctttgctctgattttatttggaatcatcga

SEQ ID NO: 4904 - DNA, 2300 bp, Homo sapien
gggtggcctcgcttcccctctgctgggcaaggagctccttcctgctgcctgatgttctggatactgagcctacacccaggcagggctgaatctcctttccccgcagtccctgaggccagcaggctctgggcctcacaactgtcctctgctgagcgaccctttggtcagatccctgggcgtgcacgtagcagggaggtatgcatctgtgtgcgtgtgtgtccacgtatgggaacacaggtgtatgcatgtatgcatgtgtacagggtacacccatgtgagggccccccagacctttttccaaggagtaaatgacaccctctcatagtgtcaggtgttcactcaggacccccaagggtgagggtggagcgagagcgtggaaaggcctaaggtaggctaggcaggagcacagccccagatggccccttaagatggccacacagagcccagccagacatcaatgtcagccaagggctggccagggtggtccccgggaggtgcaggggtggggctatttaagcctacccacttctctcttcattcacctaggaggcaatcacaggagcttgtctgtagccaaaagatgcccccagcccctccctacctatcaggtcccttccctgggcacaggcctgagtgtgtagcctaggtagccactggcaccagagatggaacctgtctgaacccaagggagccccttgtggccaactctagctccataaactggaagggtgtggcaggcagccggagtccagtggcccacagtgtctctcctgggctggcaggcctgtgccccggccacctgcccctcagcaagccaggtctggacatcacggttggctgagtgcaagccagcctctgtcttggcagctccccctcctgcctgtgagggtgacttcactttgacttcatatctgcagtgatgtgcagatcacttattcagccctgagctcagccaggcaagagggcggggttctgcacacagcaagcaagggagcggctggctcaagggtgccctgggcccaggttccctggcttttcctcctcaagggcccatgggcttcccttcttccatccctctgcgcctaagtgcaggccagacctcaaaaagcagccggggatggggcgagaacagaggacttccccactgagcccacatccaacctcacccagaaccccttctcaggtccagttgctgctccctattaggggtaaatgtgtttatgcgcatcatttccatcatttctttgggggaaaattggattctttcctcctcctcgctactcgctctccgactctgccagcccatctcctgagagttctcctgtgtaagggatgcaagggccaccagcaccaggtctctgaaaggacgccggagccagtttccggtttccaagggttggaccagtgctggaggggggaatcacaaactgcccttccaggaccctaccctctctactaccccaggatgctgaaaaaggctattctgcctctcttcccctgctcagctcttccccgcctcctgcctccggccccagcagaggccgcgctcccactgcgcctctcgcctctgagaaatggcgcagcaagcgctccgcggagagcctggaggcggggcgcccttctctgagtccgcggggtcgcaccccgagccagtcggccagacctgcatcccgcgtagcatccctgccctctctgtgcagcggaaagggcaaaaggcagggactgcaagcgggcgcgcaccgggtaggaagagcggctctgcgtaggtgcgcggacccgggctcctgggttccatccccgccgcgcacctcggggtccgcacccggctcctgccgggcccttttcggccgcaccccgctcccgcaccccgctcctccccaagccccacccggcccaagccgcgcgtcccgcactgagctcctacacgcgccgcgccccggccgcaccccgcgcagccagagcaagcactggagccccgccccttcccgcaccccacccgcctccggccccgcctggcccacccctggaccgcccccgccccgccccgcccctacccgctcctccggcgcagccggcgcttacctcgcttcagtcccgcgaccgaagcagggcgcgcagcagcgctgagtgccccggaacgtgcgtcgcgcccccagtgtccgtcgcgtccgccgcgccccgggcggggatggggcggccagactgagcgccgcacccgccatccagacccgccggccctagccgcagtccctccagccgtggccccagcgcgcacgggcgatggcgaaggcgacgtccgg

SEQ ID NO: 4905 - DNA, 2300 bp, Homo sapien
gtcctttcctacggttttccttcttatgacaagcagcactttttgacagcacaacactaaacactaacacaaaatacagtgaaaagggataaaaagaatggcctgattccactagagatgccagacaaatgagaatcaataacaaaaccagagtaccaaactgagaataaatagccagagacctccacgcagagtgaggtgagccctagtgctgaccacatcggcgcacctgataggccgagaacatggaggcatgaggggcctctgggtggcacaatgggtggaagcctggggacctcagggacaagcagtacagacttaccatgggatcaccaggaaaactgtggaaaccagcaaaggctatttattcacaacttgctatagcaggggaatcagccagcatcacttacttttggtagaaatttaaaaggcccgaaagagatgggaaacttttattgttttgttttgtttaagtatcagattggaaattattggcaggaaatgtttttaattacatttttctgatattaaacccaacacagttgtactttaatattttccctaggagaactacttattttacaactatatcccagtgtatcacccatgatcagccacataatttgaatcatgcattatcttctctccacattcaaattacatacatttagtatttggctacttaaaaaaaaatcattaaaaagtaacaatttaaatccattgatgggagaacctcagttagtttcaaaacaacaattcttgccaggcggggtgactcacgcctgtaatgccagcactttgggaggccgaagctggaagatcgcttgagcccaggagttcaaggccagcctaggcaacagagggaggccccatctctaccaaaaaaaatattaacaattagccgggcatggtggcatgcacctgtggtcccagctactcgggaggctgaggcgagaggatcgctggagtcggaggtggggaggctgcagtgaaccgtgatcgctccactgcactccagcctgggcgacagagcgggaccctgtctcaaaaaatagatgaataaataaataaaaacaattataatggaagtttggataggaatttaaaacatgtggcaactaaccctgaccctgcggcttcagtctccccgccgctagctgagggccgtggccgctgcacagaggcttgtgaggattcgggggttcaggcagcgcccgccgcgcatctgccagacgtgcggccacagggtaggagcagtaagaaggatccagggaaaaaagtccacgaatgagaaaggaaacccagcgtttgtagggctaggagaacaaagaaagaaaatgctggcggcggagggcgaggctctgcggtgcgtggcagatgggaatttgctcggtggcggctcctctttctggagagcttcccagcgtcccctcccccgccagcccgcggtgacgcgcccggcacccaccacagccggctctcggcgccgtcgcgccttcgctcgcccgcttaggccgtgctcgcggtggcgtgggagacagagagcccagggaggaccctggaacatgcagtggtatggaagacgcctaagaaagggcttctctttccactcacgaaaatcagtgtgtgagctcgaagccatttcccagcgtgtccgcctcaactccctcattcaacagatgaggaattcctccagggaaatgcagtgatgcgctcacggctgccggcggcccagcgccaaggggcgctccacagccccgcggcccgaagccctcgactcggctgccacgcaggccccgcggccccgctcggactcccaggatcggcttccgagcgggacagcgctgcagtccacgagtccgggcaggggcgcctccaggccggagcggtttcctgcctcgggcactctgctgtctccacaaacggtttttggaggcacacacacggatactttaaacacgtcggtgatgaatcggtacccagctgccagtggcggagcttcctgggcggggccgcgggcgcgcggcggcttcatttcctcgcgcgcgccggaagtggcctctcaggcgcggcggcgcgcccgggggtgggtggctgaggcggcggcgggcccaaggcgtgaggcgccgcccgggtgtccccgcggcgcaggaggcggtggagcgcagagcgggcgagcgcggtgagtacctggcccggcctcgcccgccggtccgcgactcccgccggctccggcccgggcggtgcgggcgccggggctgcgggctcctgtgtggtcgggtggggtcgcctagcggacc

SEQ ID NO: 4906 - DNA, 2300 bp, Homo sapien
cttattctttgcctccagttacctctaattagttagttcctacttaattcacaggacctcttctctatctcttccttgctactgccaccaccctaaccctggttccccctccctccatttcttcccttcctgtccctccttagtgtttttagatcacctactaagtgccacaagctcacactggtaatactgaagtattgtcaagacacttctgtggcaaatggtgtaaacctaccttgagcttgcttgaggaaaataggagcagtattgaagaatctcggatacctcccagaaataaagggattgttacaaccaaatttggggaagaaaatcaaaacaactcttgtttctcagggattggaaccagagacttgaataccatcaaaattctcgtctccttgtctgtttttctctgcatgttgacttcattctcctgttgcagattggcttcttccacatggtgagggatatgactgttggcggctctgggctcacatcttctcagctttgccatcagagaggaaagagctttctcccagctccagttgagaaaatcccagggaaggacattttgcccactcttgagccaatcactatggccaggttgggtgggggtattgggactggcccagcttaagcctggtctccacccctaggaaattactgtggttggggtgggcagagagtgaggggtattctgtgatcagtgcctccacttgatgctgagtatgtggggtggcaatgggcagttttcccccaacagaggagagatttatattccttaagacggggagaagagtcctaggcattcagagcacttggagtccactccatgcactatttgagcctttgttccatctctccattacccattctgtactgttgtaagtgtaatcctcctaaaatgttacttttttgattaggctgcaccctagtgcagtgagtgattctccagcttcagtgccagagtcaccaggaggacttgtgaaaatgtagaggcttctctccagccctagcatctgattcagtgggtctggctgtagtctgagagtttgcttctctaacatgttaacacaggaagctgatgctgtgggtttgggggcctcactgtgagaaccactgccctagcagaaaagtcctgctgattctctttgcctttaggatactgaccaatttctttaaccttgcatgggaggtactcttcactctgacccttctctcattgttcccattttaagattccgttgacccttatctcactgttcccattttagggtccttttctaccaatctgatttgtctgatcccttttctctaaaatgctttctacattcttacctctttgcctttgagaataattattttgaatgacctttacactcaccactgaattcaacattttaaccaaggcataactcacgttccacttctaacatcttctctaactactccagacatgagcgatgtatttttcagaactgctgttcattcattcattcagcaaatatttattgaactcctactctatcaggggacactgcatccatagtaatgaacaaaacaaaatccctgctcccacagagtgggagagacactggaacaaatatgtctagcaatatgaaggaaaacagctgaggaagaggatggagatgaaggagtgggaggtggcagctgcttctcaagtagtattagggaggatccctctgataaggcgacatgtgtgcaaagacctaacggatgcaagaggagagtgatctttgtgtgtgttatccatttagaatgcattattaacagacattacagctatttttccatttgtgtatttttcaactccccaaaaggtgtttaagattccaaaggtcagtggccactttaacacttttggagcctcataccaccaacatgtgcctcaaattgggcatttggtgaatatctctccctgatgataatcatacacatgaagctgggattttctttccctttgtgaatgtagaaccaatataatcaaatatttgaagtgtaaaacatattttgtaagctgtgttgaaggaagaaaattggtaactttaagtgggacttatcatttgttgtgtgtgctttcctcatagtgagtctaattttcacaattacaccttggtctcattgaatgaagaatttaatcgtggacgaggactaaatgtgggtgcccgagcttgggacaagggagaggtcttgatgtttttctgtgatgttgatatctatttctcagccgaattccttaacagctgccggttaaatgctgagccaggtgcgtaaaatgt

SEQ ID NO: 4907 - DNA, 2300 bp, Homo sapien
gtaaagccaggtatggaaatctgctctcttccaagatggaagagggcacccctctcaccagcaggctgggcccctgggactgcccttgtgtccaccggccctgcgtgggaggtgagaagggagtgaggcgcgtcctccaggagacagtgagtcactcttctctgctttgctataagcacgtttcttctgcattgattagctctataattaggaggtgctttccttcctgcctgaacagaggaggggctgcaaggaaccagaggggctgctgcgtgcaagcctgtcccccactccctgcaaggagctgctgctccaaggagtcagaggggctactgcgtgcaagcctgtccccaactccctgcaaggggctgctgctccaaggagtcagaggggctactgggtgcaagcctgtcccccactccctgcaaggggctgctgctcttccaggccagccccagctggacctggggtggaggtgagggttcccacagagactggtctggcacactggctggccccggccccgtctgtgcctacatcctgggtgggaggagggtgcttcctgagcccttcacagggtctgctgcctcgagatgggtctggtgcagccaggagcagctgaggcaggagagaggctccccgtgcttcctggaagtctgtggaagatgccagtgcctctcctgcccctgagaccagttaaatcagttgtccaggcaggggtcaggcacggtgtctttgaaaaatccccacatggtgctggtgtgcacatactacagctgagggcctgccctggtttgtttattgattgattgaggcagggtctggctccattgcccaggctggagtgcagtggtgtgatcagggctcactgcagcctcaacctcctgggctcaagtgatcctcctgcctcagctccccaagtagctggaaccacaggcctgtgccaccacacctggctaatttttttttgaatgttagtagagacaggggtctctatgttacccaggcttgtctccaactcctgagttcaagcgatccatccacctcggcctctcaaagtgctgggattacaggcatgagcctccgtaccaggcccctgctctgagttagccggtgcagcttacctggaggctgaggttctcacacaggtgggcttcccgggccttccattcacctgcacatgattcacctggtgtcttgctcagcagcagatgtgacccagcaggcctggcctggaacttgagatctgctctttgacaatcgacaggtcatgctttagctgcaggtccagcggccacacttggaactgagaggctgtaggggaagggtctagaacgccagtgtgcagctgagctacctgaaaggggagcactgggcccactcccaccagtttctggctcaggagaaggtactgctcctgctctggggaccacacctggccttagagcatccatgcagggtctggctctctggggtcagggtggcctgctctgtccaggccagccccagctggacttggggtggaggtgatggttcccacaaatgctggttgagcaagctggcccgccacagccctatctctgcctagccctggtgggggggcttcctgagctctccacagtgcccaaacacaaagggccagtgtgtctagaataagcagtgcctcctgtgtggtctgtaggggtgctgagcaatcatgctggtgggaatcagctcctgggggtgaggaggcacctggtgcccagcaccttacacaggggctcctctgatcttccctgcaaacctctgaagtagtgctccctgtgcccattttacagacaaagaagttaaggctccaagggtttgaggatcttgacatagccaagacaggtggtggagccaggctcggacttgggctccctgcctacccctgctgcttgctcggcatgaatcctggcactgttgccctctggctgtgacctggggcaggtactcacccctcgtctgcgtaagggaataacgggttctctgggagcatagggggtgactgggaagagtaactgggattcttcaactgtagccttgcggttttcagtgttcagcaccctggccatcggtgtatcatgatggctattgctgtgactggagccaagagcccagtgtgcaattcttccttgggaaggggctgcctggtggtggacacagctgttcagatacacaggtttgcagctgcctgtcgaagtgcctgcccctgctgttggggcaaggaggaagcaggtgcaagaacaagcgacctcagggctgggtgggggtggccggca

SEQ ID NO: 4908 - DNA, 2300 bp, Homo sapien
accagccctccctgcaggacagcctcagccccagctgcagggatgcaagcaggacgcctggcagggctcagccccagcatagcagcctcctcgcatcctcaggcaccaggaaggatgtgggtcaggtcacacatgaatgctgagatcacactggtgggtaaaggagacagcaccatctgtgtcagccagagatgggggcaagggccccattcctcccggggaagcgtctgccttatcaaggtccttgggtgacactggtgcaatctgggatgagcgtgataggaagtgaccctgtgactgcataagaaggcttgtggggctgcccacccatccaccacctcctctagagtgtcacattcagggaggcagaggggatgcttgctctggggtcaggaggcagcagggccaactgctcacatggacttcctgagacaacactggggccaccccagggcccagatgttctgcagggctacggtacagggctgaggaaggcaggggcaggtgcctcgaaggcttccccaggggcaagacaccaggtttcaccttcttggtgctctccatgaagccacctgaagggacagggtggccctgcaggcccagaccatcctgatgccacctgtctgcctgccaaggtcaccatgagcttcgcatcttctggctggcctgaaacaagatgcagaagcaaaagtgggggaggacattgtgaaagctggagggccactgtgccatttctgcctggttgcctcgtactccccgcactgcccacccacaggcgctgcataccacgcagtaatgtatagtgcatgctctgagcagtgggaagcggttccaggccaggccaacactcactggtagagaagagctggtgagagggcagcactccaggagaaggactcctgtctccaggcccttgagctggcttgagggaggccagtgaatgaacccagcacagcccctactttcccaagacagagacaactgcccatcgagccagcctagtaggtactcttgctgctagtaagtgagcaggcaaacaagctgggaggcagagggcctctggcaaggcctgggcaagagccgtgggggtggaggtggggtgagggtatgggcatcctggggcggccagatgttgtcagggtcacgattgtccatcagcccgtggcttgagagctctccagagttgtcagagcctctctgtgaggttcaagctgagcataccctgctcctccctagcggccgccccgccggccaactcggactcccccagagcccaaggggtctctcacccagctcaggtgctgggtgctccaatccagacccccagagagggcgctcttcggctccgcgcatctttcccgtccgcatcatctgagggagtggggtccaccacaggaatgcgcagaggggtagccccatcacctggcagattccttctgaggctggggctctgggggcgggaggagcctcactgtgccatgtgcccagcccacccctcgctgcggctcggatcagccctcccacaaaagcagctgccgtgtcccccgagttccaatgaaatggaaggacagggagttctgtgcgacgcctgtctcaggccagagctgtgtggagtgagcgccctgtcagggaaggcattcaagtcgaatgctggcagaacacctgctgtagttccgtagtggacgtctacgatcaggtgaggccggggccgggtaagaggcatccccttcccgcgccgagccccgacccacgctgcgccccctcgccggccccgcgcgccagcaccgacccccggcacggccgatcccggacgccccgtccagcctcacaccccggcacctacggcgcccccacacctagcgccaggcgcgcgcccggcccaggcagctcctcctgacagcgctccaggccgccccgggtccctgccccacctccgcgccatgctcctagcctcggccccgccccgcgttcctggccggcctcgcggcccctctgccccgcccggaccccgcggtccccagcccagcccctcggttccctgcttccggggtcccacccctccagcggaggcgtccagcggcaggggccggcgcaggagtgggtgcttgcttggctcgcgggcagaggagccgccgctcgctggacgccggaccgggcaggacggcgcggggagccggcggccagaatgttcctggagccccaggtagggctgcggcgggcccaggcgcaaggccgcggggcagggttcttgcgctgtcgggctcgggaggggtgcgacggtcccctgcatcccgacccgt

SEQ ID NO: 4909 - DNA, 2300 bp, Homo sapien
aatgagtaaacaaataaataatatggggagtggtaggtgggcatacagatgaaacagaattggccatgtattgataattgttgaagttgggccattgagtttattgtatatacctttttagccgttactattataagcgtttaaaatcttacataataaaatattgtttgtaaaaaatagtaagatcatattactttgtgcaaaaccctccacctccctctgagtcaaagccacagagggctgatggctggccaggctcttcgcgatatggtccacctggcagctcctgcaggctcctctctaccacactcactcatctccacttggcctccttctaaggcatcctccacctcagggcctttgcatgtactgttctctttgctgaaaatgttcattcctcggattcagcatagcttgcctcagttaggtcttagctcagatatgatcctttcagccaagatttccctgatcacccaaaataaaatccccaacccagcagggaagggtggtggtgagaaactacagttctagctactcaggaggctgaggcaggaggctcactagagtcaggaagttccaggctgtagagcatagtgattgcacctgtgaatagccactgcactccagcctgggccacacagtgacacctccccttaaaaaataaaaaagaatcccccaccctacaagctcccctccccctcccttcgctggctccctctccctgctgggcctctctgtgggatctgcagcatctgacacatgaactatttatgtgtatttttattcactgcctacttcccacaagaatgcaaactccaaccagacagagacattcacagccgaatcccagtgccccatcttacacctggcatacaggtgttcaagacacaaggactaagtgagtaagcaaggtcctcagcctcttcaaggggtgctgtggggctcctccccattttttcacacagacccctccacctggggacatcgtcgccccagacctgtttctcactggccctcgtctgactgcctgcaagagtcactctgggccaccctggggtcaggccacagggtgtccgttcaagagaaggtgacccttcagagcgacaggaagttccagtggacgccagaagacctgtgtcctgctttagtggttctgaaatctttcaaggtggctttggagccttgctctgccacttataggctctgagaccctgcagggtaaccgcactccctgtgcatcagtttactaacctgtccaatgggaacaaatccaccaccgaccttacagggcgattaagatggttaaggggagtgacccaaggggccaggacttgcccacagaagggctttcaccgtctgattccactgacaaaaattttgccagctctgcgggagtccccagagggccttttaaatgcggtggccgcatcgcctcctagcttgtctgctgcctgatccttttttttttttttttttttttttttttgagacggagtctcactctgttacccaggctggagtgcagtggcgcgatctcggctcactgcaagctccacctcccgagtttacaccattctcctccctcagcctcccgagtagctgggactacaggcgcccgccaccacgcccggctaatttttttttttgtatttttagtagagatggggtttcaccgtgttagccgggatggtctcgatctcctgacctcgtgatccgcccgtctcggcctcccaaagtgctgggattacaggcgtgatgccttatcctttttaaatgaaagcctggccgccctctcccggcgcccgccctgtcccagtgccctctgctcgagccccgtcccgcgccctacctccccctgcacctttgccccgcaccctcctccctccgcgtcccgcgcccgcccgctcccccgctccccgcgctctcgcgcccgctccgtgcccgctcggcgctcgctccgcgctcgctcgttcgctcgctcgctcgcgctccccggcgccggctgcggagggagctgctctgcccgcagctggcgcagcgcgggggcggccgcgggtgggcgggtgccgcgggcccgggcgccgagcatgagccgccgccggcgccggccgcgcgctgctcggggcccgactgcggcgcgagggcggcgcgggagcgacgctggcccggaccgaggtaggcagcggccgcggaccctcagtgcctcggggcccccgcccgcgcctggggccgtgccctccggtcgccggcgcgggcagggcgcggcgtgcgcgggcccggggtccctcccggcgcggccg

SEQ ID NO: 4910 - DNA, 2300 bp, Homo sapien
taacccccacactccaccgagactttaaaactctgacttccattcttctctttttttcttttttaagatggagtctcgctctgtcgctgaggctggagtgcggtggcacgatctcagcttactgcaacctccgcctcccaggttcaagcgattctcctgcctcagtttcccaagtagctgggactacaggagcgcgccaccacgcccggctaatttttgtatttttagtagagacggggtttcaccttgttggccaggctggtcttgaactcctgatctcatgttctgccctcctcagcctcccaaagtgctgggatcacaaccgtgagccaccgcccccagccatgacttccattctttaccatccttacttcctgagcaggccatccttaacctttacacttaaataaactcctttaaactaaaatctaacctgtttgactattgtagattgacaggctaatgagagtatgaacctccaaagacttctgtgagggctaggtgcagtcatatatgcaatgaactcaagtaaacagctggctgaggaaacaccgggacgcctcctctgtgctaagccccatgcagcatgcacacagacacaggcccacctcagcctcccaaagtgctggggttacaggcgtgagccgcctttcccaaccaatattttatatttttacacaagtgacagcatcctattcagactgccctatactttttttccacttaaaagtatgtctgggccagacatagtgtctcacacctgtaatcccagcattttgggaggccgaggcagtggatcgcctgaggtcaggagctcgagaccagcctgctcaacatagcgaaatcccatctctactaaaaatacaaaaattagctgggcacagtggtgtgtgccggtaatcccagctactcgggaggctgagacagaattgcttgaacctgggaggtggaggttgtggtgtgccaagatcgagccactgcactccagcttgggcgacagagcgaaattccagctcaaaaataaatatataaataaacaaacaaaccaactaaaccatcattgccctccccagccctcccagcccagagacccccatcccttgtcagccatccccccttaccttctggacagggacaagtgtccctcatttggaaaagaattaaggaggggtaacagcagactagggaggcctggggtcctccacacgcctgtgtggggtgactttggcccccagcaacaaggcaggcctgaggtctgcagagggaggcagcccactcctcagccgggggcgtctatcctcctcctggccccatccctcacctgtgggggaggctaagtgggtgtcagggccctgtcagagggtgagccacccccgggggtgcccatcggccaccagcctcccttcagtagacacccagcccaagtgacagcagtggcatggcactgctgagcacagggagcctcaaggtcagtgcctggctcctggtatcctccgtggtccccaggacacccccacacagaggtcccagaacccccaaagctggcacaagagcccaggaacaccctgcccagcaccctccaggtccctcttttaggatctgggtgagctaaagaagccaaaagaaaggctgggcgcggtggctcacgcttgtaatcctagcactttgggaggccgaggtgggcggattgcctgagctcaggagttggagaccagcctgggcaacacattgaaaccccatctctactaaaatacaaaaaaaattagccaggtgtggtggcgtgcacctgtagtcccagctactcgggagcctgaggcaggggaattgcttgaacccaggaggcagaggttgcagtgagctgagattgcatcactgcactccagcccgggtgacagagtgagactccatctcaaaaaaagaaaaaaaaaaaaaaaaaaaaaaaaaaaagaagccaaaagagggtcttcggcccagcccgcccctccccaacagccctgggtgtggcagggagcctgaccagttccctccagcctgcgtcatggagccctgggcgtggctgcagggtttaaagagccgacccacgtgcccagcagcctcctcagatccgttctctgcgctgccagctcaggtgagccctcgccaaggtgacctcgcaggtgagcaggcgtccactttggggctgctgggtgaagggggtgggtgcccaagaattctgagtaatgaggagcctgttgaggggtctgaggacagatatggctgcagcagccgcttgaaggcctcctgctttgcacccactatca

SEQ ID NO: 4911 - DNA, 2300 bp, Homo sapien
ctttgagaggctgaagtgggtggatcacaaggtcaggagttgagaccagcctgaccaacatggtgaaaccctgtctctactaaaaatacaaaaattagccagggtgtggtagcgcacgcctataatcccagctactcaggaggttgaggccaggagaatcgcttgaacctgggaggggaggttgcagtgagccgagatcgtgccattgcactccagcccgggcaacagagcaagactgtctctcaaaaaaaaaaaaaaacaacaacaacaaactccaaacaggccgggcatggggctcgcacctataatcccagtactttgggaggccgaggcagggggatcacgaggtcaagatatcgagaccagcctagccaacacggtgaaaccacatctctactaaaaacaaaaactagctgggtatagtggcatgggcctatagtcccagctactcgggaggctgaggcaggagaatcgccttaacccaggaggcagaggttgcagtgagccaagatcatgccactgcactccagcctgggtgacagagtgaaaactgtgtctcaaaaaaaaccaaccaaacaaacaaaacagtcaaacatacacaaaagtagaaacaagtgtaatgaaactctatgtatacatcaggagctttaataaaaattactagttcatagcacatcttgtttcatgtatatttccactttccacgtaatctgaaacattcaagaaatcaggtatcatctgcaaatatttgtggctctaaaaagggtcttttaaagaaataaaattacagtataatgacaacaaaatttacaattctgcaatataaaatgtcactgatcatattatcgaaattgctttatagttgttctccagttcatttgaattaagattcagaggtccacaaaattgcgttagttaaaagtttaggaattgcgttaaaaaaattttttttcaaagattttttttcaaaatctttacgtgtgtccatggtcaaatgtacaaaccaaggtacgtccgctagttccattttagaggcggcctcccagagaggggctgtgtctaacttgctggcttctcttccactctgcactgcccgcccttccccgtggctggcactctggactttccccaggtcgcgctcgcgcctggctcccttcgggagaactcggagaaatgtcttcccgccgccctgactctctccttcccccacttcctgcctgggcccagcgcgcgggccacggggccgcacctgcaggcacgcgtttcccattggtgacatcttggcgggcccggcaatggcacttcctcctctgcaccccgtgacccacgtccggctgccggtcttggatcacgaggcctccgcttcccggactccggaccccgcgcctcctcggggccgacgggccagtccctggcgtggtgagccgccgcgcgggcgccccggccccgccactccagtcccggccgccccccccaggtccctttccgccgccccggtcgctcggagacggacgcagacctacgagcgcctcttcccttccctcccttcagccgcgctcggcccgcgggtccccgagctcccgcctaggcagcgctagcttggcgggccggggagcagcccccaccccaccttgccgtcgccctcgctctcgccctcagggccccggaagcccgccaggggccccctcccctcccctcccctcccctccccctcccgcgaggcgcccttccctccgggaaccctcccgtccctgcccccactctccccgctgcgccgctcgctccgccccccgcccggaagctcccgcccgagcccgcgcaggccctggggccgaccttcctgccgggccgggcggtccgaggctgctggagtgccgtgagcaggccgcgggaacgtcgccgtcaccttgtctcggggcctcggcgctgcttcccgccaaaacacgtttaccgcgcgcccgggcctcccaccttgcggaagggaccccaccaccacttggatttctgttgcaggttgagaacaaaaacatgcacctggagtttccccggagccctctgcgtggttgagcttcggtggaatttcggggctcttggctgccagccgcgcttgcctggtagcaacagaaaccagtcctgctcgcctccgtggtaagtctagagcatgaaagtccgcgggcccggccgggtggactttggtttgagagtggaactaagtgagtaatgggggcggcgcggccagacgcgctcccagcctcctggcgagagtgctgcccggtttcccgggggcacgggagtgtgtc

SEQ ID NO: 4912 - DNA, 2300 bp, Homo sapien
aagcgattcccctgcctcagccacccgagtggctgggactacaagcgcgcgccaccacgcctggctaatttttttgtattttagtaggggtttcactatgttggccaggatggtctcgatttcccgaccgcctgatccgtccgcctcggcctcccaaagtggtgggattacaggcgtgagccaccgcgcccggccttcagtgtactactttccttattttattttttgagacagcgcctcgctctgtcgcccaggctggacgcaatggagcagtcacggatcactgcagcctcgacctcccgggctcaagcgattctcccgccttagcctcccaaattactgggaccacaggcttgcgccaccacgccctgccatcggctctcatttccttttcccatcctagtcttccatcaggcgtcctttcggcgcacatttcagtgtcctgcggggctcaccagtgtccttcctccagggcctcaggggcagtcagagggatctttcccgccgctccactccctcctcctcctccccctccccctatcccctcccctcccctcccttctcctctccagaaacgtcctcgcttgtccgcctccaccgcctcccccgccagccgtgtcggctctgctccgcgcccagccggccaaccggcggctcagctctggcgcgtcacaatgcgccgtcgcggccccgcccccggacgccggacgcagaaactccgccctgccgcggtccttgcgtccttccggctccgtcgtggaagcaggactgcgccgcgtcttcctcaaggtggggttcggggggccaccgaatcgctgtcacgccggcaggtagcagggggtggggacgcgggctccttgggcttctgtttcctggtgtccagggcaaagggctgagccgggcagtagggcctagtcggggcctggctcgccgggagcaggagggcttccggcaaagccgcgtgcgctcgacgggcaggcgctgaggattggggccggcagcgcgcctgaccccgcccctcgtaggctccgccccgtgctcgcaggcgggggtttccatggtgatggtcaacaagcctcaactgcctctgctacaactgccaagttccccgcgtcccaccctcctctaggtgctccaagggaccaccggggtgcctgatatgagagcgggagtgtagagactcggaggccgaggtgaggggcggccgaagtctccgaggtcgaaggccgcacacccgggacctagcggggaccgggtccccctgggggtggggacggggggtgggatttgagattagggagactatccgaagtccagggccccgtacccggactacctggggactgggcctattggggtggggatcgttgggctggggctgggatttgggatcagggaagagcgatctgagtttaagcgccgcaaacctgggaccgagcgaggactgcacataatgaggggccgtggcgctgagatttgggtgacgggattcgaggtcgaggggcccgtacgtgggaccggcaagaactggacccactgggatcgggagacgcagcgtcggaggtcgagagccgcacgcccagacagtggtcccacgcggtgagcaccgcgggctgagattttggagtcaggaaagcgcggggaaggcacggacggccgggtgcgttagtccggccccctggcggggagctggcgactgccggagggctctgaaagtgagaacaggcctggcgcagtgggaggcccagccgggaggatctcttgagcccaggagttcccgacaagcctgggcaacatagactgtctctactgaaaagtaaagaaaaaaaaattagccacgtgtggtggcgcgcgcctgttgtcccagctactcgggaggctgaggcgggagggtcgcttgctctgaggtcgaggctgcagtgacagtgattgtgccactgcattccagccgggcgacggaaatgagaccttgtctcaaaagaagtaataatagtaataatacctgagtaaaatgaaagccgcgcgctcacgtggctgcaggcgcctgagagttgcacaagacttccttgtggggagttggctccgccctcctcccacgcccggttcccgtagccttagctctcggccccgggccctttttcctcctcggctgcgccgcgtgtcctcggagcgcggtccctgtattggtctcctgctcctagaggtatcgtgtttgtatttggggtgaaaatctgactcgtgcgcgctcttcagcttagtcgtccttttttttttccttttgtttgtttgtattaagtatt

SEQ ID NO: 4913 - DNA, 2300 bp, Homo sapien
cccaaagtcttgggattacaggcgcgagccaccgcgcccggccggccacaacttcttaagaatacctacctatctgattttcgcccctttcctatgatgctgaatacctatctgatttttgcaggaactattttctgtaattttgcctcaaattatgcagttttctctttggacatttttacctattctgacagctcctgctttactctttccattctctttcttggaactagctttttcttttaacaaactccttccttcatcacaatcatcccactcatcatctgacactattttgagcactcctttactttctctggtgatttaaaaaataacgttcagccagatgcgtggctcaatccagtaatcccaacactctgggaggcgtaggtgggcggatggcttgagtccaggagttcccgaccagcccgggcaacacagcgaaacctcgcctctacaaaaaatacaaaatttagccgagagtggtggtgctactcaggaggttgaggcaggaggatcgcttgagcccaggaggtcgaggctgcagtgagccgtgattgtaccactgcactcccgcctgaatgacagggcgatactcagtctggaaataataacaatagtaacaatgttcagcttaacctgtgatgagtgccttgacatcatctcttcatgaagaagatccaccaaaataaaatggttacaattattagccctacaatacatcaaaaaaaaaaagaaaagaaagaaaatctgtccctggcttagccattagccaccaaatctgtgtgttcaggtgctctgtgactgaaaatcttgccctcgacctgggtctgagttacattctgaggtttgggggcttctcacaccacggaatttatcacctgagcaacttcaacctgacaaatccctcctaacgccctgctctgagacccctttaggcggtctccggagtactcagtgtaccttttttttttttttttctttgagacgtagtctcgctctgtcgctaggctggagtgcagtggcgcgatctcggctcacgcaagctccgcctcccgggttcaagcgattcccctgcctcagccacccgagtggctgggactacaagcgcgcgccaccacgcctggctaatttttttgtattttagtaggggtttcactatgttggccaggatggtctcgatttcccgaccgcctgatccgtccgcctcggcctcccaaagtggtgggattacaggcgtgagccaccgcgcccggccttcagtgtactactttccttattttattttttgagacagcgcctcgctctgtcgcccaggctggacgcaatggagcagtcacggatcactgcagcctcgacctcccgggctcaagcgattctcccgccttagcctcccaaattactgggaccacaggcttgcgccaccacgccctgccatcggctctcatttccttttcccatcctagtcttccatcaggcgtcctttcggcgcacatttcagtgtcctgcggggctcaccagtgtccttcctccagggcctcaggggcagtcagagggatctttcccgccgctccactccctcctcctcctccccctccccctatcccctcccctcccctcccttctcctctccagaaacgtcctcgcttgtccgcctccaccgcctcccccgccagccgtgtcggctctgctccgcgcccagccggccaaccggcggctcagctctggcgcgtcacaatgcgccgtcgcggccccgcccccggacgccggacgcagaaactccgccctgccgcggtccttgcgtccttccggctccgtcgtggaagcaggactgcgccgcgtcttcctcaaggtggggttcggggggccaccgaatcgctgtcacgccggcaggtagcagggggtggggacgcgggctccttgggcttctgtttcctggtgtccagggcaaagggctgagccgggcagtagggcctagtcggggcctggctcgccgggagcaggagggcttccggcaaagccgcgtgcgctcgacgggcaggcgctgaggattggggccggcagcgcgcctgaccccgcccctcgtaggctccgccccgtgctcgcaggcgggggtttccatggtgatggtcaacaagcctcaactgcctctgctacaactgccaagttccccgcgtcccaccctcctctaggtgctccaagggaccaccggggtgcctgatatgagagcgggagtgtagagactcggaggccgaggtgaggggcggccgaagtctccgaggtcgaaggccgcacacccg

SEQ ID NO: 4914 - DNA, 2300 bp, Homo sapien
agctgtgatgcagtcactgtatgactttttttttttttttgagacagagtttcgctcttgttacccaggctggagggcaatggtgcaatctcggctcactgcaaccatcacctcctggattcaagcgattctcctgcctcagcctccagggtagatgggactacaggtacgcgccaacacgcccggctaatttttttttgtatttttagtagagacagggtttcgccatgttgcccaggctggtctcaaacgcctaacctcaggtgatccacccacctcggcctcccaaagtcttgggattacaggcgcgagccaccgcgcccggccggccacaacttcttaagaatacctacctatctgattttcgcccctttcctatgatgctgaatacctatctgatttttgcaggaactattttctgtaattttgcctcaaattatgcagttttctctttggacatttttacctattctgacagctcctgctttactctttccattctctttcttggaactagctttttcttttaacaaactccttccttcatcacaatcatcccactcatcatctgacactattttgagcactcctttactttctctggtgatttaaaaaataacgttcagccagatgcgtggctcaatccagtaatcccaacactctgggaggcgtaggtgggcggatggcttgagtccaggagttcccgaccagcccgggcaacacagcgaaacctcgcctctacaaaaaatacaaaatttagccgagagtggtggtgctactcaggaggttgaggcaggaggatcgcttgagcccaggaggtcgaggctgcagtgagccgtgattgtaccactgcactcccgcctgaatgacagggcgatactcagtctggaaataataacaatagtaacaatgttcagcttaacctgtgatgagtgccttgacatcatctcttcatgaagaagatccaccaaaataaaatggttacaattattagccctacaatacatcaaaaaaaaaaagaaaagaaagaaaatctgtccctggcttagccattagccaccaaatctgtgtgttcaggtgctctgtgactgaaaatcttgccctcgacctgggtctgagttacattctgaggtttgggggcttctcacaccacggaatttatcacctgagcaacttcaacctgacaaatccctcctaacgccctgctctgagacccctttaggcggtctccggagtactcagtgtaccttttttttttttttttctttgagacgtagtctcgctctgtcgctaggctggagtgcagtggcgcgatctcggctcacgcaagctccgcctcccgggttcaagcgattcccctgcctcagccacccgagtggctgggactacaagcgcgcgccaccacgcctggctaatttttttgtattttagtaggggtttcactatgttggccaggatggtctcgatttcccgaccgcctgatccgtccgcctcggcctcccaaagtggtgggattacaggcgtgagccaccgcgcccggccttcagtgtactactttccttattttattttttgagacagcgcctcgctctgtcgcccaggctggacgcaatggagcagtcacggatcactgcagcctcgacctcccgggctcaagcgattctcccgccttagcctcccaaattactgggaccacaggcttgcgccaccacgccctgccatcggctctcatttccttttcccatcctagtcttccatcaggcgtcctttcggcgcacatttcagtgtcctgcggggctcaccagtgtccttcctccagggcctcaggggcagtcagagggatctttcccgccgctccactccctcctcctcctccccctccccctatcccctcccctcccctcccttctcctctccagaaacgtcctcgcttgtccgcctccaccgcctcccccgccagccgtgtcggctctgctccgcgcccagccggccaaccggcggctcagctctggcgcgtcacaatgcgccgtcgcggccccgcccccggacgccggacgcagaaactccgccctgccgcggtccttgcgtccttccggctccgtcgtggaagcaggactgcgccgcgtcttcctcaaggtggggttcggggggccaccgaatcgctgtcacgccggcaggtagcagggggtggggacgcgggctccttgggcttctgtttcctggtgtccagggcaaagggctgagccgggcagtagggcctagtcggggcctggctcgccgggagcaggagggcttccggc

SEQ ID NO: 4915 - DNA, 2300 bp, Homo sapien
ggcgcacacctgtagtcccagctatcggggaggctgagacaggagaatcgcttgaaccttggagatggaggttgcagtgagccaagatcttgccactgtactccagcctaggtgacagaggaagactccgtttcaaaaaaataaatatataaaaataaaaaaaatgagctgggcattgtggcagatgcccatagtcccagctactggagaggatgaagcaggaggatcacttgagcaggagatagaggctgtggtgagctctgattgcatcactgcactccaggctgggtgacagagtaagaacctgtctccgaaaaaaaaaaaaaaaaaaaaaggctgggtgcagtggctcaggcctgtaatcccagcactttgggagggtgagccaggcagattgcctgagctcaggagtttgagaccagcctgggggacatggtgaaaccctgtctctactgaaatacaaaaaattagcagggcatggcggcgtgggcctgtaatcccagctactttggaggctgaggcaggagaatcgcttgaacctgggaggcgaaggttgcagtgagccaagattgtgccactgcactccagcctcagcgacagagcgagactctgtctccaaaaaaaaaaatcaactgtatatctaatggtactgaaaagagagaaaccacaagacactggtatatattgacatacacaagtcacagagaatagaaatggactggatgttgaagcacagtgatgcatatattattattcaagtcaactcactatttaaagctaatttcataggaaaattctacttaattcagtctaacattatgtaagtaaccaaggaagagttaacagctgtgttacagaagtgaactataagcttgtgaattcagtatttaaaaaaaaattccttttcagtattttgtaatgcttcaacatgcattttgagcttatttctgtttatattgttgtaatgttcctcagcagttaacatgtattgaagcattttttttttttttttaatgagactgagtctcactctgtcgcccagtctggagtgcagtggcactatttcagctcactgtaacctccgcctcctgtgttcaagtgattttcctgcctcagcctcccaagtagctcgaattacaggcacccaccaccactcctggctaatttttgtattattagtagagacggggtttccccatgttggccaggctggtctcgaactcctgacctcaggtgatccacctgccttggcccccaaagtgctgtgattacaggtgtgagccaccatgccaggcctgaatgtttacttttacttttaatgtaagttttaatttaaatactgatacttgattcagttattggaaaacttttttgttttgagacggagttttgctctttttgcccgggctggagtgcaatggcacgttcttggctcactgcaacctccgcctctcgggttcaagtgattctcctgcatcagcctcccgagtacctgggattattggcatgtgccaccacacccggctaggctaattttgtatttttagtagatacagggtttctccatgttggtcagtttggtctcgaactcccaacctcaggtgatccatccgacttggcctcccaaaatgctgggattacaggtgtgagccaccaagcccggcctcttttttgctttgtttttttttgagacggagtctcactctgttgcccaggctggagtgcaatggtgagatatcggctcaccacaacctctgcatcctgggttcaagtgattctgctgcctcagcctcctgagtatctgggattacaggaatgtgctaccacacctggctaattttttgtattttgagtagagacggggtttcaccatgttggccaggagttcgactcctgacctcaggtgatctgcccgcctcggcctcccaaagtgctgggattataggcgtgagccaccatgcccagccggaaagcttttaagtgcccagaataatttgggtgtgtgaatgcctttttatccatagtaaatttaataaaatctaattatagatcaagtatttctgatgtaaatttagcatctaaatttaagtggctgtgaagtataaaataacagtagataccaatgacttagaagaaaaaaaagccttgacatctctatttcctcgtctctaaaggtgataacacttgcactatggtgatcctactagtaatacatttggagccacgttgtaaacttcagagtttgcaccattattattatttttttattattattattttttgagatggagtttcgctct

SEQ ID NO: 4916 - DNA, 2300 bp, Homo sapien
agtggctcttgcctgtaatatcagcactttgggaggccgaggcaggcggatcacatgaggtcaggagtttgagaccaggttggccaacatggtgaaaccccatctctaccaaaaatacaaaaaatagccaggctttgtggcacatgcctgtaatcccagctactggggaggctgaggcatgagaatcacttgaacccaggaggtggatgttgcagtgggccaagatgcatcaatgcactacagcctgggtgacagagtgagactctgtctcgaaaaaaataaaaatactttcaacattctttctaagcacataaataataagacagtgatcactggggtatgatgtaaaaagaatgggaattccatgtcagcacaacgtatgaggctgcctttgctctggagactcaggctgacctgagagaggtaataggctgaggtttgcttttaagggtgttgcagggatgatggggcagaaagagacctctgtggcccatggatgagatggaccaggatacctctgccttgaccggacccttggaagattctgtacaggtagcatgaacaaaaagaaaatcagccttcccacaaattgcagtggacttcaagatgtttggaaagcccagaacattcttcagccctgaaatctccttttatttttatttttttttttgagatatggtcttgctctgttgcccaggctggagtgcagtggtgtgatcatggctcactgcattctcaacttcctgggctcaaatgatcctcccaaatagctgggactacaggcatgtgccaccatgcccaggaatttttttttttttttttttttttgtagagatagggtctgttgtccagttgcccaggctggtctcaaactctttgactcaagcaatcctcctgccttggcctcccaaagtgttgggattataggcatgaggcactgcacctaacacgaaattcctttaaagatatcaaggagtgtgtcccccgttagcagcaagaaaaattcctctggaggaggaaacatcatcttaggtctctctctcttctttttttttttttttgagacggagtctcgctatgtcatccaggctggagagcagtggtgtgatctcggctcactgcaacctccacctcccaggttcaagcaattctctgcctcagcctccagagtagctgggattacaggagcccactactatgcttggctaatttatttttatttttatttattcatttatttttgagacagagtcttgctctgtcccccaggctggagtgcagtggcacaatctcggctcactgcaatctctgcctcctgggttcacgccattctcctgcctcagactcccaggtagctgggattacaggtgcccaccaccacgcccggctaattttttgtatttttagtagagacagcgtttcatcgtgttagccaggatggtcttgacctcctgatctcgtgatccacccgccttggcctcccaaagtgctgggattacaggagtgagccaccacacctggcttctttttttttttttttttttagagctagaagagaacatcatacacataaattcattgcattatacaaataaacacctgattgacagatcacatcatgtgaaatttatatagaaaataattgatacaggttataataatttatgcaaagataatattagaaaaattggaaaagattaaattatgcagaattgaaaattcacttaagaataaaagaggcatctgggaggtgaggagtgcctctgcccggccgccccgtctgggaagtgaggagcgcctctgcccggctgcccatcatctgggaagtgaggagcacctctgcccggctgcccatcatctgggaagtgaggagcacctctgccctgccacccatagtctgggaggtgaggagcgcctctgcctggctgccctgtctggggagtgaggagcgcctctgcccggctgccccgtctggggagtgagaagcgcctctgcctggctgctgtgcaatcttccaagtgtgaagtgacagcctttctgcaggtgtacccaacagctccaaagagacagcgaccatcaagaacgggccatgatgacgatggcggttttgtcgaaaagaaaagggggaaatgtggggaaaagaaagagagatcagattgttactgtgtctgtgtagaaagaagtagacataggagactccattttgttctgtactaagagaaattcttctgccttgggatgctgttaatctattaccttacccccaaccccgtgctctctgaaacatgtgctgtgtccac

SEQ ID NO: 4917 - DNA, 2300 bp, Homo sapien
agagaaaagataattggtgggcttgcatctctgaagatagaagaagggatttgatctagaatgcacaggaagagattagccttaaacagaaagaaatttttttttctctgtggtctgaagagaaggtctggttgggaagagcagccagtccacttgcttttaatatgccatgggtcatgccttgctaaaggatgtggtgatggagcttgaaggcagcaacctttgcttctgtttgtttgtcccacctttactccggggcttgagcctccttttccagccctcttcctcagaatggagaccagtgaccttgaacagaaagcttgggagacagcacccatccttaccttcatctttaccctcatccttccccactggtgacaagttgggtaagtcatgtcactcctgcagggcaggcccaaggaaggagggagtggtgcctctttagcctcaggccaaagctggcttagctgatcaaatttatgagacagcctttatgactttttatatattctatcactttacttttgaaattgtgccttagagagtggtgccagcccatgcactgtgcagatataagtactgaaattgagagtttcaaaaacaaaaaaaaactggttcttcaccacaggtagtttaagaagcattgcttcatcagacagagccctgaagggaaccagatttgctgacattgactgagtaaatatttggactccctttatgtgccaggccctgcttgaggtcttggggatgcagtcatgaacaaatgaggcagcctctctattcttggggaatttaaatctcagcagggaaagacagtaaataagaaagcaagtgaataagaaaataaggtaaggcataagttataagaagaaattaattaaattaaaccaggaaaatgatatatacaggatgctccagtggattagatggtcagtgacatgctttctgaagaggcaacagttggactgagagctgaatcatgaggaatggagagggcagctagtgcagaagctacaatgagtttgatgcagttcaagggcctgctgggtcactggtgctgaatatgatcataagagaggcctaggttggggaggtgacaggagagcctcatgggccaggatgaagagtctggattttactggatggccactgaaaagcctttggagggtttcatgcttggccttgtttttgttttaaaagatcaccttggctgtcatgtggaaaactcatgtttgggggagcaggagtagagtcagaccaaccaggaggttgatgtgggtgagagcaagtgctgcctaggcctagagaggtgacagtgcagggcaggggagctgggtggatgccgatatgctttagcggtaaaggaggtgggtgataggtgagatgtgaggatgagaatgaaatgacatcggggattttggtttgagcaattgagtggttcgtgtggctgtttactaaaatggggatgactggggaagagcagatgctgatggatattgctggagcaggagttctgttggggcctgttaagtgttttgttttgttttttgtttgtttgttcaactcactgcaacctccgcctcccgggttcaagagatccttccacctcagcctcctgagtagctgggactacaggcacacatcaccacgcctggctaatttttgtattttcagtagagacgaggtttcaccatgttggccaggctggtctcgaactcctgacctcaagtgatccgcccacctcggcctccccaaatgctgggattacagccgtgagccatcgtgcccagctagggcctgttaagttttaagcactttagacgtcccagtgtagatgttaaaaggtagaaaggtggagtctggaggtgaggtaagaggttagggctggaaataaatatttggcagtgaatggtattttaagtcaagggatccctcaggagagtgttttatggctgtgtgtatatgtgctattttattttcccagtaatgttcaactacttagtttagaagaggaagaacagaaagcataggaagtgatttttaacttgtaggatattagagagattcatattttaagagtagaggggtccaggtagtggactagtcccgattatggttattacagtttgatgaaatgtggctgagatcattggcactgtggagattaagaaatgtgaggtcagagtgttgggtaaattgttcctgcgagtgttaaggttgtcaggataatggtgggaatggggtgaagatgacaactcagcaatgacacaagaagagagtgacacagaaagattcagtag

SEQ ID NO: 4918 - DNA, 2300 bp, Homo sapien
tggctcagcctgtaatcccagcactttgggaggctgaggtgggacgatcgcttgatcccaggaggtggagaccagcccgaacaacatggtgaaacttcatctcttaaaaaaaaaaatacaaaaattagcctggtgtggtggcgcaagcctatagtcccagctacttaggaggctgaggtgggagggttgcttgtgcccaggaagcagagattgcagtcagccaagatcgcactactgaactccagcctggctcaaaaaaataaataaataaataatgaaaagagagtagaacctgtgaaatagtcatttaggagaatggatggactaagaaatgtagaaggatagccaggcagcgtgaagggcccacttgaacttaatggttataaactgaaaatgaaaccaatcatcccagccatgtggttttctcaaacaacctctgccgtacaggcgcaggccaggaactggattcaagcagatttgggtttccatcaagagaataaaaccaagaaagactgggacaagagagttaagggtaacggcacatacacaggactggccataaccatgctccatggcctcttaaattgagtgaggagagaagtgagcacatgaggaagtgaaggtcagggcaagggtggtaaatctaaatagggaaaagctctgtggttttccaatgaagaatgaggagaggagtaaggtccaagggagacattttgtgttccccaggcaaaaggtaagacagcatctctgaggaggagaccgaaggggacgtgggcctctccaagcatcgcaggctgaaaataatagtcccccaaatatgtccatgtcctaacccccagaagctgtggatgttaatttctatggcaagagggattttttttgaaatgtgattaaattaaggatcttgacgtcaagagattatcccagattagccagctgggcctgatgtaatcacaacagtcgttattagaaggacccacgaggagccagtgcctgagcatgtgatgtgatgatgaaggcagaggttgcagtcatgcactttgaagataaaggagcgagccataagccaaggaatgcaaatagtcactgggaactggaaaaggcaaagaaatattctcatctagaacctccaggaggaactagccccaccaacactgactttataaagcccagtaaaacttgatttcagacttggcacctccagaagtttaagagaatacatgtttgttatactactaagtttgtgttaatttgttgtgacagcaattggaaactaatacaccaaggaagggggaggatgtagaagagaggtccaggcaacatctctttcctctccaaaataaatctgaaagaaaggaattgggaaaagaccaaatgggtagctctgtgtcactcggtgagaagtgaaataaacgtaaaatcctggtatcaacaacccttgtgtgcgtttaggagagttctgactgctgggagccacttgtctaattccctcacctcctgtgtttgttccaagatcccctatttaaaattgcaaagtacacctccagtcctacacacccacaaacgcacctcgccacaccccgcccagctctatgctttcagtaccacctcatgacacacacgacgccatatatttactatatttatggattgcttgtttccccaactagaatagggcagtgacttttgtgcaagcatcttgaacagctcctggtacacagttggctctcaattaatatctgttaaatggatgaacttcagaggtgagatggaagatgccgaatggcaaatattcacttcagaatgttttgaaaggtaaagatgaaattatgggtatttacatccttttcccccaatagtattttaacaaatgaaaatcaccttaacaggtattcctaaaataattcttatttgtttgtaataaaaaacgaggaggaggacttgaatacacgcgtcgctgactcaaagatggtcccctccgcccaagaatcccgctccgcacagcgcagagttcaggggcccgcgccggaagtgggcgtggttcgcccgcggcttgctgggacttgtatttcggggccctaggcgcgcgagcggtcagcatccggaatctggcccctgcaggcgtggggttccacgtgggaggtgagactggccgggcttccccagccgctggcagaggcgttcaggggtcaggaaatgggtgtgccgcgggtaaggcgctgggccgccgagctgcggaagccgggagggcggcgatggtagggcacgcgaccagcggaggcgcggcccgcggcggcacg

SEQ ID NO: 4919 - DNA, 2300 bp, Homo sapien
gatagaatagtgaataaaaggaatgcttataggaaacaattttgcgtggaatgctagatggccaagcctcagcctttggtccagtgcaatccttgcctcacttgtcaatagtgaaaaattagtttggttagaagaaccatctggaaacacaccagcttctgctaccttcatgctcattgtcagaaaaagattaaccagtgtgaacgttctgatctgttaattcctgggactgttttcttcccagtggactgtttgttggtagaataacccccaaagctcaaagctaaaatgcatcattagtcctcgtcggcagttgagctgatttggaaaagctgcaccttcctgcagaagatcaactgacctgctatcccactgcacatctgaggtatatttcagtgaaggcaggtagctgtgcttttcagagcagagaagcagttttaagagcagaaaggtagaggaaatctagaaaagaaccgtcttgatacagatttatcccatggtgtgaagggagggcaaagaacccagtggcacttcgcttatccagcaatttctgtcactgtggcgacaaacttctgcccattccagagggtcttgaactgctcaggaactgggaattcattaaagtcaccgccttctgtaggaatgaggacattcatctcagaagatttggcactggctatttcacaatccagggaattcttgctcaggtaagcatggcagccatctgttttgttgatggaaatggttggcactttactcatcacctgaactttgacatccctactgttgattatctccacaatgcccaccatatcatcgaataccagaccaagtttcttacaattatctactgtaatggagttaattttgcccttgatttgcaacatcgtgttgacacacttgtatatgtaagccgcctgtttcagctctgtgtcatcaatcaccagattggaaacattttcctgattttccactctccacttcttgccctccagttcaagtacagctggctccttctttgtggctggtttggggtttaggtgcagagaatggcttggggccactgcgtactggaccactctgagccttcagggtagggttcttgtgagtcttcatgtcatcagatacacgtttcagggcatgtgtgatgctctccccctgattaatctgcgcaaacagtgctgagagggaagcggactcatctgagcctgaactgacagagactagtggaggaggggggcctggtggtgggggaggagtagctgatccagcagagggtccagatggcagtccactcagttcttttgtcacaggccccgttttgctccaggcagtccggtggtatggaactccttaatgtaagcctgcagctctgtgcatatacttaaataagctttgactcagtctacatgcttcttatccacatctttgtactctttaaggactcagtttgtataaaacacagcagcatgattcatttctttcacataagggccaggattgggagccatagccacccagcctagggcctggatactttcactgacagctgacagctgattaaacaacttgctgcctcggttcttctcccaaaaggttatcacttctttgatctgctctgagataggtgccaacagatcggaaagcttattacctgccggctattgacactgagaagctgtaaccaagagagctcactccaacttcaaaactgtgtgtaccatctccacatctttctgcacgtcttccccaatctctttactgatcttcaagtactctgccacagggcaggcaagcagcgagtcaaatgcctgcgcatatggagctgctcctgcttttgaaggactatctccatatccacggtgcatgtcagaggtatgggatactgcctccaggcggcccactgccctgtccaattttttaccagattttgcatgtcagtcataatgtatcacctcccgactgcgatcagccgctctccacttcccgcaccttcacttttcaaagattcccaggtgatgccaacctgctctgcggatggagcccctaagaccccaagcggcccagactacgtttcccagaggcctccgcggcctcagccacttccgcttccggtccagcctgtctccgcgtggtgcgagcgctgcaccagcccctggctggtggttactgtccgaacggcgtggtgtggtcgctgactctctgggcgtgcagctccgcagccctgccggctcggttcggttcgtgagcggccggggtcaggctgggtccctgaagcctcgagcccctggcgggtgctc

SEQ ID NO: 4920 - DNA, 2300 bp, Homo sapien
ctaaaaaaaaattgcaaaattcttataatgttttaagaaagtttatgcatttgtgttgggctgcaggttggacaagcttgctttatagcaacacaggatggacaaatacaggggagaatgtgaagaaactggagccttcatacattgttggtggaaatgtaaaatgccattttgacaacagttttccagtttcttaaaatgctaaatacagttttaccatatgacccagtgattctactctgaggtatacccaagaaaattaaaatatatgtccacataaaaacttatatgtaaatattcatagcatcatttttctttctttctttcttttttttttgagatggagtcttgctgtgtcactcaggctggagtgcagtggcgcgatctcggctcactgtaacctctgcccccaggttcaagcgattctcctgcctcagcctccggagtagctgggattacaaacatgcactatcatgcctggctaatttttgtatttttatttgagacagagtttcatcattttggccagactggtcttgaactcctgacctcaggtgatcgacctgcctcggcctcccaaagtgctaggattacaggcgtgacccaccgcatccagccgtcatttttcaaaatagccaaaaactggaaacaaccaaaatgtccatcaacttatgattggataaacaatatctgctatattcacacaatgaaatattactcaacaataaaaggaataaagtactgatacatgttactatatggatggacctcaaaaacattatactaaatgaaataagccatatattgtataattccttttatatgaaatgtccagaaaaggcaagtctatagaaacagatattagatttatggtcccgtggagcagagggtagcaatgagggatgattgcaaatggaaatgaagtttgttaatggtgtagtgcaaatgttctaatgatagattgcaatgttagttgttcagctttgcacattttctaaaaataattgaattgtacacctaaaataagtgagtgttattgtatgtgaattatgccttgataaaactgtttttaaaaataatagcaagatatgggagttgagggtgtttgcaagcaggtgattgattcaaagagggaccatataatgtaagctggtaaggaaggttgaagagtagtgggagagtagcaggatccatgaattattgatgcagctgacaatttattggctttagttcactagaggaagtgagatgcaaagacaggagttgataatcagaaaatgagatgattaaaattgagaccattgttggattaataatgcagaagttacaaatatgatcatggatggaggtgagtggctctggtcttctggagaggaagttcattggaagtaaggaggaaaagtgatgagtcatttataagcactccaagtgtgatgacagtagagctggagtgagtgataatgatacaggaactaaaatcttcaaggggtgacccaggtgatagatgattgctgcaaagaggaataatgtgtacaatggctttaaggcaagagactcaacgttggagttaagagggagggagagagtattgccttgaagcaagcagagacagggtcacaacaggctatagtcaggattatatgagatgtttgtataggcaaaaccccaagaaacttcctgaaaggttacggtaatagtaaaacaagtttttccatcacatctgtagcttgtgttgaatgagatgtattgattacagtcgccatctcggactatggcaaagctagggaggttagtggcctgaaaacataaaaggagtataatcagtaaaatcaagaaaaactaggcaggctggccagaattactgggaagagatagaaattagaaaacaagcagaattgtagagtgatttgcattctttaatcaaaggaatgaggctctctaagagtaaggtgagattcagcactgcagaaacacaagtcttggtcatggctggattgtacattctgttgtcactaagtccctgaccctatggcaacgacatcataatgaccccaaatgcaagtaaagtaaacaaaatcagggcagggctacaggtgatctggtgaactggacttggtggatggtgtggaagggactttgggagagacctgtgcccatgataaaagggaagatgaagatgttcctttgagtttgcatgtgtggggcctttttggcatggttgacttgtctgtactccttcctgtgacttgacatcaaaattaggtaagaaatcatgtatttattcatccttgttgactttt

SEQ ID NO: 4921 - DNA, 2300 bp, Homo sapien
tttccagaccgccaagtgtacccctcttctcatccgccctccagaggacgccggattttagatcttaagtctggtggtctcgtctgatactcctcttgtttggttctttccttctcattgtcctacctgataggacagtgttagtaacctgtttaataagtggggaagcagagtcagggctgctgggttactcgcccaagatcatatcctgggggagccacggcaagaagccaagactcacggactacttctaagctttttccaaaggatatagtagcctttctaataggaaaatcaatgtttttaattataaagccacttttacaaaatcttggggaaactgcttcctcagacctgtgatctagggagaaaaatatgacaatttctcccttactaatcacggaggtccctgataggcggcggagttgtaacttgaagacctcacagcaggtggagaggcagagctgtgaattctactctaatttctggaatccccggcgacagagtccaaccccaggcagcaggcgccatgtaccccagggacttttaatgtgtgtgcagctgttgagcaagaataccttgaacttccaaatgatgtgctggcatgctggtagggaattcctttgcagcttgtgttccaagttggaagtgagtcctccaaataaaaatttaaatgattctcctggtcatcacagcatgtagcagaatgtgcagttgtcaagaagaaccaggtgcttaggttgacaaaacaaagaatggtagcatcatactattatttcattaaatcagaaggccagcattttgataggacaaattagagggaaacaaggagtatgcattgaaccactgcatttcttaaaagtataagaattcagtaattaggatcctgaagtaagaagaaatattttttttaaaaaatagatcatgtgggccaggtgtagtagctcatgcctacatgtcttgggaggccgaggcaggagggtcacttcaggccaagagttggagaccagcctgggcaggataatgagacccgatctctacaaaaaaaagttaaaataatttttaaaaattagccaggcttggtggtgcttacctgtagtcctagttatttgggaggctgaagtgggaggatccgttgagtccaggagttcaaagtcacagcaagctgtaattgagtcactgtactccagcctgggcaacagagcaaaatcttgactcagaattttaaaaaaattaaaaaataatttagagcacatacaagaggattcctaggatctgaaagagcacttcaatctggtcaaactctcttcctttctgttcaattttataagcattctgaccagctctttagtgattaggaactagacaactgtctaatgtaagagcatacattttggatccagaaagtcttggatttgaacctttgctccactttgactccttattttctgtgggtttctgggcaagttacttaacctagttggagtgccttgggcttggagtccagagtaggtctttcttttccaagaattgacaagtgtttacacttggtcagaactggtattcttgtatcttcaagagcaagagaaaggcgagtctgggtctggagcctcctaagaattgttcagtggtaacaaatggactctcttgttaagtctttgtaactacagataactggagagctgattggctccaaccaatcatgaaggctgaaatgttgttttcttagattctgaattcctctggggcttggagggaagaaagtagtaggtggttaggtggggaaccaaaatggaagatcccaattacatgccaagaccaaagtgtaaacaggagtgactattaacttgggattggcaggaagagatatatgtttatgtgttctctgctttcccacatcctgcttcctcctagactcatttgtgtgtggtcctggtacctttgggcccattttgcagtgatattttagtaactgacattatgtcaaacaatctaggtttcttacattcacttatgtctcaacaactgttgactttttccttctcacatatcaattattctgccctttcctgtttgtttctgtttgtttttctccctcaggtgctcaggaacagcccatggaagaatcatatgaagaggtggtgactgaggtcgtaagcaggagtggacatgtttggatttccaacagctaccctgctggactgtcatggaagatatgcccagaatgtagcgttcttcagtgagtgagtcagttgatggctggatgcgctcagctcacagatattcagtgtccctgttct

SEQ ID NO: 4922 - DNA, 2300 bp, Homo sapien
tctgtgtttcccattttacattaatccatctggaggttctcttggcatgggagttaggtaaacattcaactccccgaccccaccaatgtctagcccttgtcataacaccatttattgaattatctgtccttcccctaatattttgaaatgcctgcaaagtgaggaaattgttctttggtaatttttcaaatctacactgcggatgatttccctttcaccctcaccccacaccctcccttttgttgagtatttgccttaagatgcaggtggtgggtgaggatgtgccccattttgcagctgggcagtctgtctatggaggctggggtcacatcaaccccaatcctaacagctttctcccctgctttgggcccttcaatgtgtccactttcctgagacgccttaagggaatttatgcagatctataaaagtgacgatggtcccccctcacagccaccttttcccaccaatgctttgtcatgtaccttcacggcaggatctgaaacttgtcctagtgtccacagccggtcttgaccttaacagaacctatgtacccttgtgtgaagcagaggccgcagccttaggactctgagccttggcctttgctgtgtgccgccctccacccctttctcagacttgggaggagtgaggagaggagccacctggggcagttcaggaatggggagcttcaggacagtttgcaccacacactctgggacttagctgtgcaacaccccgacccccatgtgaggaaggtggtgtttgtttgctccaccagactgtcagctcctccctaggagcacggagtgtgtcttgctcacattcgtatccccagtgtcagcacttaaaatggattcaacggataaatgttgaatgaaattcagaaatgatgtgcaatagtaaaagctaacatttaggaatcaacttattacttacagacacctttgcatattgagtgaaattaagttgtttgatttaacaaatctgtggctttggggtagagaacaagaacatagcaagaggaagcattctttattagtccttcacgaaagaggatggacagacacatctacggagaggggctccagaggcagggacccagagatacacccggccaggcagaacagctccaggatgtggccccgatcctggaaaagtgcgtttaaaagaggcttaaggcatatcagacagcctggccaacatggtaaaaccttcatctctactaaaaatacaaaaaaattagccaggcatggtggcacagacctgtagtcccagctacttgggaggctggggcaggagaatcacttgagcccagaaggcggaggttgcagtgaggcgacaccgtgccactgcactcaagcctgggagacagagtgaaggaaaaaaaaaaacaggcattattagagaggctttatctcctacgtgttcaaaagcaaccatgctcctcccagtatctcaggacgactggactgcctgtgttcctgttgctcttcacagaagctccatgaaagcgggcttcgcttttgttcatgcagccagaggctcaacacatgacctcgaagccgccaaggctttatcaaacggatttctcccaaaaacttcgtttccttccgcgacgccctgcaagaaccctgtattcctgagtccctggctcagcgtctgctaccccgatgctgtcaatcagatcctgctaatctgagcggccgtggctccgtcccggctccgcgtccgctgacaggtcaccgctgtgagtctccggattaccagtccaaacgggacggcttgaggtccccgcgccctagggacctgcggggcccgagcgcagggcgcgccagagaactacatttcccacagagctcttgggaagccggggccgccgagacccacggcccggcgggcgggctcgcggggagactcctgggagttgtagtccattccgccggcgccggcgctggcgctgctgcgggctcggcgccggcctttgtctgcgggcacgcgccgctgcggtgagtgaggccgctggccgggtcagagcgccggggcaaggcggggctgcgccatcagaccgctgtcccgggccctccgtgtggccgccttatgccagcggccgccaaggaaatgagcaggcctggccggcccgggccccgagggaggccagccgcgagcggagaggtcggcggtccgcagagcagggtcccgtggaccggagagcgggatgccgaggttcaggacgcagggcgggcccggtgcccggggcccggggcctgaggcgggagggcagcgtctgcggagaggagcagggc

SEQ ID NO: 4923 - DNA, 2300 bp, Homo sapien
ttggttaagaaagccttccctggcagagcttgcagtgagccgagatagcgccactgcactccagcctgggcgactgagtgagactccatctcaaaaaaaaaacaaaaatgaaagccttccctatgacaagattataagaagattaatccatgtgttcttctgggcctttgtggctctgtgtttcccattttacattaatccatctggaggttctcttggcatgggagttaggtaaacattcaactccccgaccccaccaatgtctagcccttgtcataacaccatttattgaattatctgtccttcccctaatattttgaaatgcctgcaaagtgaggaaattgttctttggtaatttttcaaatctacactgcggatgatttccctttcaccctcaccccacaccctcccttttgttgagtatttgccttaagatgcaggtggtgggtgaggatgtgccccattttgcagctgggcagtctgtctatggaggctggggtcacatcaaccccaatcctaacagctttctcccctgctttgggcccttcaatgtgtccactttcctgagacgccttaagggaatttatgcagatctataaaagtgacgatggtcccccctcacagccaccttttcccaccaatgctttgtcatgtaccttcacggcaggatctgaaacttgtcctagtgtccacagccggtcttgaccttaacagaacctatgtacccttgtgtgaagcagaggccgcagccttaggactctgagccttggcctttgctgtgtgccgccctccacccctttctcagacttgggaggagtgaggagaggagccacctggggcagttcaggaatggggagcttcaggacagtttgcaccacacactctgggacttagctgtgcaacaccccgacccccatgtgaggaaggtggtgtttgtttgctccaccagactgtcagctcctccctaggagcacggagtgtgtcttgctcacattcgtatccccagtgtcagcacttaaaatggattcaacggataaatgttgaatgaaattcagaaatgatgtgcaatagtaaaagctaacatttaggaatcaacttattacttacagacacctttgcatattgagtgaaattaagttgtttgatttaacaaatctgtggctttggggtagagaacaagaacatagcaagaggaagcattctttattagtccttcacgaaagaggatggacagacacatctacggagaggggctccagaggcagggacccagagatacacccggccaggcagaacagctccaggatgtggccccgatcctggaaaagtgcgtttaaaagaggcttaaggcatatcagacagcctggccaacatggtaaaaccttcatctctactaaaaatacaaaaaaattagccaggcatggtggcacagacctgtagtcccagctacttgggaggctggggcaggagaatcacttgagcccagaaggcggaggttgcagtgaggcgacaccgtgccactgcactcaagcctgggagacagagtgaaggaaaaaaaaaaacaggcattattagagaggctttatctcctacgtgttcaaaagcaaccatgctcctcccagtatctcaggacgactggactgcctgtgttcctgttgctcttcacagaagctccatgaaagcgggcttcgcttttgttcatgcagccagaggctcaacacatgacctcgaagccgccaaggctttatcaaacggatttctcccaaaaacttcgtttccttccgcgacgccctgcaagaaccctgtattcctgagtccctggctcagcgtctgctaccccgatgctgtcaatcagatcctgctaatctgagcggccgtggctccgtcccggctccgcgtccgctgacaggtcaccgctgtgagtctccggattaccagtccaaacgggacggcttgaggtccccgcgccctagggacctgcggggcccgagcgcagggcgcgccagagaactacatttcccacagagctcttgggaagccggggccgccgagacccacggcccggcgggcgggctcgcggggagactcctgggagttgtagtccattccgccggcgccggcgctggcgctgctgcgggctcggcgccggcctttgtctgcgggcacgcgccgctgcggtgagtgaggccgctggccgggtcagagcgccggggcaaggcggggctgcgccatcagaccgctgtcccgggccctccgtgtggccgccttatgccagcggccgccaaggaaatgagcaggcc

SEQ ID NO: 4924 - DNA, 2300 bp, Homo sapien
tgaatgaaacgttgggggataggatggacagcatgctcacttactgactgcacgtataataacaaggtgattgtgttctgagtggtccttcctggattgatctgtgctgtcagaagtcaggacaggggctagccctggaagatgtgggggccagacacacagaagccttctgtggcatgagtcacatgtgtctcaagctggatgctgggggctgggcctgtggtaggggaagcttctataatgtaaatctggagtcctacagtcacagcatctttgggtaattgagacaagggctgatgcaatcagtagaatattagaatgtgtcactgagttaatggacacagtgtgcctggaatgcacatcaccctaaacccggggatagatccactgccgtgggggtggaatctgttagaactctccaagctccatggggctcgaacttcagtgccaaagcgggatgggtttgtggcttcagctctctgggacacagctgccagcctctccttgtccagctggcttcttgaaggttgggatcggaggctcatccatgcacaagagcttctggacacagattctttggctccagtctttggttcaaacaaaaggcattttcgtaagcctctgtcttcttgccctgctttgagcaagttcagttcaaattctgagttgcttttggctctggccaaattctgctgttcttggaggtttgctttgtttctttttgatgctctacaagtcaaaaattgcaacatacaccaaggagaaaacatgtggcgaagacaatgaaaaacagatccgggcctgccaaagaaagaggtggaaagacagaacctgtcagttccatacatcgtgcagttctgggtgctccactccagagcaaatgtgctggcctgtggatggaattcttcctgagtgagccctgctttttagatctgggttcaataaagataattctcttcatccagtgtaatcttcaagtgttccatgacttttttccctcaagatctttcacctacttcttataaaagcaactgaatgttgatttaggtttgggctggcaataatgatgaaaagttggtgacttggggctctatgttcaaaaaccatctgcatctcaccattgcgaggtggacttgtgaattccttttttagtcataaaaaactcacagaattccatgaagggaaggagccaaggggcccacctctcacagaggctgctgtaccaggcgggtagatgatgacattctcgagggtttgcaagtgctgccagtctgtgaggctgaagggtgtccacaggaggagggggccctgtgtctgcaggcttgtagtctccagtgaagcaactcagggagatcctgctccacatcagaacaaaggctagaaacaggaatttctgactctgaaaatccggattataattatagtggagtgattgagaataccaagaagtgattgattctcaggaggtggaggatacactttcacagttaatacagcatgacaaaacaaagcaaaacaaaaactaacaaccttgccctgtggggtagaaacaacagaattatccttcctaacatccttaattttaaattatatatccacatgtatacatattagcccatttttttttctccagaagattgttagttccctgagggtgaggcctctttttcttttccccccacttctgttttccagccattagtacagttcctggaagattgtatcttgacaatttatgtagtcatttatttatttgagtactatttattgaaggccttctatccagtgaacactgttcggaagaatatcacagtgaacagaagggacaagaattccttcctcccaaggcttacatttgaaaggcatgggaaaaacaaaacaaaaaaagaaaccaaataactagaagggattgtggtgtaaaacctaaatcataaccaagggaggggcatgcaggtcacattttagttggcatggtggttacttagtctctgaggtcattaagtggcctgtggtctgaggcaggtgcaacgtgagaaatccagagaatcatgagggggtagggcaggcttagaaaagggagaatctgctgccagagaggccagatgccatgagtccaaaggaatcatcccgcccccagcagacaagcgtggagccagcctgctcctctggccaaagcattccacccccggacctctcctccaggtacttcctgtccagacgggcagtggccccagagcctgggaaacctgccccacaggtgagggcaaggggtgtgtctgaagtgggtgagaggctggtat

SEQ ID NO: 4925 - DNA, 2300 bp, Homo sapien
cccttcagaacccactacagaaatgaacagtgggggactccagttctcaccctggagccaagatggcaaggtgacagcatgtcataacagctgttcagagctaggactcagggatcaagctgagctgcacaccaactggggtgctgtgggcgagcaatcccttattatatctaaggcagataagagaaggagttaacccctaaggatcttgtaaggattaaattagttaatgtagggaaaggtgttagttaaattcctggtccatagtatctattttattttaattcctaagaaaatatagtatctctgtgtctgcttcatcgaccagactgtattgcagatggtttaagaccaggcagcaaatttgaggtggagtcatggttatcagaatggctgcccagaccacaaagctgatttatctcaatcataacagcagcaaattcctgttattgtagtgaatcacagcatgtaagcgcacagatgcaggcgccggggttcagagggctgggttgtgtggggagggtaacgaaaaacagacacttgcagggccctaacaatgtgtgtagcaactgaacctgcagcctgcttacacaaaacaggccttaatgaaactcagtttcaaaatggaatatttttcctaaatgataaggtattgcatatggttcttttcccattgtgtagtaattccttctaaagcaaacattttaaagattttaactgaggttggaaaactaaaacttgcctcagtataaaaatgtcgaagccatctgctagaaaatcacagctctgcgatataaaacacccagagctgtgttgctcaaactaatttaatcacaaaataccatttccttgatccgaagggaaacatttctacttggccactagagctttctggagaaaggcacttatatttgcagtaaggtatattagtaattttgaatttcaaagagaaaacagagcagggattttggaaaacatatgttgaaagggtaatttcaattctttgcagatgagaaaagtttttgttaaaacaactgacagacactgagaaacatggccatcagtttgaaggaaagtaattgagttgtgcagtttgcattttattttgcacacgtttaacaattaaaagcttttctgtactatgagaacaaaaccccccaaacaccaatgcaatggcagaaagttgggagtcaaatcaggcagcacacacacgaacactgtgttcacatgatgaggaccacatttttgagacattttctgaaaagaacctgtatatgtgtgtgtgtgtatgtatatattcttttttcctgccagaatctcttgttgaatgatcatcaagttagttctggaaaataggttccaatattgctccattcattggcataggttgactttatcttattccaatttaattggcagctgttttcttagatagttttgcataaaatggtgctcagagaacaagtagagttttaaacatgacacagtcgtgtatttgaggatgtttatgttatatatgtgcttgttaatttagtagttatgagtttaataataactttgagctctttagacatggatcctcatatatattaacaaaatcagctgtgtgccttaaccaacagtgagcatattttttaaaatgggcctctgaattgaaaatttaaaaaaacccttcagcatcctattaggattgattaacccacaggagggtaatcctggtaagcaaacgtaaccaagattctccttccccagtgattccaagtgcagcctggctctcctggtcaggtgcttcctttactcaatatttcctgatctgttcctagatcctaataccaccctctgcgtcaacctgtgaatgcatcctcactaccagggctcaggacttggagccgggattttgctgacatggtcttttctctggttgtcaccttccatttcttctttggtttgcctttcattttaatgccagattttctaagtgtaagaaaggagggtggagagtgggcagaagtcattgtttccatcatgaaagtcaacatcagtatttcctgtcctggggacaaaccagtgcctcatgtttctggaaacgctgcagcatttaacttcaattttaatctggataacgccaaagcttttcctcaaattcacccctggagtcagctcatagatgctctgattttgtctaccattgctcctccttaatatctctcgcacaggtgccattgacctttagatgggctgtacggtgtggggttcggtgccatggatctgcttctccagggaccaggatcttgagatct

SEQ ID NO: 4926 - DNA, 2300 bp, Homo sapien
aaaccaacagagagcaagggaggaggatgaattaaacctgcataaatacaatgacaagtaaaaaagaagaaataaagaaagaaaaggtacaataaattcaagacgaaagatagaatgacaaaataggcccaaatatataaacatttacaataaagttagtgattgtttctagagaaaaacaactttttccaaattagattttaaaatctaattatattacatttacaagatgacctaaacctaaagcctagaatgaaagagaagtatatttacatcaaaattattaataaataaagcaatactcatattaggcacaatatatttttaagcctgaaagcaaggaataaaaaggataattactcaaaagaaaaagaaaatattgattaggaaggcaaaatagtaaaataatgtgtattatttctccaaaccaaaaaacatagcatcaaataggtaaaatggaatctgatcaaatttggccaaattcgcacagggattgataaacctgtaatacgctgggagatcctcatggacctctgtcataattgttgagctaaattaactgaataagtttaatctaatagctatacagagagagtgctgcatcaaaccaggaaacagtcacgattttcgaccacttggaaaatgtataatgatagaactctctgcaaataccaatgcatcattatcatatagaccatattttctgaccacaatggaataaaattagatatcaataggtagaaggcaaaaaagccctaaacaaacatcaaaacaacaacaaaacatagcaaactaaaaagactcctttaaaaattttatgggtccaaataagttattatgaatattaccaaagatttagaattttgtagtaatataagtattgcctatcaaaagccatggagtagagctagagccatacttaggggaataccagtagctttaagtgtatatattgttatttaaaaaagttaacacaagaaaaatggaataatcccaaaataagaaaaaaataaataattaaaagaaaacgttaatgaagttgtgtgtattacacacacaattacacacacaccacatatacatttaaatcaaaagctaggttttgaaaagataggttgtagaatggtacattctaccaacaagcttaatgaagcaaggagagaaagcacagatcaccaatattagaaggagagaaggaggaggagtgttgaggttggaacaggctggggaaggtcagattttgattaacttgtacagtgtgtcaaagatttggggcttcatttcagagcagtgggaaacctcgaaagtttttaagtagatagtaaatatatggatgggggaggggatggtggattgggaaggagtgagttggactaggtaggagacaccagttacagagaggactgcagaagcccaagcaaaaaatgatggcggtattcataagggaagaagcagacaaaatgaagacctaggagactcaacagagatgtggattgtagagcaaatgggattcagtgtttgagagtgcatcagttaggtctaatcaggagacagaagccacgcaataatttggactgaaaaattttaacataaagaattcttgctgggcgtgatggctcatgcctgtaatcccagcacttcgggaggccaaggcgggtggatcacctgagatcaggaatttgacacctgcctagtcagtatggtgaaaccccgactctactaaaaacacaaaaaattagccggtatggtggcgtgcacttgtaatgccagctactcaggaggctgaagcatgagaatccccgaacctggaaggcggaggttgcagtgagccgagatggtgccgttgcactgcagcctgggtgacaaaagtgaaactccatctcaaaaacaaaacaattcttaactgtaatgtgggagtaactataaaggacaaaaactaactttaaagaatactctggggatgaggaaaaatacccaaggaggatggaaacttggagggcccctcaccaaggctgggattctgacccggtcggagagggtgtggctactgcccattacacgtcacaaaggaggtggccaggcgttgctgggctgcccaacactatgaactgcacaaagatggcgctccccataagtgaggctgggcagagccccgctgtgcacccccatctccacctccgcatgtcatttctgaagcctcgccactcagtagtaggaggaataggccagtaccagcaagagagcccctttctgctgctgcatccctccagtgtcctctattgacagttgaacctggtggc

SEQ ID NO: 4927 - DNA, 2300 bp, Homo sapien
tgtagcccaggtctagcacatagtgggtgctcagtaagtatttaacgaacgactagcggaagggatggccccatgggtgccacagtagcttctgttctggggcctcagggcgcctgcgggaggggcagcggccaggcctgaatccctggttcgccctcgactcagcccacgcgggcctttcaggcttctgggacagatcctaggtccagctgcccacctgattttgtggcaaagaaaaaaagaagaagaagaagcgagaggcgatggcgtttgctttggccagatttaagggcaagcgaggctgcgcgcggctcccgcagggtcggatctccgagctccagggcgcccctccacccgggtgtagatttcccgcggaccccttcgccctcccgggtttcatcagctgcgcaggaatggagctggccagagctctgggagcggggagggaggcgccgccaccagagggcgccggagccccagcgctgcggccggtgagcggccaggctccccggcccagcccagcaaaggcctggggacgcccgacggctgccttcttcactggacctcactgccttcagttctttaagagcagggccaagtcagtggggttcccggctccaagcccagtgcccagggtgggtgggtgggtgggtgggtgggtggatggatggatggatggatggatggagtgccggcccacagccatctaacggccaaagtggttttggaaaaaaaatgcacagaagacacctactcccaccagcggagttccggagccctcgcagcctcctgttgaccgctcccgcctaatgcagccgctgaccgcccactccccgacggccaggactccccagggacagggacgtgtccccagggcaggcccctggatggacgcggcgactgaccccacttcgctggacgctgtgctgggaaggacacagagaggtggctggggcagcctgcggtcacaaagcgaggcccaaaggggcgctctcctcacccccacgtctcctgggtgccgacctgcaccctcccttcgccaccggactggggccatctgggatgtctcgggggtatccggagggctaagcaccgccgagggacggctccgtgggaagagttttctggacccagaaggcagacgccagtagtactgtcctaggagtcggaggtcggggtgggggagttctcagctctttgggtcgcacggagcttttcttgggtaaggcagtaagtacttaggtttaaaggacttacttacagctaccatttattgagtactgtctgcttgtcagacacgatgcagagaatttcgcggcgtggggcgggtctcattgaatctcccgtcccactccgcggggtgggcctgtgattagctcatttcaccattgagaggtcggaagtacaaaggctacattcgcttttactgagagccgccggcgccttctgctttgtttgtacaggcgaggaaactgaggctcggctggtggcgccgtgggcttggagtccgagccacgctgactgcaaagacgggtctcattcccgcagatcgagctctgccggcggctgcgccgcaagccgggcaggtggcgagcttgagcccccacgcacagaaagcaggaccccctcggctgccttgggccgccaccgccagcaggccctccgcccgggactaacttgtttgcttttcattggttctcattcagttcccgccatcgaaaggccccgtcccgcagctttccacgcgcgccccactttacgcctaaggtcctcagtctctccagtggggccctgtcacagggacaataagcggccctccagccggcgtcgctcaggctgcggacctcactgcagaccgggccagcggtgcggggcccagcggagcctgagaaggtcaaaggccggagcgcactgcgcctcgggagcacagagggagcggaggaggggcgaaggggatgggtggggggtgccgccgagggagtcgcgcgtcagagaccccggccacggccagcactcggctccgggcccgcccctcaccgcgcgccccgccccgccccgcctggctctcccctctaaagcgcccggcgcgcgcctcccaccgccgcactttcactctccgtcagccgcattgcccgctcggcgtccggcccccgacccgcgctcgtccgcccgcccgcccgcccgcccgcgccatgaacgccaaggtcgtggtcgtgctggtcctcgtgctgaccgcgctctgcctcagcgacggtaagtgcgctcggcggggaggccctggcgaggctctgggcttcggc

SEQ ID NO: 4928 - DNA, 2300 bp, Homo sapien
gggattgcggtgggagggtgtcaagtaatacaaaaaatattcttcatgtagaaaaggttttcaaatttcagatctatttgtattgctgtcaaaatttttgctatgtctccagccacctagactagcacttgctatgttagcttcaattgacttactttttaaaacttgaaccatatattaaaaaaaaaacctgagcaatatctgaaatatctgcctttactgtgctagttatattttttcttattactttaaaaaaataaatacataaatctatattttatagatttcagagtaccacctgaagtcaccttgtcaattacacactgtacaacatggatttagtgtaaaccttcaatccctactgggaaccctcttgcaggcccagccgttgggccctggaggagtgaacggcccaggccaggcagaggggggtaggcagatgctgcctaggggtctagagaccatagcacacatgccagctcaggagatgccctgcctttaactcagcagccagacccctgcctcccaccttgaactgtgcttaacaaggcatccctgaggagccgctgtgccctgcattacctggtagagcggcacagagtctgaagacttcaggagaaggtggggctctatggggagtaagagtccccaggcagagaaagaaaggtggagccttttgagcataagcataagcaaaggacacagggaaaggggtggggaacttcgctgacccgaatttgagaggtacccctgtggccgagtgagctggagacatgtcaaaatggcctggtctgatggccgcctgcctgtgcaggcggtgcggaggcccccagagtgtacagggttttattttattttatttacatatttacatatttatttatttatttacatatttgtttatttatttatttttgagacggagtctcgctttgtcacccaggctggagtgcagtggcgccatctcggctcactgcaagctccgcctcccgggttcacgccattttcctgcctcagcctcccgagtagctgggactacaggcgcccgccaccacggccggctaatttttttgtatttttagtagagacggggtttcaccgtgttagccaggatggtctcgaactcctgacctcgtgatccgcccgcctcggccttccaaagtgctgggattacaggcatgagccaccgtgcccggccagggttttaaatttcaatcgccaattgtaaaattgtgaggcttgtacctaaaatatggatccttggccaccctatttaaaatcctaactcccaccccactttcctctgctccatcttcccctagcatttaatggccttctaagtattttatgcgtaattacttatgcttagcgccatgtgcttctaaacgtttagtgccttttctaaactacttcaaacatgtagcccaggtctagcacatagtgggtgctcagtaagtatttaacgaacgactagcggaagggatggccccatgggtgccacagtagcttctgttctggggcctcagggcgcctgcgggaggggcagcggccaggcctgaatccctggttcgccctcgactcagcccacgcgggcctttcaggcttctgggacagatcctaggtccagctgcccacctgattttgtggcaaagaaaaaaagaagaagaagaagcgagaggcgatggcgtttgctttggccagatttaagggcaagcgaggctgcgcgcggctcccgcagggtcggatctccgagctccagggcgcccctccacccgggtgtagatttcccgcggaccccttcgccctcccgggtttcatcagctgcgcaggaatggagctggccagagctctgggagcggggagggaggcgccgccaccagagggcgccggagccccagcgctgcggccggtgagcggccaggctccccggcccagcccagcaaaggcctggggacgcccgacggctgccttcttcactggacctcactgccttcagttctttaagagcagggccaagtcagtggggttcccggctccaagcccagtgcccagggtgggtgggtgggtgggtgggtgggtggatggatggatggatggatggatggagtgccggcccacagccatctaacggccaaagtggttttggaaaaaaaatgcacagaagacacctactcccaccagcggagttccggagccctcgcagcctcctgttgaccgctcccgcctaatgcagccgctgaccgcccactccccgacggccaggactccccagggacagggacgtgtccccagggcaggcc

SEQ ID NO: 4929 - DNA, 2300 bp, Homo sapien
tcatgatttggctctctgtttgtctgttaattgtgtataggaatgcttgtgatttctgcacattgattttgtgtcctgagactttgctgaagttgcttatcagcttaaggagattttgggctgagatgatggggtttcctaatatacaatcatgtcttctgcaaacagggacaatttgacctcctcatttcctaattgaataccctttctttctttctcttgcctgacttccctggccagaacttccaacactatattgaataggaatggttagagagggcatccctgtcttgtgccagttttcaaagggaatgcttccagttttggccccctcagtatgatattggctgtgggtttgtcataaatagctctcattcttttgagatacgttccatcaataatgagtttattgagagtttttagcatgaagggctattgaattttgtcaaaggccttttctgcatctattgaaataaccatgtggtttttgtcattggttctgtttacgcgatggattatgtttattgatttgcatatgttgaaccagccttgcatcccagggatgaagccgacttgatcatggtggataagctttttcatgtgctgctggatttggtttgcgagtattttattgaggattttcacatcgatgttcatcaaggatattggtctaaaattctcttttttgttgttgtgtctctgccagactttggtatcaggatgatgttggcctcataaaatgagttagggaggattctctctttttctattgattggaatagtttcagaaggaattgtaccagctcctctttgtacctctggtagaatttggctgtgaatccatctggtcctggactttttttggttggtaagctattaattattgtctcaatttcagagtctgttattggtctattcagagattcaacttcttcctggtttagtcttgggagggtgtatgtgtccaggaatttatccctttcttctagattttctagtttatttgcttagaggtgtttatagtattctctgatggtagtctgtattcctgtgggattggtggtgatatcccctttatcactttttattgcatcagtttgattcttctttcttttcttctttattagtttttctagtggtctatttgtggatcttttcaaaaaaacagctcctagattcattgattttttaaagggttttttgtgtctctgtccctttcagttctgctctgatcttagttatttcttgccttctgctagcctttgaatttgtttgctcttgctactctggctgttttaattgtgatgttagggtgtcgattttagatctttcctgctttctcttgtgggcatttagtgctataaatttccctctacacactgctttaaatgtgtcccagagattctgggatgttgtgtcttcgttctcattgctttcaaggaacatctttatttctaccttcatttcattatttacccagtagtcattcaggagcaagttgttcagttttcatgtagttatgtggttttgagtgagtatcttaatcctgagttctaatttgattgcactgtggtctgacagacagtctgttgtgatttctgttcttttacatttgctgaggagtgttttatttccaattatgtggtaaattttagaataaatgtgatgtggggctgagaagaatgtgtattctgttgatttgggttggagagttccgtagatgtctattagatctgcttgttgcagagctgagttcaggtcatggatatccttgttaaacttctgtctcattgatctgtctaatattgacagtgggatgttaaagtctcccattattattgactgggaatataaatctctttgtaggtctctatggacttgctttatgaatctgtgtgctcctgtattgggtgcgtatatattcaggatagttagctcttcttgttgaattgatccctttaccattatgtaatggccttctttgtctcttttgatctttgttggttgaaagtctgttttagggaggacacagagctgcgccgcccgcaccacagaccttcgcctcgccccgccggttcctcaccctcggggagcaacatggataatctcagtgataccttgaagaagctgaagataacagctgttgacaagaccgaggatagtttagaaggatgcttggattgtctgcttcaagccctggctcaaaataaatgattcagtgtagggggaggagctaagatggccgaataggaacagctccggtctacagctcccagcgtgagccacgcagaagacgggtg

SEQ ID NO: 4930 - DNA, 2300 bp, Homo sapien
atccaaagggagggagtgcagctggtcctctccctcttgttaaaagcaagagaggctttcccagaagctcctcagcacacaccctgtctgggctatttgaccagaactgggtcacaccctctcattcctaaagtagtctctgggaaagggagacagtagactaacctgtggactgaacagtccctgccaagccaggcccggaaggaattcgtatcttctgagcaggtgaccatcagatacaaaaaaaaataagtggctgttggccagcaagaagcaagtgagcactgtgggccagccagagcttcccgacccatgcaaatcaagggttcctaaaggacagggagctgccatcgctgctgaagcccagcccccgcagctccatctgtgcaattcagcatatgccacagagaccggaacacctgcatttgggggagtgggtgtgtgtggtgtcaagatatgtcaaagtttaagaagattgaagttgatagtctgctaatagaaaacaactaacccaggaaataaatatgtaaatcatacactcataaacttgatcttgaagatcacacgagcacagaagttcctaaactcattcaaggcggaaaaatacaaaaaacggtaatctttatggaatgccatgattcttgatcaaattaatcaatcaaattaaaataattttaatagcaaaaaatatctattcattatatatgttgagggtgtatcatcctcaagcaagaaacatgcaagccaggcatggtgcacacctgtggtcccggctactcaggaggctgaggtggaaggatcgcctgagcctgggaggttgaggccacaaagattgtgccactgcactccatcctgggcaacagacaagaccttgtctcaaaaaaaaaaaaaaaaagaaaagaggaaagaaaggaaggggaaggggaaggagaaggggagggaggggaggggaagggaggggagggaagggccaaactaattgttcttgagttttccgttattattggcagaccttggctttccatggttcaacttaggatggtgtgaaaatgatgtacattcagtagaaattgtactttaaattttggattttgatgttttcctgggctagcaacatgccctacaatatattcttacatgagctactccacactttataacataaaccttgtgttagatgattttgcccaaccataaactaagtgttctgagcacatttaagtaggccaggctaagctctgatgttcagtaggttggttggattaagtgcatttttaacttaaaatattttcaatgtctgatgggttttttgggacataaccccatcataagttgaggagcatgtgtattgggtttgcttggagtttttttccttatttggttgttttgttttctatcttatatgagcaaaggggtaaaagatttcagaaaaacacctgagagataaatcttaataccattcaatctagcacatccgttagtaaattaagaatgagggaaagcccaccactgtccaagtgtaaaggctgggctccttgaaacagctacagggacactccaagtacatcaaaaacaccaattcagccaaaacttcacatttattttctgcaaaagttaccaaggctcacagatgcctttgggtttccccaaggtcacccggttaattattgacatagcaactcccctcgcaaaacaaagaatcaaaatgatttcccacgtcccatgttgggatgcatgttaatgaggaaggaaggcctctgcgtggcggggcctgagctaagtatgtctagtcagagtccaaatccgggacagatttgaaaagctttctaatccacctatacgcagaagaataaagcttggaactcatttcaaaagttgtttctactggtgatttaaagacacactcctctctcccatatgcacataagcacagacctgcaagagcactgtcccctccagagccagacactacaggcccccagcaagtgtgaaatccaggtgtgactttctaggcatggcttggtgaggaagggcctggcccactccttggctccctcctcccagccagaaacggttaattgccagctccagactgcctccagcccagccctaatcgccgatctcaggcggctgggctgcgctggggctgagcggctccagcccaggctggggttgtgtgagcagcaggagcattcttccaaggtaatgattaagctgagtgcctggcaagggcacgggctgagagcacagaaggtgagccctattcacacctcggccaggctgcggtggccaggactggt

SEQ ID NO: 4931 - DNA, 2300 bp, Homo sapien
attaatttcatgacccactattgggttgtaagtagagtatgaaaaatacaagtgggcatgagccataactaggggctggcatgttgctgctacagacaagtgggtatttctctctcctttccttccctccctccctctctctttcctctcttccccattccctctttcctccctccctccttccttccctcctttccttccttccttccctcctttccttctttccttccttccttccgtccttccttccttcctccctccctctttccctttcttccttccttccttcctttttgtccttttccttctttcctatctttcttttttccaaagaaggaaatggacattggctggcaaccaacagtatctgtagcctccaccataagtgagctggagaccacacccagttctactgaaccctgaaagaaaaggtgacccctccttctgaggggtctgacaatggaccctccccttctgaggggaggacgctgacaatggacacctgtgtctgatgtaaaatgcaagcactcacagccataaaagagaataaaatcgtgtcctttgcagcaggatggatgtggctggatgccattatcctaagcgaactaatgcagaaatagaaaagcaaacaccacatgttctcgcttacaagcaaaagagctaaatatcgggttcacctagacataaagataaaaacaatagacactggggacttcaaaagtgggagggagacagcggggcgaggggtgaaaaacttcctattgggtactatgctcaccatctgggtgacaggatcaatcccaaacctcagtaccacacaatgtacaattgtaacaaacccgcacgtgtatcccctaaatttaaaataaaaatggaaattttaaaaaatgcaagcagtaacaccaactgcccaggagtgctgggggaattgcatgggatccccaatgtaaagcactagcatagtgtctgagcccacaatgggtgcacaggacacatggggttgctgtcccaaacccagtcctcactcagagccagtcatggccctgtgaacagcattaattaggtcagagagaatgattcacactcgagttctggagagcccagggaaactgttatgtcaccctggtgctatgtttacttctcctatcaggagtgattaaattcttaggatctcatgctcagaggttgacagttatattgaattttacccacttttaaaaaacctttggaagcacccgattatttgtctcagctttgatgagggctgtggaagagcaaatgtgtcatgacaagtcaccaaccacagggagcctcagagctgtcaaaggatgggccattctccaaaaattcaagcaaacgcagaaacgggagggcccctggactgggtatcttcagtcctgtcactttttgcaggtgggggttccaacataagtcatacagcagccatacaagcattagcacagcccctctaagtcgaagttcagggacccatgagactcaaatcccaggctgattttggtgcatatggccacctgcactttctagaagatccatatcagattctaaaatggccatgagaccctaaaaatattaggaaacgcacactgaatgaaactaaaatgatttatgttaggggtgggagagaacaggtccagaggtcagagctgggaatcgtgaggtaaagcagaaattgcaaatgttttccatcaaccccatcccccaccttgacacccccacaccccagaaacactgaactgttcccagttccccaaatggcttgtggttttctgtcctctctgcctccgtgctggcaaatattcgtccaggaggcagtgactgggagagaaagactaacttcttattcaccagatcggatttcttaaacaataaggagttctaagaggccatgccaagcaaacggccagactgtacaaaggtgccccttgagcaataaatagcaaatgctctgggctttactgataagcctccccagactccaagccccaccaggcatgcagacaagtgcctgcagtgattgcagcgcctgcgcagcggcccttgttggaagtccaggagtccgcgctaccccgcaaagtccctggccgctgcccgcacaccgaacctctcggggctgagtcgggctgctttctcctcgcgtcccggggcgccctcgggaactcgggagcgcgcggcgagctgaacaatggcctggggacacctggcaggtcgcaggccccaaatcttccccgccgcccctaggccaccgccctgcacccggaacctaccggcgttcccagagc

SEQ ID NO: 4932 - DNA, 2300 bp, Homo sapien
gactgcctggctctgttaccttaagcaagtccagttccctctctgaaccttgggctcctcatcaattaaataactataatcctcgatgacttctgtgaagacgaatgaggagacctgtaagatgggccttgtgttgggctcacccataatgaaaagaggctcccattactattcttattgacactgggagttgggggctctggagagactgtggagccccagagatgggaatgtgaggcctgcctgcaggagtggccatgaatgaggagagagtctgagctgacacctgaaaccaggccccagaccccaggggcccagggcagagggctttctggcagatcccctagttaggtctcccctttgaggctttgcacgtccagaatctgaactctgacacacacccaagtttcgttcatgttctttgttatctgtcatggtccacttggtcctgacccagggcgaccctggaccttgattctgttctcgacctccaggctacccactggagcttcatggtggaaatacaacccaatctcctgagtttcagacagacactttaatctgtagcatcaacctttttgttgtcaaatcaccagcactacacactgagagaattatggctagaactaatgacaacagccttcacatacactgacaaagtgctgaaacagcccatgacaatttccggccagcatttttttaacctaagtttaatgagtttcatctctcctcttccctcccttcctctttctcctctgaccctctcccttcctgtcttctcccctaacctgctgtcctggcagaagtagctaaggaaccacacagaggaacagaaggcaggatggtctacatttacctgttacttcaccaattcacttctaacttaaaaaaaaatggtttctggcaacaaatcctgattgacaccttagtactgtgggcagttaaactacagcaaagccagcgaggggctcctctgtgagtgcaaagcatagctttggagtctaacctgcttgggttcaaattccagaagcccagcccttatttgctgtgcgaccttatttaattcctatgtgaaatggggctcctgaagctgtccttactgtgttttaagaaagtgctggccctggcctgggcactgattctggtgtgagaggaggcctccctccctccgccgtgccaggttaatgaaaacactgaggcatgttttggaagtgggaagtgcaggatgggaccggagtcaggagcccagaagagcagggcagcaggcaggctgaccttcggagactaagggtgaagagcaagagactcaggggcacaacaagccctgggttcaaatcctggctccatcaccaactcatccggtaaaggtggacaattttataactctttaagcctcagttttcacatctgaaaaggggataacgaaagtaggactctcacttgctgtgaggagtaagaggcatatcgtgttaaagcacttggcccagagcaaggcgagccctctacagacagcgattgtgagacagaccccccctgctgctattatcttggcgttcgatttccatcagtgaaatcagagttgtgccagaggcctctaggctctctccccaactctaggatcagtgcttctaggaaactggttaaggacaaggtgaacaaaaaaggtgtagccagtggccgggctcatctgtcttgctcaggttgtagcccctaaattgcttaacagaggtgccaggcgcagtgccccctctcagcaatgagcccgaggcccgcaatgcgccaggctggcgggggagggaccctgcgcgctgcggccgaagggcacaagtgcccaggcttcagcgtccctgcctggtggcagtcctgggtcggaggggatgctccatggacgcccaagcactctcctgctcgttcatcactcaccgtccagtcatcgcgcagtccagaagccactgcatgtgtcgtgtcctcgcttgcaccggagctgcgcccgcagcgcctgctgaccccaggcttcagctgctcggggccaggcccgcccctcgccccgcccctcgcccctcgccccgccccgctccccgcctctcgcccggcacggccaaaggtgccgccccggtctctccgtcccgccccgagcacgcccctcactccgcaccggccaatggcaccgccccgtccgccccgctctgggaacgccggtaggttccgggtgcagggcggtggcctaggggcggcggggaagatttggggcctgcgacctgccaggtgtccccaggccattgttcagctcgccgcgcgct

SEQ ID NO: 4933 - DNA, 2300 bp, Homo sapien
gataggatgatcctgaggtcatcaggaagcccactccctcaaatccttccccttctccaggccaactgtatttccctgcctcttgcatcacaggctcatgcagggctgatgctagcacagagggcaggtttgtcacatttgtgggtgtcaagcaaggggggagagagcaaactggactggtccaagtgagtgcctgaggagctgggcattctgcagggatgggctctgaggacattaataaatacgacagcaggtggagctgagcttgagccccccgccccccgtggcatttgcacacactcaggtcgggaagacatgatgggtttgtgtgaacagatgtgggggagttgtgaatgagcagagctctgtcgtgggcaggatgtggtgtggccccaggctgtgccccctcccaatgtgtcctaacacccctagccctgagctgcaacttgggagatggaaggtggaggcaaggtcagcactggagtatgtgtgtgtgtgagtgtgtgtctgtgagattgtgagtgtttgtgtatgtgtgtgtgtgtgtgcatgtgagcatgtgtgtatgtgttaagtgtgagtgtgtgtgttgagtgtgaatgtatgtgtgtgtgcatgtgattgtgtatgcgtgtgtttttgtgtgtgtgtgtgtgtgtgtatgtatgtgtgtgtgaagctttacctccctgcctagcatgtaggaggccttgataagagtccttggccacattgacatgggggagagagaggaacaggaagctgtgcagatgccaacaggttcgagaaagctctggtggatttactgtccgtgaaagaaacctggggagggcaggagcggctcctcaaaccaatcaaggctgtgtgtggaaagagggaatagtatgtgtgtggaacagtgtgtgtgaaccgcgtgtgtgtggatccactaatgatcctgtgggcttgagattaccttgttgcacagacgaggaaaggaaggtttgggagtttaagtcactgcccgtgatcaatatagagaaggtactaagagaccagaatcaggggtccaaatgcttgtgctggaacagtggcttttctgcttacttgctggtaatcttgggcaaagtgcttaagctcttgtccctgtcttctcatctgtaaaatgggaatatggtgatactcacctcacaatatcgttgtagggactggaggagataactcagagaagatgccaaccatttacagcacatagggaacacagtgccgactaacccactgccaggacagccagtgatgggccactgcctggctgagcgggaaggcaggagagaggcccagggtagctctggaggattgcaggagcaaccgaggcagaagccagtagtcaggctgtccctgccaagggaagggagcatgtgatctaaaatgcttaggagatggatctggattcctggggattatggagagtcttctggggtgggcggctgaaaggaccagtgtcactggctcagcatgaccttgcccaaccaaggcagcttgactgacatgtggccatgtgggtctgggccagaccctttcagccgcagccaccttgtgccaaggcggtgtgatgccaaggccgacggtgtctgtgccagggctgcgggtgttgggtgctgcactggccggcactcctctggctcacctgtctgtccacccttccttgtcttcccagcaagtaacttctaggtctgcagacaagaggaagagaagatgaaggaagactgtctgccgagttctcacgtgcccatcagtgacagcaagtccattcagaagtaagccttggtgtgcaggttgggcgggggagtcttcacatttgccatccccctcatcctgggcagcctttaggtggaggggttctgagcacttgttcagagatctgatggggtgccctgggggacagtgatggggtgcttctttttgagcctgtccaataggggatccccaagctacacatgaccatggctgggaggcatgggcaatagaaaagaggctccagatggcaggcactttatacgaaataggtgtgtacagggcctcattataacttttacattgattgcatgttgacaaatagtaatttagatatattgagttcaataaaatgtgttattaatgctaatttcacctgtttcattttcccctctgtattaggccattcttgtgttgctataaagaaatacctgaagctgggtaatttacaaagaaaagagatttagttggctcacggttctggaggctttacaagaagtgtggtgctggcatctgctcggcttcca

SEQ ID NO: 4934 - DNA, 2300 bp, Homo sapien
agatgtgtcactgagcttcctatgaaggagaggccagcatggatctatggagttcaaaggtctatggggggttctgttcttgcctcttggtctcgggtgcctctcagtggagagagcttgtggggatggctcactcatggagacccactgccctccagccccaccctggacgccaggcagaggaagatggagcagacacagccctggccacgaggggctcgggcttggacgcagaaggagatgcaatggagcttcttggaggaggtgcttgtgcactgcaccctggaagacgagtgaagggggacagggaggaaagctgagcaggtggccctgacctcaggacctgcctggacaaggtcgggggcttggctgtactggggacaggctggctctccatgactcaggccagacatgcctacacaggtgatgtgtgtgcccccagcatagccgcccactgttcaccctcccccagcttggccgcatctgaatggagggaaagccccgtcagccagcagcgaattctccgcctccctccctcttttggtctcttgactaatctgctcattgctaataaattcaaagaagagccagcgaactagacaaagggtctacaaaagatataagagcttgggcaaggtgagaagtgccatgtgccactgaaatcctggtcactgtctcaggcactccctgccccgatgcctttgtgcacatggagttcccacctagaattcaagaacttgggactgccggtccctcttgcttgcctagggagtctggggtctgcccagtactcagagctcaggcttgggctaactctcaagactcctctttctcccccacctgcagcacaggcaggcgtgttccaggtggggctgtggctggggcagaggatctgtggcctgtctggggagtgcaggagcttcccaggggctgcctctctcatccttggcagcctcctttgctggcatggtcactcctggacagatgcagtggctttctaatgttgcccaggtgctccttggcagccccccagccccagccccagcccagtcccagcagctgcagcgatcctttgaagcagaagccagactgcagtgcccttgttcaaaccctgcagtctttccctccctcctagagggaaacacagcatccaccccaaggtccactgaccccctcctacatgggccagtctgcaggccccttgctgtgccctgagcatgtctgtccggcgcgccctcaccacaggggctttgcacgtgctgcccctgccacctggaatgtgcattttcccatttttttcaggtttctgctccaatatctgctcttagggaagacacccctgaccactgtacctgtggcggcagcccaccacagcatgccactgcgctgctttccttcaggcagttcttgctgttgcctgaatcacagcacccattcatctctggcttgatctcctcccttactagaatatgagctccagggggccacacctttgtccgctgctacgtttgctgtgcttagtgcattcacagcacacactagcacctcatatctggtgaacaagtaaacaaacaaatcctccgaaagcaccccatctggggtgtaagaagaccagggtcagaccccgcagaccgcccttggtcccttgcgagcagggtgtgtctctcctaggagcaggcctagggacccagcctcagctgcctccagactggggtcctgtgctgctgatttttcatcaaagttgccaaggacctggcccaacttcacaggagtcatgatggggtggtgtaacacagagtgggaaacaagctttggggcaggggtggccctggggctacctgtgagggcccagtggaacccctccctctcccagtgcccctacttgaccagcagtgaacccacccctttcctgccctgcagcgtaaacattccccagcctcctacaggcagaaaaacacctccaagctggcagctgggccaggccccgcccaccaagctgttttcctaagacagccttccgagcaggctatttttggccctcgtgacagtgattgatagctgctgggaaggtataaaagcagcttgcctgcgaaggttcttcacactgctcagggaagagcctgctacggtggactgtgagactcagtgcactgtcctcctcccagcgaccccacgctggaccccctgccggaccctccacccttcggcccccaagcttcccaggggcttcctttggactggactgtccctgctcatccattctcctgccacccccagacctcctcagctccaggtaagag

SEQ ID NO: 4935 - DNA, 2300 bp, Homo sapien
ctgccagcttggaggtgtttttctgcctgtaggaggctggggaatgtttacgctgcagggcaggaaaggggtgggttcactgctggtcaagtaggggcactgggagagggaggggttccactgggccctcacaggtagccccagggccacccctgccccaaagcttgtttcccactctgtgttacaccaccccatcatgactcctgtgaagttgggccaggtccttggcaactttgatgaaaaatcagcagcacaggaccccagtctggaggcagctgaggctgggtccctaggcctgctcctaggagagacacaccctgctcgcaagggaccaagggcggtctgcggggtctgaccctggtcttcttacaccccagatggggtgctttcggaggatttgtttgtttacttgttcaccagatatgaggtgctagtgtgtgctgtgaatgcactaagcacagcaaacgtagcagcggacaaaggtgtggccccctggagctcatattctagtaagggaggagatcaagccagagatgaatgggtgctgtgattcaggcaacagcaagaactgcctgaaggaaagcagcgcagtggcatgctgtggtgggctgccgccacaggtacagtggtcaggggtgtcttccctaagagcagatattggagcagaaacctgaaaaaaatgggaaaatgcacattccaggtggcaggggcagcacgtgcaaagcccctgtggtgagggcgcgccggacagacatgctcagggcacagcaaggggcctgcagactggcccatgtaggagggggtcagtggaccttggggtggatgctgtgtttccctctaggagggagggaaagactgcagggtttgaacaagggcactgcagtctggcttctgcttcaaaggatcgctgcagctgctgggactgggctggggctggggctggggggctgccaaggagcacctgggcaacattagaaagccactgcatctgtccaggagtgaccatgccagcaaaggaggctgccaaggatgagagaggcagcccctgggaagctcctgcactccccagacaggccacagatcctctgccccagccacagccccacctggaacacgcctgcctgtgctgcaggtgggggagaaagaggagtcttgagagttagcccaagcctgagctctgagtactgggcagaccccagactccctaggcaagcaagagggaccggcagtcccaagttcttgaattctaggtgggaactccatgtgcacaaaggcatcggggcagggagtgcctgagacagtgaccaggatttcagtggcacatggcacttctcaccttgcccaagctcttatatcttttgtagaccctttgtctagttcgctggctcttctttgaatttattagcaatgagcagattagtcaagagaccaaaagagggagggaggcggagaattcgctgctggctgacggggctttccctccattcagatgcggccaagctgggggagggtgaacagtgggcggctatgctgggggcacacacatcacctgtgtaggcatgtctggcctgagtcatggagagccagcctgtccccagtacagccaagcccccgaccttgtccaggcaggtcctgaggtcagggccacctgctcagctttcctccctgtcccccttcactcgtcttccagggtgcagtgcacaagcacctcctccaagaagctccattgcatctccttctgcgtccaagcccgagcccctcgtggccagggctgtgtctgctccatcttcctctgcctggcgtccagggtggggctggagggcagtgggtctccatgagtgagccatccccacaagctctctccactgagaggcacccgagaccaagaggcaagaacagaaccccccatagacctttgaactccatagatccatgctggcctctccttcataggaagctcagtgacacatctgtgcttgtagagcaccagtgagtatcaaaaacagctctggtttctgcttgtttgttttcctttttagcagatagtgcaaggtcatatctggaagctgtgtgtatatttgataacctttggatacactattttctctgtggatggcaggatgtttgaacctagaaaccccatttctaagttaccatgaaatccacattgtgcagggtcttcctgagtgctgccagggatacaaagaagtttccatggcgtccctgttctcacagggcttttagtgccaacgaggagagagaaatgggatttgtgaatctaaaatatgggtcagaaatac

SEQ ID NO: 4936 - DNA, 2300 bp, Homo sapien
gtgagtatcaaaaacagctctggtttctgcttgtttgttttcctttttagcagatagtgcaaggtcatatctggaagctgtgtgtatatttgataacctttggatacactattttctctgtggatggcaggatgtttgaacctagaaaccccatttctaagttaccatgaaatccacattgtgcagggtcttcctgagtgctgccagggatacaaagaagtttccatggcgtccctgttctcacagggcttttagtgccaacgaggagagagaaatgggatttgtgaatctaaaatatgggtcagaaatactgcatgattcccttatataaggaatctaaaataggctcatagaggcagagagtgaaaatggtggttgcagggactggggcaggggaggaggaagtggagagttgctgtgcagctgatataatgtttcagctatgcaagatgagtaagtcctggatatgggctggacaacgttgtgcctacagtgaacaatacagtattgtgcactgaacagtttgtttagagggtagttcttatgttaaatgtccttatcacaataaaacataaataataaaattaaatgttggttgagatggcaatgagagaatgatattcaaagttaattgtgggaagactagtgtcagagcacattaggagtgtgtagtttcgagactgcggctctgggtagagggcagctgaggttgctggcaagtattctggcaaatgactcagcttggccaggcttacacacagagtgaccgggattggcacagaggcctggggtggtctcgcagagacagaggcctggaataggtcagaggcactgaatcaagggcccaaggggtgccaaccagcactactagcaaggtgcgtgcagaggactctgttgattagggccccaggttggcagcaggagagaagccatgtcacctgcagacctagggaaaccgagggaggttggggacatgggatgaaggctgttgtagaaattctggtatgggatatagggctagtgatgtctaagcagtggtgagaaaagcaagaccctttgtcagccctggcaagtggacgctgctgctgttggaaggcaccgggagaagggtgaggctgagacacagctaggacagagagtgcccacttctcctctggtgggtgtgggaccctgccgggcctggtggccataggacctggtggcgcaggaccccctcccaggtgcagtgtgggcagagaggtcccctgcttggcatgagcagacaggctgtgcgtccctggaaccacttcttcaccgcggtgtggacgtgcctgccggccagcagctggcttcctgtgggacacctgactcagccactgtgttctgcgctgtgcccctggccaggcatgagctgagcacatctcaggctccctcccacagggcctggtcacacgccccagggcacgtagtggctgatggtccttcctgaggggatggggccactcaggaggagggatgtgcaaggcctgagtgttcagagcatcccatccctagggggcacagggaaggtaggcagctgctctgggggaagggctgatgtgtggacccccacaggaagaagggactctgatcatcgaggggctcctcaacattgcctgggggctgaggcggcccatccggctgcagatgcaggatgaccgggagcaggtgcacctcccctccacctcatggatgcccagacggcctagctgccctctgtgagtacccggtggcttctgtgacacctgctcagcctgagctcccgggttggggatatcccgagcctcagggtgggagccctgttcccttatgggacactggcacaggagggtgacccagcctcatccccatgccctgtgactgcctcagtccacagcctcgcccagggtggcctctccctccttcctggagaacattccaggctcccatgacctctatttctgtttctcaaaccttcctgcaagccaccttgctggcaagaagggacgactacagccaggggggctcccaacacctatgcaagccgaacatgtctcgccatctcttgttctatctttaaaattcacacgaatttagcctcttactactctgttttcattttaatgtcaaaattttaaaaataaatttatcagaatttcacattacatttgtttaatatcagaataatgtttctgtcaggaggaaatggtctcctgcctgccttaccattcaatgcacatttatctcctcctcggcccactcccaaaagacgcagttagtagctgggccttgcctgcttctgc

SEQ ID NO: 4937 - DNA, 2300 bp, Homo sapien
tggttcctagactaaaggggcagcccctacttgggacatgctattctcaaggcagagggaaagagcagagtcctggcagaaacacaatgacttgaagtttcttctgggatgtgatgtaccccttgcatccagtcacatgcggtcagccaattcaaatcagtggtcaagtcaacatcagtgggacaggcatgtggttcaccaggaggcaccggagtcacaccacaaagtgcagggaccaaaaccagagaaggtggagcaaaccctcaggaataatcatgcctcaggaatctcacgtgagatcctcaaatgctgcaaacagtgcctggcacacaataagcactcaataagtgttaactattattatactaacagctaggctgaaggcataaaaccctacctgctttctctccctgtctttttcccattctcctttaccctcctctccttcatatatttttctggctctccctcctctccatccttactgcccaggactctgtccacacttagggacacacacccctttatttcctgactttcgtctctctctttttaaaaaatccatcctcgtttacccaatgctttagttgacatacctctggcccttctatggctggcccagttgttttcaggtataggaaaaagggataatccatctttatgtagacattaaaggagttagttttaattagtaactaccttactaacaaaatggctttttaaaaattatctttttattttagtgtacatagagcagacagtcccaacgggtcatgtttgctcctgacgcttttcctaaaccatttctagatctctggccattgccctttaccccaaactctccaaccaccagcatcaaccaacttataacaatttaataataaaagtaacaacgactctcatttcttctgtgttatacattgtgctaagtgccttacattacctcatttaatcactgcaatagtccagatactctctagattgcgagtggagcttctttgtccagacctcattcagctttgtgctttgccatatgcagagacagctccctacagagcagaaagccccaacttaagagaatgaacctatgacttagtttagcctccaccaacaaaccactgtattacttcaggcaggtcagcctctcttgcttcagtttactgatttgcaagacagatatgataatctgtgcttcatgagactatggtgaagatgaataaccagaagataagatgtaaaagtactttgtaaacaataaggcatcttataaattcattcattcaacagctatttactgagtgtctgttccctgctgagcactgttttcagcactgcagacacaataaagaactaaagagacagatcatgagaggcatcgggtgccactgcgaggtccttggctttgctctaataagttgggaagcctttgaaggttttgaacaaatgaatgacatgatctaacttaggtttaagaggattactctggggccgtgaatagactgtagggcaacccgtctggaagccaatataataatccagaaggtggatgaaggtggcttggtggttatagcagtggaagtgttgaaagtggcttgataatgaatatattttaacgatgaagccgacagaatttgtggataaatcacaggtgaattttggatgaaaaaaagaagagacaacagtgacatcaaggtttttggcttgagcaactggaaagatgatgggatcttcacccatccctgggaagaagactgttgcaagaacaggttaggtagatatcaggaattcatttggggggtatgttaggtttgggatgtccattacacatgcaaatgcagctcttgagtaatcagttcgatatacaagtctaaagttcaataacatttatgtcccacagtcagactggagttaccaatgcgggagtcttcagcatgcagcaatagcattggaagccaaaaggcggaggagctccccagggagtgggggaacacggaggtcagctggtcagatgactgagcacggccaggatggctgaggaggagcctggaaggaataagaacaaagagagatcattactaatgagcaacaaaaggggtgtgttgaaatcagactttggagccacaaagaaccattccaattctgggtcgtccgcttacacacggtgaacggagcacatttcttctctgagccttggttcctttcctgtaaatggagtataaccactcccatcttgcaggagctttttggtgataattaaggtgacttcgtgaaaagtaccagggtctcaaaaatctcaaaat

SEQ ID NO: 4938 - DNA, 2300 bp, Homo sapien
atataaatcttccaagcattaccaaatgagtacataattttgaagaactaaaaagtggagataaggtaaatcttaatgggaatggagtaactccaaaagacaatcaaaatttgtgtaacagaacattactatgctttaatatttagttccatgttaaacttctactaactagtaactgcctaaggtatccaaatgaataagaaatgacaaattacactactttatgatatattcctgtttatctgtatttagcattcgatttccatagctctagatgacagtttagctctaattctgtagcataaagtgttttgaaaattgaaacttctctacagggagtggtaggtttacttagtctatgaagacacgctttattattggtttttatagatcctaatgatccaagaaagcaatttgttgaaaacccaaaacgaaagtactgttttcggagacagaaaaactgcaaaagaacttttaccagaaagtggaatgaaactgagtagaaaacgcatggtaggtaggacacaagaaaaggagaggggggagaaaatgagtttacatgtaaaactaggatggaatttttagaatacccaaatgctgcaaaattcaaaatttcaaatgattttatttatttataaggctgacttgtggctatttaaaataacggccaaaacaaaccaacaaaaacccctacaaaccccacataggtggcaatgtcggaaaatctagaacttcaaaagcaataaaattattggaactatttttcattatcttgtgtcagaatgtggaatttaaaatagaaacaattattctgggtttctttgcatacaaacatataaagcaaataaatgaaaacaaaaacataatttttcttgccttcctttcatcttattgtataattgagactttaggtccaggactttatctggatatttaataattacatcagctgtaattatggtcagcgtaagagtaagccgcatataacacaagattacagttaggactacccactccttaacttaagcaaatatttacagaacatctaccacacaggagacattgtgttaggtacatggtgttggtgttgcttttttttttttttaataactataatggtcattatacataaaagcacacgcatttaatacaatggaagtcagatctagtcagaaactcagactgtcaaatccacctacggatgaggcaatcatactagtatgtgccagacactgtgtaacttgattctgtgctagctctttaattctcctggcacctttatgcagttatttccgttttaagttaaggaaacgagggcacaatgctagaaggcactggccgggttcccagaccctagcagtttgactccagagcctgtactcttagtggcagccacatcttccattgctcagtccagcgcggcgacccgtgctttgcatagctccccagcaggggcaagcacgaagttaaacctgagtgacagaagctgctgttcttgcacacccagctaactggaatgtgcctcagtttcctcgtaaaatggggagggtaatgataaagtggcaacaccatcaagatgttagaagttgcaatgagtctgaatctgaaaaccgctcagagcagccctgtgctgcctaagcatttgttccacgtatctagtcctcgaacgctccgagcgacggaaggggccggggctgctgctcacccgcccagttccacccgccgcgggccgcgcctcgcccgggcccccagtccaagcctcccgttcccagcactccgccggccgctcctcattgacccggcccgcccgccgcgcaggccgcggccccaccctgggcccgcgtggccctcccgcccccgcccggcggccaggccctgcccggaggcgggagacgcaagccacgccatcgcccgggcccgcgccgccctcgttgcggccagcgcgctcccgagcggacccgagtatccgacgcaggccccgagcgccccaagtgccccaatcccactcaccgcgcgggaccagccaccactctggctcgctgggcgcctcccgcgccgccggaagtgagggcctcgccgcgctctggcgccgccgcggtcgctctaggaaagtggcggagcgaccctctatggtcccgggcccacccgaaagcgttgttcgtttcttcctgtggttttgttttctcctccccccaactcggaaggcgtcctgtgacccccgggacctcaagagctgtaaccgcccctgtgtgtggtcgaggcttttgaaaccaaactctagcctctccaacctagaaact

SEQ ID NO: 4939 - DNA, 2300 bp, Homo sapien
gctcacacttataatctcagcactctgggacgccaaggcaggagaatcacttgaggccaggaatttgagaactgcctgggcaacataggaaaacctcatgtctacaaacatttttttaaaaattagctgggtataaaagacgtgaaccagcaggagttcatcagagctctggcagcctttctcaaaaagtctgggaagctgaaagtcaccgaatgggtggacaccatcaagccggccaagcacagagagcttgctgcctacgataagaactggttctacacgtgagctgcttctacagcgcggcacctgtacctcttgggtggtgctggggttggctctatgaccaagatctacaagggccgtcagagaaacagcgtcatgcccagccacttcagctaaggctccaagagtgtggcccgccaggtcctgcaagccctggaggggctgaaaatggtggaaaaggaccaagatgcaaactgaaacctcagggagagagagatctggacagaattgccggacagatggcagctgccaacaagaagcattagaacaaaccatgctgggttaataaattgcctcattcaaaaaaaaaaaaaaaaattagctggatgtgaccaagcatggtggctcacgcctgtaatcccagcactttgggaggccgagatgggcacctcggtcaggagtttgagacctgaggtcaggagtttgagaccagcctgcctgacatggtgaaaccccgtctctactaaaaatacaaaattagctgggcatggtggcaggtgcctgtaatcccagctacttgggaggctgaggcaggagaatcacttgaacccaggaggcggaggctgtggtgagctgggatggtaccactgcactccagcctgggcaacagtgtgagactctgtctaaaaaaaaaaaaaccgggtgcagtggctcatgcctgtaatcccagcacattggggggccaaggcgggcggatcataaagtcaggagaccaagaccatcctggccaacagggtgaaaccctgtctctactaaaaaaaaaatacaaaaattagctaggcgtggtggcgtgtgactgtaatcccacctactcaggaggctgaggcaggagaatcacttgaacccgggaggcagaggttgcagtgagccaagatcacgccactgcactccagcctgatgacaaagcaggactctgtctcaaaaaaaaaaaaaaaaaaaaaaaaaaaaaaattagctgggtgtggtggcaggtgcctgtaatcccagctacttgggaggctgagggaggagaatcacttgaacccatgaggcaaaggctgcagtgagcggggatggcactaccgtactccagcttgggcaacagaatgagactgtctcaacaacaacaacaacaacaacaacaacaacaacaaaaatggccggccgcggtggctcacgcctgtaatcccagcactttggaaggccaaggcaggcggatcacgaggtcaagagatcaagaccatcctggccaacatggtgaaaacccgtctatactaaaaaaaatacaaaaattagctgggcgtggtggcatgcgcctgtaatcccagctactcaggaggctgaggcaggagaatcgcttgaacccgggaagcagaggttgcagtgagccgagatcatgccaatgcactccagtcaagcaacagagtgagactctgtctcaaaaaaaaaaaaaaaaggaaaaagaaaaagaaaaaaaaaagtaactgggtgtggtggcaggtgcctgtaatcccatctactcgaggggctgaggcaggagaatcacttgaacctgggaggcagaggctgcagtgagctgacatctgccactgcactccagcttggcgagagagcgagactcagtctcaaaaaaaaaaaaaaaaaaaacaaattagctgggtgtggtggcttgtgcctacactctcagctacctaggaggctggagcgggaggatcgctgaaacccaggagttcaaagttattgtgactgtgatgacatcactgcattccagcctgggcaacagagcaagagcctgttgggtggcactgggggcgctgtgcctcgcccggagcctcacccagagccttctggggtggtggataggtgaggacctcatcgaggtaggggttgggcggtggagaagggagagtggcggggtagcttagggaagcttgtgagccaatcagcacacaatgtgccagagtgtgggcgtggactgagggaagaagtgaaaaacacagcctgcaacggtgcctcaacagtacccccatttgaaattt

SEQ ID NO: 4940 - DNA, 2300 bp, Homo sapien
gtcaataacaatatgtagtatatttgaaaattgctaagagagtgaattttaagcgttctcaccacaaaagacaaaaaaatgacaagcatatgatatgaggcaatgcatatataaatagtgtgatttaaggcattccacgatggatgatacatatatcagaaatatcatgttgtacatcataggtatgtacaatcttcatttgtcaatgtaaatattaaataaatactttttttaattaaaaaaaataggatgggcatggcggctcacacctatactcccagcattctgggaggctgaggtaggaggatggctcgagctcaggagtttgagaccagcttgggcaacctggcaaaaacccatctctgcaaaaaatgcaaacattagtggggtgtgatggtgtgcacctgtggtcccagctacttgggaggctgaagtgggaggattgcttgagcccatggaggtcgaggctgcagtgagccaagatcgtgccactgcactccagcctgggcaacagagcaaggccccatctcaaaaaaataaaaaataaaaataaagtgactctaggatcatggcactctcttacactttcagcctgtgaaacagaggtgctcttgatagtctgtataaatgtgtctttggtgtcctgatgtagatttttgtccccctgcaacagcatgaacaggctgaacactttgccacgaggcttctgctctctgccagctcttgaggttctggacttgacttacaacttgaacggaaattctcttcctggaaacttcttcttttttttttttttttttaagatggagtttcactcttgtcccccaggctggagtgcaatggcgtgatctcggctcactgcagcctctgcctcctcctacctcagcctcccgagtagctgggactacaggcgtgcaccaccatgcctggctaatttttgtatctttagtagagacggggtttcaccttgttagccagactggtctcgaactcctgacctcatgatccgcccacctcggcctcccaaagtgttgggattacaggcgtgagccaccgcgcccggccccctggaaacttctacctgagtaagaaactttcagttctataaatctcctcaacactatactttgccttctcagagtgaaatttatttgccaggacctaaactccaagagaaattattggacagagataattttttctttagagactccttttgaatattccttagtagctcagcagtatgtgcatttgatatatcgttatgtgacaccgttgggctgaagtggacttagtaacatcatattaacattctgagagagattatatacctaaatgagatcaagcctcacatttagctaagagacttgactttctttttaaatagcatgccaaaaaaaagtatcctcccatgttggtattaattctttgcaggatatttgcccaggaagtccgaatcagttatttataaaaatatttattaataaatcactaacagaattcttaaattttctagccaggattcttatttccagccttttaaaaagtactcttattgacctatttatccagtacacaggcattaagaaattattggccataggtgaacacactttattcttttatatgccaacaaatttcttgctgaagatgcttctgaaaattaaaaaatggtttcctctgggaactcatgcactatttcagacaaagtttgcttctcttaaatgagtgttctatttcttcaattagtaatttatgtggcattcagaaaatctgaattttctgagctggtctctaaaatttcactttttaccttatatacattatctctatgactttctcaagcacatgaaaccaactgtaaaatattttcttgggcagtggaacacctgtttttattatgttacattaacatacagttctggagtctgagctccaaagatcacttgaggctaggagtttaagaccagcctgggcaacatagagagaccctgtctctagaaacaaaaattaaaaaattaaccaggcatagtagcatgtgcctgtaatcttagctaatcgggaggctgaggtaggaagattgcttgaggccaggaatttgaggctgcagtgacccactgcactccagtctgggtgacagaacgagactctgtctctaaaaaataaataaatactgataaacaaaacatacctctaattatactcagcttttttggttgaggataaacagatgctttagaattttagccttcagtagtttgtaatcatattatcattgtgtagtaattgtgaacaaattt

SEQ ID NO: 4941 - DNA, 2300 bp, Homo sapien
ggagaaggggaaggagaaaaaaaggagaaggagaaaaggggaagaagaagaaggagaaagagaaggaagaggagactgagaaggagagggagaaagagaaaagaagaaggagaagaaaaaaaaagagtaaagaagaaagaagatctgctggtgcagaggcagctttaactttcattgcactgcttcgtggctaatgccttatccagctggtctgagcctaaaatttctccaaagccacctgcctatctgactctctgtacagacagagaaaatgaaaagctatgccacccggtgtgacctacaatatgacctatatctgattttgtcccgttcatagcaaattttatagcctgtcctaaatctcacgtacctacagcctatccatttgtattctgagagttgtagtttctgagtacaaaagggattagaggacaatgatgggaattgcattctggttgcttctaacagcagaagtccatgtgataaatggatgactataacatgttcagtcattgtgattctacgccaaaggcagactcagaggcaggataacagccattgatcatggtttccaacatgtactgttaaccttgcagttggttctaataccttttgattttggcaatgtgatgcccattcctgttttcagcattatagaaatatttgtcctcatctgtttctttatacactacttcatggtttggaatcagaaggatggtttgaatcccagttctattattactaattatttgaacttcagcaaattacatcatctttctgaattctggtatcttaatctggaaaacagggatactattatctgcctgggagggtgttgtgctgattagataagacagactgagtagatgatgagcaaagactggcatttttgcctgctcagtaaatgatagcaaactcttcttctggtcccatgagccggaagacactttagaccagaagcctccagacagctaaatttaattaattatagtaaattttaaaagctgacatcttttgttgtggagtgcattctcctactgcataacttttagtgccatagtctgagtcattatttctaatcttgagtcattcaaatccttttaaacactggaatatcaatcactcaatcaatgaattattgtttagttatttcatctaaatgttttttttgattttgtacagcattggaacaatgtttgccaattattgtaactatgtgaatgactacagttattatttaatattttggagtcaataataatccattcttaaaaactcaactgagtaagaaaattgaagctttgaatccataactaataaggaaagaactattatgtttaattgcatatggagattgatttttcaaattacttttcaaggtatttaaaaatatctgcttgctggtcatggtggctcacacctgtaatcccagcactttgggaagccgaggcaggtggatagcttgaggtcaggagttcgagaccagcctgaccaacatggtgaaaccccatctctactaaaaatacaaaattacctgggcacagtggtgcatgcctgcaatcccagctacttgggagggtgaggcaggagaaacgcttgaacctgggaggcagaggttgcagtgagccgagatcatgccatcgcactccagcctgggcaacaagagcaaaactgcatctcaataaataaataaataaataaataaataaaaattaaaataaacaaaaacatctgctttattatatacatcaaataatcagaaactaacatttaagcttcctttccaaataacgaaagtcctgatgcattgttaagaaaaactgcccatcagtgagctctgcacaccacattgtaagcacgatggcttatctcctttacattgggagctcggtttccagttccaaactgtatagcagcttttaatctatgaccacatggcaggaaggcattactgcaatactttcattctagtgaaatcaccctgaggtcacaaaatgtgttcagggtaacatagtggcttgtggcactgggatagaaacctgcattgttaggtcattcattttaggggagggttcccatagaaggaagtaggtctgggctgggaatatcacctcctaggaaatatgcagtaagatggattgtgtgtctaaaggttaaactctttttccaacaggtattcaatggcattagaagtaactcaccccagctagagaaactgtgtagtagtgtgaatgtaagcagtgagattaaatcttcaggaaacacaatgaaagtcatttttttcacagatggatctaggc

SEQ ID NO: 4942 - DNA, 2300 bp, Homo sapien
gttgcagcagcaacaggaagctagtattgcagtgaagcctcaaaatccacctgaagaaggtttccccatgacacatcacttggctgtctcccttgcaacctccagactctaggtcacaagccctcacattaagcccaaacgttcaatatcctttgtaacatggcctggccccaatagcgactggacaatggtagtcaatggctttaaaatggaatctttgactttcaaattcaacgaaatcttgaaaattttatccactgcaatggcaagtggtccaaggtttcctatattcaagctttcacttacctccgctactaaccttacctttgtcaatcttgcacttcttaccaggctcttaacaaacctgttatcagaaggaaactcattagctggttctgcagctaaacagtcagcccttaagccccatcccatactacctgtttcccagctcaacagccctcatactcacaaggagaaagcctcaatctttctttggctggggccacaaaaacggagggctggttctttctagacaataagctcgttttgcccatgtcccagaaaaaatccaaactcactcacattcacagcctctttcacaccagctatcgtcctctgcttcagtttttataacctcacctgcagtctcctgccatggccaccacctttcaacaactcacgcaggcccgtaccatctgcaaacaagtttctttccagggagcactcagaccacccacttagccgagaaatcaagctaaagggcaccttccagtgttcagaggccactacaaacctggaaaattgatttcattcatatgccccctctcaagaaacatgactatatcctcacccctgttgaccactttcaacaggcagattgaagcctttcccaccaccaccaagagggcaaaagaggttacctcaatcttcctacaacaaattatcccaaggtttggactgcccacaaccagtctgggcagagagtgagctcctgtctcaaaacaacaacagcagccacaacaacaaaaagataaaaagaatattgtagataaatgggagaatgtgttcttagaactcacccactcgaaactcaaggacatcaaattgacagtcttggtgactttctaggtaaaaatcttcaaaatgaatataaatagatgaatttccctgatttggattgctgagagtccattcacagtttaggtttctcgagtaattcctgactccatcatagccaggagaagtaaagtttccttcaggagtatttggaagagacccaccacacactaagaaaacagaaggcaacagaaagtagtagtaagattcaggccacaacagaagagataaacaatataggaacagtaactaaaacatcaacattactgctttgatttgtttttctagatgcaatcaggattatgggtaaaaggcatgcaaattatggaagtttctgcaagtttaaaaaggaaaaatgtgcaaaaatcaacaacttctctattttcctgttggtgtagatcaggtggctggggtttggctctgtatcaatttgtccaaatattgaggccctgtgctcattaatatttaatttagaggaatacccaaatataacggtggcaggtcctaatggcttgattagcaattctccacttgatctaataatttaatttaaatcagacagataataggaccttggcctaccaatgaatttgcccccttttaataaaggaacagatgcttcctgtaccagtgaaataacttagtgggtttttttaaatattcactcccacttctaaattttaaaacccttagataatagcaccaatccaggaaataggaggatatttataattagaggccatatcttgcttaattttgaaatattctatatcaaatcaaacctcccatttattttcactggaaatacgtgtgtgaatagacgaccagaaacaataaagcctgttctgtccccagcaaaattaattactctccgagactaagttaccttctaggaggtagatggtctctttcagcaccaaataatggaccacggaatatggaacaggtcacaccaatcctcatggtaacatgactgaaactgtgctagaagctcatctaatggcattacaagttttaaattcaccatagcagcttcttcctgaaatcagaaagctttttttctgtctgcagtaagtttttgatctgcttatatgtgtttgtcttatgtcaaagattccaagtgaactttgatcactaaagggaaaatggatggctctgctgccattggcagtagctggggggca

SEQ ID NO: 4943 - DNA, 2300 bp, Homo sapien
tcgtgttaatttgattgatcttttctgccctcctgcttttcagaaatttaaaggctaaaaagaggacctaaactttaaaacttctcttttagtctcccattaaactaattgtaagaaccaccaaaaaagggaaaagttctttggaaaaattatttggaaagcagtaaaatgatatggactgttaggatgtaaaacataggatataagtcattatatgttagtggtgctctgacatagggacctattactgagaatcaacttttgctcaattttcagagaaatggaatggttgcatcacttatctacgtaaacaattgaagaattgtctgaaagaaaatatggtatgtttaaactggaaaagtcctgtaatactttgttcatgagcatttacacagtggagttactgttaattttgggggtactgtggacaagcccagggctgccagtgaatcgagtcatccttacacgtctctctttgtaaggtgctttgcagtgtctgtctaagtactagaaacattctttgtttctagattactgcaaagctaaggaaaagctatatttccttaattatcagctagcatttcttttaaacttttagcatggatatttggggatttatttacatatttattgcaaagccctggattacagagatttaattgaagattttttaaactaatagtttctctgaatctgctttgttaaaatcagtattcaccaggatgcccctgttgtctctgtttttatcttaatgcatcactgagttgacgttaaatttcaaattcttctttgcccttaatactattctatcctgaagccacctttatatactgatgaaagaagtaagcaatctgttattatcatctgtttgtatatatcaaatgctcacctcacaatagcatcaaccagtgaaaaacttcacgttttactgtttttatttggataactatttactttgcaatcaactagcaaggtataaaattgtatgatatgcagaactttaactggattgctttaagtgaacatttaaatatgataagccatattaatgatatttaatacacttaaaatgaacatgttttattcatcatgagtaatacaacctaccactcaatgaaaatctaaagttagagtaaatttgctcatgaattcaataacttttccataatatttttagttatttggttaaggttctcttaatgtttctttcactttttaatagtttacgccttttttgcctgtgttttttattggtttgtttaaagcaaaatctcataccgtgtgctacctggaagcactgtaacctagtgacaagatcataggctctagggacacactgccgggccacgtctcttctcctgtctgaaacttggtcttttgtggtcatgagaactgaagatctatcctgaagattggataagatagtaaagtgcttcacattaattcctggcatataaatacataataaatgcttccactttatcttggctcactgcaacctccgcctcccgggttcaagcagttctcctgcctcagcctcctgagtagctgggattacaggcacttgccaccatgcctggctaatttttgtattttttaatagagatggagtttcaccatgttggtcaggctggtcttgaacaactgacctcaggtgatccacccacctcggcctcccaaagtgctgggattacaggcatgagccaccacgcctggcctatattcttaatttagtactattctgagtaaaaataattagctattagttttataaatttaccatgactattttataaacatcagtgctttccataaagtgaaacaggttatgttgtggtgcatttctttaccttgtgctggccaatccctcattatgctgttcccctgttgtaatacttacattaaatgttaccagtttgtatttaagtgatttatgtctcctgattggactctgacaaagagaaaaatgctaggaagagtaccaggagatagccccacaaagatgggatttgggcataggtttggttattcaagtagcagtgcttagcttcttgccaatgggaaatggaatgctggtaatttataggaagtgacctcacaatgacccaagctcctgtttgttgattgtgatgaaatgcatgctgaggcacatgccttgggagctaagtggcagctatacttcactactatggcagtaaagatgactataaagactggcgggggatggatcctttcaaatgtacctgagctgggatgcccagcttgtggaacgcacagcaggaggtgagcagtggccagtg

SEQ ID NO: 4944 - DNA, 2300 bp, Homo sapien
ggagggatagcattaggagatatacctaatgctaaatgacgagttaatgggtgcagcacaccaacatggcacatgtatacatatgtaactgacctgcacgttgtgcacatgtaccctaaaacttaaagtataataataaaaaaaaataaataaaaataaaaaataaaagaaaatgaagaaaatcatgtcatttgcagcaacatggatttggctagaggactttatcctaggcaaacaaatacagaaacagaaaatcaaataccacatattctcactcataagggggaggtaaacactgggtactgatggacataaagatagcaacaatagacactggggactattggggtggtgaaggagggaagggagaaagtgttgaaaaactgttgagtactattctcagtatctgggtaatgggaccattcataccccaaacctcaacatcacacaatatacccaggttacaaacttgcacaagtgccctctgaatctaaaataaaagttgaaaaagcaaaaataaaacagtaaacaacaacaacaacaaaacagcaaaaccctcaataaatacataaataaaaatataaataaatgtctttgccagagctttttgttttttgtgtggctttgagttagtatctggggtcacgttgcttttaagctgtttgctatcaactgcatcctatctaatatttctttttcttaatagtaaaccactcaatttttgtgaggagatattacattgtggttttgatttacatttctctaatgatttcctttccagtttggatgctgagcattttttcttatgttttttgcccattcatatataattttaaaagaaatgtctattcaaatccttttgccattttaaaatcatattatttttaaatattgtgttgtagaaattatttatatattctggatattaactctttatcagatatataatttactaatattttcttccatccacaagttttttttaacattgttatgtcctttaatgcataaaagttttaaaaagtttgatgtagtcccaattgtctattttttcttttgttgtctgtacttttggtgtcatattaaaaaataattgccatatccccttattctaagagttttatagttttagatcttccatttaagttttaaatccattttgagttaattcttgtatatggcataagacaaagtttcaacttcactctttcatgtgtggatatccaagtttcccaacactgtttgttgaagagaatgttcttccctcattgagcggatctggaatgctgtaaatattatttgaccatatatgtggagttttcttttaatgggttctttattctattccattggtctatatgtctctctttaagccagtgtcatgctgttttaattactgtagtcttgtaacatgttttgagatcacggagcatgagaccttcaactcagttagttttcaagattgtctagtcagagtatatatgaatatttagataaatttttctcttttttcaaaaaatgcagcttagattttgatagggattacatataatttgtagactgctttgggttctattgacttttcaaattaatacataatgttgtacagatttggggaatacatctgatattttggagatcttaacattaaatcttccaatccatgaataccaatgtctttacatttatttgtgacttctttcagtactgttttgtagttttcagtgtacaagccttttatttccctggctaagtttattcctaagtattttactatttttgatggtattgtaattaaattattttcttaattacctttggattgtttatagttaatttatagaaaggcaactgatttttgtgtgtcgattttggatcctgcaactttccagaatttgtttaatagttccaacagttttctggattttatgcatatatgcatctaacagttttctagattttatgcaggagtctaggattttatgcatataggatcaagtcatctgtgagcagagataattttacttttttcttttattctttggatgtcttttcttgcttaatttttttttcctaattggtctgcttggaaattcaaatactatattgaatagaagcgaagagacagagtatacttgtcttgttcctaatccagaagaaaagtttgaatcttttaccattgagtgtaagtttacctgtggatttttcatatatggcctttattatgttattttccttctattcctagtttgctgagtgttttcgtgataaaaggtgttaaattttgttaaacatttttt

SEQ ID NO: 4945 - DNA, 2300 bp, Homo sapien
agtatcaaacataaattatttagaaataaaaagtgcactgaaaactacaaaatattttgaaataaatcagaaaagatttaagtaaatggatcacttgaacctgggaagcagaggttgcagtgtgccgagattgtaccactgcactttagcctgggcaacagagggagactccaaagagtcgaaaagaaaagaaaagatttaaataagctgaaacatattctatggatcagaagacttaatattgttaaagtgacaatattccccaaattgatctacagcttcaactcaacccctatcaaaatcctagcttgctttttggctgaaattgacaagctgattctataatttatatggaatctcaaaggatccagaataaccaaaacaatattgaaaaataaagaacagcgttggtggattaacattttccaatttcaaaacttactatagcactgcggtaatcaagcagtgtggcactgtatagcatgtacattacagatcagtggactagaatcaatgtccagaaataaaccgttatgtttataatgaattactttttaataaggtgtcaagacaacgcaatgggaaaagaataatgaattcaacaaatgatgcatggacaaccggacatgcacatgcaacacaatgaatttgaattcttctatcgctccatgcataaaaactaactcaaaatgggtcacggatgtaaatgaaaagctaaaactataataatcctagaggaaaacctaggagtaaatctttaagatgttattgtaggcagtggtttctcagataggaccccaaaatcacaagcgacaaaagaaattggacttaaagttaaatacttttgtgcttcaaacatcatcaagaaagtgaaaacacaacccgcagaagcaataaaaatgtctgtaagtcatgtatccgattagagacttctatccaggatatataaataatgcaattcaatgataaaaaagataaatagcccagttttccaaagagtcaagcatctgaatatacatctctccaaaaatatacagatatccaacaagcatgtgaaaagatgttcaaagccatttgccaggtgcacaaacccaagacagtatgaggagatgctacagggactctgctgcttcacagacatgaagcgttggtgagaatgtaggcagccgcctttggggacttcacatccccgccgccccacgcacggtgagctagtgtttaaacttagccgagatcaatacacgcgactgtgtgcccgtcagaccctgcgctgccggcggggctgggagaggcgggcgccaggagtgggcgggaacctgggggtcaggccccagccgcgggaagccgcccaggagcgcgcgaaaccttctccacacccttccaggcatttgcccgccgcgattcagagagccgacccgtgacccctggcctcccctagacagccccgcatgtccagatgtgccgtcccgcctgcctcccgcgaccactggccatctctgggcctgggcgcggtctcggcgcccgcctgcccccgccaggagccgcaggtccagccagtgaagaagcccgcgctgaaggagcctctgtgctccagaatccatcctcagtatcagcgctggggtggcctcctccaggaagcccttctgattctctcatgggtcgctcttcctctgcagactcccggagcacccctgctccaagtaccgcaagtggcactgagaacttggggagagcagaggctgtgcctagatttgtagggagtccccgcagctccaccccagggcctacaggagcctggccttgggcgaagccgaggcaggcaggcagggcaaagggtggaagcaattcaggagagaacgagtgaacgaatggatgaggggtggcagccgaggttgccccagtcccctggctgcaggaacagacacctcgctgaggagagacccaggagcgaggcccctgccccgcccgaggcgaggtcccgcccagtcggcgccgcgtgaagagtgggagagaagtactgcgggggcgggggcgggggcgggggcgggggcgggggcagccgggagcctggagccagaccggggcggggccgggaccggggccagggaccagtggtgggaggaggctgcggcgctagatgcggacacctggaccgccgcgccgaggctcccggcgctcgctgctcccgcggcccgcgccatgccctcctacacggtcaccgtggccactggcagccagtggttcgccggcactgacgactacatctacctcagcctcgtgggctcggcgggctgcagcga

SEQ ID NO: 4946 - DNA, 2300 bp, Homo sapien
agctccggctccggtgtcctccttctctcgcacttctatcacgccatccagccaggacatctgcaggtaacactctgcttcagatgctgccatgatcagtgtgcagccagaaataagcattagtgtctgtaggttcttgaatttccatttgcttaatcaatctgcctttggtctaaacagttggcgagttttatgtgtggtttgctcaccaagttacccatgctagtctcatttcttcactatgatgtctattctcttttaaaattgtttttactttctgtgcttttatcccactgttctgcatgcagttccagtgcagtgttttctgagtgttgtcaccacagttccgtgcagtctgctgttgtctcgaaagctcctcactgccagagttctctgacacaagggctcactgtgacagttatctgtaaggacacattacaggcgtcaaagagaaattcctttggttcagaatgggcccaggccttgaagcctgctaagaataccaaagccagaagaacactaaagttctcaaggtccctcaatgatgtgggtgagaaggcgcaggatacttcagaaagttttgcctatgtggaaagaacttgttctgaagggaaattaatactccctcaagatacgtgtctcagaactaacaggtttcatcataaagaaaaaagaaccctgaaccacaaacctcttggcaattccaaacattcttgtgtttcatgcctttctgccggtcgctcaactgcctcagaggtggaagctggcaaggggggcaggcccggcctgctgctggaagagaaggcggatggtgaggccacgtcccgaagccggcaactgctccagtacctgttctcactctcgcacggcttgagcgccagcagcctgcacaggttccatgagctggagagctgcgctgctcgcctgcacactgccaagtcctccagcgggctggcagggagtatgggcttctgctctgacgagatgggagacgacgatgtctttgaggacagcacatctgcaaaactgaagagtagggttctgcgggcgcccctctgctccacggaaaaggacagcgacctggattgtccttctcccttctctgaaaaattaccccccatatctcccgtgtccacgtcaggggatgtctgcaggttggtttgccaggaagtgccattctagccatctctgctcgcatcaggaacctcctcttgctttagtatgtgaagtttcaggaaaatgaagtaataggaagttgtaaccagttgtgggttgatggttttctccagaagaatggagtatcaatatcgtttgaaaaacttaatttttatgatgtgagtcccaagatagttttacaaatgataaaagaggaagaagctggctgggcgcagtggctcacgcctgtaatcccagcactttgggaggctgaggcgggtggatcacctgaggtcaggagtttgagaccagcttggccaacgtggcgaaaccccgtctctactaaaaatacaaaaattagccgggcgtggtggcgggcgcctgtaatcccagctactcaggaggctgaggcaggagaattgcttgaacccgggaggcggaggttgcagtgagccaagattgcgccattgcactccagcctgggcaacaagagtgaaactctgtctaaaaaaaaacaaaacaaaacaaaaaaaaaaagaggaagaagctacacatattaaaggccaagctgactcttctaaactaaaaataagtagactttgcataaagaaactggaagaaagaaactagtatcttcagttttccagcctgatggtccagattttaagcattgttgcatctcccagcctcttttttaacccttgctccctacctacccccaaaaggtgtgtggggactggctgttctccagtagctccttccttccttctttttaactgaggtgtagccacctatgtcccatcctaactctgtttcccccctttatcttcccttgtgcagcatccttgtctggcctccataattcactttttgtcatgactcttgtgccctcctcattctgacctttctccagtctccgctccttagtgccagctgtcatcatttctaacatttggatcagagatcccctcactaaaacagcctgagagcctggctccttccaggacgagtgccccaacctgttctctagctgctggaaaagacccctctgtttcttaaaagcctgttaagttccttcaggctagtagctacaccttgttgcatacttccttggaaatagagagtgctttcaaattaatttctca

SEQ ID NO: 4947 - DNA, 2300 bp, Homo sapien
gggagtataaggcagctccgcagtaagtgcctcttgttttgtgtgacgtgcttgaatacaaacattcagactgtttcttgggcacagtagtgctccatcttatgccagcctcatcaaaggcttgaaatagagtaggtggtgtgtgatacctagacactaacatcccctattctattttcctttttttgttgttattatcaatggtcactcacttactgtaaaactagactttataaacagattattattttagctaattttcttctatgtgttgatccctcccagtttttgttcctttttgttgttcattgattctagagttgtgtgaaggaagccatttcgtgattcctggtgctcctctgcttgcttagtgacactactaagaattggcaccagccttacaaacacctgcctttgatccagagtagagtttggggagaggtagagtaagtgactgcttatcaaatgtgaccttggggttgtcaggccctgttgtttaccctaccttttcctactgcctcacctgtccccaccccctaccccagcacatggttaataaatgaaaatctccaaattcgagattcattcttttggttgaaggcttccattttctgttaaaatttgaacaacatgaaacattttactacattaaaccttctggataatttacgtttaattggttttgtatacagagtgggatagatctcagtgggtaagtggggagaaagaacaacacacaattcaattattagacattttgggggatgcgtaagagaaaaccagaaacagggcaggagtacctggaatcactgaagacagtttatgcatacactgttattttacctaaaggcagcctttctcatggttcttaggcatgtcatggtgacccttcatattccctaggaaaccctttacggcagtgtttggcaaactatagtctggtgggccaaatctagcctgctgcctatttttgtaaataaagttttattggaacataactatgctcattcatgtacatactcttttttttttggtgggggggaggttggggggttggagtctcgctgtgttacccaggctggagtgcagtggtgcgatcttggctcactgcgagctccgcctcctgggtttgtgccattctcctgcctcagcctcctgagtagctgcgactacaggcgcccgccaccatgcctggctaattttttgtatttttagtagagacagggtttcaccgtgttagccagggtggtctcgatctcctgacctcgtgatttgcccgccttggcctcccaaagtgctgggattacaggcatgagccaccgcacccggcccatttacatgctctctatgggtgctttcatgctacagtggcagagttaattagctggaacacacttggaccacagtgcctaaaatatgtatcttgccctttataggaatagtttgccaacagctcgtgtagagtctctacttttggaaggttaagtatggatcatagataccttgagtttaatttggacttcctaacctctgatctcaccattatgtggactcacagacagtggttttaaggaaagatcactgcttatttcaggacaaatgcttggtcatgataaaaaaaaaagtttaacttcaaaaatattcttaaaataaatggtggcactgctttgttttaatcctaagtagccaatggaagattatatctctgattatacatgtacgtgatccacctgcctctttcaggtgctcccatcttattatgagaaatgttagaattttccccttagacattcatcttctattgtttttgaagaccaaacatttatgttgccgtaacttatttaaatatacatatgaatataagtataaaatgttaagctcactcttggaaatttaaagtgttttagctgagttatgtttattctctcttcattttctctcagcttgaaatccatggcccaaaatgactctaccagtggagactctcttctgtgaagaagacgaccagataagaggttgggatgagcatgccactgcatcagatctctgccattccatcccaggatgccatctctgctagagtctacagaagtaagaccaaagaaaaggagagggaagaacaggtactgggagagtatcttttttagtttcattatttttattaaatttttattaaagatgacctagaacagtgcttaaactctaaaggtcaggttttctctgataatatactgacaagcacacaaatagttgtactcagaaggaattgtctttttgtagatttctaggttttcagattt

SEQ ID NO: 4948 - DNA, 2300 bp, Homo sapien
catgttgcccaggctggtctggaactcctgggctcaagcgattcacccaccttggccccccaaagtgctggtgttataggcgcgaaccaccacacctggcctacttagcataactttttaaaggttcgtccatattgtggcatgtgtcagtactttatttctttttattgctgaatatgattccgttgaatggatatagcttatttgatttatccgtttatcatttgatggacgtttaggttatttccaccttttggctatcatgagtaatgtgatagaaacattcatggacaagttttcatatgaggagatgtttgcatttctctttggtgtatataccctaggattgaagttgttgggtcatatgataacatgtttaaccttttgagaaagagccagactatttttcaaaacgactgcatagatcctcactagcagtatatgagggtttcagtgtcacaacatccttgctaacacttgtttgtcttttattatgaacataattaaagtaatatctaatagttttgatttgtatttccatgatggctaatgatgttgattaacccatttttcattgggttatttgtctttattattattattattattattattattattattattattattattttggtagagatggggcctcgctatgtttcacacactggttttgaactcctggcctgaagcagtcctcccacctcagcctccgaaaatgctgagatgataggcgtgagctacttgcacctggccttgcccttatgttactgagttgtaagagagttgtttatatattctagatacaagtcccttattacatatatgatttgcaaactttttcttctgtcagttgtctttagacttttttttttttaacatttataaatagaggtagagtattgctatattgcccaggcctttcttgagttctggcctcaagagattctcttgccttggcctcccaaagttctgggattataggtgtgaaccattatgactggctgtgttttccctttctcagtggtgtcttttgaagcacaaaagtttttattctgatgatgtgtagtttgtctgtttttccttttgtgtgaggaagagatccaaatttcttttgcatgtggctatctagttgtcccagcaccatttgttgaaaacagtactctttccccaagaagtgatcttggcacccttcttgaaaatcagctgactatagatacgtgggtttatttctgggccctaaattctattccattgatatatctattcatattccagtatgacacagtcttgattactgttcctttgttgtaagttttgcaatctggaaatgtgagctctccaactttgttctttttcaaggttgttttggcagatctgagtcccttgaattttatataaattttcagatcagcttgtcaaatttctgtaaagaagtcagctcagtttttgatagagattgctttgactctctatgtcaacttgggaagaattgccattttaacaatattaaatcttctgatccatgaacatggacatccatttccaatttcttcaacaaccagctttggcagtatctcttctagatgtgaatgttcatgttaggtgggctgtattttgcaagttagcattagtcaaattgaagccctcatgcctggattgtgaggcatagtgctgaggtttaactgttattctgtgtaaagattaatttagttgatataaaagatgtttggaaattatgcaaagaaaataatgtaatatatgatttgtatttttcatgtaaatcttcacataaaaaatggcatggcctgttttatcgtttgtttgtaaactcatttttatcctaaatatgtgtggcataggagggagattgtttcaggcaaacttataggtctgttgctttgttgtggtggtacatatcaaaagactaacttcaatgacagtgaggagggatgtccttcaaaactgtaaaaaatttgagaccctcttgcatctgtgtttctgtgccataaatagcccttctcaggcttgtcatgggcatgtaccaatgatgtaataatgatgattatatcagaagcaccacaggtagcttttggcatggtaggtatagggctgtggatatcgtcagtttgaccaagtattccaagaggccccatggagtttgtcatctgtaatagaggacgttagtgcattagtgatgaaaaaactgcttaccactgactattgtgatctcccagggagtataaggcagctccgcagtaagtgcctcttgttttgtgtgacgtgcttgaatacaa

SEQ ID NO: 4949 - DNA, 2300 bp, Homo sapien
ttcaagtgattatcctgtctcagcctcccgagtagctgggattacagatacccgccaccatgcctggctaatttttgtatttttagtagagaggaggtttcatgttggctaggccacgttggccaggccggtcttgaactcctgagctcaggtgatctgcctgcctcggcctcccaaagtgctagtattacagacgtgagccaccacgcctggctggcaatcccttcttgaactacactccaggtggcaagaatctggacccaggacctggacacgttcaagttgtcagctccctttccctcaggactctgacctcctatactaataccccgtcgccaaagaccatattggttaacatttacccaacactgtatgtattgggcacttaaaagtgttatacaggcattacctcattttgtctcataaccactctattcagtagatatctttcagaaagctgaagagaggctcggaaaggttaaggaaattgcctagacagtaatggttgcgccaggactcaccctagctttgtctccatgagtgctgcttatcagccctgcatagctcacagatccctgttgaactacgaaggttctgccgcttcctgtagaaggatgacaggattccatatccattcatcagtcagccaaccctttggctcaacaagcctggtctaggcataagctataccaatggaagatattggtactaccttcatggaacacctgctgccagaagcagtagagccaaccaggttgtggcaactggccttgataacctattttccacagtaaaagacaaatggagaaaattcatcatttttctgctctttgtaatactgtattgtaagtgtgttatagaaatggagatgttttgaccttgctgatccagaggatatcttgagcacactgttttgaacctgacaatctgctttttacttagccaaaaattcaaagtggtcagaattgtagggaggaattgattagctatatgatagatcactccgggacaacagaacaactatggaatatttgagaggatttgcttataattcactcatgaatttactaagaaatacaaattattcatcttttatgcatgattatgggagaaataaaactggcagtggttgaaactatttctgggaagtttgatgtaggaaaattggatttggtagacagtgatgaaagtgacagaggaataatgagagttttatgtggacaaaagatgaatgcagagtctggcccggtgcagtggctcatgcctgtattcccagcactttggcaggcagaggcaggcggatcacgaggtcaggagattgagaccatcctggctaacacggtgaaacctcgtctctactaaaaacacaaaaaaatagccgggcgtggtggcgggcgcctgtagtcccagctactggggaggctgaggcaggagaatggcgtgaacccaggaggtggagcttgcagtgagccgagatcgtaccactgcactccagcctgggctacagagtgagactccgtctcaaaaaaaaaaaaaagagatgaatgcagaatcaaatatttagacgtctgtatgtacacagagatgattcccccataaaaattaaaatacaacttaaaagtaagaagtcgtataaacctccttcacgtgctttctctggctgagaggctatgctgtgggaatctttcagtccagattagggagcgaaagcaaacaaaaatctgtcaaggcaaaaaccgttattacttattccttcgcttttcctcccgtttgatagcctcaggtaagaaagtattttccatcttcttctccaagtaaaacatccttttgccagacaaaatttccttttccttccaaaacactaatattaataacatgtagtcagggccaggagacactaaacgacacacacagagctggggaagtcttttcggttccaagcccagtgggttgtcgcctgggcactgcgaaggggtggaagcacagaaaggccgcgcggcggcacccgctgcagcccgcccccagcgcgctgcagtcgccggggcaacgcctccacccaactcggccggacacgtgacgcccgcgtcacgtgacctgccactcggtgtcctcccgcggaggggcgtagggtgtaaacaggcgacgcgctgggggaggtgcggccttgctgcgtccacgtctcgggcatgctcgaggcgggccagggcggtagcgccgccagctcagagcccacctgaggtaactcctgcggcctctaggatcggagtcccccacgccgcgcgcagccgccgccgctggcc

SEQ ID NO: 4950 - DNA, 2300 bp, Homo sapien
caaagtgtttaatcaaaacacctacttttcttattagaactaaaattattttatatgtttatgaggagtgtgatacagattctgaggtaaatatatatattttttacttttctttttttttttgagacggagtcttgctctgtcaccgaggctggagtgcagtggcatgatctctgctcacttcaacctctgccacctgggttcaagtgattctcctgcctcagcctcccgagtagctgggattacaggcagtggtattgaggtcaggagtttgagaccagcttggccaacatggtgaaaccccatctctactaaaaatacaaaaattagctgggcatggtggcgggctactcaggaggctgagacatgagaattgcttgaacctgggagacagacgttacagtgagtggagactgcgccactacagtccagtctgggtgacagaggttacagtgagtggagactgcgccactacagtccagtctgggtgacagagtgagactctgtctcaaaaaacgaatacaaataaaaaaaaattgtttttgaaataactattatcaaagcagcatagaaagattaaaatgtttcttttctaaaactaaattgtgcccaatgcatatcaaacttcatatatattgttttatagctgataaaatctgaaagatttttctgttatgagaagatccacacatacacttgcctgagtaaggcaccctgtgctggtttaggaaaggctttcatgtgactgtggtaatggctatagcaatatctaaaaaatgggcataatttttatttcttttttgttgtgttttgttgggttttttcccccctaaaggtctgctctctgatccaaatttttatctcttgatgtaatatggaaagtggagcattaacttacaaaaggcaagaacttgtttgaaaagtgtcttttaatatttatacattttgggcctgtgaaagtaaatcaaaacatccaaataactgttttcataaagcaagctaaaccatattataagatttttatgttagtaatagtgttattgaatttaggctatggaagcatctttgatgtttttaccttactgctttccaagtttaatattttcctattgctgcaacttctttttaaagggttgtagagcaccacgattctgttaataaataagtgaaagttatgcagcttgggaaatctttacctcttttaggagaaaacagatgtttctgcagtatgatgagaatgtctttgggagagaacttttattttttcctggaactgttgcagttttagtacatgaagtgacccccctcacgttctaagttattatgtacttttaattacctaacttcatgtcaaggaacagctcttaagaatcagcctttatataaaaccagaaagaaaaagataggtctgcttacttctaatttcttagatatgtctcctaattgtgtgtgtgtgtgtactttttttttttttttttgagggactacaggtgcgcaccaccatgcccagctaatttttgtattttttttagtagagacggggtttcaccatgttggccaggatggtcttgatctcttgacttcatgatctgcccgcctcggcctcccaaagtgctgggattacaggcatgagccaccgcacccggccgtgtctgtgtacttttaatctaacgtaagtggaatttattttggttttaattattgttggaaccaatatttgaaaatatagggagcagaaagtatatagtaaaaaaattattgatagtaatatcatagaatcagcaaatacacagactctagtgacatagggaaaaaatatagactataatggcataggacaaaaaactctcatgttttagtttagccctgtctttgaatatagcaacataatcatgcattttgtttgtttgtttcttattaatataacatagggaatgctatattaattgtagaaagatcagaaacttatttgaagaatatcatgtttatattatatgcacaggactgttgttcaaattcagtatattatatcctgtcactgtaccaagatgcataaaacttgatccaaattgaagacttatttcaattttccatttgtagttcctacagacgatccacttaggaagatggcagagtacttggattccagtcgagttgaggtctgggagaagacctcctgcagcaaacaagttacatttttggtataccaagaaggagatcaattgaatttctttcctgcagtagataggggagatggcactttaacaccgttatctgactcttcaaagaaaatagatttt

SEQ ID NO: 4951 - DNA, 2300 bp, Homo sapien
ttcctttctgctattaggtcttagaaaaatcacatttgattctctaggcattgttctttaaaacctaaatgcctagaggctggaactctaaaatacaattcagaaaaatcacatgattcctgatccaattcagagaggtttaaaaataaaccttttgccagtatagggaacagaaatggaatgacatactataaatactactttaccattgtgtttagtttcatacgagtcttgtttatttttaaatctaccagatcttcaaatcccaagatgatgatcgttttgcaaaattccaacattgcctgtttacctggtttgtgatgtgtctgggtttcatggatattatcatggccccggttgcatcctttctcagaatataagtagttctgaaatccagtcattcattcaacaaatacgtattgagcgtctactgaatggtcagtgcaatgttccaagtatggtagacatgggagagaaagtctctgcttcatgacagtgcctacaataaatgtgtaaagagtcgatgtaactcctaatggttgtaagtgctatgcagaaaatagggtaggaagggccctcgaaaaagatgacattagtggagacttgattgatgagagggttttattaagcacaagaagagacggcagtattcacattggtccctgagtcaggtatgtcacatgaattcccatgaagtggaggagactagtcagagcatcctcttctgtggacctcattttgaggaagtccttcagatttatttgatccttcactaaccagaaaaccgaaggataagtattgattctactcctggcttgcttccacatgtcaaattatatccctatgtttaataattttggttagaaaataggattattgccatctttttcttagctatttcaagaggatttaatgagatatgctactttggctgttggactgctttttataggttagagaaaaacaaagttaataatgttagggccttttagcactcctgataccagagacttttaattaattggatttaggtaattgtcctatgtgacatttatagtaataactataaatgtttatagtaataactatgtgatgtttatagtaataactcttgaagtagcacaagaaccctgtgtttactgaaccattatgttaagatagaattatatagtgtttaatgccatgtgaactctattgtattacatttttgaaagttggttatttgtgcgtagtactactttaaaccaaagtgtttaatcaaaacacctacttttcttattagaactaaaattattttatatgtttatgaggagtgtgatacagattctgaggtaaatatatatattttttacttttctttttttttttgagacggagtcttgctctgtcaccgaggctggagtgcagtggcatgatctctgctcacttcaacctctgccacctgggttcaagtgattctcctgcctcagcctcccgagtagctgggattacaggcagtggtattgaggtcaggagtttgagaccagcttggccaacatggtgaaaccccatctctactaaaaatacaaaaattagctgggcatggtggcgggctactcaggaggctgagacatgagaattgcttgaacctgggagacagacgttacagtgagtggagactgcgccactacagtccagtctgggtgacagaggttacagtgagtggagactgcgccactacagtccagtctgggtgacagagtgagactctgtctcaaaaaacgaatacaaataaaaaaaaattgtttttgaaataactattatcaaagcagcatagaaagattaaaatgtttcttttctaaaactaaattgtgcccaatgcatatcaaacttcatatatattgttttatagctgataaaatctgaaagatttttctgttatgagaagatccacacatacacttgcctgagtaaggcaccctgtgctggtttaggaaaggctttcatgtgactgtggtaatggctatagcaatatctaaaaaatgggcataatttttatttcttttttgttgtgttttgttgggttttttcccccctaaaggtctgctctctgatccaaatttttatctcttgatgtaatatggaaagtggagcattaacttacaaaaggcaagaacttgtttgaaaagtgtcttttaatatttatacattttgggcctgtgaaagtaaatcaaaacatccaaataactgttttcataaagcaagctaaaccatattataagatttttatgttagtaatagtgttattgaatttaggctat

SEQ ID NO: 4952 - DNA, 2300 bp, Homo sapien
gataggtaatgtagtaacactaattttacagataaagctaaaatctggaagcaatgtggaataatggaacaaggttggatttttgtattgtgtcctagtttaaatatggctttccgacatagagctgtttgattataggtaaattgttctactttaattggcttttgtttactcctttgtagacgagggatttcactaccaactttgcaggattgtgatggggagagaatacgtaaagacccttatcaactatctggcacttgaagaatggcagatgataatgatgatgatgttgtaaagaatgaatgacttggccaggtaatggagcttctggtattgggaggcaaggctttaaacacacctgcctgactccacggtccatgctgtcaattctccagtgtgaatgaagtgggcaggcaagggtgagaaacgctaaggtttttactcagtaagtctccatcacaggccctattctaggctcaggaatgcaaagatgattaccatcatagctctgtcctcaaaggtctccaatctatttagcattaagcatatgtggagtttcagaaggaaccaacggcgagactggtgaatcaatgcccagtgcctcaccatactcccccagtgtatgctcaatagttcgttgaactgtggagataagttggtgggtagggtctcagaagaatgagagaggacaggagacacagattagatgtttagtttcatattagactggctcctctgagccagaagtcgaggatgagtgaacccgcagtgggagtgagatgacattctttgtcagctgagtaacccacttagtgaaggaggttcacggagttggaaaatcggtagggggaacggaacgaggcagtgggctcccatgttaggttgaaaggcaggtgttggcttgaagccagttactgtttacaccgcagctcagcagcttggaaactggagcaggaggtgtggctgggcttacccaacgctgggatttgagcccagggtgcctactccattgcctggcctacagttctcagtaaattgtatgaggactacagaaagttatctgttttcgcctttgtcttcaagcaggcacggtaatgcccccattttccagatgaggcaattgaggccagaaacattaggggacggtgaagcctaaagcagatttgttaggacaggccggcccaaacgcaccaggagcgcccctcactctggagaggccaccgactggacagcgtctgcctgtatcgcctatctccagcaaatcaggcgcctggaagaggatccccggtgggtctcacggagggcggctccggcttcaaccccgccgttcccagcaggccatgcggctgccctccagacgcccgcgtgggcacgagtcaggggtccagtgttgctagtaataaaagatcaacatccgggcctcgtaactcacaacctccagcgaatgccaagaaggccccagggccctggcgccccggcaaccgcccacgtccgggggccaggcctgcccccgcccgcgctgattggagggcagcgaaagcgccgtccagcgattggtaggtggtgtcacaaaggggcggggcgcggcggcagcggagcgttgtcggccagtgccttccgtgaagttgctcgccgggtcgttgggccctgtcgacctgtaggcgggcgagcgagccagcggacaagactgcgggtgaggctgagctagcgagcggccggcagggggggcgcccgggctgcgagccgctgagcccagccgcgctgccgccgccggccgtcgtggggccggaatggcgcaaggccggagtggcgcgggcgctcggcgctgggctgccgggtagagtcctgtccccgcccctcgccttgcggcctgacgccggccgctgctgcccggggaccggagcggcgggccgcctttgcccaggacacacgctctggcgtttgttcctttgggcgtgacgccagcttcaacgggtacgcggctttcccgacgggtgctgatctccgagtcgctgttgtcacgcggactgctgtcctccagattcaggccggtgggtctggggagcccggattggtcttggaggagcaacggctgcgcaggtgactcggtggcctcaagtgtgtaggtacctggatggcgcgaggagatgctggctctgaaatacttcccaattccgcttgcagatgaactccggactagagtttaggctacagacaagttaggcggttgatgtgattctgtagctcgtatttcgaactttagggatgttttgatgtatcagtaaatgtagatctgt

SEQ ID NO: 4953 - DNA, 2300 bp, Homo sapien
tcttgctgctgactattcagcctgtcaccatggtgcagtcttgtaggccgcccaggttggtctcagcgatcctggagctactgacttcttccttgggcactgtaagatcagacagggaattactcatacccagagtcaaagattttgttcagctcccacaggtcaaccatttgcccaagtctgctgtgagagtgacgtgatgacagatgagggcacttgctagttggccactcctttcccctattcattttatgcatcttccttctgtccgtaggttatttgtgcacatagtttcttgctgtagtacccaatgtcggtcagagtcagcatttgttaaatacgatgattttcttttggaacaactaaatctactcatcaatcagtaggattggtttcaggggattcaggagacaacaggtttagaaaatacgcaagctgctattttgagaggcttgaaagggagagagaacttacgttaaaaaaaagttcctatggtaacaacttttaatgctattttattcagtctccatggtctatcagataggtaatgtagtaacactaattttacagataaagctaaaatctggaagcaatgtggaataatggaacaaggttggatttttgtattgtgtcctagtttaaatatggctttccgacatagagctgtttgattataggtaaattgttctactttaattggcttttgtttactcctttgtagacgagggatttcactaccaactttgcaggattgtgatggggagagaatacgtaaagacccttatcaactatctggcacttgaagaatggcagatgataatgatgatgatgttgtaaagaatgaatgacttggccaggtaatggagcttctggtattgggaggcaaggctttaaacacacctgcctgactccacggtccatgctgtcaattctccagtgtgaatgaagtgggcaggcaagggtgagaaacgctaaggtttttactcagtaagtctccatcacaggccctattctaggctcaggaatgcaaagatgattaccatcatagctctgtcctcaaaggtctccaatctatttagcattaagcatatgtggagtttcagaaggaaccaacggcgagactggtgaatcaatgcccagtgcctcaccatactcccccagtgtatgctcaatagttcgttgaactgtggagataagttggtgggtagggtctcagaagaatgagagaggacaggagacacagattagatgtttagtttcatattagactggctcctctgagccagaagtcgaggatgagtgaacccgcagtgggagtgagatgacattctttgtcagctgagtaacccacttagtgaaggaggttcacggagttggaaaatcggtagggggaacggaacgaggcagtgggctcccatgttaggttgaaaggcaggtgttggcttgaagccagttactgtttacaccgcagctcagcagcttggaaactggagcaggaggtgtggctgggcttacccaacgctgggatttgagcccagggtgcctactccattgcctggcctacagttctcagtaaattgtatgaggactacagaaagttatctgttttcgcctttgtcttcaagcaggcacggtaatgcccccattttccagatgaggcaattgaggccagaaacattaggggacggtgaagcctaaagcagatttgttaggacaggccggcccaaacgcaccaggagcgcccctcactctggagaggccaccgactggacagcgtctgcctgtatcgcctatctccagcaaatcaggcgcctggaagaggatccccggtgggtctcacggagggcggctccggcttcaaccccgccgttcccagcaggccatgcggctgccctccagacgcccgcgtgggcacgagtcaggggtccagtgttgctagtaataaaagatcaacatccgggcctcgtaactcacaacctccagcgaatgccaagaaggccccagggccctggcgccccggcaaccgcccacgtccgggggccaggcctgcccccgcccgcgctgattggagggcagcgaaagcgccgtccagcgattggtaggtggtgtcacaaaggggcggggcgcggcggcagcggagcgttgtcggccagtgccttccgtgaagttgctcgccgggtcgttgggccctgtcgacctgtaggcgggcgagcgagccagcggacaagactgcgggtgaggctgagctagcgagcggccggcagggggggcgcccgggctgcgagccgctgagcccagcc

SEQ ID NO: 4954 - DNA, 2300 bp, Homo sapien
aacactattaagtcatgaaacgaagactctgaggtagaagtcaagcaatataatccacaatttcaggtattcccagcaaccatcgcatctcgcaagtaagatgtatttttttttaaagtctcaacttccaaaaaatcaataatccattctgtaaaatcagatgtaaaactatgaccgagccgggcgcagtggctcacgcctgtaatcccagcactttgggaggctgaggcgggcggatcacgaggtcaggagatcgagaccatcctggctaacacagtgaaaccctgtctctattaaaaatacaaaaaattagccaggcgtggtggcgggctcttgtagtcacagctactcgggaggctgaggcaggagaatggcatgaacctgggaggcggaccttgcagtgagccgagactgcactccagcctgggcgacagagagagactccgtctcaaaaacaaacaaacaaacaaacaaacgacaacaaaaaaaaccaactatgaccgacagaagacacccaaacttttgtcgtggtaacacagtaaatgcttttactaaaagctgccaacatttctatcgtaagggggcagctggttgtaaccttaatgtccatattggtcgggatagtaaggttcttgtctgtgttgcgggtaattgttaccgcaggattgtccacgccactgattggatcgattgtcacttggccacccccatctgccgtccctgcctctgaactgtctgctatcttgcaaccgattgtctctgtttctttggttcccaccagctctgctattccattcctcaacaattggagaggactcaggagggcgtttcaagtattcctgatactcctcgtcatcttctgtgaatctactagcaaacatctcttcaaaatttggaacagctttggcagtgtcagtcattctgaaattcccaaagatttgaggcagctgtattgtttaatgtttaggttgtttaaatccgccaagggctgtgtctatctagctcgggccgaaccccgccagcgagacactaagagaccgcaggagaggtggcctctggcccaccacaccgtggaactccagaccaccccagctctccaatgtagcggagacccttccgctagccatagaaaataacttaagtcacttaagctgtacttggggtaatcaggttatttaatgaggtgataactgaggtgactacaaaagaaaagtctgggattgggtgtgtgagcaaggtgcatggggacagtggtatgttctaggttgaaggctcaccctaggccaagcaccgtggcacctgttttacaatatcataactttaatatcacatccttgcaagatatgtagcttcgttttactgaggaaagctcagaaaagttaaataactcgcccttgggcacacatgactggaaagaaattgggatttttattttagtaagtaagttggtcaggcacaagggcgactcagcagagggaacttcaaggaagtgtgagacaacagctggagccctgagctgggagagtggaggacgaattataaagagttttatgcctgccataatgagaagcttgtccttgaacttgaggggaatgctgagagtgcaaaggactttaagcaggccctacacagtggcagccaagcaggtcataaagagcaagatgatgcccaggcagatcagggattctcttatctacagagcgtccgcctaccagctccttcacagcagcggattttgctgcaagagaagaggcagcaggccaggccttttccttcgcccacagcgcctacgtcgaaggctcccaggctggttgctccactggctgcttgaggtcccctctctccagacccgccgaactggcggccggtgctttggccgatcccgcgccgctgcctcgggccttgggcggcagcgccccccgcccaacccgcctctgcagcgttcctggcgtcagcccctatcctccagcttcctccgccccaacctagggtagaaccccaaactccagtcccagtccacttccgcagcttcctcccctcagcatcgcaggtcggatcacgtgcgggttctgtcacgtgacatcaggtcacgtgaggccggtcacgccccgggcagcttggctggggctaggcttccggggctctgcggtcctcggcctgtgctggcagcctcggagcccaccgagccgggcggctgggatggtgagggcggcgggccggagaggggccggcctgggctggggccgccgtccctgccgccctcaggctcagcctctcttctcgtttttttcgctgcagat

SEQ ID NO: 4955 - DNA, 2300 bp, Homo sapien
tgttggtcaagatggtcacaatggcccatccaggtttatggggagaggccataggctccccttcttgatggtgggagtgtaaatgtactctcagacttgtgtgaaaaccctaccaaaggctttgccccatgtgtgtcatcatagagtgaatgtttttattggatattgttcagattctgaggcaaggagaagtaaaactaaggcagtctaagtaagagttaaagctttggacccaaaggaatgcgtcctgactcctttctctatatctgaagtgtgaggctgaagcttgccctgtgaagtcattttgggggaacatatttgaggtaacggaagtgtcttttcttgcagtaccaagaaaggtatcagttaagggtccgaaactgtgatgttgacatttgtttttgttctttgctttggtttactttcattttcttagaacagcagaaccctttctcttgccattgtgtaacatgcaggaggggcacgggatgcctggaatcccccacgtggcctcttctatctaaataaacccatgggactccggggagcacaggggaaaaacactgtgtggaggagatctcacttagtgaactcattaggtctatatttaggagtagacagcgaccccataattaaaaaaaaaaaaaaactgtccaaagaggtcttagaaatatcttcttgtcctatttaattgttcggctcttgtgtattgaagtttatcttcccaagggaatagatgtcccattttatgtttctacttcatgtaggtcaacttgcaggtctttctttgcaggataagctgatgttttataacattttgaaaatttcttgatttttatattttttagctattttgagatgaaattatactctttttgcctaggctggagtgcaatggtgggatcttggctcactgcaacctctgccttccaggttcaagcaattctcctgccacagcctcctgagtagctgagataacaggcacccaccaccacacctggctaatctggtatttttacaaaattaatataggctggtcttgaactcctgacctcaggtgatctgcctgccccagcctcccaaaatgctgggattatagacatgagccacagcaccgagctgaaagtttctttagaatctatcaggtcttatcctggtttgcaacgtcatatacctatagttaagctaagtagactagcaaacatttaaaaataaagtttaatttgtatttatttaaaagaaataagtcggccgggtgtggtggctcaagcctgtaatcccagcacttggggaagccgaggcgggcggatcacaaggtcaggagatcgagaccatcctggctaacatggtgaaaccccgtctctactaaaaatacaaaaaaattagccgggcgtggtggcaggcgcctgtagtctcagctactcaggaggcagaggcaggagaatggtgtgaatccgggaggcggagctttcagtgagccgagattgcaccactgcactgcagcctgggcaacagagcgagactctgcctcaaaaaaaagaaaaagaagtaagtcataatcttaggagaggagggtgttactaaataaaatagttgtagctccattaatttgggaatctagcccctgtttctttattgaccctgtctaatctctgattctttagacagtaatgggaagccatgcttatatatttatttttttagcatggtgtaggaaattgattcaaaaacttattcctgccttctgtcattcaggtgggaatacagaagcccctgggctctgcgagcccaccagatcctgtagctctcctcctccttagcgccactgcacacaccctgcacagaccctgaggcctatccctttaaggactctgtctgagccaccttccctctcaggaaagaagcctagacacatggcagctgtcatgtctgagtcacttgtgttttatactgacctgatattttaaaaactgatattcctgttaaccagcaactttaatttcaatccaacaggatttgttttcttctcaaagtgcgagtaacttaaaaggtgcatctctgctgcctggcaagctccccacgtcggtttccctgtttgatgatgaagatgaagaggtaaacattgttattgtaacactagataatttagattaggagaaaacggttgttgatgtaactttctacccagaggctcatatactagcaaaaggtggtagggaagcagtcaggctacctgaagtttatataacaaaaatatttctgtttttatttcagtgacttcttccttatattttcctagc

SEQ ID NO: 4956 - DNA, 2300 bp, Homo sapien
catatgtaaagatggacacaacaaagatgtcccctgcagctgtattatattagcaaaaggctggccacagcctaaaagccactcagtaggggaatgaaacattgacaaaatggaatgctatggcgcttccaaaaataccagaaaatatatttataaatacaaagtttacatatatatatatatgtgtgtgtatatatatatatatatatgtgtatatatatatatatatatatatatatatatatatatacacacacacacatatatatatatatgcacaagctttagagataatctttccaggttatatatattatataaacttcgtatagtatctaaattttttattagaaaagcaatccattagttccataatgagaaacattttgaaggtaaaaaacatacaactgaatgaattctcttcatctcatttccaaagggaagaagagacagcagctgactcaagcacaaactacacagagtggtcaagtatgtgtccctcacctgtaagcactgcaggccaaagacctggcacaggtgcgaccacaagccttcctatggctgtccatcacttctgccctactttcagaccccgagtgagtcccttttttgtttactagatatctaacatttaaaagttaccatcaacattattggtttgataatataatgctccagacctgacattctaaaattcatccctatttccttatcacagccacagattaaaacttaacaaaaaggccaggcatggtggctcatgcctgtaatcccagcactttgggaggccaaggcgggtggattaccagaggccaggagttcgagaccagcctggccaatgtggtgaaaccccacctctactaaaaatacaaagatcagccgggtgtggtggcgtgtgcctgtggttccagctacttgggaggctgaggtgggagaatccttgaacctgggaggcagaggctgcagtgggccgagatcatgccactgcactccagcctgggcaacacagtaggactccatctcaaaacaaaacaaaacaaaacaaaaaaaccaaaaaaactaatgaaaaacttacttctaacaaaataaatcacattaacaataattattattgttacatataaaaatgagtttaacacagcaagtaatgttaaatatttcacaactgtggaaaaatattacaaaaccatacacagtaagagactgggagaaaatatatcaaattaatcatattcactgtgtgcagctctcatttataaataagcttatagtattggtataacaaaaaaattcatataacattttttgtagaaataaacatagactatttctttggttagatctataaaaaggattggcaatctatgacctgccaacctggtttgcataacatcaccattgagatcaaattcatataccataaaatctacccatttacgtataaaatgtaatgattttttggtatattcagatctgtgtatccactaccacaatctaagtttagaatattctcatcacccccaaaagaaaccccaaaccattagcagtaattatccattcctgctcactgctactcccagcccccagtaactactaatctactttctgtctccattgatatgcctattctggacatttcatataaatggaatcacataatatgtggtctttcatgactggcttattttatttagaatgttttcaaggttcatccatgtggcagcatgtatcagtactttgccttttttattaccaaataatattccattgtatggatatactatattatgtttagccattgtttccatcttttggctattatgaataatgctgctgggagcaatcatattcaagttttgtgtgaacatgtttttatttctcttggatatgtacccaggaataaaattccggattgtgtggtagctttatgttataagaatttgaagaacagcaaactgttctccaaagtggttgtactgttccacacttgcagcagcaaggaatgagaatttccatttatccacatccttaccaacactcgttacttccctttttttttttttttttattatggtcctcttcccgggtatgaagtggtatgtcactgtggttttggcttccctgatgctgagcatctttctatatcctttttggccatttgtctatcttcttcagtaaaatctctattcagatgtctgtcttacctattttttttcagacagggtctcgttctgtcactcagcctgagtgcaatggtgtgatcacagcccactacagccttgaactcctgggctcaaagg

SEQ ID NO: 4957 - DNA, 2300 bp, Homo sapien
ttgttcctcatcttatgttccctatactaacattaaaacattaataatccaggctctctgactgtactacacatctgtgtgatgtttaaatggttgattgaaagaccattgcatacactggggtggctaaatattcgtgcctttcaggtgcaaagctttgaatctgagttttagcctttctatgtcattttctcccccagccccagtaggtttttgtaagtactctgttttctttttatcatagagaggactcctgtgacagccacagtcttcagaatgctatttctgaaatgctacctttgagttggttcagccctcatttgagaaagtatttttaagactcagaagccaggattgttttttgcattatgatttttccttaaaacttctaagatatttgatgcctttttggtattttttttcttttgaaggtacaagagaaaaagagagtagtgaaaaaagaccactctgttaactctttcaaaaaccagaaacatcctgaatccattcaaggtagtaaagaaaaaggcatatggaagccggaaacacctcaggttagaaatcctctttaaggattttcagctcttgtttgcatcccagtacagagaaattccattatgcagacccacagttatttagacttgtctgcattaaggaggaaacagcaaccagggctacagctttgtcttcactgcacttcccccgagtcatctcccctctcctcactccacacgccagagtttcatgaatctatactttaatagttagtgttttttgatgccatgccagatttgactctgaagtggagttaaggtaggatgaagaatcttcttcccactaaagaatttatttctccctctggatttccttggaatagaattaaaatagaaataaatataaattacatctgatttcctgcctgctctcagtgttgcctctcccgaggtcattgctgttgggccgtactctgcagcagtcttctcagaacgctgtggagctcctcctgggaacagcccaggactggagagcgagtgacagttccacgtgcaggtgtcccagggtgtctcactgaagccttagtgtcctgagccgtaaacctgaggcacttggacgaacacatcaccactgacccttcctggggctcagatcttttgcttttagagccagtgcattaggctatggttgaatttttgtgtgctccttgaaatttctatttgataaccaacatggtaattttgcctgctggtcagttttaggtgctctgataaactgtgactcttgggaatcttactcatcttgtattccttgactccatatctgatctggcagctttccacttatgtgacagaggaggaggcatacgtgaagtagtgctagtgaaacatcaggccccaggagagatttgaatgcctttcccattaaagagctacagaaagtgacagttttgctccatcacagatttatttacaggcataagaaacacttgtctttctgtttcccaaatggatttttaactggatgtaatcttacacaggactcatcaggtctcgctccatttaaaaccaaagaaccatccactcggatcgggaagatacaagtaattaaaacactggaatcttcattgcctgccctgtggcatctataaacttttttgggtttcctactcttgtcagctgctgccaaacatcttctcatctcttcccccgcctcccctcccctgcacctagttgttgtctcctgtgtgctgcgtctttaacatctattctttgagcccagtggtgggcataggtgtaagacgctctgttttaattctgagactagattgggcgattttcctacgtttctctactcctctcgtattatacattatgtgtaccgaatcttgtcatgtgtcacaataaagataatagactgctgtgttgaagaacaaatacagagtttcatttttcttctttaggcaaatttagcgatcaacccagcggccttgctgcccacagcggcttcccagatctctgaagtaaagcctgttttgccagaattggcttttccttcatctgaacacagaaggagccacggtctggaaagtgtgcctgtccttcccgggagtggggaggccggtgtgagttttgatcttccagctcaggcagacaccttacacagtgcaaacaaggtgatgaaaccatctttgcttccttgctctcttcttttaaccagaacatgcatatgcttctttctagtttatcagttgcatacacagcagtctttgactctccttttgaaggaggtgcctcatccttcct

SEQ ID NO: 4958 - DNA, 2300 bp, Homo sapien
ttgatcttccagctcaggcagacaccttacacagtgcaaacaaggtgatgaaaccatctttgcttccttgctctcttcttttaaccagaacatgcatatgcttctttctagtttatcagttgcatacacagcagtctttgactctccttttgaaggaggtgcctcatccttccttcagccgctcccccctccattctccccacccccctcatcctgcacctgcttttccatggcctgcatttggtacatttgcattctgctcagtagccacagtaacgtctcaccactttggctggtgtctgacacctgcaggtttccagcactgccacctgggggtcttctaaccacagagcagatcatgcccctcctgctggcgcttcctcactactccaaggagagcattcgggctcctgggtttggtatgaaacccctttgcaatcggtgccagcccatgtgtgcagcttcctcactagtcacttcacactttccagcctgactccaggcacaccaggtgccactccctgaacacacatggtctgttctgctgctgcccaaggctcctgctgcctcctcaccaggaatgcccctctctgtccacagctgtgcttccacatccccacttctgtcactgtgccctgcactccctgcaccaagttcccacagcagcgacactgtttcatgggatctcctcaatggactgtgaactctttgaagttttcctttcattgtagttgggtttcttgtttctatccagtctcccttctctagaaagctttaactgatctgcaagtaagtgacaggacacagaatgacctaccctgacaaatagattcatttcaaatgtttgcaaacctgtttccttgtgcaaaacaaaacagccttccttttaacgacaattttcattggctttttttttattaagtttaaattggcaactaaaattgtgacattcccctgaagttgacaacacaatcatactttgcccagagtagattgtagcttctcaaaattctacttgattgtatattttggaaactatcataaactgcatcattgctactaagtgattcatgttttgagattatatgaaaagttctgatttctaagccatatttcttatgtggaatatttaacatttgaattcaatgtttattgacttgaagaaaacagcaccttagattacctctctttattgtgtcatgtttctccccgctcctggagcctgaatttagactagccccctaacaaaggttagtaccagaattccccgattctttcttgttttgaaagatacccacgtttctgttgagggtagagtaggggccaagggaggggttgtgagacacagagagccaacatgcctactttccaggtttccagcaacagatgaaactttttgtgtgaaactgaactgaaactgccctgaaaagattaaaaaatggagaactctaaaggattaagaatgacttagtcttggagtactaggagctattaaactccttccttggaaatcattaagaaataacctcttctatgttcttagataatatcttcattgaagtagaccagataaccttacaatattttgagtcactgattctttgccatggtagctttgaacactttattttatcgtcagatcaatgtatgtttttttgccgttgcagagccgtgtcaagatgagagggaagcgtagaccgcagacccgtgcagctaggcggctggctgctcaggagtccagcgaggctgaggacatgagcgtccccagaggacccattgcacagtgggctgatggcgccatttccccaaatggccatcggccacagctcagagcagccagtggagaagacagcactgaggaggccctggcagctgccgctgcaccttgggaaggtggtcctgtgcctggagtggacacaagcccctttgcaaagtctctgggtcattccagaggggaggctgacctttttgattctggggacattttttccacgggcactggatctcagtccgtggagagaacaaaacccaaggcaaagatagcagagaatcctgccaacccaccagtgggtggtaaagcaaagagccccatgtttcctgctctaggcgaggccagcagtgatgatgatctctttcagtctgctaaaccaaaaccagcaaagaaaacaaatccctttcctctcctggaagatgaggatgacctctttacagatcagaaagtcaagaagaatgagacaaaatccagtagtcagcaggatgtcatattaacaacacaagatatttttgaggtaataggactt

SEQ ID NO: 4959 - DNA, 2300 bp, Homo sapien
ctacaagacacaatctgaaaatgaaattagagaaacaatttcactgggcaacaagagcaaaacttcatctcaaaataataataataataataataataatcatcatcatcatcatctacaatgtcatttcccatccaagcttgacttctacctttactttctgatatggttttgccatgcccccacccaaatctcatcatgaattataatccccataatcctgatgtgtcgagggaggggcctagggggaggtgattggatcacgggggcagttatcctcatgctgttcttgtgatattcagtaagtcctcatgagatcttatagggttttgttttgttttgttttttgggatggagtcttgctctgttgtccaggcaggagtgccatggcacgatcttggctcactgcagtctctgcctcttgagttccagtgattctcctgcctcagcctcctgagtagctgggattacaggcatgcacaaccacacccagctaatttttgtatttttagtagagacaggatttcactacattagctaggctggtctcaaactcctgacctcagttgatccacctgccttggcctcccaaagtactagggttacaagtgtgagccaccgtgcccagctgagatctgatggttttatacatgtttgacagttgctccttcacatgttcccactctctgtgcggccaccatggaagtcggacctgcccttctgccatgattgtaagtttcctgaaggacttccccctctgccatgattctaagtttcctgaggcctccccagccatgtgaaactgagtcagttaaacctctttcctttaaaaattacccaacctgaggtatttctttatatcagtgtgaaaacagactgctatactttctgataatcatgcttaagcaactggggaattcagactagctgggatcaaactatggccccacccttagcagtcatgtgaccttggggaggttgcttaccttctccgtctcaacaacttctgcaaaatctgtaacatgagattgtttctgagggttaaatgagcatagcacagtggggacactgtcaggcacacactacttgccagatgtcgagtattcatctttattgaaataggactgtggtaagccactttatggctctcgattttgtatgagaaaatcatgcttagtgccttgttagtaaaagaaagaaaacctgaaagtccctgccacggaaggaagaaatagcggggagaaaagggagttggtaagtttcagcatttcagagcttggaggggcaagttaggtttctattttatggagaaggaggtggaggcaggatgggtcctaaggtgtcattcaaaacacacagccataactctttattgagagtagagctagggccccagggattgctgtggtcaagttgcggacaaaaatgaccactcgttggaagacaggagaggagtgtttagttacaaaagcagtcaacaattcaggtgtatctatatttagtcagcaaataaaagttgttcaacttggttgctaattggacccactctactgaggctttgtatagaactcatagaggaagatggcttcaagtaatgaactaccctttgcttttcttaggactaaaatctcaggaagctggtgatgaatgaaaaccttagtcccaatggcactgcacgaggggccaggagagcagcagcatcataagccacagggtggggcagccaaggcaggggcattctgagctgttggggaggggtggcaggcagggtggggcactgtgaggtgtcggggagggcattgtgaagtgtggggtggggcattgtgtgccacatgcctgggctcccacctggggccagtgggcttcagtctgtaggtgactacagaaggaggaggagctccgtctgttctctcttcaggcagttgttgtgtctctcagcacttgttgggttcacaacctattaaataagccggctggtcttcaccctcccagacaagtcaactcaggggaggcagcagggtgcgggccttggcccgcagccctagccggggccggggccagggccagggccagggctggtgcccggggccgcgctgtgaggtgggcaggcgaggagcgggaagaccatctctgcaagtgcagcatagcctcggcctaggacagcgggagtgcgtggccaaagctgtgagcagaggcacaggtggtggcagacagtagaggcgccccatggggaacatactgacctgtcgtgtgcaccctagcgtcagcctcgagtttgaccagcagcaggggtcggtgtg

SEQ ID NO: 4960 - DNA, 2300 bp, Homo sapien
aaagttgctccatgaaactaataaatgaaaaatggtgattttttagcatgtaaattttaggaaatttccccagttacgcttaatggcttgatttagtatgtatgttatttttgaaaacatatgttgggatgtcacaaatggacttagcctacagagatttatattcaacttttgaccagagagttccattttaatgtgacactgagagtaaaaaactgtcttttcctccttacctatttctcttcctacattcttggccaggaggaaggcactgctacatacccagtcttccccagcagagcctgagcagctctgttttccttctacttcccctcttctttcacatctcatgaccaagcacttcctattctgtctcccaaatgatcacagactttttcctccgcttttgtcactgccactgcccttagcattactctgcctttagagaaagtctcttaatttgtttggttgcttccttcagtccttattatacagaccactacacacacatctgacagagacttttcaccttttcatggttcaatgactgaaattcccagaataaaattaaaaccaccccagcatcaaatttgaggtcaaatagaggtgggtttgtatcccaggttcatatactgtccagcagtatggtctcagaaaactgacctccttaaggctttgtttgtgtatctgcctacactcattgagagttgggactatttcacacatacagtgcctggcatgtagaagggacttaatcaatgttgaaagaaggggaggcattttaaaatccacatcaaaaaaatgttgttctgttcgggagtggtggctcacgcctgcaatcccagcactttgggaggccaaggcaggtggatcacctgaggtcaggagttcgagatcaacctgagcaacatggtgaaaccccatctctactaaaatacaaacattagctgagcatggggttgggctcctgtaatcccagctacttgggaggcttaggcacttgaatgagaatcacctggacccaggaggtggaggttgcagtgagcaacgattgtgccactgcctgggcaacagagtgagactctgtctcaaaaaaaataaaaaaaaaattcttttaaaaatatacgaatctggctgggcacggtggctcatgcctgtagtcctagcactttgggaggctgaggcgggcctgaccaacgtgcagaaaccccgtctctactaaaaatacaaaattagctgggcatggtggcgcatgcctgcaatcccaactacttgggaggctgaggcaggagaatcgcttgagcccaggaggcggaggttgcagtgagccaagatcatgccattgcactcctgcctgggcaacaagagagaaactccgtctcaaaaaaaaaaaaaatagtgttcagcaaggttgaagcataaaaggttaatagccagaatcatttatcaattgtatttctatacatctacaagacacaatctgaaaatgaaattagagaaacaatttcactgggcaacaagagcaaaacttcatctcaaaataataataataataataataataatcatcatcatcatcatctacaatgtcatttcccatccaagcttgacttctacctttactttctgatatggttttgccatgcccccacccaaatctcatcatgaattataatccccataatcctgatgtgtcgagggaggggcctagggggaggtgattggatcacgggggcagttatcctcatgctgttcttgtgatattcagtaagtcctcatgagatcttatagggttttgttttgttttgttttttgggatggagtcttgctctgttgtccaggcaggagtgccatggcacgatcttggctcactgcagtctctgcctcttgagttccagtgattctcctgcctcagcctcctgagtagctgggattacaggcatgcacaaccacacccagctaatttttgtatttttagtagagacaggatttcactacattagctaggctggtctcaaactcctgacctcagttgatccacctgccttggcctcccaaagtactagggttacaagtgtgagccaccgtgcccagctgagatctgatggttttatacatgtttgacagttgctccttcacatgttcccactctctgtgcggccaccatggaagtcggacctgcccttctgccatgattgtaagtttcctgaaggacttccccctctgccatgattctaagtttcctgaggcctccccagccatgtgaaactgagtcagttaaacctctttcctttaaaaat

SEQ ID NO: 4961 - DNA, 2300 bp, Homo sapien
gatctcatatggcctcaattcctgtatactctcgggtcactccaccaacaacctcctacaccagagccactttgaaacattagaaaatatatttgagcattcagaaatgtataaactaggcagccccagactgcaagcagctcagaggtcccacagagaggcttagggagggtgggggaagaattttatatggtgaatgtggaagaaaaagaaaatacttgattgggtgaagtggagcagtggcctcatttggaacattacagtggaaggtctctagttagatgttagttggtggtttctgactggttaaacttaagtttccttttattatttacactgagtcaagttttgggttatttaaggaggaattgagtgcactgcagccacctcagcctcatggccacctgtttatttgattatttttaacagagaagatcctttaaaaaatatctgttaccctggctggagtgcagtgacgtgatcacggctcactgcagccacaaccttccagctcaggtgatcctcccacctcagtgctccccaccctgagtagctgggactacaggcatgtgccaccacaccaccatgctaggctaatggtttgtatttgtttgagagatgcagtttccctaagttgcttaggcttcttttttagactcaaataatctgcatgcattggcctcccttagtgctggaattacaggccatctaaatcttttatctcaggtttgccttgtgacaaaaggaggggtactttttctgacatgaggcagagaaaggtgaggtgggcgcatcctgtgcatatgattttctcaggtgatgggaatatggttggctcttgactaatgggatatattttctctttgaatgatttggcaagatatcagatgagagaagttgaatgaatgttagaagaacatagaaaaaataggttatacacgttgggtttctgaagaaatgatgtctttggagaaacaaaacttttattgatttctggaaacatttagggccaattttttatgtaagtaatttgaatttatgatgatatctctgaccactttttgatattttttctggttcaggtgagtggtgtcattgagcaaacacaaagtcgggctcatccaaggatgagattttgccagagaaaggacgagcagcaagtcagggagcttaaggtaattatgggaatgtgactatctgcaattgcttaggtagaaggagacagattggatttttgtgtgtttggtatttgggataagagggatgtgggtgtgtacttgacatgggttgtttattctctgtctctctctttttctctctttttttttttttttttttttttttgagagggagtctcactctgtcgcccatgctggagttctgtggcacagtcttggctcactgcaacctctgcctcccaggttcaagggattctcctgcctcagcctcccgagtagctgggattacaggtgcctgccaccacgcccggctaatttttgtgattttttttttagtagagacgaggttttactacgtaggcgaagttggtctcgaactcctgacctcagatgatccacccgcctcagcctcccaaagtgctgggattacaggcgtgagccaccgcacctggcctgtttattctcttaagagagaaaatgaggggattagtggactgtagttctggacaaggtggaaaactcttaaagtggaagtattggggcaagtgctctgacaggctaggatggtgcagtcagtcccttcacccagaaatcagtagaatgttaacagttcagactcaaaccttgtgaaaaacaggttctagaaaggaaatccctcacagcaactggcaccataatcaagacagaatttttgcagaataaatagagttacctgctttcagccccaggtcgtagctattgtctgccctgctgatatgtgataataatttgtgatcctgttgtcttaaaatggggtcactcatctccagtagaattaagtccacagtgaagttgtccccccatccccagagataaacatatatgaatgaacttacgtgataacaactactgctgcctgggatcatgagagacctgaactgaactgataggaagtgaaaggtggctgaggtaatgagaatagacccatctgcagaggatcataaaaccagcaaagacaagatcttgtctaagatgccttcacaaactttgtccatgagaactgtaaggtcttctccagacctgttggctgctgctgtgatctctgcccaagaggagcttctgaccaacatccaaagggcttct

SEQ ID NO: 4962 - DNA, 2300 bp, Homo sapien
gcccaggaggtcaaagctgcagtgtgccttcattgtgccactgcactctagcctgggcgacagagtgagaaaaaaaaaaaaaaaaaaagatagattctaagaggccaatgcaggcaaatgggcagattgcttgagcccaggagttggagactagcctggacaacatagctactaaaaatacaaaaaatgagctaagcatggtggtacatgctactcccgaggctgaggtgggaagatcacttgagcttggggaggtcaaggctgcagtgagccgtgatcatgccactgcactccagcctaggtgaccctgtctcaaaaaaagaaaaatgtggtatatacatagaatattattctgcctgtaaaaaggaaattctggctctccctctcactctccctctccccacggtctccctctccctctccccacggtctccctctccctctctttccatggtctccctctgatgccgagccgaagctggactgtactgctgccatctcggctcactgcaccctccctgcctgattctcctgcctcagcctgccgagtgcctgcgattgcaggtgcgcgccgccacgcctgactggtttttgtatttttttggtggagacggggtttcgccgtgttggccgggctggtctccagctcctaaccgcgagtgatctgccagcctcggcctcccgaggtgccgggattgcagatggagtctcgttcactcagtgctcaatgttgcccaggctggagtgcagtggcgtgatctcggctagctacaacctccacctcccagccgcctgccttggcctcccaaagtgccgagattgcagcctctgcccggctgccaccccgtctgggaagtgaggagcgtctctgcctggccgcccatcgtctgggatgtgaggagcccctctgcccgggctgcccagtctgggaagtgaggagcgccttttcccggctgccatcccgtctaggaagtgaggagcgtcttggcccggccacccatcgtctgaggtgaggggagcacctctgccccgccgccccgtctgggatgtgaggagcgcctctgcctggccgcgaccccgtctgggaggtgaggagcgtctctgcccagccgccgtgtcttgagaagtgaggagcccctccgcccggcagctgccctgtctgagaagtgaggagccccgccgcccagcagctgccccctctgagaagtgaggagcccctccgcccggcagccgccccgtccaggaagtgaggagcgtctccgcaagacagccgccccgtccgggaggtgggggggcagcccccgcctggccagctgccccgtccgggagggaggtggggggcagcccctgccccgccagccaccccgtccgggagggaggtggggggcgcctccgcccggctgccgccccgtctgggcggtggggggcgcctctgcccagccaccccttctgggaagtgaggagcccctctgcccggccgccaccccgtctgggaggtgtacccaacagctcattgagaatgggccatgatgacgatggcggttttgttgaatagaaaagggggaaatgtggggaaaagatagagaaatcggattgttgctgtgtctgtgtggagggaagtagacataggagactccatttctttctgtactaagaaaaattcttctgccttgggatgctgttgatctatgaccttacccccaacccggtgctctctgaaacatgtgctgtgtccactcagggttaaatggattaagagcgtgcaagatgtgctttgttaaacagatgcttgaaggcagcctgctccttgagagtcatcaccgctccctaatctcaagtacccagggacacaaaaactgcggaaggccgcagggtcctctgcctaggaaaaccagagacccttgttcacatgtttatctgctgaccttccctccactattgtcctatgaccctgccaaatccccttctccaagaaacacccaagaatgatcaataaatactaaaaaaaaaaaaaaaaaaaaaaaaatactgcaagaacatctgccccagaactgcctgtccaacctggactgacatcatccttgttattgatctttgtagccaaatataattattttaaaacaaacaaaaaaagagaatgtaagcagtataagactttaaaacacacaaatgaaatatacatgactacatgcttcagtgaactaaaactttcatctgtaatctttattttgcaacattctgaagtaacattacagtcttttcagtgtgctgtgtcatttatatcccttactttatcctag

SEQ ID NO: 4963 - DNA, 2300 bp, Homo sapien
ttaaaccctagtatttgaattagtaagagtgtctccagttatcaaggagtgtcttgaaattacttgataaaattcgaaacaaaatttattttgtctttaattaaaattgtactattttgtatcttttcaataacatagttggtaggcagaagcttaggtgtcattcttagaggttcttagttaattctgaggtccttaagatctcatgtctgcttccagggaaggctccttactgaaatctgttacctcactgccagtcacaagaacactgccatccttttgtttttgtttttaattgagacagagtcttgctctgttgcataggctggagtacagtggcacaatcatagcttattgcagcctccatcttgcgggctcaagtgatcctcctgccttagccgcccaagtagctgggactacaggtgagtgccaccacacctggctatctttttcttttttttaatttttggtagagatgaggtctcactgggttgctcaggctggcctcgaactcttgagctcaagtgatcttcccacctcggcctcccaaagtgctgggattacgggtgtgagccactgtgcctagccctcctcctatttaaaaaagatattcttccccttgtcaaagcagagttttttaaaaattataaatgtgactcacaaatttgaaatgaaaccaggttaaacattttactcaatgtattaattagtgaagaaaccaggaagatggcaaaggtagttcaaagaacagtttgaggatctaggtttttcactggcgttttgaaccaatgttagagtaagaatgctagattagattaagaaaacctggttaatgccagacagaaataaattataatctttagtgttaccttatcagacagaaattatttgtatcactgctggacaaaaatctataggttacgttgtaattgcattaagtctaggacttttaatcagtagtaaacaatgaactgaataaagtacaatttccccacataagtaatctttgggatggcctgtcattattttatgacattgaagtgacattccacttatcttttgccttactttcacattttaatttaatttaattttattttttctgccacagggtctggctctgttgcccaggctagactgcagtggcatgatcttggctcactgtatcctcctcccaggctcaagccattctcctacctcagcttttcaagtagctgggaccacaggtgtgtgccaccacacccgtctaatttttgtagagacagggtttcacccaattgccccagctggtctcaaactcctgagctcaagcgatcctcctgccttggcctcccaaagtgctaggattgtaggcatgagccactacacctagtcttaaataattttttaacacctatatctcaaagtttttaaaataaatctgtttcacacattaactttagattcagattatagtaataccattttatttgcaggtagttaatggaaaggtctccagataaaagtattcttggttttaaccaatgggagcaatgtaacatggccttacaggccctttatggcaagaattagaaaagaaaaaagatttattctgtgtgagaactttttatagattgaatgaacaagaactccttgaagacggtctctgtaattaattcttatttattcagtactgaattctcagcacctaatttagcttaggtgtggcatttaaataactgagtttccattgagtgacattgattgaatttgtgtgtgtgtgtgtgtgtgtgtgtgtttatataaagagatacatcattggagtggaggggccattcacatatttatttgtggaatgcaaggtatagcatatttaagctctggtatttgaataaataagcgtatctccagttctcaaggaatatcctgaaattatttgataaaatttcaaatgaaatttattttgtctttaattaaaattgcagttttaaatattttgaattgatgagtaataatatgtcaaagctgtgatagctccagttgtgtaacagaaaaatctttggctttgtgtgttttaccaggtgaacaaaaattgtttgctggcccccaggatactaactagacctttggcctgactcacaggacactaaggctccttttctgaagaagccttttaccagtctcatttaggggatgggaacaacatgtcttcacctagggactttagagcagagcctggtaggtgcatcatctacttttgtgggtatgggatcaggaggagctacaggagtgcctctcagactgtagatttgcatagggac

SEQ ID NO: 4964 - DNA, 2300 bp, Homo sapien
gcgtggtgatgaatgcttctgttttttgtgtcattaaacacttgcaactgtgtctccttttttaaaaaaaggaaaactgagacacaagttgggaagtaacctgccaaaggtcaccaactattcagtagcaaagcagggacttaaggccaggcttgcaaagctcctagtgctactggtaattggtaagactcaagggtttaaagaggcctccaaagaagggtagtaaactgtgatgggccctaaactttatagttcttcgaatttttcacaggtaaaaggacagaaagccaagaagagccttctgggtcactggcttctgggaatattgtgtggtcaagcaggaagtctgggggagatggaatgacacctcagggtccactcttaccaactgttcatttagcctccatgcaaggatttcctggtgatgtgaatgggggttattccctctgtgtgtcttggagcagccatgctgctcatgtttgtgaaatgatgaccagtgcagaatcttgatgttaggcactatgaagaaacattagacatggggtccatctttaaaggggaatcttaccctggtgatatagtttggatatttgtcccatctaaatctaatgttgggctgggtgcgttggctcatgcctgtaatcccagcactttgggaggctgaggcgggcggatcacctgaggtcaggtgttcaagaccagcctggccaacacagtgaaacctcgtctctactaaaaatacaaaaattagccaggcatggtggcatgctcctgtagtcccagctactggggaggctgaggcaggagaatcacttgaactggggaggtggagattacagtgagctgagatcacgccactgcactccagcctgggcgacagagcgagactccatctcaaaataaataaataaataaataaaatctagtgttgaaatttgatccccaatgttggaggtggggcctggtgggaagtgtctgggtcatgtgggtagatcctttatgaatgacttggtgctagtctcatggaactgagtgagttcttagtctttgttttcatgagaactggtcatggaaaagagcctggcacctcccacctctctctcttcctctgtcttgcacacattggctctcctttgtcttctgccatgagtggaagcttcctgaggccctcatcaaaagcgggtggtggtgccatgtttcttttacagcctgtgaaactgtgaaactaacaaacctcttttctttataaattacccagcctcaggtattgctttatagcaacacaaacaaactaagacatatggcaatggcgtgggttgcttgcagggtaccttggctgctacagaaagaaaaagtctctgtagagactcactgtcagtgactcacggagcagaaagctggcctcagagcctggacagagggtagctgtcactgcttaactgcagttcagctcaagcatatggctctctgtgggaccagcactgaaggctgggggataagtgaggcaggtcttgtcacaccttcagggtatctggattcaccaaagtggctcaggtcaggaccaatgaatagaggtttgttcgtcaagataaaaagattctggcttcctgttttcaggcaatgccaacgattgaattccctctacattgaccacccttgctgaagttgtcttaattgacctagcagccaactgacctcatattctggcacaggctctgactccttttgcctatctgccctgctctgatactacaaagagacccccccaccccagccctctggggcctcattaggggcttagagggcaggcgtgggtcaggcgagcattcctggagaacacagtcctcagtggttcaggatatgagcatagctcagagagctgttaacattatcagcctggcctgggagagggggacgcgcacagggtggtgcacagggcccgcagggaatttacagcggcgtccgcggcgatgggctctcagtgccttggaagaccggtagaggcaggttctgtctctcccggcctggcaagcagagggccgcggcgcagggcagagtgccgcggcgcagggcaaagctccagtgcgcaggctcgcgggcgcaggtgggattggatagcgacgaaggccggcaggctaggcgtggacccaactggcgaggctgctggggttgcagcgggacagttggggcggccccgcaggcccaggtgaggaaaggtggctgggggccaggtgggcagggggcgtgcgggaggccgctgcgccgggctgtgggagggcgggcgtgaagaaggaagatgc

SEQ ID NO: 4965 - DNA, 2300 bp, Homo sapien
ggcaggagaatggcgtgaacctgggaggtggagtttgcagtgagccgagatcacaacactgcactccagcctgggcgacagagtgagactccgtctcaaaaaaaaaaaaaaaaaaaagtgatccattaccttcagaccctggaatgggtctggatttcaggaatgtcattgttggatttaactgttgatgggaaatagaatggcatctcccaccaaagtaaggacactctatggctgatgaaaattttcagaggaaattcaagagatatgtgaatggagggcattctttgctttcccctgtgataatgctatgtacctagagcaaggatatgtgttttcttggaccctaagcctgcaatgaatttgtcatcagtagatgattttaagggaccaagtaagaaaccaagcaataaggctcatgaatccacatggagtgaacaggctgataccaaatatggtccatttattcttggcttggggtaacagccttatcagacaccaaacatagctatttttcatctgaaaaactgactaaattttgggttattcacaaatatatatttgctgagaagaggttgatgatttcctttggctggcaaaaacttggattttctttgcagatatttaatttcaaaaataattcttgaaatgtctcactcaaatccaaatggccattaaacacatgaaaaacactcaaacccgtgaaaagccacaggaatacaaattaaattaaaataaaattttaaactttatgtctaccagcttggccaaatacagctggtggaacgtagaaaaatggtactgtcatacaaagctggtagaaatgtgaataagtatatccatattcacatagggatgcaatctggcaacatctattataatgaaaaatgcacatatcctttggcccatcaaagcacacaagacgtgccaggcacaagccttcaggcccatagccatatccacctacgctggtcactacctatatagagatagtggtgcatcccacgtgagcagttgctgagcacctgccttgtaccagtgcttgggctggggacatgcccagatctctcacatagttgctattgttaagcttatgaacacctaatcttattgctcagtggagaatacaatctaaacaaacaggtgaatacagaagacagtgccagtcggaggtaaggtcatgggatagagtggtgggcaggtggggattcccttagctggggaggttggggaggcttcctggaggaggaaagatgggtggtgagttttttgttgtgtttttcagggtggcattaacaccagtgtgccatatggtggtatctatgtgaaatccattgttcctggaagaccagctgccaaggaagggcagatcctacagggtgagagatggggatgggtcctcattgggaactctgtgctccatggtgtaaagagccctgcactgggaggggcagcctctaggccttgccctgctcccattctgaaaactcatgcaaatgattgcctccccaggtcatacttttctcacctggaaaggaggtgatagaatctgccctgcccatttgataggttggggggtctgcagtggcacactgggaagcataggtgatagaaaaatagtagaagacttaaaagacttgtgttgctctttggcctccatgggaaaacatactgcttcccttggaggacaagtgggcctcggtaaactcactcgcacatccggggaggacacctgagccttctgtttgcccttgctcagctcccacttctctgatggaagggggtgatttttattggtctccaaaactgccagaattgagccaaaaggggaacctaggatcttacttatctccatttcccctagaattctggtgtccccagcgtcaaccatgcctccctgacctttttttgaaataaaaaaaatacatcctggagatataaatatctaagtgacttgaaaatactttcaaaaacggtttcacaggaaaacaggaggaaggataaggttgaacagagctggctcaaccattctgtgagccaataatagaaaggcttttatatccctgatctgtgatgtgcctgagaagaagggagtgagactgctcagagaggcaggattcctgctgactccagggggacacctggcacctcagcttcctttcccacttctccaggctgcatggaggggtgccgggcagggtcctcctggaagggaacctcctgcagcctcaagcaccaggtcatgacatgacatctatccctttcccaggtgaccgactcctgcaggtggatggagtgat

SEQ ID NO: 4966 - DNA, 2300 bp, Homo sapien
atgctgcctgctcctgagagcagtatgagccaagaggtgacatcttccttcatcccatctttatttttgtttgtttgtttatggcagggtgctggttcttcttgtcctccatcacctccagaaatcagtgctggtgaaatctactttgtggaactggttaaagaagatgggacacttggattcagcgtaactgtaagagtttttaggagagcttgaaaagcagttaacaagatgtccgtctagaacctggtggccattccacccagatggcaacctctgacagtgtgcttagtttgcacaaatgtaaggggtaaataaaaaagccaatgggggcctgcactgggggatgagttcagagacaaacagaggtactggggaacctcaggatgagcagggcatgcactaggggactccaaactcatgaggaggcagtgtgggcagagttggctgatgtgtcctgactctgaggtcaagctggactgcagagagagagaagcacattggggcttcagggacacaagctaaaggtaagaagggcagtccactgtcatctggccaaggatgggtggggcagtccactgtcatccagcatagaatcagtgtggagcctctggctcagacatcccagggccaggcctccatcaggactgacactttccatttggtttctgagctctgcctggtagacccttgtgaaaggagattacccatataactgtgtttacccaaggggttggggaatggcacacacaaaactggtgaaaatccagaggtcagaggttggaaggtgctgcttttattactgagtattgaaagtgatccattacaggctgggctcggtggctcatgactgtaatcccagaactttgggaggccgaggcgggtggatcgcaaggtcaggagattgagactatcctggctaacatggtgaaaccccatctctactaaaaaataaaaaaaaaaaattagctggatgtgatagcgggcacctgtagtcccagctactcgggaggctgaggcaggagaatggcgtgaacctgggaggtggagtttgcagtgagccgagatcacaacactgcactccagcctgggcgacagagtgagactccgtctcaaaaaaaaaaaaaaaaaaaagtgatccattaccttcagaccctggaatgggtctggatttcaggaatgtcattgttggatttaactgttgatgggaaatagaatggcatctcccaccaaagtaaggacactctatggctgatgaaaattttcagaggaaattcaagagatatgtgaatggagggcattctttgctttcccctgtgataatgctatgtacctagagcaaggatatgtgttttcttggaccctaagcctgcaatgaatttgtcatcagtagatgattttaagggaccaagtaagaaaccaagcaataaggctcatgaatccacatggagtgaacaggctgataccaaatatggtccatttattcttggcttggggtaacagccttatcagacaccaaacatagctatttttcatctgaaaaactgactaaattttgggttattcacaaatatatatttgctgagaagaggttgatgatttcctttggctggcaaaaacttggattttctttgcagatatttaatttcaaaaataattcttgaaatgtctcactcaaatccaaatggccattaaacacatgaaaaacactcaaacccgtgaaaagccacaggaatacaaattaaattaaaataaaattttaaactttatgtctaccagcttggccaaatacagctggtggaacgtagaaaaatggtactgtcatacaaagctggtagaaatgtgaataagtatatccatattcacatagggatgcaatctggcaacatctattataatgaaaaatgcacatatcctttggcccatcaaagcacacaagacgtgccaggcacaagccttcaggcccatagccatatccacctacgctggtcactacctatatagagatagtggtgcatcccacgtgagcagttgctgagcacctgccttgtaccagtgcttgggctggggacatgcccagatctctcacatagttgctattgttaagcttatgaacacctaatcttattgctcagtggagaatacaatctaaacaaacaggtgaatacagaagacagtgccagtcggaggtaaggtcatgggatagagtggtgggcaggtggggattcccttagctggggaggttggggaggcttcctggaggaggaaagatgggtggtgagttttttgttgtgtttttc

SEQ ID NO: 4967 - DNA, 2300 bp, Homo sapien
cagatgaagaaaagaatagcacagccaattctggggtctcctctacagacatcctgagcttcgggtaccagggaagtttgttgtcacacacacaagaccaggacagaaatactgaagaactagacatggctggggtgcagagcttagtgcccaggctgagacatcagctttcctttctgccgttaaaggtaatcatcccttggtttactttctagatctggatgaaagagaacagactgtgaagcccaacagcctggcccctaggcccttcctgttctctgttttccatgtcaggtggatggaagttacttagcccgtttgagccacagcttcctcatttgcatacagaagcaaatgcctgcatggcatggttgttgagaaaaacgcatagaagaaggcagagttctaggacagtgtctgggcacaggctcagtgtgggtgcctctggagtctttagtcactaattataattgttgtgataatagcaccatgaggaaattgattgctgccaatggcaaggcgtgggcaatcaggcacctcctattcttgtccttgaattggtcctcaagctgggaactcagtggctttgctcttgaccataccccatggaggaagaagatgggatctggagtaggtgtatggagggctgtgtgcttcagtcccagctctgctgtcctctgccgtctctttggactcccagtggtgttgtcttctcaggccccgccagacccatgccccagcctctccattctgctctgggccctgcacagctggtgctcatggactgagtcaccttgctgtgttctgcttggttctgcccagtcaaagcctcagcaggagcccgcagttgtgggatgagtgaggacagggtggcagtgctggagtctcagttgcacacccttcattccactctctccctgtgctgacacaggttgcctgtgcccctctacaaagagcacagctcctatgagggtccatcgaccactcccttctctcgcccttcaggctcaggggtggtcacagcacccagtgtttctagccccaggtgctgaactgatattactggtttctccaaaggctggcaagacctttgaaaacaggtctcccatgacctatcctcccttactcaggctgagtgtatgcccttctcattcttgctgggacaacttgctggttgaaacaggcaggttattgcacctctttcaaccttgtttctctttttatgatggagataatgatgtctgtccacagccgtggaaactaaggtactatgcccagtgtcggggataaaacccgtatctttcttctactcatcttagcttcatcagctgggacccctgtaactaaagacagattaatgagagaaaagcatccacgtgtatttactataagttttatgtgacatgtgagccttcttacggaaatgacctgaagaaacagttctccctgagtatatttgatgaagaatggagagtcatggagaaatgagataagacaaaaagcaggagtatgtaaggtgggaggaactcagcagggcctgcttgttcagattcctctctcagtccctgtgtcttcccacataagatgctccatttttccagatatagggagggcattctcacttgagggtcttgtgccctgcttcgggggaagattagaaaatccttcctaggttttagggcctgcttcagaagagaagggcaggggaaggtcagagaaaccttccctcatgtgctgtttctccaattcctccaatgtgccaaggtgccctattttggggtagtgtgtcttgacctctgtcacaaggatctggcatgcaatagggctccatgaatgacagtgccttcctaattggccatggtgctcacctggacagaacatcccatgaggaactggatacaggaggccagtggaagaacaacgatagtagctgccattaattgagtacttacctgtgtgccaggcagtgtcctgagcactttatatgtattagctcatggaagctccatggtaacccaatgagatcattcctattatcaaccccttttatgggtggggtacctgagacagaaagagcaaaggagcacacccaagctctctcagggagcaggggacagagctgggattcagattggcctccagagcagaaaccttcaccccaggccttcctctggtaggtcctctctggcaggaagcagagcagagaggccttcatgctggggcttctttggtggcaaacctgagagttggtttcctggggctgggggccgttgaggggagcaagggagctctaaggccac

SEQ ID NO: 4968 - DNA, 2300 bp, Homo sapien
actctgaaatctcttattattgcagtaatatagttggattgaggcttttctttatctttggcgcatccatattttattttcctttttttgagacagagtcttgctctgtggcacaggctggaatgcagtggtgtgattacagctcactgcagcctcaacctcccaggctcaagcaatcctcctaccttagcctcctgtgagtagtgtatgccaccatgcctggctaatttttcttttttttccttttttttaatttttatgtttttgtagagatgggatttccccatgtggcccaggctagtctcaaaactcctgggctcaagggatccacctgccctggtctcccaaggtgccaggactacaggcatgagccactgtgcccagccaatattttcttgatcattttcttattaccttaatttagaaataattatcattgtaaatattctgttgcattatgtttgaggatgtttttagcgatagtgggaatacaggaaattttgatagaggtgaagacattggcctgcagctgaacagcaagatcatggttatcgtggagcctgtctagtcagaattttccctgttttgagcacttttattcatctgggtaggcttttgatattatctaaatttagaacacaggaagaaaaacaggatggaatttattttaccagtttttgcctataaaaatgaacttctggtacactcctgtaaacgtatgtggtgttttactggatgcagttaaaaaatgaaaattaagagttgatggttagagttttttcagggtctttttaaagtaaaattttcatcttttcacttataggtaaaaagcgcagactcaccattattgaatgtgggtgtgacattaacatgatgattgatctggctaaagtagcagatctggtaagtgagcaggggcagcctggggtgctgatggagacttacagcattgtgataggttatttaccccgtgatgaagggaagagagttttgtgattattaaaaggatcatggtcattatcagggatatagtagatgtgattgaattgatgatgataataataatagtaataaatgttgtcatattaataatacaaatggaatgtgcacaatgaaatgtgttccaaaatctaaaagcagatcacaggacggagaaaacctttaatgaacacagctaataagagctcatttacatgcatacatatatatgtacaaatatatcatagtaagtaccatttcttcttggacccttcctggcactgtgctaactgctttctacaaatttagcttacatacacccttgaggtgagtaggtattatctatagtttacataagatgaaatagagcctcccagcagttaagtaacttgtgtgaagatgggacccttgttcctgatggttctagaaccttcatccttaatgataatgctaaagtaagtacatgaattgcctgaagaagtggtcagagtttatcaatagaaaattcaggcagtactcagcgtgtggaaaatgtacatgctcttgcatttatggaaatgataatgttcactatttctgatattctatgaactatcttttacattggcaaaaaaaaaaaaaaaaaaaaaggccaggcacagtggctcatgcctgtaatcccagcactttgggagaccgtagtgggcgaatcacctgaggtcgggagtttgagaccagcctgaccaacatgcagaaaccccgtctctactaaaaatacaaaattagccgggtgaggtggtgcatgcctgtaatcccagttacttaggaggctgaggcaggagaatcgcttcaacccaggagatggaggttgcggtgaggcgagatcacgccattgcactctagcctgggcaacaagagtgaaattctgtctcaaaaaaaaaaaaaattagcaaaaaaataagccatattgattaggaagtgtggggtgacagataccttgtttttttcatttttatttagttttttctagagctacagattttatactttggcctaggaagactcctaaaatataaaggaaaaagtaatacagattttaaagttgtgccattgtaatgtcagaaaactaaataacattcaaattttgaacatgtaatgctactattagtaaaaataagtgtaattaatgtaaagttgtgtaacgattactaaacttgtatacttgaaatgattgaatagttcatagaagtcatttgtttctcttttatttaaaatgtagcaagtttctaattttaaatacatacatattaagagatgcatttacatttttttatttttagtta

SEQ ID NO: 4969 - DNA, 2300 bp, Homo sapien
aaaagcacacttatcaccatagaaacagtttaaagtttaggaagaatcaaattctataaattcttgtatcttgggcaagaaacaccaaccagtgtgcagatgctggaggcaaggcagcttctatggcaagtcttctcacgttttagtaaaagccacacagcatgcatctccatgtcctttggagctggactagacttgtgaatccaaatgtcacctgtgagaggctcctaactatttaaaaagattcaatggaagaaccatcagactgtagctaaacacacctgtgaaaggatcgagacatccacacagcagactgaactgcaaaagcattggcatttctcttctgggcattttcttcgtctcctagctggagatcctgcagatgccacttctttttctttgcagctttgggtccactgtttttctttctgtgtttcttctggtccttagtctccatagtggctatttaccaataacaagtaactctaacctacaaggaagaaggttggggtaaggaggtgggagaagcattttacaatccaggcaatacccagggaaaaacattaaatttcatttatttctttatgaagacatgatgtatttgttcactgaacaagggtagaaactgcttaaccatccccaatttcatttctctctgttatgctataaattagatgagttacctctgctaaggttacattctatggttaagttactttttactcgtctcaagtgtcaacatcaccagtacctatttctgcaaggatggaaatattctatatctgtacttttcagccatttagccattagccacatgtggttacttaaaatgtacttcagagaaactgaaaaaatgaattcttaattaatttcattctaactctaaatagtcacatgtggctaccatactggacagctcagacctagacatcgactggactaacgaagtggtttcctaacttaaactaaaacttaaatttcaataaaaaatttaaaacgtttttatgaacttccaataggatcgcagtattacttttagtacctgttgactctaaaacttctaaattacagctcatctacatacatttgaaaaatagcaatatctgtatgtgtgagatatgactggttctagatgatgcctggaggccccatggacttacagagacccttccagtgatttctgaggtacctgggaatctgtggccaataaattggtagtcactgaatctgtgagtttttttggaatatcgggctgcataaaatctgacagcttgattgagaaaaagcggggcagggtgccatttcattcagttaaggtcctgtattcattccgtttaataaacgtttgtgtctgtctatgatgtgctagccactgtgccagaaaatggatatagctatggtctgattgacagaggaaatccaaactagtatcttccgtgccatgcaataagagctacattgcaaggctgcagagggtgctactggagcacagaagtgagtcaaaggcttcccacagacacacacacgagcggaaacagaaagtctttatatatcaccatatgtcaaggaacactggccgggagttaggagagctgggcactaggaacgctttgaaactgaatagctgtgtgatttcagaggttatattgcttgtctactatattttactgccgaacttgtactgtttctctcccttttcttcttggtgggaaaagcacaatttggggtcaacagattcggctcaggtctaagtcgcctgccgggaccacgtcgccaggaaacgacgtctccccgacaccttccctcccagtccgggctctctgcagggattcatcccgtcactctcccaacgaccctcgggcacacctcaggcagatgcgaaatatgccgctcctggggagcaaagatgacccggaggaccgggggagtaccttcccacgcgcacgactcgcgatcttcccagtgccccagagccacggacccaaccgccgcctaccccagcccgcggcacctaacctgttcacaactgcgactccttaggtccgcttggacaccgccggaaacggaaattcaccctcgcgccgactcgccggaggtaaacaaaaaggcagaaaaaaagggaccgccgcctggacgacttgcaggggacagctggaagaaagactcgtcaacggccgagtgctggcgccggcgccgtctgcgcagtgcgttccaccgggtccgcgtccctcccgattcagccccaccccgccctcggaatccgctgcctcagctcctgctgtggcactccccagcagctt

SEQ ID NO: 4970 - DNA, 2300 bp, Homo sapien
cattaaacatccaaatggatatctcatggaggcagctggagttcaggttagaggtctgagtcactgataaaactttgggagttgttggcaaatgatagcgtattggtcagagtccgattaggaaagagaagccacacagtcatttgaacaggaaaagtgtacatagggaattgttaattgcaacagggaagtggagtaaccaggcacagactagtaggaagtataggaggagcagctactagtctagggctcaggtagagaactcaggagagtcctcccctcttagtgccctgcccctgcacctcatcagaggaacccagccatggccctctgcttgtcgggagagtcaccgatgctataccactggaacttactagaaatacttccttaggtgctggggaaaggagcggtgtctcagaagagttactctacaataaaactgcctggagctggtgagaggagtgggacctgctgggcactggccactgtgtccctggtgaagtcaaccgcctgcaggagccaggcgagggagcataggagaaccagtagcaaagacagctttcacctacaaagtctctccattgctctagataggaggtggtggtcagagtgggatactgtgagggttgcagtccttggacctgacaaggtctaaggtctgatcatggagggagggggaagctgaggtagggcagaggacaagaatgggcttcataagaccaaaaggatgttagaaggattatttacccagatactgacatctccaagaagtaagaggcctagtgtgaagaagttacaacatcctaagctcttcagggataagggaagcatgcgccacgtaggtagcctccctagtgcagcacccagtatatagcctatgcagagtgaatacctgggggctgctgggggtgataacaaggtcactgtgacaggacctgaagcctgggggtctcggcgacaggagtgggcctagttttttgatgtagaattgagccttgcatgcaccggtgggatcatattgaaaagaaaccctccaagactagaggaagatgcatcctctgacaatgtagtctctgtaggcgtcccaagtagctgggctggggattagatgggctccaaggcatttcctcaggtggcaatgggtggatccctgggaaggcaaagctgtgcaggaagaaaatggcaagatgctaccttccctcagggaaaacccctttcccgggagcagggaaggcgaggcagtttaggctgggtcagtttgtccctgccctcagagtctgttggtcccggaaaaagagggccttattttatttatttatttttctttgagacagtgtcttgctctgtcgcccaggctggagtgcagtggctcgatctcagctcactacaacttctgcctcccaggctcaagcgatcgtcccgcctcagcctccagagtagctgggaccacagggaccacaggcgccccgccacgacgctggctttatttttatttatttatgtatttatttattttttgagagacgtagcctccctatgttgcccagattggtcttgaactcctgggctcaagcaatcctcctacctcggcctcccaaagggctgggattacaggcgtgatccaccgcttctggccaaaagagggctatagggcacccccagaacgtgagatctccctcgtctgtcatctttacagaggaggaagtggtctcccaatccagccatagtccattcgccccgggcacggtgactccggggcggccagaaccaaatgtgtctcctggcttttgcacggcatcaagtaacccgcgccaggccgcacagctgccctggccttcagcaaggactccgcgagcgaggtgcaagctgctggggagtgccacagcaggagctgaggcagcggattccgagggcggggtggggctgaatcgggagggacgcggacccggtggaacgcactgcgcagacggcgccggcgccagcactcggccgttgacgagtctttcttccagctgtcccctgcaagtcgtccaggcggcggtccctttttttctgcctttttgtttacctccggcgagtcggcgcgagggtgaatttccgtttccggcggtgtccaagcggacctaaggagtcgcagttgtgaacaggttaggtgccgcgggctggggtaggcggcggttgggtccgtggctctggggcactgggaagatcgcgagtcgtgcgcgtgggaaggtactcccccggtcctccgggtcatctttgctccccaggagcggcatatttcgcatctgcctgaggtg

SEQ ID NO: 4971 - DNA, 2300 bp, Homo sapien
cagttccaggtgcaggggttttaaatccatcacaaggcgatagatgcgggggctttgggtaccatcaaccggacacaaatgtgggggcttagggtactatcaactgggcaaattcctgggaactgcggatatagcttgccacagtatcttatccattaattgcattctttgatgtgctgggagtcagcttgcacaagttaagtccttgaggaaggggggtgggtaaggggctgcaagtgaaggagccaaaatggagtgtgtctggctctctcagctaagggacagtcaattcaggttaaaacaaggtagggtatcacacttacaagagggaggcagaaagagttgatgtgaaatgacctggagtgggagaggttagaaaaggctgtgctgccggctttgaagacaaaggaaagggccactagctagcagcctctaggagctggaaacgctgggaaacagctcccttgcctccagaaggcacaggccctgccaacccagtttagattcccgaccccccgaactgtgagataacatgcatgtggcttaaactactcaatctgtggtactttgttgcaggggcaacaacaaacatacagacatctaactcagacccgaggccttgggtgggacccaggccccatttcctgagacacctgctcccacagcgacctggggtaagcagaagtgggggaggattctccagacaccccagactgtctccaagtagagcggagatctcgccagttaagcgcacagctgaggacagttactgggtgaagtggcctgggtctccgccttctcatgcccccaccgcccagaccctagaaggggagtggctgcggcctctgcaccctggcgctgagggctcccagacccggcccagtggggcaccccagttcaccaccctcctcgccttaggtgagccaaagcccaggcagggtggagcctcacgcacactgactgccccctaggacaggcacaggtgacgcgggggtgtgggacccaggctatgactctggacataaccttcaaggctgtaaaacgagaaggtccatccccccaaaacacgcactcccccacaaccaccccctccccccccccacacacacacactcccctgcaccacagatacacacattcctttcgctccccactcagacgcctcgaggcctcggcgggggaaccataggggcgcgaccagggcgcgccgaggtgtgaccagagaggacacgcagcgaccttactcccgcctttcccgcaaggcgcgttcgccagcctggactagtgggcacgggccctgcgttctaataatcaccataataataggcgctgggtgtacagaggggacccaggcgacgctggcctccatccgataaccaccgtaacaggggctgggccgcgccgctcctccgctctaagtgctctttacatgcttcttaagttaccggcaggccagccgcccttacgagagcccctcacggacattaacccaattgagaagactgaacccagcttacgaacgttaagttgtcccaaatcgcagggctggcgagtgaggagcctgaattggaacccaggagcttctggaacccgctccagaattgcgctctcgaccggtttgtccgctgagagcgaacgggtgcgcgagcgccgcatccctgcccaaggccatcaggcaggcagcgctggggccggggacccgcgcggagactccaccccgggatccgggaaggctcccccgagccggggtcggagctgcggctggaggggcctcggcttgaggaggatctgggagggcgggggctcagtcctggccaccaggtgtgaggggtcgggtgcggagccctgtgtcagacgcggcggtgaaggctgtagccctgctctccgggatgggggtggtactctcaccccaccctgccccaagccgcagggagcccctggcgcccctggcgcccgggacccgccctggctggagccctgcggtttccgggagctcacggtcggctctgcgcccctccaccgccgggcctgggcctgggccagggacgggctggggcgggactgcggcctcggggcgctgggtccctgcccctgccgtgcactgcgcggctccccgcgccgcagctgggcaccagcagcaccacggaccgcccctgtgctcgcccgacggcgccccgcggcgctttaagagacggcctggcagcccagccccagccgcccagaccggcgagaccagcctgcgggagcagccccatggcgggtaagcgagcctcgcctccccagcccagccccggcccctc

SEQ ID NO: 4972 - DNA, 2300 bp, Homo sapien
gctgggcaaggttttttgccatgatagagatggacagaggaggaacagctgtcaggacttggtgacacagagaaagatggggactttggaaaagcacagcatgggggtcgagagatggcagctctgggcctggcactcaggaagtgccagaagggattcccttttcaaaaaacatcccactacccaactccacccccagaacagcctgagtacagctcgggcgcaatcatggaggcagctggtgtggatgccatgccccattggggtggtcaggtgggggtgcatggcagctgggggaaggggtcaagatagctgacgggttccatgtaggggtcccctgagccttgctagctgcctgagtccagtgttgaggcacactgaactctagacagaggaaggggaaatgtaagccacccctcccagggtactgcatggacaacatggtccacacaatggtcctagagatatcaagtcctcatccccaaccccgtgactacatagcaaaaggggctttgcaggtgtgattaagttaatgatcttgagatgggggtggtggttatcctggattatctgatgagcctcttatagagaaacgccacactctgagatgaattcagaagtcctttattagccggcaaccgagagacggctagtgctcaaaattctctcggccctgaagaaagggctagattttcttttatactttggtttagaaaggggaggaggagcctagctgaagcactcttacagaagcaaaacaggcaaaaagttaaaagacaaatggttacaggaaaacaaacagttccaggtgcaggggttttaaatccatcacaaggcgatagatgcgggggctttgggtaccatcaaccggacacaaatgtgggggcttagggtactatcaactgggcaaattcctgggaactgcggatatagcttgccacagtatcttatccattaattgcattctttgatgtgctgggagtcagcttgcacaagttaagtccttgaggaaggggggtgggtaaggggctgcaagtgaaggagccaaaatggagtgtgtctggctctctcagctaagggacagtcaattcaggttaaaacaaggtagggtatcacacttacaagagggaggcagaaagagttgatgtgaaatgacctggagtgggagaggttagaaaaggctgtgctgccggctttgaagacaaaggaaagggccactagctagcagcctctaggagctggaaacgctgggaaacagctcccttgcctccagaaggcacaggccctgccaacccagtttagattcccgaccccccgaactgtgagataacatgcatgtggcttaaactactcaatctgtggtactttgttgcaggggcaacaacaaacatacagacatctaactcagacccgaggccttgggtgggacccaggccccatttcctgagacacctgctcccacagcgacctggggtaagcagaagtgggggaggattctccagacaccccagactgtctccaagtagagcggagatctcgccagttaagcgcacagctgaggacagttactgggtgaagtggcctgggtctccgccttctcatgcccccaccgcccagaccctagaaggggagtggctgcggcctctgcaccctggcgctgagggctcccagacccggcccagtggggcaccccagttcaccaccctcctcgccttaggtgagccaaagcccaggcagggtggagcctcacgcacactgactgccccctaggacaggcacaggtgacgcgggggtgtgggacccaggctatgactctggacataaccttcaaggctgtaaaacgagaaggtccatccccccaaaacacgcactcccccacaaccaccccctccccccccccacacacacacactcccctgcaccacagatacacacattcctttcgctccccactcagacgcctcgaggcctcggcgggggaaccataggggcgcgaccagggcgcgccgaggtgtgaccagagaggacacgcagcgaccttactcccgcctttcccgcaaggcgcgttcgccagcctggactagtgggcacgggccctgcgttctaataatcaccataataataggcgctgggtgtacagaggggacccaggcgacgctggcctccatccgataaccaccgtaacaggggctgggccgcgccgctcctccgctctaagtgctctttacatgcttcttaagttaccggcaggccagccgcccttacgagagcccctcacggacattaacccaattgagaag

SEQ ID NO: 4973 - DNA, 2300 bp, Homo sapien
gcaggatccccctaccaggcagtgtgtgatggtgaggcccaagcctggggtctgacgtcgacacccctgtgggcatttggccaaaggcagccatctgccagaatctgagagctgctctcagacctcgctggagagggctacctggggcagtctgagtctctctgggcagactgaggtcctttgctacccaaacggggagaattagagatactgttggctcctgggcactggaagggaggaacgcaggcctctcagcacagggctgggccaacaagttgggggtcccggcacaggggacaacggagaagtgccaacattgggacccaattatgtgatactggggcccagagatagtacaggtgcctcataccacgtggccctgggtggacagcaggaatctattgcgagtggcgggaggccggggctgcctgtcctgcgccctgaagctggccagcggttgtggaaactgggggatattgagggaaccgtaggcccaggtcctcagcctcatagtgtggaacctggcgatcccagggcctgggctggcccccggcgtcacgggaccgggaaggcgctgtggtgctgcggggaattgcggagaagaaggcgggctccagtggaggtggctcatccccgcacggtcactgccctcgcccgctgttggggtccgcggctgggagactgaaggcctcaagtcgggctgggtaggggcacgtgggcagggaaaggggtggtagattaccagtcttcaggggcggggctggagatgcaaccctagggaaggagtctaccaggctgggctcttgaggggcaatggagggctccgggggccaggccaggccaggatcatggagttcaaaggactggagtgaggtttggggtccatgagagtggagctcagaggatgggacggtgggtccaggatttgggacctggggctggaaagtccgaggctagtggagaccaggcctggtatcccagacgaaagggccctataggaaacggggtctcgtgggcgggatctggagccagagaattgtgagaggcggagctaggatggagaaggcgagaggaaaggggtagccgccggcgcggagacctcaatgcggggcgtggtgcggagggggaactggagcgaggggcactggagcgagggggtggggctacgaggaggtggacttgaggggctgggtctggggccggagaatcgtggggagctgcgcctatacacccgggacggtggggttgcgtcggggaagtgggagtcttgggggttcgctgggcagcctggagaacaggcggtcgtggtgcgggcggggccgaaaagaccgaggacagtggggacccggcctgaggaggggtcgggaaggaggggtgggggcgcgcggacgcagatcccgggccgcggcggggcggtggcaggctccagagtggcacgggcccaggtgagcgaggtctccgcccgccgcccctcccgccgccccggtgccagctgccccgctggcccctccctgtacccggcgcttgctccgcgggccgggccgacggcggcgggcggcgtctcgcgcccaggccaggtcggctctggctccatcttgggccgcggcacctggcacctgtggcggccgcaggagcagcgcttcccccgcctgcgcggccccggcgggcgagagggtgagaggctggctccgcgcgctcccgttggggcggggggcgtggtgggcggcacctcccccttgctgagcctcagaacccactccttcccgctgcctgcgctcagacccccggcatcctggcccctgcccagcgcccagagcccccggtggccgcatcgcactccccgcgctccgcctctcattgtcctgtcctgtcccctcttctacgtctcctctgcccatcctcccattttcacaagtctgtccgggaccctgtctccttcggcctccacccctgctgccatcgctcctccctctccccttcttccttttcccctccctcagcctactgcgccgcctaccccgcccccagccttgctgccctttggcttctcctgtcccgcatcattaccccggcccacagccccatttgcctgcagtcgctgcctttgctcctgagaaggtctgtagcctcgtttcgggcccgtattgagcccccttctccctaagtccgggtgggctttgtgcaggaggggcgggaggggagctattctgggcgaggctgcgtggtgcggtgctttcaggcctttggccccgcagcaggggcggcctgtgcttggcgtgcagagtgcagctgggtagacg

SEQ ID NO: 4974 - DNA, 2300 bp, Homo sapien
ttcacatgcttctgcctggcatgggagctgtttgctgcttttaccaccatttcagctcttctgctgttctctgacccacaagagctagggttcaggctgcgtgccttgcgcagtagttctcaaatgtgtctatgtggaagcttgcctccaagggcttaccagcaaatccagaccccacacagctgccctgcaagaaggaggtgacagtggctgcgttcttgcctgcacagaggacgggtgtccatagagctcccagctggagttgagcagtttctggtcaagcaatgttctctgattttacatgtctggaagctaccattacaatcaggtcttcttaaatgtcctccctccctccgtcttcctttcttcctttctttctttgtcagatgctgtgtgtggacttgtgctgggatctggaggcggagacaagagctgtgacctagacataggggagtggggaacaaaggtgctcaggcagacaaccaactaggctgctacatctgcctctgcagcagagcatgggagggtggtaggaatttgtcatggcagcagggacatcggagctggggtgcaacagaggagcagccgctttccaggtagtcaagacaggaagcagcatggtccagaaagaagagatgacaggtgccagtctacagcgatggtgagcagaggcctgggggcttggcaggtgggttcgcatcctggatctggctgtttcttagctgagtgactttgggcaagttgctcaaccactgagtgtcactttgcttcatcagcacgatgggaataaaaatgcccacctctcagagctgttgtgatgattaactaaggtagtgtctgcagagtctatgcactacaaacggcagctgccattctagagggaccactgccatgacttcatggggacatttccatggggagccacaggaggttcactggacaggtgtgtatgtccagtgtttaggaggtgctcttgaagcagatctgttactctcaggaggttctctaagcacatatgtgactttgccatgtggggatggggggcagggaattataagctagtgtattcaaaacaggagcagcccttgtaagcaaagctgttccattatagccaagtcatgtgcatctcagctccaaaggagaaagtgaccattctcattgaattctcatcgccacaaccttgggactgcctgagataagacactccacttccagggcccaccctgagttttcactcacaccctggatgcccatctccttccctcaccctggctgacattctcagccacactgccctcccctggtctccaggggctgaatgctcccagcctcagggcttttgccgtggctgtgccatccatctggcctatcgaacccatttgctcacagcatctcaccccctgtaataatttatttccctctttccttgtaccctgtctgtcttctcccccagggctgagagctccagaaggaaccaaggacagggagcctgtcttgtccagctctggtgcccagcaggagagccaggctcataggaggtctgcaagtaatgtttctggacgaacttatgaaaggcaggtctttttatacccatttcatggatgaggaaactgaggcagagagagagagagacaggcagacgcacacacccctagacagagagaaacactcctggagaaagagaaagggagggagagagggagggggagggagggagagagagagagagagagagagagaaagaaagaaagaaagaaagaaagaaagaaagaaagaaagaaagaaagaaagaaagagagagagaaagacagcgcagctccagcctgcctgtatccagggttgaggtgggcgtgagagacacacgcaggcagggctgcagttccgggcaggccttgggggctcaagatgcggctccccagggcgagtgctggggtcccggggcaggcgggcggctggagcgctctcgtgggcgggcgcaaggggcaggctgggcgggcgcaggcgggagcgtagcagccgctccactccgcacgcaggcagcatcggggcagcaggagcaggtgaagcaggcgcggctctgccccgcgcctggtgccccctgggcacaggagtgcggccgggggcggggccgagtgggccccggtacgaaccctccgggaagccgggcgcgctgcctgcccttggcccggggcgcagagcgtcacactggatctggggagcatcctacccccactgtggacctcagtctcctcacctgagacatgggcggccccatccgcaccctgtaagccgcaagccaa

SEQ ID NO: 4975 - DNA, 2300 bp, Homo sapien
tagatagcaggctttcaacaaatatttttgaataacaacaaacaagagtatggactttgggaacaggagagcctagtagccagcgagcctgagccaatccttgatggcctccaattctgagaagaatctctgggcccccttaggctccctgtggaagaaagcttacccagtcaatcctaataaaaatacttctgagacagatctaacaggacaaagtggagtctctccactctttcagtagctccttcaccccaggtgctgtttggggttctgacactgccatggcatggccagcaggatggcccctagggctcctggggctgctctataagagcttcccacccctgacctgcagtccatgagggcaaagccagatccgggcacatgcccatccgtgttgttctcatgctctcagggggtagagctagtgtgttggacttggcatgtttagggtcacctccctgagggttgacaacctgagcaaaatcagcattcccttggcaaggaataaagggggaatggatttgtggtcagcaacccaccgccaagcattctgcctgcaacagggtggggctggccaggggaggctcctcagggaaggtgaaagctgtgcagagttttgcaggatgactcagtgcttatcaggtagacagataaggaagaacattccagggagagggaggaatgctaacaacagcaggggatctggtctgtactagacatgccaaaggaatggtgtgtccatatcaacagaggagggagagacagaagagaaagagcttgtcagggcctgagtcagagcgggctcatgctgtggggctaagaagctcaaacgatttccagagacagtggggaagctttacagggacaggcaggggaagatcttaacccggctttcgtaggcctctggcttgagtatggaaggtgagtctgggacagggagcccagcgccgaagtgttgcaacactatagggagacatacagaccaattccctcccacctaacagctctgtgctttggggtcctgggttagtttcctgggagaaggctggccttggctacctctgtccttgaccaaggacatcgttttaaatatttgtgatgtgtcctaggccactgcatctctgtccctgtagtgaagagaagatactgattcctaagctcctactctgagaacacaaatatctgcaatacctcggtaagccctaggcctgagtgtgaggttgcaggcacttccatggccccatgcaggtgtctaagttccctcgtggtatttggccaaggggggccctgtgtgatgccctagcgcggtgactacccgtgttcctggcccatgggcatcttccacggaattctgggcttagcctggggattcatgcgggcacatctctgtgatctgctctggagcaggatgtacatcaggtctctcagacctgagtccctggtgcctggcgctcagccttgactgaagtgcttggcccaccctgctgggccagccagctcctgctcagggccacagccctgtaaccacggcttcctccccaggactcaggaattctcccactccggaatgccttgctgctggggtaaccaggtcttcacttgtgaaacaggagtcggccacctcagccctgcgcctggcctggtggaacatgggtcaccgccccaacctggggcagccgccccatcccaacgcagttgctgccgctctccatgcctccctgtgcccagctaaccgggggacttgtcccctgggaaaacctgggtacccaggctgcctttggtttcagcccctactcctcttcccgggctgcctgtgctccccggacggcccctttccccgggctgtgttcacatcggctgggaagggtcccttgcagacagatcttggacgaggtcgcgtcccccctcgtgaccagcaaactcctaaaagcggcccttgccccagagcccctgtagcctccaaccggcagtcaggaggcagcgccgtctcagcgccgcttagtggcgccaggcgtgcctggaaatccgctttcgcagcgccccctcgtagccgcctccggccgcagaaaggcgttccctggacagagaagcgggcgcgcgggggcgggcgcgcggggccttgccggagaacctgactctccgcagcagcagtggaagccggagtgacgcgttgtgttgaacaccagttttctggagcgctgtgtgttcttaacagctgagcagtctgtttctccaatcaggtttcaaagccacttcaactgcactggcccctgtgggtcactgctgcaccgccctga

SEQ ID NO: 4976 - DNA, 2300 bp, Homo sapien
atcagataagcatttctgctggacggttacagaatctggtcaaggagagactgagtcactgctcatcatcctagaagctgctgttgattttttttttttttaaagacggagtttcactctgttgcccaggcaggagtgcagtggcatgttcttggctcactgtaacctctgcctcctgggttcaaacaattctcctgcctcagcctccccagtagctgggactacaggtgcccgccaccactcctggctaattttttgtatttttagtagagacggggtttcaccatgttagccaggatggtctcgatctcctgacctcatgatccacctgtcttggcctcccaaagtgctgggattacaggcgtgagccaccgcacctggcccagaatatttatttagagactgatgtcaggcctaagtgttgatagtgggtagtagtgggcaagatgcctggccctctctccttctcatgagcaagtcagtatcatagaggttaaacatatctttaagtagcatttaacttaacattttttaattaaaaaaaagagaagtaatttgtaaaaatattgcatcccctatttctcttgctggaagctatttgttcttagcagaaatgagaagaaaaggtgttttgcttaaaaaataagtgagttgctcaccatacttctggatctcatctagaattggactcacagtttgtgaacagcccaggtatagccaatgtcttagctttggaacgcttgccactttccagctacagctgaaccttatatcctggtttggttcctgatgactttcaaattctcctgacccaaacgcaagctcagaagcacaagcacattgttggtggcagtacagactgaaacaccctctttggatggcagttcctctcacaggactttattctccaggtatgcacaggcacacacaggtgcccaaaggataaacacacagatctattgtagcatatttgtattactgagagattagaaacatcctaaaatgttaaccaaatcgcttggatgaaaagttttgctctgcttattaggtttggcgtacaatatggaggtgacatctgttacttccagtgtattatagatactttagctccaaaaatgatacctgtacctagatgggcaccaaaagggaatggttaacaaatattgcatatacaggggtatggggcagctccggggctggggatggcggcggccaggtttgcagcggctccaggatgagcgggtggatcccgggaagcgtggtgaaatgggctggctcccgagccagccgggaggacgcttactacagctgctcagaagcaccactggaagctcagatgtaggtgccccagccagaagcagagaggggttcagagaagctacagagaagcccctcctgatgccccagggagcaagccaactccttccaggctccaggaacaccacaaagcaatatgaaacctgttcatgagaggaaccaggaatgccttccaccaaagaaacgagacctccccatgaccagctgctccactaaccacacatcctccagtgatgcctctgaatggtcccgaggggttgtggtggccgggcagagccaggcaggagccagagtcagcctggggggtgatggagctgaggccatcaccggtctgacagtggaccagtatggcatgctgtataaggtggctgtgccgcctgccaccttctcaccaactggcctcccatctgtggtgaatatgagccccttgcccccggaaaaaaaaaataatattgcatatgcagttgattaaatggcatactccatggctattaggagtgatgaaaatgggctgggtgcggtggctcatgcctgtaatcccagcactttggtaggccaaggtgggcagatcacctgaggtcgggagtttgagaccagcctaatcaacatggagctgtgtttactgagtggggctttcgcaggctggagctaagaatttccagtatgcgtaacagccacagcccaaatatctgccagtgagttgtgtaattccccagagcaggcctgggcagtgtctgggtggggcctgggagccacaggagatgcccaaagccaggcagagcccgggggcgaggggacggcaggcaggtgtggcgctgccctgggcgggcttgcacccccacacccaagtgagcggcctgctcactcctcagctgcaggagccagacgtgtggagtcccagcagaggccaacctgtgtctcttcatctccctgggaaaggtgcccccgaggtgaaagagatggcctggtggaaatcctgggta

SEQ ID NO: 4977 - DNA, 2300 bp, Homo sapien
ccgccaccacgcccagctaatttttttttttgagatggagtctcgcttggtcgcccaggctggagtgcagtggtgcaatctcagctcattgcaagctccgcctcctgggttcacgccattctcctgcctcagcctcccgagtagctgggactacaggtgcccgccaccacacctggctaatttttttttttttttgtatttttagcagagatggggtttcaccatgttagccaggatggtcttgatctcctgacctcatgatccgcctgcctcggcctcccaaagtgctgggattacaggtgtgagccaccacgcctggccattcccagctaattttttgtattttttagtagagatggggtttcatgatgttagccaggatggtctcaatctcctgacctggtgatcagtccgcctaggcctcccaaagtgctaggattacaggtgtgagccactgcgcccagcctaactgtaaccctcttatctcaactagctgacattattacttcacatccagttcaatttataaattaagagaggtgccatgggcctggtacggtggctcacccccataatcccaacactttgggaggccgaggcaggtggatcacgaggtcaggagttcgagaccatcctggctaacatggtgaaaccacgtctctactaaaaatacaaaaaattagccaggtgtggtggcaggcacctgtagtcccagctacctgagaggctgaggcaggagaatggtgtgaatccaggaggcagagcttgcagtgagcagatatcatgccactgcactccagctggggcaacagagcaaaacatcgtccaaaaaaataaaaataaaaataaaaatgaaaaagaggtgccatgtgtacaaaaatcaatgcacatttatgaaattttttttcaaatatattttcacacattttatctaaatacataatacagaagcctgtgtgacttgggcaatgtggccaggagggcctgagactaacacatccaccttggcaaaaggacataaaatatgtcttatggtcagaaaaatcaacattttgtgtatttacttagtttacgaaaagtactgaaaatgctattactagctgaatttgtgatttccttttgaaattctgagttatccttatttttcccattttgtttttgcaccaaggagactgcagtcaaataaaacagatactacacgcactcgtcggggcagccgtactgcagaagcacgttgatgcactcctggctggaggcctgccgggcgtaggtcagcgctgtgttcccgtgggcatctcgggccatgacgtccaccccgtcaggagctgctccaggaccacattccccttgcggcaggccagatggagtgccgtgcagccgtctccctccccacaggtctcgttcacctcctcacgggagccatgtgccagcagcaggatggctgtctgcaggtcctcatcagtggtggcccgcagcagctgctggcccagggacagctcagtgcagggtagtggggccagaaagagcttctcctcatatttggaacggatccaccattccttctcttccctcgtggactttattgagggttttgtctgcccctggctgctcccttcccagatgctgttggctagctcattgccaatagatgacataaccttcctgagctcaactggccagtcatccagctccagagatcgcacacgggaaaggcgggtgccaaaactgcggtggatacctgagcattcaatacacatgaggactcccaagttcaaactggcccacttaggattctgggtctcacagtccacacagtgggcgttcccacgcatgttttggatcgactgcagggccatggcctcactctggctggtcagctgggacttgcttttactgctcttgcatgactgcaggctggccaggatctggctctggatggcttggacccaggcatcccgctcctcatacgtcgtggcttcaaagtgccacgtttggccagtggcagacacaatcataaagttgttggtgcttttcttctttaggtgtttctttttattggcatgaggagaggggggcgggttgagcttggggctggtggtgctggagataccggggctgaagcatatggagtcacccagcccggtgtccatgtccttggataggccattgcttttagagctggagatgggtgcacaggctgatgtggctagggatggccactttcctgggactttgatggtagatgtccgaaggtcaatctcttttttatgaatattcttcatataatcacctaagcttga

SEQ ID NO: 4978 - DNA, 2300 bp, Homo sapien
atgtgtaacaaaggttggatagatcagagacaattggaagacgaatcctctactctattgtcacctcttatttttctattcacacatgtcagatagagacatgcgtgttgtaaattattttgtcagaatgaaagcctggcagattaagtgatttcttctctttttgctgtacttgatatcgatctcttgttcatttcttgataatatgtttggttatttttgttttcattgcttttggtgtcagagatggctttggattccctgttctgtgtgctcctgtctggctcctgaacccagctggagaggtgtgtcaatcccaactggtgaagtactgagaggaagctacacaaaaggcagcaaggtgttaataagtgtacctctgacattttaaccacctctgacttttccatggaatggacaagtagtagtctctgtcagagcaatgttttaaaggaaaaaaagaaacttgaggtcgtaaactgtttattaatttatgctgttattttgtgtttactcaactcatttatattgacttgtaaattagtaatttatgaactactattcatcaattcattgcctacatgtcagcaaacaagttttcttcttaataaagaatccggtggctgggcacaatggttcacacctgtaatctcagcatgttgggagggcaaggcaggaggattccttgaggccaagagttcaagacccgcctgggcaacatagcaagatttcatctctacaaaaaaatgaaaatattggctgggcatggtggctcattcctatagttcaggctactcaggagcctgaggtaggaggatcacttgaacccaggagtttgaggctgcagtgagctatgatcctaacactgctctccagcctgggtgacacaccaagagaccacctcttcaaaaaaggaatctaggggcatcagtgtgtgcacacagcatggcttgtgaatgcggaagtgcctgtgtgcatagttgtgctcaagaatgtgttgatgattatatcttctcagcatgaaaaaaagttgttgttgtttttttttgagatggagtcttgctctgtcaccagactggagtgcagtagtgctatctcggctcactgcaacctctgcctcccgggttcaagtgattctcctgcctcagcctcctgagtagctgggactacaggcacacgtcaccactcctggctgattttttgtattttagtagatacggggtttcgccatgtgggccaggatggtcttgatcccctgacctcgtgattggcccacctaggcctcccaaaatgctgggattacaggtatgagccaccgtgcctggcctgaagttcacatttataaagatctctctacgtcttagatttgattcttcctttaaatatttttctcattgacatttgaaagcacctgaccttatataaaatgaagaattttcataactccataaaaggagaattatgacatcatctactatttctttctcttgtctcataaatctaaaccatcaacctgcttatttttgtatactgtcacactgtgtattccctgcattgaatgcctttctattgacattgtctgtaaaaattgtgggaagttttctgcaccctaaattttctgttatggggattagatatccagtatccatgtttttccaagtcttacatcagaaagggtaaatacagccctcacagcagcctgttgtttgtcctgcagttgtgtttccatcacattacacaaagcctctttgtcttcgtggttgtaccctgctaataagttttttttaaattatgtaatatgtgtatatacaaatacctatatgtatgtgtgtacacatacagctgatatctactgagattatgtatgcatgaactatagaattaacttgtaattttaagaaaataaattattttgtaaagataaatctcatgtttaagaaggggaattacaattgaatcatttagggatgcctcagcctaagcataatatggaaaaagccataaccaaaagtcattttagagtactgctaggttactcaacctatcatcacatttaattaaaatgtcagtttgaaccatggccagtcgattttcgttaatatgttatttaaatcaacttgtgaagtcttcattttagatatagaatttgtgttaatgaactggaaaataacattctattgcttggaagatgtgttaaagcctaaatatttatgactttgtaaaagaagaaaaccagctggtgatcagttggcattagtatataaggatgtactcatatttgataatagccatttttttct

SEQ ID NO: 4979 - DNA, 2300 bp, Homo sapien
ttagaggtctgagtcactgataaaactttgggagttgttggcaaatgatagcgtattggtcagagtccgattaggaaagagaagccacacagtcatttgaacaggaaaagtgtacctagggaattgttaattgcaacagggaagtggagtaaccaggcacagactagtaggaagtataggaggagcagctactagtctagggctcaggtagagaactcaggagagtcctcccctcttagtgccctgcccctgcacctcatcagaggaacccagccatggccctctgcttgtcaggagagtcaccgatgctataccactggaacttactagaaatacttccttaggtgctggggaaaggagcggtgtctcagaagagttactctataataaaactgcctggagctggtgagaggagtgggacctgctgggcactggccactgtgtccctggtgaagtcaaccgcctgcaggagccaggcgagggagcataggagaaccagtagcaaagacagctttcacctacaaagtctctccattgctctagataggaggtggtggtcagagtgggatactgtgagggttgcagtccttggacctgacaaggtctaaggtctgatcatggagggagggggaagctgaggtagggcagaggacaagaatgggcttcatgagaccaaaaggatgttagaaagattatttacccggctactgacatctccaagaagtaagaggcctagtgtgaagaagttacaacatcctaagctcttcagggataagggaagcatgcgccacgtaggtagcctccctagtgcagcacccagtatatagcctatgcagagtgaatacctgggggctgctgggggtgataacaaggtcactgtgacaggacctgaagcctgggggtctcggtgacaggagtgggcctagttttttgatgtagaattgagccttgcatgcaccggtgggatcatattgaaaagaaaccctccaagactagaggaagatgcatcctctgacaatgtagtctctgtaggcgtcccaagtagctgggctggggattagatgggctccaaggcatttcctcaggtggcaatgggtggatccctgggaaggcaaagctgtgcaggaagaaaatggcaagatgctaccttccctcagggaaagcccctttcccgggagcagggaaggcgaggcagtttaggctgggtcagtttgtccctgccctcagagtctgttggtcccggaaaaagagggccttattttatttatttatttttctttgagacagtgtcttgctctgtcgcccaggctggagtgcagtggctcgatctcagctcactacaacttctgcctcccaggctcaagcgatcgtcccgcctcagcctccagagtagctgggaccacagggaccacaggcgccctgccacgacgctggctttatttttatttatttatttatttatttatttatttatttatttatttatttatttattttttgagagatgtagcctccctatgttgcccagattggtcttgaactcctgggctcaagcaatcctcctgcctcggcctcccaaaaggctgggattacaggcgtgatccaccgcttctggccaaaagagggctatagggcacccccagaacgcgagatctccctcgtctgtcatctttacagaggaggaagtggactcccaatccagccatagtccattcgccccgggcacggtgactccggggcggccagaaccaaatgtgtctcctggcttttgcacggcatcaagtaacccgcgccaggccgcacagctgccctggccttcagcaaggactccgcgagcgaggtgcaagctgctggggagtgccacagcaggagctgaggcagcggattccgagggcggggtggggctgaatcgggagggacgcggacccggtggaacgcactgcgcagacggcgccggcgccagcactcggccgttgacgagtctttcttccagctgtcccctgaaagtcatccaggcggcggtccctttttttctgcctttttgtttccctccggcgagtcggcgcgagggtgaatttccgtttccggcggtgtccaagcggacctaaggagtcgcagttgtgaacaggtttggtgccgcgggctggggtaggcggcggttgggtccgtggctctggggcactgggaagatcgcgagtcgtgcgcatgggaaggtcctcccccggtcctccgggtcatctttgctcccgaggagcggcatatttcgcatctgcctgaggtgtgcccgggggtcgttggga

SEQ ID NO: 4980 - DNA, 2300 bp, Homo sapien
attcattcacttacttaatgcaagacttcaggggaagaagagtcgctgagtggaggagacgggaaacaatgcattatgaaacgcccatggtctctggatacccacccagccagtacccaccctcctagggtctggtctcgaccatctcatcatgtgttttgagggtgcgttttcctaccagttgtttttttgtctttgagacagggtctcctctcgcccaggctggagtgcagtggtgcgatctcggctcactatagcttcaaccttccgggctgggcgatgctggtgcctcagcctcccgactagctgggaccacaggcgcgggccaccacactcggctaatttttgtatttttagtagagaaggggtttcgccagggtgcccacgctgttctcgaactactgggctcaagggatctgcctgcctcagcctcccaaagtgctgggattacaggcatgagacaccagcaacacgcccagattcttctacacccttaattgggagataaggcttctgcttgcaggctgtgcgttcttccagccagccgcacctttgctgtggactaaacaggaaccactggattacagtcctctggctctctgccctgcaggagattttaatcaaaaattctaggcctaagggaaaagcagggttaagctgaaaatgcacacagggctcctgtaaatttcttttcataaaccacccgcccagggcattaaatagggtacttagttgatccgaaccctccagggagacctccgacccttctcttcgtagcccccagctcccctcccccggttccactgaggcaaggggactgagctgctccacatgccaggagtcagcacgccggaaggccccgcccagcggctggcgcagccaatcgcagagcgggcaagtggtgggggcgggcctgcctgggcggcaagggggcaggggggtctaggggctttagaggtcaattagctgctttcgggcggccttaggcgacaggagactcctggacccagcacctgcccactgtgcctgtccacctgtggctacagcagctgagaccccagtgggctaagattggacaggggccaccagggacccagcaagtccttcagctctgtgagtgagggattttccggagtgccaggccgcagtattcccagggccggtgggggtgggacagggaggctcgaccccggcaaatcaggcagaggcgccccttgctccctgcaacatcgcccacgtcctggggccacagtgagcatgagcggagggcgggagcaagagccaggggacctggcctgggtccccagcccaaagcctgggaagctgcctacccacccctgtgtgggcgcggacactggggactctggcttccggtggttcggccacctgattcagtttatgctctgtgaggggagctggagtgttggcaggactggcccacctgcaggactgcaggactgcgggaacggcggtagatgggtgctctccttcccagtttgtcctgggaagacattcaataactgtttcattacaaggggcatttggaaaacatacttcaccttctgttgtgtattagccaagaacaaggtgtgatgtgacttcccaattattggggatccctttgtcccttcttgaaattagatgtcttcattcttgaggttttgcctggatgacctcagcacaattggtacaaaacctgggccaacggtttcctagtttcccggttgttgccttaagcttctcgcccatcaggtaccttcctgtccttttcatagcctgtcatcatcatcccagaaaactgtttcaactcctacagctctggacaggctgcttttcattttggtgggtccctccaatacctccacttgccctgtttttctccagccacatccttggcctcttccacagtccttaggtaaatgcttggaagaataatttaaatatttttattctaccatggtggccctagtttctcagggggtagtaaaatggctttttaggatcggtctaatcagatcctcatttcttttcccttcctagatttttgaaacatgaatccttcactcctcctggctgcctttttcctgggaattgcctcagctgctctaacacgtgaccacagtctagacgcacaatggaccaagtggaaggcaaagcacaagagattatatgacatggttggtggcatctgaaactgtccaggggaacaccagagagatgggcattgctattgggatcatatggccagagagtggcttctagaggctggctcctaccaataagctaacacaataacttaa

SEQ ID NO: 4981 - DNA, 2300 bp, Homo sapien
tcacgccgccgccctctggctcctgggcctgccgggtctcggcgatgggcgagggctgtgcccggtgcctgcggctccctccgcgccgtggacccccgcggcctcccggccttccttaccccggcggcctggcggccccgcgagcttcacctccccagcatccgaatcgcgcagctcctcccgcgagcgcccgccgccttcgctccccaggccccagctgagaccgccaggaaggcgggctcctcgaccccagatcataagaggtgtctgggaactaagggtgggagggggccagggtagaaaatgtcagttcaagtacgttaaaattaagaacttaggctttgtttaaaaaacaataaatgaagtgaaaaaaacaagccacagagtaaaagaagatacttgcagcaagtgataaaggattagtatccaggatatataaagactgttattgagtcaatgtgaaagagaaaaacacctgaagcaaagaatggatgccggcattaaataggcacttcaaagaggaaccatgaacgaccaaaatcaagtgagtaggtgaccagttcccattagtaattaggaaatagcaaattaagaccacaaagagggcagtgagggtggctcacacacctctaatctcagcgcttgggagtccagggccagaggatcccttgaggccaggaggtggagtctagcctgggaaacatagcaagaccctgtctctacaaaaaaataaataaataaaataagaaaaaagtaaaccacaaggagatgacttaccaccaggcaaaaatattaaagtatgctaataccaagtatcaagaagaatgaagcaagatagctcaaatatgcttttgaaggaaatatactgggcttcattcattctgaaataccccttatttaagatactctattatattaaatacagttccaaaacaaaagaaatcaaagaacaaaaaactaacccaatacttttatcacttgtaatttgtatattacacatattgaaagatatattttagacttattagagaacgatttttaattggatatcactcttgtgcatacaaaataaaataaaattgattaaggtgtttctaacagttacagtctgacttttctgagtcctgtttgagtctcactcattggtgcctacgtctttccacacactgtaacctctctgctattcaaagcgttggtcatacagcagttttgacactgggatgtgaacctgtccacattctttccctagagagggggcctgtgttcctgcccattgactcttggcagctgtgactgcttggaccaatagagcacagtggaagtgacactgtgtgacttccaaggtgatgtcataaaaagctctacagtttctgccgtgctcactgaaaatactcactcttggacctctgggccacctgtaaaagcccaagcaccctgaagctgccatgctgggaggaagcccaggtcacacggggaggctacatgcagggtctccattcacagtcccagctgagcccaggttttgggccctcctgcctaggagccacacttgtgagtggagcagcctccagataattccagtgcccaatccttcaagttatggggccccagacatgaggagccctcctaactccgccctgagtgcctgatcctcagaacctgtgagcataataaaatgggcctgttctgtgtccctaaatgtaggtggtctgttacacagcagtagagaaccggaatgtccctcattcacaaagactctggcaacactgcagtttccatctccttcccgaactgccatctcctgggggacttcagtgtcacacaaataacctcccattgccaacactctggcctcccagtccttgacctcctcacccacagcaatgtcctcacctaactcacctgggctaactcttccaatgaacaaacagcagggtctagtggttttaagggacactgtgagggctgttataagggaaatggaggcttcctcttgtagcccctccaaaggtcctgtgcctccccctgatgttgtcaacatgcaggacattgggaagagctgcaggtcacaaagtcaccatgtcaaccttcctgtcaaccataacagagaattctgtccccagggtgggggaagggccaggcaggtagctggaagcaagtctcccagagccagctgctgaccctagtccctgcgatctggggaggtacctggtggagggccatagtgtgcactggtgaaagggcaggaggaggggtgtggccccgggcataaggggaggcggcaaagaaggggcctgtgc

SEQ ID NO: 4982 - DNA, 2300 bp, Homo sapien
gagtcacaaaatccagagtttcaattcagcaccatggtctatctggaggctgtggtgggtcattccctggccatgacctggctcattgcctcctccttagaatggggcaatgccctttacccccagccttgttaggaagactcattaaggttgcttttgtctgctccctttacatccactctaggcactccctctgcattccccctcatccagtctgtctgggattacatcagggcctctgcagttcctgtgagtttctagcctgtggctctgccttgcctggcaggtcccttcatccccatcctctgtcatcgcctctgacctgcaaattctcccttcatcctcatcacacttggcaaggtgaaaatgaagataccctttttacagatgggggacacgaaggcacagaatgatgaagcaacttgcccaagactatgtggctagtgagtggactctgcctgtctccagaactgagttgctccttccccaagagtagcagaacagtcagaaaccatgggaattggtgggctggggtacacgtcccctaaccattagtatccaggaggaatgagaaaaatcagaggaatttcaacctgcgatgctggaaagtgtgcagcacaggaagccggagtcttgtcacactagctgtctctggatgcttccccaacctccaggagccacccttgtccaggaaccagatagaaaaatacctgtactactcacagcccaggattgtggtgaggtgccaggagtgcaggggaagggctttggaggccagaaagtgctgcaacattctcctgaagattgcaccactgctgctactgaataagcacagagtattaccacccagcaggaggagcaggaaagggaaccaaggcaatctctccaaagctgaacatttgcctcttttctttcctggtgagccagaaggtgcctaatacgtagcccagcttccccagggccagcctgaaacagaccaaactgttctgaaagtgtaggaactatcgcgtggctctccaagttgcagaagaggcacttagaagcagccaaccaaaggccttctctaagcagtgacattagaatgcccaacacaggcaacaaagcaatctctgtggggcccagtaaaatagaagtcatttgcgtgaaaaaacaaacaagcaaaacaacacagaaaccccaaacatccgcagtgagcatctgagaactgctgagaggcaggtccgagcaatcatctgttgcagcagcgtgaggatgaggatgctgacccagctgatggaggggtagggaatcgtccagaacccctttggtggcttttttcctcatccaggagatgaagcaccagggaaaagaaagccagggcattctttctgcctcagaaaaacaggaggcctaggtctggtctgaccaaagtttggccctgcttctgtgacggaagcttgcatctccttgagtggtgtcctgtccctagtgaaaaagagacagtggctcctgagggtgacccagggccagagctagaagggacactcacttgtccaagatgaagtagaggtcaaatgagccctggcatctgtgacctgcttgcccctggcgccagtgctgcctccatcctgggccatggtggtggtgggctctcctggagcccagggccaggcggtgaaatattctccagtcaggtccatggtaccgaaggcttcctgctctaaaaagcggtggaggaagcagcagcagcagcaggaagaccaggaagtagggccccagggactcatggctccccattatctggctgtccctgtgaccccacctcactcttgggtgcctgtgccagggcccagagaggctgagcacaggccccttctttgccgcctccccttatgcccggggccacacccctcctcctgccctttcaccagtgcacactatggccctccaccaggtacctccccagatcgcagggactagggtcagcagctggctctgggagacttgcttccagctacctgcctggcccttcccccaccctggggacagaattctctgttatggttgacaggaaggttgacatggtgactttgtgacctgcagctcttcccaatgtcctgcatgttgacaacatcagggggaggcacaggacctttggaggggctacaagaggaagcctccatttcccttataacagccctcacagtgtcccttaaaaccactagaccctgctgtttgttcattggaagagttagcccaggtgagttaggtgaggacattgctgtgggtgaggaggtcaaggactgggaggccagagtgtt

SEQ ID NO: 4983 - DNA, 2300 bp, Homo sapien
tggatttattcccatttggatggaaacactaggcaaagtattttcttgttgacataacatattttacatatttatggagtacatttaagtatttattacatgcacagaatagtgatcaatcagggtgtttggggtgtctatcaccttgaatatttggtattactatatgttgggtacatttcaagtcccttcttctagctactttgtttttttgtttttgtttttgtttttgttttgagacagagtcttgctctgtcgcccaggctggagggcaatggtgtgatctcggctcactgcaacctctgcctcccaggttcaagcaattctcctgcctcagcctcccaagtagcttggactacaagcgcaggccaccatgtccggctaatttttattattattattttttattgtttttatttttagtagagatggggtttcaccatgttagccaggctggtctcaaactcctgacctcaggtgatctgcctgcctgggcctcccaaaatgctgggattataggcatgggatactgtacctagccttctagctactttgaaatatacaatacattgctgctaactatagtcaccctaggtgaagtatttttcaacagaaacactttgcatgtcccccgtgtctcctctgctgaggtggacactggcactggggcccctgctgctggttggataggtcctcatgatgaaacagatgcttctctgtcatgctaagtaagatctttcatgtcaggaaggggctcttctggaagaatagttagtgtctgtgctacatttcctaaaaaactgtttccccagaaactatatacagctttcaggtgcctcagtgcttcaagacatgctaagggaggaccctcatttgtcttgcatgtttttgggatttttcttgagatgttcttgcaggactcagggcagataacagaccagcttgatgaagaatttagcaaggaaggcccccactgagctgcttcctgttctcgcagagatcagataagcatttctgctggacagttacagaatctggtcaaggagagactgagtcactgctcatcatcctagaagctgctgttgattttttttttttaaagacggagtttcactctgttgcccaggcaggagtgcagtggcatgttcttggctcactgtaacctctgcctcctgggttcaaacaattctcctgcctcaacctccccagtagctgggactacaggtgcccgccaccactcctggctaattttttgtatttttagtagagatggggtttcaccatgttagccaagatggtctcgatctcctgacctcatgatccacctgccttggcctcccaaagtgctgggattacaggcgtgagccaccgcacctggcccagaatatttatttagagagtgatgtcaggcctaagtgttgatagtgggtagtagtgggcaagatgcctggccctctctctttcttctcatgagagaaggtggaatgccttccaccaaagaaacgagacctccccatgaccagctgctccactaaccacacatcctccagtgatgcctctgaatggtcccgaggggctgtggtggccgggcagagccaggcaggagccagagtcagcctggggggtgatggagctgaggccatcaccggtctgacagtggaccagtatggcatgctgtataaggtggctgtgccgcctgccaccttctcaccaactggcctcccatctgtggtgaatatgagccccttgcccccggaaaaaaaataatattgcatatgcagttgattaaatggcatactccatggctattaggaatgatgaaaatgggctgggtgcggtggctcacacctgtaatcccagcactttggtaggccaaggtgggcagatcacctgaggtcgggagtttgacaccagcctaatcaacatggagctgtgtttactgagtggggctttcgcaggctggagctaagaatttccagtatgcgtaacagccacagcccaaatatctgccagtgagttgtgtaattccccagagcaggcctgggcagtgtctgggtggggcctgggagccacaggagacgcccaaagccaggcagagcccgggggcgagggggcggcaggcaggtgtagcgctgccctgggcgggcttgcacccccacacccaagtgagcggcctgctcactcctcagctgcaggagccagacgtgtggagtcccagcagaggccaacctgtgtctcttcatctccgtgagaaaggtgcccccgaagtgaaagagatggcctggtggaaagcctgggta

SEQ ID NO: 4984 - DNA, 2300 bp, Homo sapien
ggcctggaagcaagaggtctcctcagattagaggggaagctctctctgcctggggtcagagctggagcagcatgggtgtaaggggtcacggccccatgtgctgactccctccaggtgacccccatggcacctggggaaggaagcaaaggggccctggccaggacaccagcagcatccacagcacctgctaatcatttttgctggagtaaccttttgggcacttctggtaaagcagacacgctccacaggtgcttttgcaattgctctttggaatttgttaaaaatacacctatgtttttaaagataatttggagtctgcctagtttaatttcagcataggggaaaaataagggaatagtgacaaagtttctttacttgagcaaacttgagtcaggctcctgaaccttctaggctcatctgtgtactttcttgtaaaatccaatttgagcaagaatcccactaagtcaattcagcaagaactccccttgttcctatctgaccactcccaatatccgatcagggtcctcatcctccaccttcccaggtgatgtctggtcaccctggcctttcttcagcaggtctcctgttaggtcagtttagccagcatcaccctcacccctggcatttcctcttggtaattttccatctttcaactcctacctgctccatggctccaagtctcaacttctcatgctgtttttagaatcagcctgactgtatattgaggtctcttttcgcttattgcaatagtcctgaataaaatctggttttactactttatcgtctagctctggtttttctttgccataggtattccctacctgtagccttgccatagctctatcatcgttgctttttaattccctccaagagatgatatctacatatactccctctctatcctcagatcaatgttttgcatttcctaggagctgaattccttttcttccattgcagcactggctgggagagaaggcacaacatggtccagcatactgagccccaagtttgtcctgcagcatgatttgagacacagtgttcgtgccacacagaattctgtgagccgtccaatagcctttcatacatttgttttctgcttaaactacagagtagatgctcttgtcagcacctaagaacactctctattacacagaactacaccctaatgacattttatctgtttacgtgtcctctcagaaaagctgtgagccccttgaaggcaggaactttatttgtttttaaacattcagggcctagtagatagcaggctttcaacaaatatttttgaataacaacaaacaagagtatggactttgggaacaggagagcctagtagccagcaagcctgagccaatccttgatggcctccaattctgagaagactctctgggcccccttaggctccctgtggaagaaagcttccccagtcaatcctaataaaaatacttctgagacagatctaacaggacaaagtggagtctctccactctttcagtagctccttcaccccaggtgctgtttggggttctgacactgccatggcatggccagcaggatggcccctagggctcctggggctgctctataagagcttcccacccctgacctgcagtccatgagggcaaggccagatccgggcacacgcccatccgtgttgttctcatgctctcagggggtagagctagtgtgttggacttggcatgtttagggtcacctccctgagggttgacaacctgagcaaaatcagcattcccttggcaaggaataaagggggaatggatttgtggtcagcaacccacatcgttggtcagcaacccaccgccaagcattctgcctgcaacagggtggggctggccaggggaggctcctcagggaaggtgaaagctgtgcagagttttgcaggatgactcagtgcttatcaggtagacagataaggaagaacattccagggagagggaggaatgctaacaacagcaggggatctggtctgtactagacatgccaaaggaatggtgtgtccatatcaacagaggagggagagacagaagagaaagagcttgtcagggcctgagtcagagcgggctcatgctgtggggctaagaagctcaaacgatttccagagacagtggggaagctttacagggacaggcaggggaggatcttaacccggctttcgtaagcctctggcttgagtatggaaggtgagtctgggacagggagcccagcgccgaagtgttgcaacgctatagggagacatacagaccaattccctcccacctaacagctctgtgctttggggt

SEQ ID NO: 4985 - DNA, 2300 bp, Homo sapien
agaatctgggaatgactattaagatttatttattccctctctaggtaaaatccctctctaggtatataaataaataataaataaataatcagtttcagccgggcacaatggctcacacctgtaatcccagcactttgggaggccaaggccgatggatcacttgaggtcaaggagtttgagaccagcctggccaacatggtgaaaccccatctctactaaaaaaaaaaaaaaatgcaggccgggcatggtggctcacacctgtaatcctagcactttgggaggctgaggtgggcgaatcacgaggtcagattgagaccatcatggttaacatggtgaaaccccatctctactaaaaatacaaaaaaaattagctgggcatgggtggcaggcacctgtagtcccagctactcgggaggctgaggcaggagaatggcgtgaacccaggaggcagagcttgcagtgagccgagatcgcaccactgcactccagccttggcaacagagtgagactccatctcaaaaaaaaaaaaaagggcaaaaacaaattagccgggtgtggtggtgcccgcctgtaatcccaactactcgggaggctgagacaagagaatcatttgagcctgggaggtggaggttgcagtgagccaagatcctgccactgcactccagcctgggtgacagagctagactctgtctctaaataaataaataaataagcaggaagggtaggagagctctaaatatatgcacttgttagcttatatttatgttcagagcctcaggaaatgagcatacacaccaggcttaaattgggtattccaaggatcaggttggggatagggagggaactattttaaaatacatctcttttacatgtgcctttatattgacttaaaattttaaaaattgagatagaattcacataccataaaattcagtcctttaaaaagtatacaatttggtggtttttactgtactcaaagttttataatcacggccactgtctaatgccagaagattttcatcagttcatttctattgacttcttatttctttctttttaaaaaattttaatttcatttcattttatttttgagatagggtctcactttttcacccaagctgcagtgcagtggtgcaatcagggctcactgcagcctttacctcccaagctcaagagttcctcctgactaagccccacaagtagctggaattacaggtgcacaccaccatacctggctaatttttgtattttttgtagagatgaggtctcactatgttgcccaggctgatcttgaactcctgagctcaagtgatccccttgcctcggtctcagagagtgctggccttacaggcgtgagccaccgcacctggcctatattgactttttataacaagcatgttgtacttcggtagtttttaaaacataaaaatgattttaaaaaccaagaatcacagtgatttggcagagcagtgggtcttttctggaaaagagagtcttgcctacccatgctgtcagggttagtcaaatgcccaggctttctggcaagtcagtggtagatttttctctctgctttcatacaaatgggataataaaaatttatcagccattttaagcaactgaatgaaaataagttttgcctttaccattttccttgttcaaaatcctgaagttctagtttcctagttgataaattacatcagttgacattctccataacctggggtcagaatactgtatcattgcccatcaacattattaggttaaatgaaaaggtgtgaaaactgatatcttactgtttttgcaactcttggtttacaacgaggttaaagtttcatcatgtttcctagtcatttgtatttaaaaattttctttttttttttggtgaatggactattctttgctgtttgtccatgacccactgttacggacacgcacctggtagtggtctcagccctttgctgaataaccatttccttccccatctttgtccttagttactgtgtgaattcttatattgtgatttatttccaatgacgtgttgaccttttaacattgagtttgcttccatatttagcgtgtatatgatgaagaagtggaggagccagtactcaaggctgaggcagaaaaaacagagcaggtacttgtataaaatcactcttagctgagtttctgactttgaaaaatgtggtggagatcgatgtgttatgtgggaactgggggatggtgggcggggttgggaaagggagggactgctcctgacagcagcccaagaggggattctttcctttgtttctgaaatg

SEQ ID NO: 4986 - DNA, 2300 bp, Homo sapien
ttggggtgggcatcaggatcgcggccctgggaacaggagggaaggtcatgtgtgattagagctgtaagaacttatctcaaggaagttacatatgtaaagatggacacaacaaagatgtcccctgcagctgtattatattagcaaaaggctggccacagcctaaaagccactcagtaggggaatgaaacattgacaaaatggaatgctatggcgcttccaaaaataccagaaaatatatttataaatacaaagtttacatatatatatatatatgcacaagctttagagataatctttccaggttatatatattatataaactttgtatagtatctaaattttttattagaaaagcaatccattagttccataatgagaaacattttgaaggtaaaaaacatacaactgaatgaattctcttcatctcatttccaaagggaagaagagacagcagctgaatcaagtacaaactacacagagtggtcaagtatgtgtccctcacctgtaagcactgcaggccaaagacctggcacaggtgcgaccacaagccttcctatggctgtccatcacttctgccctactttcagactccgagtgagtccctttttgtttactagatatctaacgtttaaaagttaccatcaacattattggtttgataatataatgctccagacctgacattctaaaattcatccctatttccttatcacagccacagattaaaacttaacaaaaaggccaggcgtggtggctcatgcctgtaatcccagcactttgggaggccaaggcgggtggattaccagaggccaggagttcgagaccagcctggccaatgtggtgaaaccccatctctactaaaaatacaaagattagccgggtgtggtggcgtgtgcctgtggttccagctacttgggaggctgaggtgggagaatccttgaacctgggaggcagaggctgcagtgggccaagatcacgccactgcactccagcctgggcaacacagtaggactccatctcaaaacaaaacaaaacaaaacaaaacaaaaaaaccaaaaaaactaatgaaaaacttacttctaacaaaataaatcacattaacaataattattattgttatatataaaaatgagtttaacacagcaagtaatgttaaatatttcacaactaaggaaaaatattacaaaaccatacacagtaagagactgggagaaaatatatcaaattaatcatattcactgtgtgcagctctcatttataaataagcttatagtattggtataacaaaaaaattcatataacattttttgtagaaataaacatagactatttctttggttagatctataaaaaggattggcaatctatgacctgccaacctggtttgcataacatcaccattgagatcaaattcatataccataaaatctacccatttacgtataaaatgtaatgattttttggtatattcagatctgtgtatccactaccacaatctaagtttagaatattctcatcactcccaaaagaaaccccaaaccattagcagtaattatccattcctgctcacggctactcccagcccccagtaactactaatctactttctgtctccattgatatgcctattctggacatttcatataaatggaatcacataatatgtggtctttcatgactggcttattttatttagaatgttttcaaggttcatccatgtggcagcatgtatcagtactttgccttttttattaccaaataatattccattgtatggatatactatattatgtttagccattgtttccatcttttggctattatgaataatgctgctgggagcaatcatattcaagttttgtgtgaacatgtttttatttctcttggatatgtacccaggaataaaattccggattgtgtgatagctttatgttataagaatttgaagaacagcaaactgttctccaaagtggttgtactgttccacacttgcagcagcaaggaatgagaatttccatttatccacatccttaccaacactcgttacttccctttttttttttttttattatggtcctcttcccgggtatgaagtggtatgtcactgtggttttggcttccctgatgctgagcatctttctatatcctttttggccatttgtctatcttcttcagtaaaatctctattcagatgtctgtcttacctattttttttcagacagggtctcgttctgtcactcagcctgagtgcaatggtgtgatcacagcccactacagccttgaactcctgggctcaaagg

SEQ ID NO: 4987 - DNA, 2300 bp, Homo sapien
tcgtgcctttcaggtgcaaagttttgagtctgagttttagcctttctatgtcattttctcccccagccccagtaggtttttgtaagtactctgttttctttttatcgtagagaggactcctgtgacagccacagtcttcagaatgctatttctgaaatgctacctttgagttggttcagccctcatttgagaaagtatttttaagactcagaagccaggattgttttttgcattatgatttttccttaaaatttctaagatatttgatggctttttggtattttttttcttttgaaggtacaagagaaaaagagagtagtgaaaaaagaccactctgttgactctttcaaaaaccagaaacatcctgaatccattcaaggtagtaaagaaaaaggcatatggaagccagaaacacctcaggttagaaattctctttaaggattttcagctcttgtttgcatcccagtacagagaaattccattatgcagacccacagttattcagacttgtctgcattaaggaggaaagagcaaccagggctaccgctttgtcttcactgcactccccccaagtcatctcccctctcctcgctccacacgccagagtttcatgaatctatactttaatagttagtgttttttgatgccatgccagatttgactctgaagtggagttaaggtaggatgaagaatcttcttcccactaaagaatttatttctccctctggatttccttggaatagaattaaaatagaaataaatataaattacatctgatttcctgcctgctctcagtgttgcctctcccaaggtcattgctgttgggccgtactctgcagcagtcttcccagaacgctgtggagctcctcctgggaacagcccaggactggagagcgagtgccagttccacgtgcaggtgtcccagggtgtctcactgaagccttagtgtcctgagccgtaaacctgaggcacttggacgaacacatcaccactgacccttcctggggctcagatcttttgcttttagagccagtgcattaggctatggttgaatttttgtgtgctccttgaaatttctatttgataaccaacatggtaattttgcctgctggtcagttttaggtgctctgataaactgtgactcttgggaatcttactcatcttgtattccttgactccatatctgatctggcagctttccacttacgtgacagaggaggaggcatacgtgaagtagtgctagtgaaacatcaggccccaggagagatttgaatgcctttcccattaaagagctacagaaagtgacagttttgctccatcacagatttatttacaggcataagaaacacttgtctttctgtttcccaaatggatttttaactggatgtaattttacacaggactcatcaggtctcgctccatttaaaaccaaagaaccatccactcggatcgggaagatacaagtaattaaaacactggaatcttcattgcctgccctgtggcatctataaacttttttgggtttcctacttttgtcagctgctgccaagcatcttctcatctcttcccccgcctcccctcccctgcacctagttgttgtctcctgtgtgctgcgtctttaacatctattttttgagcccagtggtgggcataggtgtaagacgctctgttttaattctgagactagatcgggcgattttcctacgtttctctactcctctcgtattatacattatgtgcaccgaatcttgtcatgtgtcacaataaagataatagactgctgtgttgaagaacaaatacagagtttcatttttcttctttaggcaaatttagcgatcaacccagcggccttgctgcccacagcggcttcccagatctctgaagtaaagcctgttttgccagaattggcttttccttcatctgaacacagaaggagccacggtctggaaagtgtgcctgtccttcccgggagtggggaggccggtgtgagttttgatcttccagctcaggcagacaccttacacagtgcaaacaaggtgatgaaaccatctttgcttccttgctctcttcttttaaccagaacgtgcatatgcttctttctagtttatcaattgcatacacagcagtctttgactctccttttgaaggaggtgcctcatccttccttcagccactccccactccattctccccacccccctcatcctgcacctgcttttccgtggcctgcatttggtacatttgcattctgctcagtagccacagtaacgtctcaccactttggctggtgtctgacacct

SEQ ID NO: 4988 - DNA, 2300 bp, Homo sapien
tacacagcagtctttgactctccttttgaaggaggtgcctcatccttccttcagccactccccactccattctccccacccccctcatcctgcacctgcttttccgtggcctgcatttggtacatttgcattctgctcagtagccacagtaacgtctcaccactttggctggtgtctgacacctgcaggtttccagcactgccacctgggggtcttctaaccacagagcagatcatgcccctcctgctggcgcttcctcactactccaaggagagcattcgggctcctgggtttggtatgaaacccctttgcaatcggtgccagcccatgtgtgcagcttcctcactagtcacttcacactttccagcctgactccaggcacaccaggtgccactccctgaacacacatggtctgttctgttgctgcccaaggctcctgctgcctcctcaccaggaatgctcctctctgtccacagctgtgcttccacatccccacttctgtgactgtgccctgcactccccgcaccaagttcccacagcagcgacactgtttcatgggatctcctcaatggactgtgaaccctttgaagttttcctttcattgtagttgggtttcttgtttctatccagtctcccttctctagaaagctttagctgatttccaagtaagcgacaggacacagaatgacctaccccggcaaatagattcatttcaaatgtttccaaacctgtttccttgtgcaaaacaaaacagccttccttttaacgagaattttcattggcttttttttaattaagtttaaattggcaactaaaattgtgacattcccctgaagttgacaacacaatcatactttgcccaaagtagattgtagcttctcaaaattctacttgattgtatattttggaaactatcataaacactgcatcattgctactaagtgattcatgttttgagattatatgaaaagttctgatttctaagccatatttcttatgtggaatatttaacatttgaattcaatgtttattgacttgaagaaaacagcaccctagattacctctctttattgtgtcatgtttctccccgctcctggagcctgaatttagactagccccctaacaaaggttagtaccagaattccccgattctttcttgttttgaaagatacccacgtttctattgagggtagagtaggggccaagggaggggttgtgagacagagagccaacatgcctactttccaggtttccagcaacagataaaactttttgtgtgaaactgaactgaaactgccctgagaagattaaaaaatggagaactctaaaggattaagaatgacttagtcttggagtactaggagctattaaactccttccttggaaatcattaagaaataacctcttctatgttcttagataatatcttcattgaagtagaccagataaccttataatattttgagtcactgattctttgccatggtagctttgaacactttattttgtcgtcagatcaatgtgtgtttttttgccattgcagagccgtgtcaagatgagagggaagcgtagaccgcagacccgtgcagctaggcggctggctgctcaggagtccagcgagactgaggacatgagcgtccccagaggacccattgcacagtgggctgatggcgccatttccccaaatggccatcggccacagctcagagcagccagtggagaagacagcactgaggaggccctggcagctgccgctgcaccttgggaaggtggtcctgtgcctggagtggacagaagcccctttgcaaagtctctgggtcattccagaggggaggctgacctttttgattctggggacatcttttccacgggcactggatctcagtctgtggagagaacaaaacccaaggcaaagatagcagagaatcctgccaacccaccagtgggtggtaaagcaaagagccccatgtttcctgctctaggtgaggccagcagtgatgatgatctctttcagtctgctaaaccaaaaccagcaaagaaaacaaatacctttcctctcctggaagatgaggatgacctctttacagatcagaaagtcaagaagaatgagacaaaatccaatagtcagcaggatgtcatattaacaacacaagatatttttgaggtaataggacttaacacgtttttgtgtctgttctaagttaaggaaggtatctgattggcttatttgagccatagattatgtctagcttgttgcgtgcataccccatagccacttgcttagtaattataattaggct

SEQ ID NO: 4989 - DNA, 2300 bp, Homo sapien
attcattcacttacttaatgcaagacttcaggggaagaagagtcgctgagtggaggagacgggaaacaatgcattatgaaacgcccatggtctctggatacccacccagccagtccccaccctcctagggtctggtctcgaccatctcatcatgtgttttgagggtgcgttttcctaccagttgtttttttgtctttgagacagggtctcctctcgcccaggctggagtgcagtggtgcgatctcggctcactatagcttcaaccttccgggctgggcgatgctggtgcctcagcctcccgactagctgggaccacaggcgcgggccaccacactcggctaatttttgtatttttagtagagaaggggtttcgccagggtgcccaccctgttctcgaactactgggctcaagggatctgcctgcctcagcctcccaaagtgctgggattacaggcatgagccaccagcaacacgcccagattcttctacacccttaattgggaggtaaggcttctgcttgcaggctgtgcgttcttccagccagccgcacctttgctgtggactaaacaggaaccactggattacagtcctctggctctctgccctgcaggagattttaatcaaaaattctaggcctaagggaaaagcagggttaagctgaaaatgcacacagggctcctgtaaatttcttttcataaaccacccgcccagggcattaaatagggtacttagttgatccgaaccctccagggagacctccgacccttctcttcgtagcccccagctcccctcccccggttccactgaggcaaggggactgagctgctccacatgccaggagtcagcacgccggaaggccccgcccagcggctggcgcagccaatcgcagagcgggcaagtggtgggggcgggcctgcctgggcggcaagggggcaggggggtctaggggctttagaggtcaattagctgctttcgggcggccttaggcgacaggagactcctggacccagcacctgcccactgtgcctgtccacctgtggctacagcagctgagaccccagtgggctaagattggacaggggccaccagggacccagcaagtccttcagctctgtgagtgagggattttccggagtgccaggccgcagtattcccagggccggtgggggtgggacagggaggctcgaccccggcaaatcaggcagaggcgccccttgctccctgcaacatcgcccacgtcctggggccacagtgagcatgagcggagggcgggagcaagagccaggggacctggcctgggtccccagcccaaagcctgggaagctgcctacccacccctgtgtgggcgcggacactggggactctggcttccggtggttcggccacctgattcagtttatgctctgtgaggggagctggagtgttggcaggactggcccacctgcaggactgcaggactgcgggaacggcggtagatgggtgctctccttcccagtttgtcctgggaagacattcaataactgtttcattacaaggggcatttggaaaacatacttcaccttctgttgtgtattagccaagaacaaggtgtgatgtgacttcccaattattggggatccctttgtcccttcttgaaattagatgtcttcattcttgaggttttgcctggatgacctcagcacaattggtacaaaacctgggccaacggtttcctagtttcccggttgttgccttaagcttctcgcccatcaggtaccttcctgtccttttcgtagcctgtcatcatcatcccagaaaactgtttcaactcctacagctctggacaggctgcttttcattttggtgggtccctccaatacctccacttgccctgtttttctccagccacatccttggcctcttccacagtccttaggtaaatgcttggaagaataatttaaatatttttattctaccatggtggccctagtttctcagggggtagtaaaatggctttttaggatcggtctaatcagatcctcatttcttttcccttcctagatttttgaaacatgaatccttcactcctcctggctgcctttttcctgggaattgcctcagctgctctaacacgtgaccacagtctagacgcacaatggaccaagtggaaggcaaagcacaagagattatatgacatggttggtggcatctgaaactgtccaggggaacaccagagagatgggcattgctattgggatcatatggccagagagtggcttctagaggctggctcctaccaataagctaacacaataacttaa

SEQ ID NO: 4990 - DNA, 2300 bp, Homo sapien
gttcaggttagaggtctgagtcactgataaaactttgggagttgttggcaaatgatagcgtattggtcagagtccgattaggaaagagaagccacacagtcatttgaacaggaaaagtgtacctagggaattgttaattgcaacagggaagtggagtaaccaggcacagactagtaggaagtataggaggagcagctactagtctagggctcaggtagagaactcaggagagtcctcccctcttagtgccctgcccctgcacctcatcagaggaacccagccatggccctctgcttgtcaggagagtcaccgatgctataccactggaacttactagaaatacttccttaggtgctggggaaaggagcggtgtctcagaagagttactctataataaaactgcctggagctggtgagaggagtgggacctgctgggcactggccactgtgtccctggtgaagtcaaccgcctgcaggagccaggcgagggagcataggagaaccagtagcaaagacagctttcacctacaaagtctctccattgctctagataggaggtggtggtcagagtgggatactgtgagggttgcagtccttggacctgacaaggtctaaggtctgatcatggagggagggggaagctgaggtagggcagaggacaagaatgggcttcatgagaccaaaaggatgttagaaagattatttacccggctactgacatctccaagaagtaagaggcctagtgtgaagaagttacaacatcctaagctcttcagggataagggaagcatgcgccacgtaggtagcctccctagtgcagcacccagtatatagcctatgcagagtgaatacctgggggctgctgggggtgataacaaggtcactgtgacaggacctgaagcctgggggtctcggtgacaggagtgggcctagttttttgatgtagaattgagccttgcatgcaccggtgggatcatattgaaaagaaaccctccaagactagaggaagatgcatcctctgacaatgtagtctctgtaggcgtcccaagtagctgggctggggattagatgggctccaaggcatttcctcaggtggcaatgggtggatccctgggaaggcaaagctgtgcaggaagaaaatggcaagatgctaccttccctcagggaaagcccctttcccgggagcagggaaggcgaggcagtttaggctgggtcagtttgtccctgccctcagagtctgttggtcccggaaaaagagggccttattttatttatttatttttctttgagacagtgtcttgctctgtcgcccaggctggagtgcagtggctcgatctcagctcactacaacttctgcctcccaggctcaagcgatcgtcccgcctcagcctccagagtagctgggaccacagggaccacagggaccacaggcgccctgccacgacgctggctttatttttatttatttatttatttatttatttatttatttattttttgagagatgtagcctccctatgttgcccagattggtcttgaactcctgggctcaagcaatcctcctgcctcggcctcccaaaaggctgggattacaggcgtgatccaccgcttctggccaaaagagggctatagggcacccccagaacgcgagatctccctcgtctgtcatctttacagaggaggaagtggactcccaatccagccatagtccattcgccccgggcacggtgactccggggcggccagaaccaaatgtgtctcctggcttttgcacggcatcaagtaacccgcgccaggccgcacagctgccctggccttcagcaaggactccgcgagcgaggtgcaagctgctggggagtgccacagcaggagctgaggcagcggattccgagggcggggtggggctgaatcgggagggacgcggacccggtggaacgcactgcgcagacggcgccggcgccagcactcggccgttgacgagtctttcttccagctgtcccctgaaagtcatccaggcggcggtccctttttttctgcctttttgtttccctccggcgagtcggcgcgagggtgaatttccgtttccggcggtgtccaagcggacctaaggagtcgcagttgtgaacaggtttggtgccgcgggctggggtaggcggcggttgggtccgtggctctggggcactgggaagatcgcgagtcgtgcgcatgggaaggtcctcccccggtcctccgggtcatctttgctcccgaggagcggcatatttcgcatctgcctgaggtgtgcccgggggtcgttggga

SEQ ID NO: 4991 - DNA, 2300 bp, Homo sapien; identical to SEQ ID NO: 4978

SEQ ID NO: 4992 - DNA, 2300 bp, Homo sapien
cgcctgtaatcccagcactttgggaggccgaggtggatggatcacctgagaccgggagtttgagaccagcctgaccaacatggaaaaaacccatctctactaaaaatacaaaaattagctgggcatggtggcacatgcctgtaatcccagctactcaggaggctgaggcaggagaattgcttgactctgggaggtggaggttgctgtgagccaagatcgcaccattgcactctagcctgggcaataacagcaaaactccgtctcaaaaaaaaaaaaaaaaaaattataactgggcagtggaattgaaaatgattttaaaaaatatccaaaatacctaaggaacttgtataaataaataggaaaaaaaaagagaaaaacatcaagaagcccacaaaaaagcagatttgtaaatgggcaatggattcgaatagacatttagccatagaaggcatccagttggtgaaaaggcatatggaaaggtgctcagcatcactgattatcaggaaaatgaaaatgaaaaccgccacgagtggtttagaccatagcggcatgcatgaaagttttcagacctccagttgttgggagtggctgaggagattggggagcttctgtctgagttggaagagtggagtctcaacaagaaccagcgtattctggacatgtgtgcgccctggagtgttcatggctggatgccttgtctacctgtgccttacagagtgacaccattgtggtgtggtcgatcagaggggcaggaggctttcagagggagtgggaagtggtggggcttggtttgtttgcccatggatgacagcaaaagtgagttggcttctcaagaacttttaccagtagcctgttttgctacaattctagacccagactggggtcccaaggcatcatagcccacagcttcttagcaagtgcatgttcagttggatcccccagctcagcctgggtcatccccacgttctgcctcttgggccatacatagctcagctctgtactgagccatcatcccatggtgagcaagaccccattcttggtcttcagtctctttccctgcagcatgcaatcaaggtggtggctggaaggggccaaggagccacatgtcacagtgccctgctgcctgaacaaggaccagaggcctgtggaacacatggctctcagatttctcccatttgatgactcatcagctgcccccacatggctttctagctcacagcagatctagccttctctgagcagtgaagatgggatgttttatggtcattttccctggtgtggagagcccaagtggagttcttcagcacaccctacaccatcccctcactaacacccccacctgtccagtcttacctgccttcatatcaaaagcactcagttaacccagagggcttcagccctgccctgcctgactttctaggaaacccctctctccacccaccctaatcagacactgtctgaaggttccccctcatcattttaaaaggaagagaaatttttctgacacagaggttctggtgaagtggccagctcccacatcacagggtgatggtggtttggactggaccaggatcagacagtgctgtcctggggctggccatctgataaggggctccagaaagggcagtgatggacccctgggaggctttctgctctcctgatcacaggtttttggtgagaggacctattggccactagggtgtctgcgggggtgtgtgtgtgtgtgtgtgtgtgtgtgtgtgtgtgtgtgatgtgtgtttacttggaatgacttctttcagcatgaagcccactgttttgctgaacgtatctcactgtttcctgaaactcagtacattcagctggcttaagggtcctggggcctcgctgtgtcatatttgcacaagcctagtgtctgtgcagactgtacactggagttcagttgtaagacccttttgatcccttattctgttcctgtaatagaaaagccatttcactcaatggaatagaaacccagatctaatggagagatgttctaatctgccatacactggggcagtggccagtgatttggactttgtggcacagatggaaatttccaggttctctaggtggtaggcagaggcctcactttttaagaaactcccccactccacccctgccaatgaggacattgcttagaggtatttctatcagtgttgagtagaagagatcatttcttggtgttgaatttcaggtaaggatgccagcttctgcatatcagggtggtgatgtttgggctgcgacaggtctagacagcagtctgaaagggggctcaagga

SEQ ID NO: 4993 - DNA, 2300 bp, Homo sapien; identical to SEQ ID NO: 4977

SEQ ID NO: 4994 - DNA, 2300 bp, Homo sapien
atcagataagcatttctgctggacggttacagaatctggtcaaggagagactgagtcactgctcatcatcctagaagctgctgttgattttttttttttttaaagacggagtttcactctgttgcccaggcaggagtgcagtggcatgttcttggctcactgtaacctctgcctcctgggttcaaacaattctcctgcctcagcctccccagtagctgggactacaggtgcccgccaccactcctggctaattttttgtatttttagtagagacggggtttcaccatgttagccaggatggtctcgatctcctgacctcatgatccacctgtcttggcctcccaaagtgctgggattacaggcgtgagccaccgcacctggcccagaatatttatttagagactgatgtcaggcctaagtgttgatagtgggtagtagtgggcaagatgcctggccctctctccttctcatgagcaagtcagtatcatagaggttaaacatatctttaagtagcatttaacttaacattttttaattaaaaaaaagagaagtaatttgtaaaaatattgcatcccctatttctcttgctggaagctatttgttcttagcagaaatgagaaaaaaaggtgttttgcttaaaaaataagtgagttgctcaccatacttctggatctcatctagaattggactcacagtttgtgaacagcccaggtatagccaatgtcttagctttggaacgcttgccactttccagctacagctgaaccttatatcctggtttggttcctgatgactttcaaattctcctgacccaaacgcaagctcagaagcacaagcacattgttggtggcagtacagactgaaacaccctctttggatggcagttcctctcacaggactttattctccaggtatgcacaggcacacacaggtgcccaaaggataaacacacagatctattgtagcatatttgtattactgagagattagaaacatcctaaaatgttaaccaaatcgcttggatgaaaagttttgctctgcttattaggtttggcgtacaatatggaggtgacatctgttacttccagtgtattatagatactttagctccaaaaatgatacctgtacctagatgggcaccaaaagggaatggttaacaaatattgcatatacaggggtatggggcagctccggggctggggatggcggcggccaggtttgcagcggctccaggatgagcgggtggatcccgggaagcgtggtgaaatgggctggctcccgagccagccgggaggacgcttactacagctgctcagaagcaccactggaagctcagatgtaggtgccccagccagaagcagagaggggttcagagaagctacagagaagcccctcctgatgccccagggagcaagccaactccttccaggctccaggaacaccacaaagcaatatgaaacctgttcatgagaggaaccaggaatgccttccaccaaagaaacgagacctccccatgaccagctgctccactaaccacacatcctccagtgatgcctctgaatggtcccgaggggttgtggtggccgggcagagccaggcaggagccagagtcagcctggggggtgatggagctgaggccatcaccggtctgacagtggaccagtatggcatgctgtataaggtggctgtgccgcctgccaccttctcaccaactggcctcccatctgtggtgaatatgagccccttgcccccggaaaaaaaaaataatattgcatatgcagttgattaaatggcatactccatggctattaggagtgatgaaaatgggctgggtgcggtggctcatgcctgtaatcccagcactttggtaggccaaggtgggcagatcacctgaggtcgggagtttgagaccagcctaatcaacatggagctgtgtttactgagtggggctttcgcaggctggagctaagaatttccagtatgcgtaacagccacagcccaaatatctgccagtgagttgtgtaattccccagagcaggcctgggcagtgtctgggtggggcctgggagccacaggagatgcccaaagccaggcagagcccgggggcgaggggacggcaggcaggtgtggcgctgccctgggcgggcttgcacccccacacccaagtgagcggcctgctcactcctcagctgcaggagccagacgtgtggagtcccagcagaggccaacctgtgtctcttcatctccctgggaaaggtgcccccgaggtgaaagagatggcctggtggaaatcctgggta

SEQ ID NO: 4995 - DNA, 2300 bp, Homo sapien
ggcctggaagcaagaggtctcctcagattagaggggaagctctctctgcctggggtcagagctggagcagcatgggtgtaaggggtcacggccccatgtgctgactccctccaggtgacccccatggcacctggggaaggaagcaaaggggccctggccaggacaccagcagcatccacagcacctgctaatcatttttgctggagtaaccttttgggcacttctggtaaagcagacacgctccacaggtgcttttgcaattgctctttggaatttgttaaaaatacacctatgtttttaaagataatttggagtctgcctagtttaatttcagcataggggaaaaataagggaatagtgacaaagtttctttacttgagcaaacttgagtcaggctcctgaaccttctaggctcatctgtgtactttcttgtaaaatccaatttgagcaagaatcccactaagtcaattcagcaagaactccccttgttcctatctgaccactcccaatatccgatcagggtcctcatcctccaccttcccaggtgatgtctggtcaccctggcctttcttcagcaggtctcctgttaggtcagtttagccagcatcaccctcacccctggcatttcctcttggtaattttccatctttcaactcctacctgctccatggctccaagtctcaacttctcatgctgtttttagaatcagcctgactgtatattgaggtctcttttcgcttattgcaatagtcctgaataaaatctggttttactactttatcgtctagctctggtttttctttgccataggtattccctacctgtagccttgccatagctctatcatcgttgctttttaattccctccaagagatgatatctacatatactccctctctatcctcagatcaatgttttgcatttcctaggagctgaattccttttcttccattgcagcactggctgggagagaaggcacaacatggtccagcatactgagccccaagtttgtcctgcagcatgatttgagacacagtgttcgtgccacacagaattctgtgagccgtccaatagcctttcatacatttgttttctgcttaaactacagagtagatgctcttgtcagcacctaagaacactctctattacacagaactacaccctaatgacattttatctgtttacgtgtcctctcagaaaagctgtgagccccttgaaggcaggaactttatttgtttttaaacattcagggcctagtagatagcaggctttcaacaaatatttttgaataacaacaaacaagagtatggactttgggaacaggagagcctagtagccagcaagcctgagccaatccttgatggcctccaattctgagaagactctctgggcccccttaggctccctgtggaagaaagcttccccagtcaatcctaataaaaatacttctgagacagatctaacaggacaaagtggagtctctccactctttcagtagctccttcaccccaggtgctgtttggggttctgacactgccatggcatggccagcaggatggcccctagggctcctggggctgctctataagagcttcccacccctgacctgcagtccatgagggcaaggccagatccgggcacacgcccatccgtgttgttctcatgctctcagggggtagagctagtgtgttggacttggcatgtttagggtcacctccctgagggttgacaacctgagcaaaatcagcattcccttggcaaggaataaagggggaatggatttgtggtcagcaacccacatcgttggtcagcaacccaccgccaagcattctgcctgcaacagggtggggctggccaggggaggctcctcagggaaggtgaaagctgtgcagagttttgcaggatgactcagtgcttatcaggtagacagataaggaagaacattccagggagagggaggaatgctaacaacagcaggggatctggtctgtactagacatgccaaaggaatggtgtgtccatatcaacagaggagggagagacagaagagaaagagcttgtcagggcctgagtcagagcgggctcatgctgtggggctaagaagctcaaacgatttccagagacagtggggaagctttacagggacaggcaggggaggatcttaacccggctttcgtaagcctctggcttgagtatggaaggtgagtctgggacagggagcccagcgccgaagtgttgcaacagtatagggagacatacagaccaattccctcccacctaacagctctgtgctttggggt

SEQ ID NO: 4996 - DNA, 2300 bp, Homo sapien
acaactgcccttcaaatccaagaatggtagatccaccgacaacttgcaccttgtgcctggaaaagccacaggcactcaaaggcagcccaagaaagcagctgggagggggtctgtaccctgtaaagtcacagggccagagctgcccaaggccgtgggagtccacatcttgcaccagcatgacctgggtgtgagacatggagtcaaaggaggtcattttggaactttaaggtttaatgactgccctattgggtttcaaacttgcatggggcctgtagtccctttgttttggtcaatttctcccatttggaatgggtgtatttacacaatgcctgtacttgcattatatctaggaaataactttcttttgattttacaggttcatgggtggaaaggacttgccttgtctcagatgagactttgaacttggacttttgggttaatgatggaattagttaagacgttggcagactgttcgaaaggcatgattgtgttttgaaatatgaggacatgagatttgagaaggaccaggggtggaataatatggcctgcctctgtttccccacccaaatctcatcttgaattatagtccttattgtaatgcccatatgtagggggagggacttactgggaggtgattgaatcatggcggtggttgccctgtgctgttctcatgatagtgagtgagttctcaggcaatctaatgggtttgtgaggggcttttacccccttcactctgcacttctctcattcttctccttccagccaccctgtgaagaaggacctgttttgcttccacttccaccatgattgtaagtttcccgaggcctctgcatccatgctgaactgtgagtcaattaaacctctttcctttataaattacccagtctcaggcaattctttatagcagtgtgagaatggattaatacagtctaaaatagatctttctttatataacttaaaaattacaagtgatgaaaagcatttgagttggttggttgtcagttttttccccctcttttggagctgtatttagtataatagaatatcttaaattagtggtcttttataataaatgaaattgggtgtacttcgccccagcatattagggttcccttgcttcatgccttccatgacagttggtattattatattttaacatttatgcctaatgattaaacatctccttgtggtcttaatttgcattttctaattactctagagacttcgtcctttcacatgattttggtcgttagtggttcctctttgaagtgcctattcatgtctgtgtccattcgttgctttgggtgttcctctctttcacactaattcattaaaagtatatatcctggatactaatcctttatcaattgctgcaagtatcttctttcagtgtgtggcttgctttttcactccgtttgttgttttttaatcaaagtataagttcttaattttaacgcactttaactgtcattttccaccatggcccgagtcgcggagtccgccttcctggcagagcgttgcgtggtcacagctgaggtctggggagcagaggcggcgggcgctcccggggggagctgggcgattccggcggggggaggtgccgatcgagcggccgccaggctgctgggggaaggagggccaggaggccgtgggggtcctcggcgcagactggagccgcaggcaccgcgcgcagccctcgcccgcatcgccgaggccccgcgggcccaggagcgagaggtcgggcgcccaggaccagagggcgtaggcgagagcaggcaccgcctccaaagaacgccctcgccctcccgcaggcgatggcgcccggccctgaccaagccagctgggggcatctccgcggagctgagccggggaagggccgggcagcccagagggtcagaagggggttttctcccggggttgtgagttctttggccagcggcaccctcccctgccggggccgcccacccgcaagccccgccccgaaggctggagcttccctgggggtgggcgacgccgagaccacgccccgaaggcgggagcggcttgggggcgggatctggccgccctcagggctccggcgccaagttcagagccacgcgcagtgctcttggccgggaggaggctgtgctgcaccagcacctcttgctccacatctccagagagcccaggtgaggcgcaccctcctgtctgcagggacagagccgcgagcgggcgcgggcggcggggtccatctcacttccacatcagcctttccccaggacagggttgttgagtcctgcctttgactgtggggtcctttc

SEQ ID NO: 4997 - DNA, 2300 bp, Homo sapien
tctcctcatgagctaaggaggctggctgccatcttcctacatccccccacggcctgggggcaaggacaccctggccccctggagtctggagaactctgaggacagaacttgctcttccacctgcttgggccttacccacaggagaagcactgcttctctacccatgccccatccaactcaggcaccccagggacttgcaacagtctgattttttctcacgtccttcttaaggctctgggctagccacacaaatcaaatcccagtgataggtccagacaatcctatcctgaaactacatcttagtaagactccagggaatcctttccccaaagacagtcttactcctgttctcccccaagccctttctgggccagaagctttgcctggactcaagcaatggcagacaagtgccctctgaggacacggaagtgcatgctcagaactgtgattctccaagtggaggcagaggagaaggcccaggcttcccagcagggctaaggatatgcaaggagtgcattcatccggaggtgttggcagcatcccagccccaccccattctcatcgtaaatcaggctcacttccattggctgcatacggtggagtgatgtgaccatatgtcacttgagcattacacaaatcctaatgagctaaaaatatgtttgttttagctaattgacctctttggccttcataaagcagttggtaaacatcctcagataatgatttccaaagagcagattgtgggtctcagctgtgtagagaaagcccacgtccctgagaccaccttctccagctgcctactgaggcacacaggggcgcctgcctgctgcccgctcagccaaggcggtgttgctggagccagcttgggacagctctcccaacgctctgccctggccttgcgaccactctctgggccgtagttgtctgtctgttaagtgaggaaagtgcccatctccagaggcattcagcggcaaagcagggcttccaggttccgaccccatagcaggacttcttggatttctacagccagtcagttgcaagcagcacccacattatttctataagaagtggcaggagctgggatctgaagagttcagcagtctacctttccctgtttcttgtgctttatgcagtcaggaggaatgatctggattccatgtgaagcctgggaccacggagacccaagacttcctgcttgattctccctgcgaactgcaggctgtgggctgagccttcaagaagcaggagtcccctctagccattaactctcagagctaacctcatttgaatgggaacactagtcctgtgatgtctggaaggtgggcgcctctacactccacaccctacatggtggtccagacacatcattcccagcattagaaagctgtagggggacccgttctgttccctggaggcattaaagggacatagaaataaatctcaagctctgaggctgatgccagcctcagactcagcctctgcactgtatgggccaattgtagccccaaggacttcttcttgctgcaccccctatctgtccacacctaaaacgatgggcttctattagttacagaactctctggcctgttttgttttgctttgctttgttttgttttgtttttttgtttttttgttttttagctatgaaacagaggtaatatctaatacagataacttaccagtaatgagtgcttcctacttactgggtactgggaagaagtgctttacacatattttctcatttaatctacacaataagtaattaagacatttccctgaggccacgggagagacagtggcagaacagttctccaaggaggacttgcaagttaataactggactttgcaaggctctggtggaaactgtcagcttgtaaaggatggagcacagtgtctggcatgtagcaggaactaaaataatggcagtgattaatgttatgatatgcagacacaacacagcaagataagatgcaatgtaccttctgggtcaaaccaccctggccactcctccccgatacccagggttgatgtgcttgaattagacaggattaaaggcttactggagctggaagccttgccccaactcaggagtttagccccagaccttctgtccaccagctgagaaggacaagggcggaaggcagctgcacagagcagggccacggccttgcacacagtccagggagcttttgtgcaggagccaggcctccccctgggtccccatgatgagagaatgggttctgctcatgtccgtgctgctctgtggcctggctggccccacacacctgttccagccaagc

SEQ ID NO: 4998 - DNA, 2300 bp, Homo sapien
tctgtgtggccagcacccacaggcagctgtgatgaccctggatacagtcaggtccatagtccttcatctgagacctccaagtaaagaaccatctgagaacctagagtttcttttaattccttttctgggaaaacttgacctgaatggacatttgtgtctttatttgtttcactgcagaaatattcatgtgtgtcattataaggtgttgtctctgacccctttgggaatgttattgcatatacacaatacaaaatcccccaaatctgaaactgtcggagtctcaacacaatcctggccacaatggtttcagatataggattgtggagttggatgtgtctcaaaatgctaaccatgggcatcactggatgattaaattgtaggttatttattttctctttaatgttttccatttcccaagttttctatactatagactactgttataacaggggaaaaaaatgtcacatttaaaaaataacgtcaggtagcagccccttgctcctccctgagcacatccaggccactaggctatccctctgctcagcctctcgtgtgtgaaaagctcctggccagaccatgttgcaggcatctgccctgtcctcactcctcccggaccacacctcactccgcatttgcagctccatttcttgggcatggcacccatttattcatcttttctctgccccatggaattcttgcactgagctggatcaaagcccagcacacttccagtcctcttcccaagcagcatttctgaagcagcacgcttcccgtcttcccctggcccatgtcatcaaaggacagagatagcaagttctattcaggcccagccattcaggggctcctgatttcacccatccccctctgcaatctctgaccgcagcatgctgtggcccctcctgcacccccctaaacctgctcagctctctgcagcctctcccggacagcctcaccagcatagaataccttccccagagtaaaccaccaggcacagcataccccagagtgtttctaaccatgatccttctttgctttgctcaaagccacacgtgatggaaatggacagagtctaagtgtggacatactgctcttaacgcagtccctggggccctttcctgggccacagcttatcagcctccaaaggccaggggatcatcttcttggcatgtaccactctcagaacaacccacctactcccctgtctaccagattgcgtggttctccctgctgatgagtgtgggccaggtggctgccaggttggtgtgagctaagaccaccccacaacagaccagtgacacagctgggatgcagggatgtggggagctccccacaggctgcagtgtgttgtggagctccgacagagcaggctgggggaacccagggcttcctcccccagctccagctcaatcaggcctgggctggagagggggcatccagaatgcagccaccaagccagcctggggcacagcatcctcttaacccctataactatcttctgaatgggaggctccaagagctgcagtgacttgttccaggtgacatttgcagggaatcggtgagggagttgagatcccagcctgtgtctagtttgactcatcaccgcactaaattgcacgggagccatattcactcgtgatctctaatgctcagcagtgcatcccaccaacagagcagggaggcttgctggcaggttccgattctgcaaggagcaggcctcttctgagccctgatgtggtccccacactctccccatctccccagcccccacggttcactgtgatcttgtgctgtcctttctatatttggaggactacttggtcttgtttcctggattcttcactcctgtggcccaggagatggagcatatgtcaccctgcctggagattcttctgaagagccctggcaaggaaatgagaaagtatcctaattagggggcaataaccccctggagaagcacagattctttacagtaggccgtgtccttcccgcatgccctgtgtgtttgtcagatgtttatagagccttcattaacggaaggctccctcagataagacgtcggagcgcggcatcgaggaccagataagcacaagtggaggacaatccagcccggcagcgggtgagagtgggtgctggccaggacggttccttcagagcaaacagcagggagatgccggcccgctccttcccagctcctccccgtgcccgctaacacagcacggccgcctgcagtctcctctctgggtgattgcgcgggcctaagatgtgtcctggggcactgtgggtggccctgcccctgctgt

SEQ ID NO: 4999 - DNA, 2300 bp, Homo sapien
gtgttcaaggctttacagtcccgctgttcagcaataaaatgaggcaagaaatattagccatccctggctgatgccttaattctttcccaacaatgtcagagaatctgtaccctacaggttttagtgctggctaaagcctgaccctcaggctggcttgaatggagcgggaatgagttaaggagagccagaaggctttaatggacacggattccaaatagcccagcttgtgcgggcctcctgcggactcaccctccttttcaacaggcctcgattgtgtatggccccaacagacacaaaactacccatgagcagaggttacccccagccggtgcaggtcagaggcattctgggggggaaggggagagggggacagaggggaagtgaggggcacatggagaaggagggaaatgggggtgggagtgggggaagggaccactgaaagatggtctggatcatttataaggagagattcactaagtcccaggctgagacccgatcatctcacttccaggcaaaccatttttgaaaactggttcagaacaaatgggagctatcctaatgggaagttgaacacactgtgatctaattttcaaaacaaataaaatgcttttctctggttttccaaaagctacaagtctgaggttcagaagctcttaataggatggcctctaatttgacactgcaagattttaaaaaattacaaatgggtcatgttttacacaccaacagaagccttttccagcaatttttcaattattgcattgtgagccctccaagaaaagtaactattttggctcacagagcccaaagttaccaagtaaagggaacagcctgttcacaagtttgcaaatagtcctttgaaatgtagcatagactgtatctgggagctttctggaagaacatgggcttgacgtggtcctttccttccctctcaagggtccttaaactttttaggtgggtcttgggcccccttctaagtctagggaagccagtggaccccttcttaaaagaatgtttttaaatgcataaaataaaatatgcagagttacaaaggaagacaattacgttagaatagagttatcacaaatatttaaaaacaattttgtaacatagtaactatgttcctttttgctaactaactagcagtaggcctaactgaagtggtaatgagcaaacatgatactttgatgaatccgcaaccactctcatgtgatatgaaaatatctgtggatggtgcctattggtgacaaagtcactaataccactgtggttggttgcttgcatttataacattagttaatgctaagtttcagttagagttaatgaaaataaagatgtatttttttccccatcaagttcataagagcccttgaattctatcaatggagaagaaatcctgctagaggcaagacaaagatcaggaccttctgccccagggttaagctgaggggcagtgggccagggactcactacaccctcacttcactgggaatccttcttaggaaagccactgctttctctcttcctgctctgatgctttggaaatgtttttaaaggcaaattgaaagcatgtcttattcctgcaatcctgaaggccacatgtccaaagattaataaggacctttgatgtgtttcttcaacaactgaaattactctcgtcaaataaagggctggttaatgagctaattctgagttttaatcacgatcttgttccagttcccttgggtggcatgagctttggggtgagggcttttctttacggagtcagcccagagaggatctctgttccccacactctcacattttggacatacgctgactccgaggcaactgggcgcacacatatcccctctctggtcctcacaggggagctgtcatcttgcaatcacatagccatcgcatgccattgcaggggcaacccagcaggcaggcccccctccaactgccgcccagcccccctcgcagccagggcaggctgcggcgccgacacacaggagccggctgcggggctgggtctcgggctctcggctggggagcggggagcgcgctcgcccacgccccccacactcgcgggcgcacaccccggcgcgcgcacgctgccacacacgggcgcacgcacacggcagccgggccagggacgaccctgtcagctgcagccccagaggtccggggcgcgcagccgggtcccctcgagggcgcagccggccgccccgccccgcccctcgaagcagccgggccgggcgcgcagtgggctacaaactttcgcggcgcgagtccgccaaggcagcgcgccgactcgg

SEQ ID NO: 5000 - DNA, 2300 bp, Homo sapien
accctagtatttgaattagtaagagtgtctccagttatcaaggagtgtcttgaaattacttgataaaattcgaaacaaaatttattttgtctttaattaaaattgtactattttgtatcttttcaataacatagttggtaggcagaagcttaggtgtcattcttagaggttcttagttaattctgaggtccttaagatctcatgtctgcttccagggaaggctccttactgaaatctgttacctcactgccagtcacaagaacactgccatccttttgtttttgtttttaattgagacagagtcttgctctgttgcataggctggagtacagtggcacaatcatagcttattgcagcctccatcttgcgggctcaagtgatcctcctgccttagccgcccaagtagctgggactacaggtgagtgccaccacacctggctatctttttcttttttttaatttttggtagagatgaggtctcactgggttgctcaggctgccctcgaactcttgagctcaagtgatcttcccacctcggcctcccaaagtgctgggattacgggtgtgagccactgtgcctagccctcctcctatttaaaaaagatattcttccccttgtcaaagcagagttttttaaaaattataaatgtgactcacaaatttgaaatgaaaccaggttaaacattttactcaatgtattaattagtgaagaaaccaggaagatggcaaaggtagttcaaagaacagtttgaggatctaggtttttcactggcgttttgaaccaatgttagagtaagaatgctagattagattaagaaaacctggttaatgccagacagaaataaattataatctttagtgttaccttatcagacagaaattatttgtatcactgctggacaaaaatctataggttacgttgtaattgcattaagtctaggacttttaatcagtagtaaacaatgaactgaataaagtacaatttccccacataagtaatctttgggatggcctgtcattattttatgacattgaagtgacattccacttatcttttgccttactttcacattttaatttagtttaattttattttttctgccacagggtctggctctgttgcccaggctagactgcagtggcatgatcttggctcactgtatcctcctcccaggctcaagccattctcctacctcagcttttcaagtagctgggaccacaggtgtgtgccaccacacccgtctaatttttgtagagacaggatttcacccaattgccccagctggtctcaaactcctgagctcaagcgatcctcctgccttggcctcccaaagtgctaggattgtaggcatgagccactacacctagtcttaaataattttttaacacctatatctcaaagtttttaaaataaatctgtttcacacattaactttagattcagattatagtaataccattttatttgcaggtagtaaatggaaaggtctccagataaaagtattcttggttttaaccaatgggagcaatgtaacatggccttacaggccctttatggcaagaattagaaaagaaaaaagatttattctgtgtgagaactttttatagattgaatgaacaagaactccttgaagacggtctctgtaattaattcttatttattcagtactgaattctcagcacctaatttagcttaggtgtggcgtttaaataactgagtttccattgagtgacattgattgaatttgtgtgtgtgtgtgtgtgtgtgtgtgtgtgtttatataaagagatacgtcattggagtggaggggccattcacatatttatttgtggaatgcaaggtatagcatatttaagctctggtatttgaataaataagcgtatctccagttctcaaggaatatcctgaaattatttgataaaatttcaaatgaaatttattttgtctttaattaaaattgcagttttaaatattttgaattgatgagtaataatatgtcaaagctgtgatagctccagttgtgtaacagaaaaatctttggctttgtgtgttttaccaggtgaacaaaaattgtttgctggcccccaggatactaactagacctttggcctgactcacaggacactaaggctccttttctgaagaagccttttaccagtctcatttaggggatgggaacaacatgtcttcacctagggactttagagcagagcctggtaggtgcatcatctacttttgtgggtatgggatcaggaggagctacaggagtgcctctcagactgtagatttgcatagggac

SEQ ID NO: 5001 - DNA, 2300 bp, Homo sapien
gcgtggtgatgaatgcttctgttttttgtctcattaaacacttgcaactgtgtctccttttttaaaaaaaggaaaactgagacacaagttgggaagtaacctgccaaaggtcaccaactattcagtagcaaagcagggacttaaggccaggcttgcaaagctcctagtgctactggtaattggtaagactcaagggtttaaagaggcctccaaagaagggtagtaaactgtgatgggccctaaactttatagttcttcgaatttttcacaggtaaaaggacagaaagccaagaagagccttctgggtcactggcttctgggaatattgtgtggtcaagcaggaagtctgggggagatggaatgacacctcagggtccactcttaccaactgttcatttagcctccatgcaaggatttcctggtgatgtgaatgggggttattccctctgtgtgtcttggagcagccatgctgctcatgtttgtgaaatgatgaccagtgcagaatcttgatgttaggcactatgaagaaacattagacatggggtccatctttaaaggggaatcttaccctggtgatatagtttggatatttgtcccatctaaatctaatgttgggctgggtgcgttggctcatgcctgtaatcccagcactttgggaggctgaggcgggcggatcacctgaggtcaggtgttcaagaccagcctggccaacacagtgaaacctcgtctctactaaaaatacaaaaattagccaggcatggtggcatgctcctgtagtcccagctactggggaggctgaggcaggagaatcacttgaactggggaggtggagattacagtgagctgagatcacgccactgcactccagcctgggcgacagagcgagactccatctcaaaataaataaataaataaataaaatctagtgttgaaatttgatccccaatgttggaggtggggcctggtgggaagtgtctgggtcatgtgggtagatcctttatgaatgacttggtgctagtctcatggaactgagtgagttcttagtctttgttttcatgagaactggtcatggaaaagagcctggcacctcccacctctctctcttcctctgtcttgcacacattggctctcctttgtcttctgccatgagtggaagcttcctgaggccctcatcaaaagcgggtggtggtgccatgtttcttttacagcctgtgaaactgtgaaactaacaaacctcttttctttataaattacccagcctcaggtattgctttatagcaacacaaacaaactaagacatatggcaatggcgtgggttgcttgcagggtaccttggctgctacagaaagaaaaagtctctgtagagactcactgtcagtgactcacggagcagaaggctggcctcagagcctggacagagggtagctgtcactgcttaactgcagttcagctcaagcatatggctctctgtgggaccagcactgaaggctgggggataagtgaggcaggtcttgtcacaccttcagggtatctggattcaccaaagtggctcaggtcaggaccaatgaatagaggtttgttcgtcaagataaaaagattctggcttcctgttttcaggcaatgccaacgattgaattccctctacattgaccacccttgctgaagttgtcttaattgacctagcagccaactgacctcatattctggcacaggctctgactccttttgcctatctgccctgctctgatactacaaagagacccccccaccccagccctctggggcctcattaggggcttagagggcaggcgtgggtcaggcgagcattcctggagaacacagtcctcagtggttcaggatatgagcatagctcagagagctgttgacattatcagcctggcctgggagagggggacccgcacagggtggtgcacagggcccgcagggaatttacagcggcgtccgcggcgatgggctctcagtgccttggaagaccggtagaggcaggttctgtctctcccggcctggcaagcagagggccgcggcgcagggcagagtgccgcggcgcagggcaaagctccagtgcgcaggctcgcgggcgcaggtgggattggatagcgacgaaggccggcaggctaggcgtggacccaactggcgaggctgctggggttgcagcgggacagttggggcggccccgcaggcccaggtgaggaaaggtggctgggggccaggtgggcagggggcgtgcgggaggccgctgcgccgggctgtgggagggcgggcgtgaagaaggaagatgc

SEQ ID NO: 5002 - DNA, 2300 bp, Homo sapien
gcaggagaatggcgtgaacctgggaggtggagtttgcagtgagccgagatcacaacactgcactccagcctgggcgacagagtgagactccgtctcaaaaaaaaaaaaaaaaaaaaagtgatccattaccttcagaccctggaatgggtctggatttcaggaatgtcattgttggatttaactgttgatgggaaatagaatggcatctcccaccaaagtaaggacactctatggctgatgaaaattttcagaggaaattcaagagatatgtgaatggagggcattctttgctttcccctgtgataatgctatgtacctagagcaaggatatgtgttttcttggaccctaagcctgcaatgaatttgtcatcagtagatgattttaagggaccaagtaagaaaccaagcaataaggctcatgaatccacatggagtgaacaggctgataccaaatatggtccatttattcttggcttggggtaacagccttatcagacaccaaacatagctatttttcatctgaaaaactgactaaattttgggttattcacaaatatatatttgctgagaagagtttgatgatttcctttggctggcaaaaacttggattttctttgcagatatttaatttcaaaaataattcttgaaatgtctcactcaaatccaaatggccattaaacacatgaaaaacactcaaacccgtgaaaagccacaggaatacaaattaaattaaaataaaattttaaactttatgtctaccagcttggccaaatacagctggtggaacgtagaaaaatggtactgtcatacaaagctggtagaaatgtgaataagtatatccatattcacatagggatgcaatctggcaacatctattataatgaaaaatgcacatatcctttggcccatcaaagcacacaagacgtgccaggcacaagccttcaggcccacagccatatccacctacgctggtcactacctatatagagatagtggtgcatcccacgtgagcagttgctgagcacccgccttgtaccagtgcttgggctggggacatgcccagatctctcacatagttgctattgttaagcttatgaacacctaatcttattgctcagtggagaatacaatctaaacaaacaggtgaatacagaagacagtgccagtcggaggtaaggtcatgggatagagtggtgggcaggtggggattcccttagctggggaggttggggaggcttcctggaggaggaaagatgggtggtgagctttttgttgtgtttttcagggtggcattaacaccagtgtgccatatggtggtatctatgtgaaatccattgttcctggaggaccagctgccaaggaagggcagatcctacagggtgagagatggggatgggtcctcattgggaactctgtgctccatggtgtaaagagccctgcactgggaggggcagcctctaggccttgccctgctcccattctgaaaactcatgcaaatgattgcctccccaggtcatacttttctcacctggaaaggaggtgatagaatctgccctgcccatttgataggttggggggtctgcagtggcacactgggaagcataggtgatagaaaaatagtagaagacttaaaagacttgtgttgctctttggcctccatgggaaaacatactgcttcccttggaggacaagtgggcctcggtaaactcactcgcacatccggggaggacacctgagccttctgtttgcccttgctcagctcccacttctctgatggaagggggtgatttttattggtctccaaaactgccagaattgagccaaaaggggaacctaggatcttacttatctccatttcccctagaattctggtgtccccagcgtcaaccatgcctccctgacctttttttgaaataaaaaaaatacatcctggagatataaatatctaagtgacttgaaaatactttcaaaaacggtttcacaggaaaacaggaggaaggataaggttgaacagagctggctcaaccattctgtgagccaataatagaaaggcttttatatccctgatctgtgatgtgcctgagaagaagggagtgagactgctcagagaggcaggattcctgctgactccagggggacacctggcacctcagcttcctttcccacttctccaggctgcatggaggggtgccgggcaggggcctcctggaagggaacctcctgcagcctcaagcaccaggtcatgacatgacatctatccctttcccaggtgaccgactcctgcaggtggatggagtgat

SEQ ID NO: 5003 - DNA, 2300 bp, Homo sapien
tgctgcctgctcctgagagcagtatgagccaagaggtgacatcttccttcatcccatctttatttttgtttgtttgtttatggcagggtgctggttcttcttgtcctccatcacctccagaaatcagtgctggtgaaatctactttgtggaactggttaaagaagatgggacacttggattcagcgtaactgtaagagtttttaggagagcttgaaaagcagttaacaagatgtccgtctagaacctggtggccattccacccagatggcaacctctgacagtgtgcttagtttgcacaaatgtaaggggtaaataaaaaagcaaatgggggcctgcactgggggatgagttcagagacaaacagaggtactggggaacctcaggatgagcagggcatgcactaggggactccaaactcatgaggaggcagtgtgggcagagttggctgatgtgtcctgactctgaggtcaagctggactgcagagagagagaagcacattggggcttcagggacacaagctaaaggtaagaagggcagtccactgtcatctggccaaggatgggtggggcagtccactgtcatccagcatagaatcagtgtggagcctctggctcagacatcccagggccaggcctccatcaggactgacactttccatttggtttctgagctctgcctggtagacccttgtgaaaggagattacccatataactgtgtttactcaaggggttggggaatggcacacacaaaactggtgaaaatccagaggtcagaggttggaaggtgctgcttttattactgagtattgaaagtgatccattacaggctgggctcggtggctcatgactgtaatcccagaactttgggaggccgaggcgggtggatcgcaaggtcaggagattgagactatcctggctaacatggtgaaaccccatctctactaaaaaataaaaaaaaaaaattagctggatgtgatagcgggcacctgtagtcccagctactcgggaggctgaggcaggagaatggcgtgaacctgggaggtggagtttgcagtgagccgagatcacaacactgcactccagcctgggcgacagagtgagactccgtctcaaaaaaaaaaaaaaaaaaaaagtgatccattaccttcagaccctggaatgggtctggatttcaggaatgtcattgttggatttaactgttgatgggaaatagaatggcatctcccaccaaagtaaggacactctatggctgatgaaaattttcagaggaaattcaagagatatgtgaatggagggcattctttgctttcccctgtgataatgctatgtacctagagcaaggatatgtgttttcttggaccctaagcctgcaatgaatttgtcatcagtagatgattttaagggaccaagtaagaaaccaagcaataaggctcatgaatccacatggagtgaacaggctgataccaaatatggtccatttattcttggcttggggtaacagccttatcagacaccaaacatagctatttttcatctgaaaaactgactaaattttgggttattcacaaatatatatttgctgagaagagtttgatgatttcctttggctggcaaaaacttggattttctttgcagatatttaatttcaaaaataattcttgaaatgtctcactcaaatccaaatggccattaaacacatgaaaaacactcaaacccgtgaaaagccacaggaatacaaattaaattaaaataaaattttaaactttatgtctaccagcttggccaaatacagctggtggaacgtagaaaaatggtactgtcatacaaagctggtagaaatgtgaataagtatatccatattcacatagggatgcaatctggcaacatctattataatgaaaaatgcacatatcctttggcccatcaaagcacacaagacgtgccaggcacaagccttcaggcccacagccatatccacctacgctggtcactacctatatagagatagtggtgcatcccacgtgagcagttgctgagcacccgccttgtaccagtgcttgggctggggacatgcccagatctctcacatagttgctattgttaagcttatgaacacctaatcttattgctcagtggagaatacaatctaaacaaacaggtgaatacagaagacagtgccagtcggaggtaaggtcatgggatagagtggtgggcaggtggggattcccttagctggggaggttggggaggcttcctggaggaggaaagatgggtggtgagctttttgttgtgtttttc

SEQ ID NO: 5004 - DNA, 2300 bp, Homo sapien
cagatgaagaaaagaatagcacagccaattctggggtctcctctacagacatcctgagcttcgggtaccagggaagtttgttgtcacacacacaagaccaggacagaaatactgaagaactagacatggctggggtgcagagcttagtgcccaggctgagacatcagctttcctttctgccgttaaaggtaatcatcccttggtttactttctagatctggatgaaagagaacagactgtgaagcccaacagcctggcccctaggcccttcctgttctctgttttccatgtcaggtggatggaagttacttagcccgtttgagccacagcttcctcatttgcatacagaagcaaatgcctgcatggcatggttgttgagaaaaacgcatagaagaaggcagagttctaggacagtgtctgggcacaggctcagtgtgggtgcctctggagtctttagtcactaattataattgttgtgataatagcaccatgaggaaattgattgctgccaatggcaaggcgtgggcaatcaggcacctcctattcttgtccttgaattggtcctcaagctgggaactcagtggctttgctcttgaccataccccatggaggaagaagatgggatctggagtaggtgtatggagggctgtgtgcttcagtcccagctctgctgtcctctgccgtctctttggactcccagtggtgttgtcttctcaggccccgccagacccatgccccagcctctccattctgctctgggccctgcacagctggtgctcatggactgagtcaccttgctgtgttctgcttggttctgcccagtcaaagcctcagcaggagcccgcagttgtgggatgagtgaggacagggtggcagtgctggagtctcagttgcacacccttcattccactctctccctgtgctgacacaggttgcctgtgcccctctacaaagagcacagctcctatgagggtccatcgaccactcccttctctcgcccttcaggctcaggggtggtcacagcacccagtgtttctagccccaggtgctgaactgatattactggtttctccaaaggctggcaagacctttgaaaacaggtctcccatgacctatcctcccttactcaggctgagtgtatgcccttctcattcttgctgggacaacttgctggttgaaacaggcaggttattgcacctctttcaaccttgtttctctttttatgatggagataatgatgtctgtccacagccgtggaaactaaggtactatgcccagtgtcggggataaaacccgtatctttcttctactcatcttagcttcatcagctgggacccctgtaactaaagacagattaatgagagaaaagcatccacgtgtatttactataagttttatgtgacatgtgagccttcttacggaaatgacctgaagaaacagttctccctgagtatatttgatgaagaatggagagtcatggagaaatgagataagacaaaaagcaggagtatgtaaggtgggaggaactcagcagggcctgcttgttcagattcctctctcagtccctgtgtcttcccacataagatgctccatttttccagatatagggagggcattctcacttgagggtcttgtgccctgcttcgggggaagattagaaaatccttcctaggttttagggcctgcttcagaagagaagggcaggggaaggtcagagaaaccttccctcatgtgctgtttctccaattcctccaatgtgccaaggtgccctattttggggtagtgtgtcttgacctctgtcacaaggatctggcatgcaatagggctccatgaatgacagtgccttcctaattggccatggtgctcacctggacagaacatcccatgaggaactggatgcaggaggccagtggaagaacaacgatagtagctgccattaattgagtgcttacctgtgtgccaggcagtgtcctgagcactttatatgtattagctcatggaagctccatggtaacccaatgagatcattcctattatcaaccccttttatgggtggggtacctgagacagaaagagcaaaggagcacacccaagctctctcagggagcaggggacagagctgggattcagattggcctccagagcagaaaccttcaccccaggccttcctctggtaggtcctctctggcaggaagcagagcagagaggccttcatgctggggcttctttggtggcaaacctgagagttggtttcctggggctgggggccgttgaggggagcaagggagctctaaggccac

SEQ ID NO: 5005 - DNA, 2300 bp, Homo sapien
ttgtatttctatacatctacaagacacaatctgaaaatgaaattagagaaacaatttcactgggcaacaagagcaaaacttcgtctcaaaataataataataataataataataataatctacaatgtcatttcccatccaagcttgacttctacctttactttctgatatggttttgccatgtccccacccaaatctcatcatgaattataatccccataatcctgatgtgtcgagggaggggcctagggggaggtgattggatcatgggggcagttatcctcatgctgttcttgtgatattcagtaagtcctcatgagatcttatagggttttgttttgttttttgggatggagtcttgctctgttgtccaggcaggagtgccatggcatgatcttggctcactgcagtctctgcctcttgagttccattgattctcctgcctcagcctcctgagtagctgggattacaggcatgcaccaccacacccagctaatttttgtatttttagtagagacaggatttcactacattagctaggctggtctcaaactcctgacctcagttgatccacctgccttggcctcccaaagtactagggttacaagtgtgagccaccgtgcccagctgagatctgatggttttatacatgtttgacagttgctccttcacatgttcccactctctgtgcggccaccatgtaagtcggacctgcccttctgccatgattgtaagtttcctgaaggacttccccctctgccatgattgttaagtttcctgaggcctccccagccatgtgaaactgagtcaattaaacctctttcctttaaaaattacccaacctcaggtgtttctttatatcagtgtgaaaacagactgctatactttctgatactcatgcttaagcaattggggaattcagactacctgggatcaaactatggccccacccttagcagtcatgtgaccttggggaggttacttaccttctccatctcaacaacttctgtaaaatctgtaacatgagattgtttctgagggttaaatgagcatagcacagtggggacactgtcaggcacacactacttgccagatgtcgagtattcatctttattgaaataggactgtggtaagccactttatggctctcgattttgtatgagaaaatcatgcttagtgccttgttagtaaaagaaagaaaacctgaaagtccctgccatggaaggaagaaatagcggggagaaaagggagttggtaagtttcagcatttcagagcttggaggtgccagttaggtttctattttatggagaaggaggtggaggcaggatgggtcctaaggtgtcattcaaaacacacagccataactctttattgagagtagagctagggccccagggattgctgtggtcaagttgcggacaaaaatgaccactcgttggaagacaggagaggagtgtttagttacaaaagcagtcaacaattcaggtgtatctatattcagacagcaaataaaagttgttcaacttggttgctaatgggacccactctactgaggctttgtatagaactcatagaggaagctggcttcaaggaatgaactaccctgtgcttttcttaggactaaaatctcaggaagctggtgatgaatgaaaaccttagtcccactggcactgcacgaggggccaggagagcagcagcatcataagccacagggtggggcagccaaggcaggggcattctgagctgttggggaggggtggcaggcagggtggggcactgtgaggtgtcggggagggcattgtgaagtggggggtggggcattgtgtgccacatgcctgggctcccacctggggccagtgggcttcagtctgtaggtgactacagaaggagaaggagctccgtctgttctctcttcaggcagttgttgtgtctctcagcgcttgttgggttcacaacctattaaataagccggctggtcttcaccctcccagacaagtcaactcaggggaggcagcagggtgcgggccttggcccgcaaccctagccggggccggggccggggccggggccagggctggtgcccggggccgcgctgtgaggtgggcaggcgaggagcgggaagaccatctctgcaagtgcagcatagcctcggcctaggacagcgggagtgcgtggccaaagctgtgagcagaggcacaggtggtggcagacagtagaggcgccccatggggaacatactgacctgtcgtgtgcaccctagcgtcagcctcgagtttgaccagcagcaggggtcggtgtg

SEQ ID NO: 5006 - DNA, 2300 bp, Homo sapien
ctgaaatctcttattattgcagtaatatagttggattgaggcttttctttatctttggcgcatccatattttattttcctttttttgagacagagtcttgctctgtggcacaggctggaatgcagtggtgtgattacagctcactgcagccttaacctcccaggctcaagcaatccttctaccttagcctcctgtgagtagtgtatgccaccatgcctggctaatttttcttttttttcctttttttaaatttttatgtttttgtagagatgggatttccccatgtggcccaggctagtctcaaaactcctgggctcaagggatccacctgccctggtctcccaaggtgccaggactacaggcatgagccactgtgcccagccaatattttcttgatcattttcttattaccttaatttagaaataattatcattgtaaatattctgttgcattatgtttgaggatgtttttagcgatagtgggaatacaggaaattttgatagaggtgaagacattggcctgcagctgaacagcaagatcatggttatcgtggagcctgtctagtcagaattttccctgttttgagcacttttattcatctgggtaggcttttgatattatctaaatttagaacacaggaagaaaaacaggatggaatttattttaccagtttttgcctataaaaatgaacttctggtacactcctgtaaacgtatgtggtgttttactggatgcagttaaaaaatgaaaattaagagttgatggttagagttttttcagggtctttttaaagtaaaattttcatcttttcacttataggtaaaaagcgcagactcaccattattgaatgtgggtgtgacattaacatgatgattgatctggctaaagtagcagatctggtaagtgagcaggggcagcctggggtgctgatggagacttacagcattgtgataggttatttaccccgtgatgaagggaagagagttttgtgattattaaaaggatcatggtcattatcagggatatagtagatgtgattgaattgatgatgataataataatagtaataaatgttgtcatattaataatacaaatggaatgtgcacaatgaaatgtgttccaaaatctaaaagcagatcacaggatggagaaaacctttaatgaacacagctaataagagctcatttacatgcatacatatatatgtacaaatatatcatagtaagtaccatttcttcttggacccttcctggcactgtgctaactgctttctacaaatttagcttacatacacccttgaggtgagtaggtattatctatagtttacataagatgaaatagagcctcccagcagttaagtaacttgtgtgaagatgggacccttgttcctgatggttctagaaccttcatccttaatgataatgctaaagtaagtacatgaattgcctgaagaagtggtcagagtttatcaatagaaaattcaggcagtactcagcgtgtggaaaatgtacatgctcttgcatttatggaaatgataatgttcactatttctgatattctatgaactatcttttacattggcaaaaaaaaaaaaaaaaaaaaaaaaggccaggcacagtggctcatgcctgtaatcccagcactttgggagaccgaagtgggcgaatcacctgaggtcgggagtttgagaccagcctgaccaacatgcagaaaccccgtctctactaaaaatacaaaattagccgggtgaggtggtgcatgcctgtaatcccagttacttaggaggctgaggcaggagaatcgcttcaacccaggagatggaggttgcggtgaggcgagatcacgccattgcactctagcctgggcaacaagagtgaaattctgtctcaaaaaaaaaaaaaattagcaaaaaaataagccatattgattaggaagtgtggggtgacagataccttgtttttttcatttttatttagttttttctagagctacagattttatactttggcctaggaagactcctaaaatataaaggaaaaagtaatacagattttaaagttgtgccattgtaatgtcagaaaactaaataacattcaaattttgaacatgtaatgctactattagtaaaaataagtgtaattaatgtaaagttgtgtaacgattactaaacttgtatacttgaaatgattgaatagttcctagaagtcatttgtttctcttttatttaaaatgtagcaagtttctaattttaaatacatacatattaagagatgcatttacatttttttatttttagtta

SEQ ID NO: 5007 - DNA, 2300 bp, Homo sapien
ttacaactttgtaaaacatatccagagggaaaaagcacacttatcaccatagaaacagtttaaagtttaggaagaatcaaattctataaattcttgtatcttgggcaagaaacaccaaccagtgtgcagatgctggaggcaaggcagcttctatggcaagtcctctcacgttttagtaaaagccacacagcatgcatctccatgtcctttggagctggactagacttgtgaatccaaatgtcacctgtgagaggctcctaactatttaaaaagattcaatggaagaaccatcagactgtagctaaacacacctgtgaaaggatcgagacatccacacagcagactgaactgcaaaagcattggcatttctcttctgggcattttcttcgtctcctagctggagatcctgcagatgccacttctttttctttgcagctttgggtccactgtttttctttctgtgtttcttctggtccttagtctccatagtggctatttaccaataacaagtaactctaacctacaaggaagaaggttggggtaaggaggtgggagaagcattttacaatccaggcaatacccagggaaaaacattaaatttcatttatttctttatgaagacatgatgtatttgttcactgaacaagggtagaaactgcttaaccatccccaatttcatttctctctgttatgctataaattagatgagttacctctgctaaggttacattctatggttaagttactttttactcgtctcaagtgtcaacatcaccagtacctatttctgcaaggatggaaatattctatatctgtacttttcagccatttagccattagccacatgtggttacttaaaatgtacttcagagaaactgaaaaaatgaattcttaattaatttcattctaactgtaaatagtcacatgtggctaccatactggacagctcagacctagacatcgactggactaacgaagtggtttcctaacttaaaccagaacttaaatttcaataaaaaatttaaaacgtttttatgaacttccaataggatcgcagtattacttttagtacctgttgactctaaaacttctaaattacagctcatctacatacaattgaaaaatagcaatatctgtatgtgtgagatatgactggttctagatgatgcctggaggccccatggacttacagagacccttccagtgatttctgaggtacctgggaatctgtggccaataaattggtagtcactgaatctgtgagtttttttggaatatcgggctgcataaaatctgacagcttgattgagaaaaagcggggcagggtgccatttcattcagttaaggtcctgtattcattccgtttaataaacgtttgtgtctgtctatgatgtgctagccactgtgccagaaaatggatatagctatggtctgattgacagaggaaatccaaactagtatcttccgtgccatgcaataagagctacattgcaaggctgcagagggtgctactggagcacagaagtgagtcaaaggcttcccacagacacacacacgagcggaaacaaagtctttatatatcaccatatgtcaaggaacactggccgggagttaggagagctgggcactaggaacgctttgaaactgaatagctgtgtgatttcagaggttatattgcttgtctactatattttactgccgaacttgtactgtttctctcccttttcttcttggtgggaaaagcacaatttggggtcaacagattcggctcaggtctaagtcgcctgccgggaccacgtcgccaggaaacgacgtctccccgacaccttccctcccagtccgggctctctgcagggattcatcccgtcactctcccaacgaccctcgggcacacctcaggcagatgcgaaatatgccgctcctggggagcaaagatgacccggaggaccgggggagtaccttcccacgcgcacgactcgcgatcttcccagcctaccccagcccgcggcacctaacctgttcacaactgcgactccttaggtccgcttggacaccgccggaaacggaaattcaccctcgcgccgactcgccggaggtaaacaaaaaggcagaaaaaaagggaccgccgcctggacgacttgcaggggacagctggaagaaagactcgtcaacggccgagtgctggcgccggcgccgtctgcgcagtgcgttccaccgggtccgcgtccctcccgattcagccccaccccgccctcggaatccgctgcctcagctcctgctgtggcactccccagcagctt

SEQ ID NO: 5008 - DNA, 2300 bp, Homo sapien
cattaaacatccaaatggatatctcatggaggcagctggagttcaggttagaggtctgagtcactgataaaactttgggagttgttggcaaatgatagcgtattggtcagagtccgattaggaaagagaagccacacagtcatttgaacaggaaaagtgtacatagggaattgttaattgcaacagggaagtggagtaaccaggcacagactagtaggaagtataggaggagcagctactagtctagggctcaggtagagaactcaggagagtcctcccctcttagtgccctgcccctgcacctcatcagaggaacccagccatggccctctgcttgtcaggagagtcaccgatgctataccactggaacttactagaaatacttccttaggtgctggggaaaggagcagtgtctcagaagagttactctacaataaaactgcctggagctggtgagaggagtgggacctgctgggcactggccactgtgtccctggtgaagtcaaccgcctgcaggagccaggcgagggagcataggagaaccagtagcaaagacagctttcacctacaaagtctctccattgctctagataggaggtggtggtcagagtgggatactgtgagggttgcagtccttggacctgacaaggtctaaggtctgatcatggagggagggggaagctgaggtagggcagaggacaagaatgggcttcatgagaccaaaaggatgttagaaggattatttacccagatactgacatctccaagaagtaagaggcctagtgtgaagaagttacaacatcctaagctcttcagggataagggaagcatgcgccacgtaggtagcctccctagtgcagcacccagtatatagcctacgcagagtgaatacctgggggctgctgggggtgataacaaggtcactgtgacaggacctgaagcctgggggtctcggcgacaggagtgggcctagttttttgatgtagaattgagccttgcatgcaccggtgggatcatattgaaaagaaaccctccaagactagaggaagatgcatcctctgacaatgtagtctctgtaggcgtcccaagtagctgggctggggattagatgggctccaaggcatttcctcaggtggcaatgggtggatccctgggaaggcaaagctgtgcaggaagaaaatggcaagatgctaccttccctcagggaaaacccctttcccgggagcagggaaggcgaggcagtttaggctgggtcagtttgtccctgccctcagagtctgttggtcccggaaaaagagggccttattttatttatttatttttctttgagacagtgtcttgctctgtcgcccaggctggagtgcagtggctcgatctcagctcactacaacttctgcctcccaggctcaagcgatcgtcccgcctcagcctccagagtagctgggaccacagggaccacaggcgccccgccacgacgctggctttatttttatttatttatgtatttatttattttttgagagacgtagcctccctatgttgcccagattggtcttgaactcctgggctcaagcaatcctcctgcctcggcctcccaaagggctgggattacaggcgtgatccaccgcttctggccaaaagagggctatagggcacccccagaacgtgagatctccctcgtctgtcatctttacagaggaggaagtggactcccaatccagccatagtccattcgccccgggcacggtgactccggggcggccagaaccaaatgtgtctcctggcttttgcacggcatcaagtaacccgcgccaggccgcacagctgccctggccttcagcaaggactccgcgagcgaggtgcaagctgctggggagtgccacagcaggagctgaggcagcggattccgagggcggggtggggctgaatcgggagggacgcggacccggtggaacgcactgcgcagacggcgccggcgccagcactcggccgttgacgagtctttcttccagctgtcccctgcaagtcgtccaggcggcggtccctttttttctgcctttttgtttacctccggcgagtcggcgcgagggtgaatttccgtttccggcggtgtccaagcggacctaaggagtcgcagttgtgaacaggttaggtgccgcgggctggggtaggctgggaagatcgcgagtcgtgcgcgtgggaaggtactcccccggtcctccgggtcatctttgctccccaggagcggcatatttcgcatctgcctgaggtgtgcccgagggtcgttgggagagtgacgg

SEQ ID NO: 5009 - DNA, 2300 bp, Homo sapien
accacgcccagctaatttttttttttgagatggagtctcgcttggtcgcccaggctggagtgcagtggtgcaatctcagctcattgcaagctccgcctcctgggttcacgccattctcctgcctcagcctcccgagtagctgggactacaggtgcccgccaccacacctggctaatttttttttttttttgtatttttagcagagatggggtttcaccatgttagccaggatggtcttgatctcctgacctcatgatccgcctgcctcggcctcccaaagtgctgggattacaggtgtgagccaccacgcccggccattcccagctaattttttgtattttttagtagagatggggtttcatgatgttagccaggatggtctcaatctcctgacctggtgatcagtccgcctaggcctcccaaagtgctaggattacaggtgtgagccactgcgcccagcctaactgtaaccctcttatctcaactagctgacgttattacttcacatccagttcaatttataaattaagagaggtgccatgggcctggtacggtggctcacgcccgtaatcccaacactttgggaggccgaggcaggtggatcacgaggtcaggagttcgagaccatcctggctaacatggtgaaaccacgtctctactaaaaatacaaaaaattagccaggtgtggtggcaggcacctgtagtcccagctacctgagaggctgaggcaggagaatggtgtgaatccgggaggcagagcttgcagtgagcagatatcatgccactgcactccagctggggcaacagagcaaaacatcgtccaaaaaaaaaaataaaaataaaaatgaaaaagaggtgccatgtgtacaaaaatcaatgcacatttatgaaattttttttcaaatatattttcacacattttatctaaatacataatacagaagcctgtgtgacttgggcaatgtggccaggagggcctgagactaacacatccaccttggcaaaaggacataaaatatgtcttatggtcagaaaaatcaacattttgtgtatttacttagtttacgaaaagtactgaaaatgctattactagctgaatttgtgatttccttttgaaattctgagttatccttatttttcccattttgtttttgcaccaaggagactgcagtcaaataaaacagatactacacgcactcgtcggggcagccgtactgcagaagcacgttgatgcactcctggctggaggcctgccgggcgtaggtcagcgctgtgttcccgtgggcatctcgggccatgacgtccaccccgtaccagatcaggagctgctccaggaccacattccccttgcggcaggccagatggagtgccgtgcagccgtctccctccccacaggtctcgttcacctcctcacgggagccatgtgccagcagcaggatggctgtctgcaggtcctcatcagcggtggcccgcagcagctgctggcccagagacagctcagtgcagggtagtggggccagaaagagcttctcctcatatttggaatggatccagcgttccttctcttccctcgtggactttattgagggttttgtctgcccctggctgctcccttcccagatgctgttggctagctcattgccaatagatgacataaccttcctgagctcaactggccagtcatccagctccagagatcgcacacgggaaaggcgggtgccaagactgcggtggatacctgagcattcaatacacatgaggactcccaagttcaaactggcccacttaggattctgggtctcacagtccacacagtgggcgttcccacgcatgttttggatcgactgcagggccatggcctcactctggctggtcagctgggacttgcttttactgctctcgcatgactgcaggctggccaggatctggctctggatggcttggacccaggcatcccgctcctcatacgtcgtggcttcaaagtgccacgtttggccagtggcagacacaatcataaagttgttggtgcttttcttctttaggtgtttctttttattggcatgaggagaggggggtgggttgagcttggggctggtggtgctggagatactggggctgaagcatatggagtcacccagcccggtgtccatgtccttggataggccattgcttttagagctggagatgggtgcacaggctgatgtggctagggatggccactttcctgggactttgatggtagatgtccgaaggtcaatctcttttttatgaatattcttcatataatcacctaagcttga

SEQ ID NO: 5010 - DNA, 2300 bp, Homo sapien
cagcactttgagaggccgaggtggatggatcacctgagaccgggagtttgagaccagcctgaccaacatggaaaaaacccatctctactaaaaatacaaaaattagctgggcatggtggcacatgcctgtaatcccagctactcaggaggctgaggcaggagaattgcttgactctgggaggtggaggttgctgtgagccaagatcgcaccattgcactctagcctgggcaataacagcaaaactccgtctcaaaaaaaaaaaaaaaaaaaaaaaaaaattataactgggcagtggaattgaaaatgattttaaaaaatatccaaaatacctaaggaacttgtataaataaataggaaaaaaaaagagaaaaacatcaagaagcccacaaaaaagcagatttgtaaatgggcaatggatttgaatagacatttagccatagaaggcatccagttggtgaaaaggcatatggaaaggtgctcagcatcactgattatcaggaaaatgaaaatgaaaaccgccacgagtggtttagaccatagcggcatgcatgaaagttttcagacctccagttgttgggagtggctgaggagattggggagcttctgtctgagttggaagagtggagtctcaacaagaaccagtgtattctggacatgtgtgcgccctggagtgttcatggctggatgccttgtctacctgtgccttacagagtgacaccattgtggtgtggtcgatcagaggggcaggaggctttcagagggagtgggaagtggtggggcttggtttgtttgcccatggatgacagcaaaagtgagttggcttctcaagaacttttaccagtagcctgttttgctacaattctagacccagactggggtcccaaggcatcatagcccacagcttcttagcaagtgcatgttcagttggatcccccagctcagcctgggtcatccccacgttctgcctcttgggccatacatagctcagctctgtactgagccatcatcccatggtgagcaagaccccattcttggtcttcagtctctttccctgcagcatgcaatcaaggtggtggctggaaggggccaaggagccacatgtcacagtgccctgctgcctgaacaaggaccagaggcctgtggaacacatggctctcagatttctcccatttgatgactcatcagctgcccccacatggctttctagctcacagcagatctagccttctctgagcagtgaagatgggatgttttatggtcattttccctggtgtggagagcccaagtggagttcttcagcacatcctacaccatcccctcactaacacccccacctgtccagtcttacctgccttcatatcaaaagcactcagttaacccagagggcttcagccctgccctgcctgactttctaggaaacccctctctccacccaccctaatcagacactgtctgaaggttccccctcatcattttaaaaggaagagaaatttttctgacacagaggttctggtgaagtggctagctcccacatcacagggtgatggtggtttggactggaccaggatcagacagtgctgtcctggggctggccatctgataaggggctccagaaagggcagtgatggacccctgggaggctttctgctctcctgatcacaggtttttggtgagaggacctattggccactagggtgtctgcgggtgtgtgtgtgtgtgtgtgtgtgtgtgtgtgtgtgtgtgtgtgtgatgtgtgtttacttggaatgacttctttcagcatgaagcccactgttttgctgaacgtatctcactgtttcctgaaactcagtacattcagctggcttaagggtcctggggcctcgctgtgtcatatttgcacaagcctagtgtctgtgcagactgtacactggagttcagttgtaagacccttttgatcccttattctgttcctgtaatagaaaagccatttcactcaatggaatagaaacccagatctaatggagagatgttctaatctgccatacactggggcagtggccagtgatttggactttgtggcacagatggaaatttccaggttctctaggtggtaggcagaggcctcactttttaagaaactcccccactccacccctgccaatgaggacattgcttagaggtatttctatcagtgttgagtagaagagatcatttcttggtgttgaatttcaggtaaggatgccagcttctgcatatcagggtggtgatgtttgggctgcgacaggtctagacagcagtctgaaagggggctcaagga

SEQ ID NO: 5011 - DNA, 2300 bp, Homo sapien
tgtacatgtggtagactttagctgtgaatccgtctggtccagggctttttttggttggtaggatttttattactgattcacttttggaattcattattggtctgttcaggttttcttgaacaggaatttcttcctggttgaatcttgggagttttcaggaatttactcatttcctctagattttctatttttcgtgtgcatagatatttataataatctctgaagatcttttatatttctgtgggattagttgtaatgtcatctttgtcatttctgattgggcttagattttcctttttttgttgtttagctagcagtctatcaattttgtttattctttcaaaaaacagaccaggcacggtggctcatgcctgtgatcccagcactttgggaggccgaggcgggtggatcacctgaggtcaggagttcgagaccagcctgatcaatatggcgaaaccccgtctctactaaaaatacaaaaattagccaggtgtgatggcatgcacctgcagtcccagctacttgggaagctgagacaggagaattgcttgaacccaagaggcagaggttgcagtgagctgagattgtgtcactgcactccagcctgggagacagagcgagactccatctcaaaaaaaaaaattgtttgttgatctttcgtatgcatttttccatcttaatttcattcagttctgctctgattttggttatttgttttcttctgctagtttgggattgattcgttctttttttctagtttctctaggtgagacatcaggttgttcatttaagatcttcctaacttctttgatgtaggcatttagcactataaactatactcttagcactgctttagctgcatcgcaaagattttgatttgttttgtctctgttttcattaatttcaaagaatttttttgatttctgaattcatttgtttacccaaaagtcatttaggagcaagttgtttaatttccaagtaattgtgtagttttgggagatcttcttggtagtaatttctgtttttattgtactgtggtctgagagtatgcttgagatgatttcagtgtttttaatctttttcagatttgctttatggctgagcatatagtcgatcttagagtatattccatgtgcagataagaagactgtatatcctatggttttggagtggactagtctgtagatatttattgagtccaattggtcaagtgttgaatttaagaccagaatttctttattaatttttcgctttgatgatctctctaatcctgccagttgggtgttgaaggctcccaatattattgtgtgactaagtcttttcataggtccagaagaacttgttttatgaatccgggtgctccaatgttagctgtgtgtatatttaagatagttaactcttctttttgaatttttccctttgtcactgtgtaatgccctactttgtccttttagatcattgttggtttaaagtctgttttatctgatataagaatagtgacccctgctttccttttgttttccatttgcatgatagatctttctccatccctttactttgagcctgtgggtgttcttacatgtgagatgggtctcttgaagacagaatatggttgggccttatttttttaatccattttgccatcctaagccttttaagttgggtatttagaccatttgccttcaaggtttatatcagtatgtgagattttgatgctgtcatcacattgttggctggttgctttgtagatttgattgtgtatctcctttatggtgtctgtgggccatgtacttgtgtttttgtggtgccaggtactgttctttcatttccacatttagcacttccttaaggacttcttgtaagactggtctagtgctcatgaatttccttagctttgattgtctgaaaaggattttatttctcctttgcttatgaagctttctttggaagaatatcaaattattgtttggagtttattttatttaataatgctgaaaataggtccacagtttcttctcacttgtaagtttctgctgagaggtctactcctagcctgatgggatttcctttgtaagtaagctgacctttctctctagctgcggtaaatagccactatggagactaaggaccagaagaaacacagaaagaaaaacagtggacccaaagctgcaaagaaaaagaagtggcatctgcaggatctccagctaggagacgaagaaaatgcccagaagagaaatgccaatgcttttgcagttcagtctgctgtgtggatgtctcgatcctttcacaggtgtgtttag

SEQ ID NO: 5012 - DNA, 2300 bp, Homo sapien
gaggcaggagaatggcgtgaacctgggagggggagtttgcagtgagccgagatcacaacactgcactccagcctgggcgacagagtgagactctgtctcaaaaaaaaaaaaaaaaaagtgatccattaccttcagaccctggaatgggtctggatttcaggaatgtcattgttggatttaactgttgatgggaaatagaatgacatctcccaccaaagtaaggacactctatggctgatgaaaattttcagaggaaattcaagagatatgtgaatggagggcattctttgctttcccctgtgataatgctatgtacctagagcaagaatatgtgttttcttggaccctaagcctgcaatgaatttgtcatcagtagatgattttaagggaccaagtaagaaaccaagcaataaggctcatgaatccacatggagtgaacaggctgataccaaatatggtccatttattcttggcttggggtaacagccttatcagacaccaaacatagctatttttcatctgaaaaactgactaaattttgggttattcacaaatatatatttgctgagaagaggttgatgatttcctttggctggcaaaaacttggattttctttgcagatatttaatttcaaaaataattcttgaaatgtctcactcaaatccaaatggccattaaacacatgaaaaacactcaaacccgtgaaaagccacaggaatacaaattaaattaaaataaaattttaaactttatgtctaccagcttggccaaatatagctggtggaatgtagaaaaatggtactgtcatacaaagctggtagaaatgtgaataagtatatccatattcacatagggatgcaatctggcaacatgtattataatgaaaaatgcacatatcctttggcccatcaaagcacacaagacgtgccaggcacaagccttcaggcccacagccatatccacctacgctggtcactacctatatagagatagtggtgcatcccacgtgagcagttgctgagcacccgccttgtaccagtgcttgggctggggacatgcccagatctctcacatagttgctattgttaagcttatgaacacctaatcttattgctcagtggagaatacaatctaaacgaacaggtgaatacagaagacagtgccagtcggaggtaaggtcatgggatagagtggtgggcaggtggggattcccttagctggggaggttggggaggcttcctggaggaggaaagatgggtggtgagttttttgttgtgtttttcagggtggcattaacaccagtgtgccatatggtggtatctatgtgaaatccattgttcctggaggaccagctgccaaggaagggcagatcctacagggtgagagatggggatgggtcctcattgggaactctgtgctccatggtgtaaagagccctgcactgggaggggcagcctctaggccttgccctgctcccattctgaaaactcatgcaaatgattgcctccccaggtcatacttttctcacctggaaaggaggtgatagaacctgccctgcccatttgataggttggggggtctgcagtggcacactgggaagcataggtgatagaaaaatagtagaagacttaaaagacttgtgttgctctttggcctccatgggaaaacatactgcttcccttggaggacaagtgggcctcggtaaactcactcgcacatccggggaggacacctgagccttctgtttgcccttgctcagctcccacttctctgatggaagggggtgatttttactggtctccaaaactgccagaattgagccaaaaggggaacctaggatcttacttatctccatttcccctagaattctggtgtccccagcgtcaaccatgcctccctgacctttttttgaaataaaaaaaatacatgctggagatataaatatctaagtgacttgaaaatacttccaaaaatggtttcacaggaaaacaggaggaaggataaggttgaacagagctggctcaaccattctgtgagccaataatagaaaggcttttatatccctgatctgtgatgtgcctgagaagaagggagtgagactgctcagagaggcaggattcctgctgactccagggggacacctggcacctcagcttcctttcccacttctccaggctgcatggaggggtgccgggcaggggcctcctggaagggaacctcctgcagcctcaagcaccaggtcatgacatgacatctatccctttcccaggtgaccgactcctgcaggtggatggagtgat

SEQ ID NO: 5013 - DNA, 2300 bp, Homo sapien
gcaatgctgcctgctcctgagagcagtatgagctaagaggtgacatcttccttcatcccatctttatttttgtttgtttgtttatggcagggtgctggttcttcttgtcctccatcacctccagaaatcagtgctggtgaaatctactttgtggaactggttaaagaagatgggacacttggattcagtgtaactgtaagagtttttaggagagcttgaaaagcagttaacaagatgtccgtctagaacctggtggccattccacccagatggcaacctctgacagtgtgcttagtttgcacaaatgtaaggggtaaataaaaaagccagtgggggcctgcactgggggatgagttcagagacaaacagaggtactggggaacctcaggatgagcagggcatgcactaggggactccaaactcatgaggaggcagtgtgggcagagttggctgatgtgtcctgactctgaggtcaagctggactgcagagagagagaagcacattggggcttcagggacacaagctaaaggtaagaagggcagtccactgtcatctggccaaggatgggtggggcagtccactgtcatccagcatagaatcagtgtggagcctcttgctcagacatcccagggccaggcctccatcaggactgacactttccatttggtttctgagctctgcctggtagacccttgtgaaaggagattacccatataactgtgtttacccaaggggttggggaatggcacacacaaagctggtgaaaatccagaggtcagaggttggaaggtgctgcttttattactgagtattgaaagtgatccattacaggctgggctcggtggctcatgactgtaatcccagaactttgggaggccgaggcgggtggatcgcaaggtcaggagattgagactatcctggctaacatggtgaaaccccatctctactaaaaaataaaaaaaaaaattagctggatgtgatagcgggcacctgtagtcccagctactcgggaggctgaggcaggagaatggcgtgaacctgggagggggagtttgcagtgagccgagatcacaacactgcactccagcctgggcgacagagtgagactctgtctcaaaaaaaaaaaaaaaaaagtgatccattaccttcagaccctggaatgggtctggatttcaggaatgtcattgttggatttaactgttgatgggaaatagaatgacatctcccaccaaagtaaggacactctatggctgatgaaaattttcagaggaaattcaagagatatgtgaatggagggcattctttgctttcccctgtgataatgctatgtacctagagcaagaatatgtgttttcttggaccctaagcctgcaatgaatttgtcatcagtagatgattttaagggaccaagtaagaaaccaagcaataaggctcatgaatccacatggagtgaacaggctgataccaaatatggtccatttattcttggcttggggtaacagccttatcagacaccaaacatagctatttttcatctgaaaaactgactaaattttgggttattcacaaatatatatttgctgagaagaggttgatgatttcctttggctggcaaaaacttggattttctttgcagatatttaatttcaaaaataattcttgaaatgtctcactcaaatccaaatggccattaaacacatgaaaaacactcaaacccgtgaaaagccacaggaatacaaattaaattaaaataaaattttaaactttatgtctaccagcttggccaaatatagctggtggaatgtagaaaaatggtactgtcatacaaagctggtagaaatgtgaataagtatatccatattcacatagggatgcaatctggcaacatgtattataatgaaaaatgcacatatcctttggcccatcaaagcacacaagacgtgccaggcacaagccttcaggcccacagccatatccacctacgctggtcactacctatatagagatagtggtgcatcccacgtgagcagttgctgagcacccgccttgtaccagtgcttgggctggggacatgcccagatctctcacatagttgctattgttaagcttatgaacacctaatcttattgctcagtggagaatacaatctaaacgaacaggtgaatacagaagacagtgccagtcggaggtaaggtcatgggatagagtggtgggcaggtggggattcccttagctggggaggttggggaggcttcctggaggaggaaagatgggtggtgagttttttgttgtgtttttc

SEQ ID NO: 5014 - DNA, 2300 bp, Homo sapien
cagatgaagaaaagaatagcacagccaattctggggtctcctctacagacatcctgagcttcgggtaccagggaagtttgttgtcacacacacaagaccaggacagaaatactgaagaactagacatggctggggtgcagagcttagtgcccaggctgagacatcagctttcctttctgccgttaaaggtaatcatcccttggtttactttctagatctggatgaaagagaacagactgtgaagcccaacagcctggcccctaggcccttcctgttctctgttttccatgtcaggtggatggaagttacttagcccctttgagccacagcttcctcatttgcatacagaagcaaatgcctgcatggcatggttgttgagaaaaacgcatagaagaaggcagagttctaggacagtgtctgggcacaggctcagtgtgggtgcctctggagtctttagtcactaattataattgttgtgataatagcaccatgaggaaattgattgctgccaatggcaaggcgtgggcaaccaggcacctcctattcttgtccttgaattggtcctcaagctgggaactcagtggctttgctcttgaccataccccatggaggaagaagatgggatctggagtaggtgtatggagggctgtgtgcttcagtcccagctctgctgtcctctgccgtctctttggattcccagtggtgttgtcttctcaggccccgccagacccatgccccagcctctccattctgctctgggccctgcacagctggtgctcatggactgagtcaccttgctgtgttctgcttggttctgcccagtcgaagcctcagcaggagcccgcagttgtgggatgagtgaggacagggtggcagtgctggagtctcagttgcacacccttcattccactctttccctgtgctgacacaggttgcctgtgcccctctacaaagagcacagctcctatcagggtccatcgaccactcccttctctcgcccttcaggctcaggggtggtcacagcacccagtgtttccagccccaggtgctgaactgatattactggtttctccaaaggctggcaagacctttgaaaacaggtctcccacgacctatcctcccttactcaggctgagtgtatgcccttctcattcttgctgggacaacttgctggttgaaacaggcaggttattgcacctctttcaacctcgtttctctttttatgatggagataatgatgtctgtccacagccgtggaaactaaggtactatgcccagtgtcggggataaaacccgtatctttcttctactcatcttagcttcatcagctgggacccctgtaactaaagacagattaatgagagaaaagcatccacgtgtatttactataagttttatgtgacatgtgagccttcttatggaaatgacctgaagaaacagttctccctgagtatatttgatgaagaatggagagtcatggagaaatgagataagacaaaaagcaggagtatgtaaggtgggaggaactcagcaaggcctgcttgttcagattcctctctcagtccctgtgtcttcccacataagatgctccatttttccagatatagggagggcattctcacttgagggtcttgtgccctgcttcgggggaagattagaaaatccttcctaggttttagggcctgcttcagaagagaagggcaggggaaggtcagagaaaccttccctcatgtgctgtttctccaattcctccaatgtgccaaggtgccctattttggggtagtgtgtcttgacctctgtcacaaggatctggcatgcaatagggctccatgaatgacagtgccttcctaattggccatggtgctcacctggacagaacatcccatgaggaactggatgcaggaggccagtggaagaacaacgatagtagctgccattaattgagtgcttacctgtgtgccaggcagtgtcctgagcactttatatgtattagctcatggaagctccatggtaacccaatgagatcattcctattatcaaccccttttatgggtggggtatctgagacagaaagagcaaaggagcacacccaagctctctcagggagcaggggacagagctgggattcggattggcctccagagcagaaaccttcaccccaggccttcctctggtaggtcctctctggcaggaagcagagcagagaggccttcacgctggggcttctttggtggcaaacctgagagttggtttcctggggctgggggccgttgaggggagcaagggagctctaaggccac

SEQ ID NO: 5015 - DNA, 2300 bp, Homo sapien
aaaaattctgataggagaaaaaagggttccaatcaaaatacatttttattgtcttttacatttacctatgttattatctttatgggtgctcccatttcttcatgtggatttgagttactgtctagtgtcttttcatttcagtctgaaggactccattaggatttctcggagggaagggtgtgctagcaacaaatttgcacaatttttgtttatgtgaataggtcttaatttctctttcagttttgaaggattgattgctttgttgtctaccaaattcttgtttgacagtctcccctccaagtattttgatattgggtggggtttttctaactgctttgtgcctagaaaaaaatgcattaagtgtttgaggctggtgtggctagttaagaccatacgtcatccaactgccttttggtctccatggtttttgatgagaaatcagctgttcattttattgggcagtccttgtttgtgatgagtcctaaatattttctcccattttcctccatgaaagtttatagttttatgttctatattaaatctatgattcattttgaagtaatttttgcataaggtgcaaggtttaggaccatgttcagcttttttccatgatggatccagaactatttgttgaaaagtttgtcctccctccattgaattattgtactgaaataatggtcttcactatccacaccagcctagaagacttttaatgcatttttgtctagtcataaagcaatttaaaaaaccccacccattcaatattttattttgggatttagagattttttgtataagaatcatggtcttcttcttcccccttcttatctttaataagcaacctttcactgtggctatagagagttagaaaaatgtggtggaataggaatgcctagtccataagtctcaaacagtttctaaagagagaggagagataaaaaaacgaaagaaaaggaaaggaaaaggaaggaaaggaaagaaaaaagaaaagaaatagaaaagaaaaagagagagggcctggagttcagcttctaattcatcactttttacttgattaccttggacttatttcctgtctgtaaatggaaacaatactcccttcttcacagactccttgtgataagtgacggctcacaggtcaagctttctgagggggtcctgctgcggctccctttctgccccagggagaggtagcagaccaagcctctttctcctgaaaccagcctctcttcctgaggctggaggaggctggtagcagaggtgtctgcagggagctgggcagctggggagtagatcttggattagtgtgtcaatgggggatgggggtgcctctatgtgctccccatctagcgcccgacactgcacacccgccctgcttgagctctggctgtagagaaagatcagtgaggatgtaaatggattaggaaaagcccgcctggcttcttccggtgccactcagcacctgggtctctggagattagtgggtggcagctttgtcagggagatagacatttaaacatcagctttggtctaaaggccctgcttaccagaagagagggaagagaagactagccctcttgagcctcctccagtttatctgtgaggctgcccctttctgaaacatggggcttatacttctgtctagtgagtcgctctggcacttcaggcaggtgctggagaaaggggtggtactggcaccaaatctgactctacatgtggcagccagagatgaaagatgtgaatcacgtactgcaggcaaaaatgttagctaacttctccagagagagaaggagaggaggccacacactacccaggtgtaggttactctctgcaacagctcgcacccagctgggaggtgctgttctcatgtttcatttggttgttcatttatttattcatttaacctttcatttgggagttttattgtttgtttactcattcactgagaaccgaccagccaacctggtcagtcctccaattaacatttctttaactcctctgtgtgcttggctctgtgcctgaccccagggacccaggtgctgaaaacacagtgccggtgtgcagtagtggccagaccatgcctggctgcaccagagtggcgagtacgggcccggacatgttcctggacattgcagaggccctgtcacatgcatgtctttattgtaggcatgagcctgtcctctgtgacgctggccagcgccctacaggtcaggggtgaagctctgtctgaggaggaaatctggtccctcctgttcctggccgctgagcagctcctggaagacctccgcaacggtaagaga

SEQ ID NO: 5016 - DNA, 2300 bp, Homo sapien
atacgcaataaagaattttgacaggaaaataaccttaaaaaataaaaatatataaaatataacaaaattatatagggaatgacacagagataactcagagagaaactattagctttgataacttgaaaaacaaaaacacattgataaaatttttatgcaaaaaaatggacttaatgaaatgttagcagagcaacaatagaagggggttactgctagtatttttaacagaaaaagtgaaagtggtggtgactttaagcagaccagcatttacctgttggcagatgacttaggtgttgctttttgttctgttgtgaacgagccacatgactggagaagtcaactttcttcttctgggagaaaggttgcgtggtcagcctgaaaaaattactaaataaaaattacctggacacttgctgaaaatacagatgctctggctcgggcccagagattcaggttcagcagattcagggtggtgcctgggaatctgcattttatcgtcttcaaggctgaatctgatgagaagacaagtttggaaaaaacagtaaaagattgttgcagatattgtgaaatgttttgctagctagcagggaatgtcaatatagatagctttaagcagaaaaaaatgtaaaacattgtgttttttagtttttttcaagtaatataacataaggttatagggggaaaataccaaaatgaacaataattttcctgactaaataatgagccaaaactctttcccctagcaaccactattaagttgcttgtgattccttccagaaccacaagaatatgtctacataatattctaatatactacagtgtataaagaatatgtatacataaatatacgtaaatatacctggtctttatgtacctatttgtaataaaaggaaacatactaggctattccataccttttgtcacttaaagaattttctaggcaattgttatatgccagcacacacagatctacttccttcctttacacagctgcatagctggttttctactgtgtgtgaactacaataatcactgttgatgggcacttcagtggctttcagttttctgctactaccaaaatacactgcaaagagcatcctttctcagatgctttggtgaacttttgcaagaatgtccatggggttacttcttagcagctgggtttacaaaggatatgtacatttacaaatttgatgaatattaccaaattccctgcagagaagttgcacttatctgtaatctcactattggcatatgagagtactcattctccatgccctcaccagcactgagtttcatcagatttttttttcgagacagagtctcgctctgtcacccaggctggagtgcagtggcccgatcttggctcactgcaagctccgcctcccaggttcacgccattcttctgcctcagcctccggagtagctgggactacaggcacccgcctccaggcccagctaattttttgtatttttagtagagacggggttttgccatgttagccaggatggtctcgatctcctgacctcgtgatctgcccgccttggcctcccaaagtgctgggattacaggcatgagccactgtgcccggcctcaaattttagtattttattctgtagtcaggcaaaaactcatgttttctttttaaataaatacgtctcagttttgacactgctattgatttaaagggcttgagagatctgttcttttgccccttctactacagagctatgatctacttcttgctgttccccatctctgctggttcctttctgaatccaagcaccagaaagagtaagaattcctttccccctttctctaaccacatttttcttgctttctcacagacagatccaggttatcatttcctcctgctgctttcacatggttccctgtcctgttggttgcaggtccaatgtctgacactatgaaagggcatggaggactcttgagttgatgacactaagcctctgctctggggctgcccccagttccttgcagagctctttcttttgattgggccaggagataaagagacatcagcgtaaaagccctgctgagcagcaatcccattgccttcagtggcacctaatccacttgagctcttcctggctctctcacgggtcactggctttgaggacgcaggctgctggggtggcagtgcctgctaacaggccagagactgcgcaggacccagggaatgagagtggtggcaggaaagggaaggggccttgttgactcactcgctgggcagcaagtgcttagtgacaagcagtaaacaaagacagcggcaacagtg

SEQ ID NO: 5017 - DNA, 2300 bp, Homo sapien
gtctcttaactagctgaacctcagctctgtatatccaaccaccaacttaacatcagttttgggcatctcaaaagccttcaaacagccaaacagcctgctctcatgatattttaatgccagtctggtccttttccaagattcccatcttggtaaaccagcactaacatccatccttggccacaagccagaaacctttgagttttccttgatgactccctctccttcattgccccacataacccatcacttggagaatgtgcaagttctgcccgttggacctcctaaataattcacagatctttccatgtccatcaactatttccatgaccatcaccctagatcaagcttccacctcttaccgtctaggctactcctacatccacctgggctctttccaataaggaatcttttcaagaagctattctgaccatgccacaccctttgctgaatatgtcaggggcttcccattgcacttaggataaaaagattttcaacatggccaatatggatgtcctacgtttggtccctttaccaatcttcctgacttcatctcatagctccttcttccttgctcctccagcagagctggcctttcctgaatttctccatcttatcctgcttaatctcatcagaggacctttgcgtgcaaagctacctctaaaatattctctgtctagtcaaacctattcccagctcaagtgacagttcctcagggaaatcttttctggccttattaactagtgtattaattggtttcatagtattatgtatccttaacaatttgtattataaaacagtgataattttgcgtttactattattactttcatagtacagtgattaaatctgtaaactctactgtattgcctggcactgaatgggcatgcaataaataattattgcaggaacaaaggatggcaggaaggaaattaagaaggttgagagggagggagagaggaaatgggaagagaatgaatgaataatcatctgtatgttccctttcagaatcaccagaaacaggccagccccacatgtaataggaaagtagtttacctgaaatcattcatttattcaacaaatatttatatattcattattaaagtaacttacttgtttctgattgtgaacataactattcctctcggaaaacatgagaaaatacccaaagtataaacgagaaccaagtcaccctttattccatagtccaatgatgaaccattgttaacataatttggtgtatttctttccaggttttttctatgtgtatatatagtatctaagtgggaccattctatatatgacttgtttcttgcttctttctcttaatgatacattgtgaacatgttcctatgttgttaagaattccttgaacacatggcatttaaattgctaaaatgtattctaccgaatggtgtaggtagttcaaacgcctttccacccgttgttggatatttaaaggacttgtcaatttatcgcttctgtaacatttacacgctttgtggggcctcagaagtaaaccaggtaatgcaaggaatctgggaagaggtggatttgcaaggaatctcggaggaggtggattttggaaaaactggaggcagcttttcccgggcagctgaagagaacacttatctctctgtaggtttctgggacccggacaggtgtcctcagaatggaacatattgtcggtcaaggtaaccagctcttcatcactcaggtgtgtgtaccggaagggggtgcctgttcgctgcgcaggttaggcctaagcgcacctgcccttcaaccctgtgccgacgaggcccgaaggcttaagctctgacctggctaccgccgccaaccagatgcggtcccctggggccacgcgccgccacgtgccgccacagggcccgcccctcccgctccaggccacgcccctcacccacagccctcggaggctctctccgcggctccgcctccaagcgacctccgcaagtcctctcgtaacccctggagtagcgccgtccccgggcggcggccccgcccccgcaatccgggccccggggctgccccgccccgccggccgctcgggaggcgcgggggcggggccctgcgcgatgacgtgcgcgggcgtgcgcggtgacggcccgcgtctctgttactcagccgagcggccgaggccggacgacgcggcttggattgcggagccgcgagcagcgctgggtaacggccgcggcgaccaccccggacggcccctgtccccgctggcgggcttccctgtcgccgttcgctgcgctgccgggtgagtgcggcggacgccgcagggc

SEQ ID NO: 5018 - DNA, 2300 bp, Homo sapien
aacagctgtgggtctgggttaaaccatattaacagccttgctaatgaaatgtaaaaagtaaaagaagaaacgttaggtgcttccaggacactcatacttgaagtacaggttgaacatcccaaatccaaacatctgaaatctgaaatgctccaaaatatgaaactttttgaatgccagcatgacgctcaaaggaaatgcttattcaagcatttgggatttgggatgctcaactggcacatatataatgcagatattccaaaatctgaaaaaattagaaatgaaacactttttggttacaagcattttggataaaagatactcaagctatagtagatttcatttttcaattggtaaatactgtttggtgcttattatgcgccaggcagtatgcttagacttcaagatgagtaaatacaacaagcattacctatcttcttggagtttatagtctagtgaagaagaggattaattgtaaaaataaacaattagaactctgatgagtacaatgaaagagaagaacatggtgccatgaaagtatataaagatacctgatttaggatggacagacagggaaagcttccctgagaagctggtagctgagctgaaatttgatacttgaaggatgagcaggagctcaatagtaaggagaaggaagtaagttgagtagaacatttgcacagcaatctaggctgagggaaagcacatgcagaagcgatcaggagagagcctggcatatgccaaggaactgagggaaggctaatgcagttggactgcagagagcaatgttttggagggagtggtggaagatgtggcaggagaagtatgcagggcctatatcacacaagactgagtacaagttattcagaatttattcattcattcatttatttattgagacggggtctctgttgcttaggctgcagtgcagtggcgctgtcacggctgatcacagcctcaacttcccaggctcaagcgattctcccacctcagcctcccaagtatctgggactacaggcacacaccacctcgcccatccatttttaaaatattttgtagagacaaggtctcaccatgttgcccaggctggtcttgaacttcctggtctcaagcagtcctcccacctcagcctccaaaaatgttggaattacagccatgagccaccacacctggccataattttattttttataaaaaaaaattttacaataaaattcagatttgttcttattgggagaacagtagaagtcattgaatgaggaatcagtgagcagattttaaataagaaaacataattttgttattgtgaagaatggatagaatatggcaaacctattagggaactattgcagttatccaggaagacatgatggtagcttgaaatgtagtcgtgtgaatggattcaagagagatttagagggaaacagtataatcaacctgttgttgataggaggagtaactcctcagagtagttgtgggtaatggaatacatgtttctaccgtttgctgagacaacaccggaagaggaccagattggtttttggatatgttgaatttgaggtgccttttgaatgtccagatggaaatgtcatgtaggcatttgagtttgaaatcagaggagagatcagaattggaactcacacttgggttttattatattgaggtagtaattgctgtgggtgtgaatgagattagccagagcaaaggaatatagaaagagaagagcagtcctgtattttgaggaattccccctattgaatatccaggtagaatagtgaatcattaaagaagcctgcaaagaactgatttcagcaaacctaggacagtgaattattaaagaagttaccgtgtgttgctttcctatggctgctttaacaaattaccagttctactggcttgaaacaacagaagtttattctcacagttctagaggccagaagtctgaactcagtattagtaggctggattcaaggtgtctgtcaccagggccatgctctctccagagtctccaggggagaatctgttcctttcctcttccagcttctgttggctgctggcattccttggcttatctccacatcactccagttactgcctacacggtcagattgcctcctccttttctgtgtgtctaatctccctctgcttctcagacagctgtaatgacatttagggcccacaagataatccaggacaatctcatctcagaatctttaatgacatctgccaaaatttcccataaaagataacattcgcagcttccaaaggttaggacccagtatcttcaaggtagcatttttgaa

SEQ ID NO: 5019 - DNA, 2300 bp, Homo sapien
caccctgttctgagaacagaaaggagcttttccttgctgttattcttttagcagaaaaggaaacctgccctactgcatgcatgttcctggatctactcaagctttttctttttttccagcaagtggagaaactctgaaacacagtgttttgttacctgctttggtaacaatatatcacctcctgtgaagcaccagagtacccctttgtctcctgattatcttaatctttttgagagagacatatgactcctccaagtaaggttaggaatcctaatctgcaggtagtctgaatgcttgggtggaaggtttaaccttcccaaaggtgaaaacaccatcaactttgtgctcagcctctgctcatatttgcagattatcagagatcattattactgtctccatgtcccccgctgacccagtttccaggataaatgtgtagaataattaataaagggcttgacagccaacactcctcttccactcttcccacttctcttcttccttatttcactactgtagtaggtaagagggaattcaggttatggtaggaaaatgattaggatgaacaatccctgtatgtgagcattgtgtgaacatagctcagtgtttaaatcattaccaaagctcctttctttattatgggctgtccacttaagaagaatttatgagtcttgtcatttcagacagtcttccctggagcactacatgactagtccagttagtgattttagaaatgtttctctggaccttttaaaatgtatccaagtctaattcctcatttgtttctagtttatttgtcctcggttttacagcttacatagtttggagtttcctgtttagttttgtttatttttaactcctttaggcctaagactcttcattgtttctctttcatctgagtcattataatagtctctcaaaagttcatattccactcttgctccccctttctcctgcagtacaatctacatgtcgcagccaaggatcaggtcaaggcattctcatgctctctccagtggctcaccttcttacctagtttgtgatctggccccaggacatgcagactgcctagtaggcaattaatatctgctgaattaattctttgtattgtaagtcatatcaggatttcttgggggttagcattatcttaaaaccacaaaaaacaataactttagacctaattggtttcatgacttattgaggaggcgaggaataggttaaagctgctttgcatacattttggaatagtctcttttgtctagtaaggatggataagtttgttaataaccagtattcacatgggtagaaaaaaagtgtcttgatttttaatcctacaagtagtaaaggaatggtagtcagaagttgaatcgtacttttaatgcctcaggcaggatagaatagtattgttttgttttgtatcccaatatgcctaactacttctctctctctcctttctgttttgcttctcatcctttcacccattacagtctcagtatgtgtgttacaccaggaggttgccttggcaggtcagaggatctgtcacagtgaaggcactgtggtaccctttgttttttaggcaaggatgacacatgctagtcaacttatttccatttgttgttccctccacttggcactaaatgagacttaaccatttttgaatcaaagtttataaatttcttacaaaaattaaggtttttattctctataataagcacatgagaaagactggttttaaattttaaactgtggagtgacgtaaaaacatgtttaattttaattatttgctttcttttgttcgtcttgtaagttattaatgtattaatactggtaacttctagattggaggaatgatttatcctaatgtttcttttttaaaaaaaactatcagtcattcatatggcatatgctaatcaaggctctgcggtattttttttcttatgttttttaatgaagcagctcttttcatgatctagcagtctgtgttactatcagtacgtaaacagtaaggactcaaattttaagattaaaacaagttcattttgttaacatcatgttttgttgcatcttgcagcttcttggtgaatttttggatgaagccattaaattaattgcttgccatcatgagcagaagcaagcgtgacaacaatttttatagtgtagagattggagattctacattcacagtcctgaaacgatatcagaatttaaaacctataggctcaggagctcaaggaatagtatggtaagtgtttacttccaaaaattaggcaaagaatcattaactgctaccttttctcctctcg

SEQ ID NO: 5020 - DNA, 2300 bp, Homo sapien
tcagatatctggaaggttattctcttttagttcacgtatctgcctctcttgctttaataactggttagtgttctgctgtatgaatatgtcacactttatatatccatctccctcttggtgaccatttaaattgtgtccagtctgttgctgttagaaacaactctgcaatattcatgttcacatatgagaacatgcctggaagaaaaatcctggaaggagatgttctgagccaaagatatttttcagttatttccaaattactctccaaagaaatggtagtagtgtacacttccgtccatgttatataggagtctctctttgccctcacccttgcctacagaatgggttaatttttaatatttgtaaatctaatgtagttttattctattttatgaatgtggctgaaattaatcatgctttgatagtcatggaagttttcaaatatttcttcaaaaggtgccctgggacatgtgggtcaggtaatttttaggtcccgtttacttccatttgtgttattgtccttcagtgttttgaccacttttgtaactgcgtgactttgagtaaatcactcccccttcatctcaccctcctacactgccccctgcattttacctcatcttaaaatagaggcagaagacctgttattaagagttgtctctaaatcctgggaaaggaaaggggactggggaggtataaacatgaataagtgacccatctataaatgtattttgctaagcatgaatttgattctttcttagaaattgaagagatttagagattggttttctctgaactttgggaaacccatggttagcagagcccgtgataaagttagaagaatgacaaaatgataaaattggatagagtctgctgcatttgaatatgtaatgtgcatttgaatatgtataaagatatagctctgtactgagtatgtatgaaaacattaacctaatatttttacatcctactaatttacagtagacgatgaagtattttgtagaatcttgtggtttttttggttgttttttttgtttgtttgtttttttgagacagggtctcactgtgtcccccaggctagagtgcagtggtatgatcatggctcactgcagcatcaaaactcctgagctcaagtgatcctgctgcctcagcctcccccgtagctgggatcacaggtgtgatccactgcacttggctaattttgttttttttttttgagacagggtctcactgtgttgcccaggctggtttcaaacttctgggcttaagtgatcctcctgcctcagcctcccaaagtgctgggattataagtcttaagccactgcgcccagcctaatttttaaaaaaaaattttgtagagatggggtctcactgtgttgtccaggtcatagactcttaataggccagcagttgtaaggcacaccattatgtgccacaaagaaaaaaacaccttcggttgtacagcaccattggttataagatatagtcaatttcagagattaaactgtgaaaaaagtacatcttaaaatcagtgagatacagtgttttcatttgtataaggatatatttgggggttttgattgctttaaaaacatttacctttattctgtatcctttactcctagccccaggtgcatgtcagtaattacccacagactgcctttttcaagatctacttaagagttttagcgcatagcagaaagaaagattaattgccaaagccattaattacagatggctttgcctagttagtgctcctaattagttttggttcttctgccttaatccctttgtgctttttcccagaggagtgctattttctctcttaaaaaatcctcttactgcaaatgtttatcattcctttttgtttctttgaagaaaaccatctcttattctctcctttatcagtgctttctatttttctccttccaagccttaagttactatagcaaacaaacttatctccagttgttgttcattccaacatattcatttgttttaccttattaccaatataaatgtcatactctgtaatcagggattctttatcagaattttattcttcaggaattaacacagactccttgaaattcgatgcaatattttttgtttgtacatttttctcagaagagggttcactacttttatacaattctcaaaagattccatgacccaaagaagatgataaatagtgttgatgtggcatccaccattaaggttaagtgtggtgtgccctgtgagtctgaatgtctacttaagaaccttaagtagacattaagaaccttaagaaggttttttgtttg

SEQ ID NO: 5021 - DNA, 2300 bp, Homo sapien
aaatgctgtgcagcactgctgtccccaaggcagagctgcttccaggtggcaacctcggtaggtggcaatgcccacagtcctgtgagtgaccacaccagccaaccgagcagcctctggggttgggctccactgtctcagcctccagcttccttcctaccgacctccacagctctgctgcccagcggctgcctgagccccggcgagcagggcttatctgcgtagtgaagggctccagaggttatcacagagccctggctgctcctcaccctcctgagcgttgggccccacggcctctccccctgcctccccacgggcccgctgtggtgccctcagccaggacacagccccaccctctgcctcagccctcagagcagcctgcttggtttccccagttcttggcggagagatggcaggagggagagtgggatggctgagagcccagagtcgggacttgaatctctggctgtgccactcattcgctgtgtgcattcaacaggttacttaattcctctgtgcttcagttttctcatctgtaaaatgtggttggaaatagtaccttcctcatggagtcactgtggaggataaagaaccccaggagggcatgtgtgtggcagctgtgcttaccagaagtgtcccaggcacgtaccaggtgctcagtaagcgctggtcctgtctgctctccatccctgggtcacaggctccagcaaagcgtggcttgggcccacccaccccatgggaacacaggtctgtggatctcacaccctactggcagatagtccagggatgtcggggggtaggatgtataaagacaaactcattcttgaaaaccctaaaattacctgtgaagttcagtataaatagttttttgtatttcccaaagatcaatttgcttacacatgaaaacttgagaaccaaagaggggaaagtcagttcacaagcaactgtctgagttttccgatccttctgcctttaggtgccgatccactgtctagccgtgagatgggtgtggtggagaattctggggtgctgtgctgcatcctggtttaacatccagcctctgtgaccttaatatatacggagactcttgtcttcaggatggggaagggaggccctaatctccgagccaaagttaaaagcacatagtgacgtttaactgtgttcttaaaatgggcaaaattgatttgaaacaaagcataaagtgaggccaccctggggcactgaaagtctctgagctggcctaacatctgcatgctttattttctaatagtgtcctggagtgcattaaattatttctattttggcatgggaaaatagcaaagtgagacgaagggaaaaaagagaaaatgggaaaagactccaaagaaagagatatgagttgtgaaagggatggactgtgagataaaagcaaagctcagctgttgctggaaggactttgggaatatcccacagggagtaatgctgactagtgccggcggtggagagtgtgctgcgggcagggaccctgcgtaagcctgtgtctccctgtcttgcaggtggtgccggggagcgggagaaggtgccggccaaccccgaggcgctcctgctcatggccagctcccagcgtgacatggaggactgggtgcaggccatccgccgagtcatctgggccccgctgggcggaggtactgcccgtagatcgcatgcccaccctctagaacccttgcctccaggtaatcatgccccctgcctgtcctgagccccaaagaccctgctcactgaggacttgctggctgcatcctgtgcttctcacagcaggctggcccttccactgccagccctcgggagtcacccaacggctgccgtgtactcacttcctcctttattgaaaactgtgtattagacatctaaatgtactggattctattccaggggtgaggaattcatgaggataggccacacctccgccttccctcatctccattctctgtgggagggatggtagacaaggacatgtgtctcgtggtgtccaggggtgagacatgtcacaaagccattgaagctcagtgagaggacggcgggggtgtggttaggtggagtggccaagcaggcttaatgcagcaacggggagccaggggcatgctggggaagagcattccagcagagacatggacacgtgcgaaggccccgaggtagggacgagctttgggaacacgaggcatgtcaggaaggccggggccccgagggagtgaagaccaggcgagtgggagggcctgaggtaagagtggtcaccaaggccttggggtcctggtggggatttttta

SEQ ID NO: 5022 - DNA, 2300 bp, Homo sapien
gaagtgacatcctgtcaatttttgccacattctattcattaaaagcaagttattaggtcctgcccaccttcacgaggagtaattacacaagagtctgactaccaggaggaaggttcaccgggggccattgcagaggctgcccaccaagggatggagcctggagcacccactctgcagccagactgcctggggcattcagatcctcagctattaagagtgggctgtgagtggccagtgctttaggcaccagttggcaactaatttcccttgggtgaccgggggcagttgggaagatacatcttattagtcatgtgaccttcgactaattattcaaccttctgtagcctctgtgttctcatctgtaaatggggtatcatcattgtaacaccatatcaggtggttgtgaggacatcgagataaaacacgaaagcttttaggatgatgcccagcatatggtgagcactcaatcaaagctggatattttaattaagagagattgcctgttacctcccagagccctccacatccccctctgtgactgctgccattcactgaaccctgagccttttccaggcactagactagtacctggggacaccaggaagaacagtcatacattccttcataagtcgtacattcctttcacagagacaggcagtaaacacgtatgcagacaaacaagctgctttccaatcaggataagttctatagagaaagtcgtgtaagactaattgggtgggagggcgcagctccttgacgaaggctctcacccagggaaggattctgtaatgtacatttgagctgaggctttaaatgagagggagtcagccatgcaaggaggtgggagggcatttggagcacctgagagaatgcaaagtttctggtgggaagagggtgagcttgagggagagagggtgctagagtggctgacagcaggacatgggccgggggaggagaggtggtccgagggacctggaggcccacagtcacatcagagttgggttttattccaagaacagtaggccctctgaagggtttccagcagttgtgctttgcccttaaggggctgcttttctttgctggagaggtggacagatgggtggatggatagatgggtggatggatggacggacagatggatggatagatagatgggtagacaaatgagcagatggatagatgggcagatgaacaagtggacagatggatggagaaatgggggagatgggcagatgaacaggtggcatcggcacaggcgtagccccttgctctgtacttactgagcaaagtttggtgctcattgcctccctctgccctccagggctgcctgaggtgtgagctcctgaaaccacatcctgggaggggcgactgctgctggaggagaggagaccaggctaggtgaaggagctgcttcctgctccctttgtcccagaggcaagggagacaccataaaggcagcagctgactggcgcacagaatccacaacagctgagttcaaatcctggctgtgccatttcccagcgtggtgaccctgggccactgaaagctcacggagcgtcagcttctctgtctgtgacacagaccatgtgtctaccttagaggatacggaggtgcttaccaagtaccacgtgcaggtgccgtgcccagcctctggcttcttggtctcattccatcttcaccacagtcctgggaggtgggtttagttattggccttgttttgctgatgagaaaatggaaacagaaagattaagtaactatctcaagaccatgtggcataagcacttacatcaggcttctcccatgcattcattaatctccaatacctggtgggtgggtccacctggagagaaccctgaggcataaagctagtggcactgagctggggttcccacatgccagataaataggatggacactccccccacctcagggagtcaagaacacagcaggacaagtgcacagggtggcaggcacagatgcggatgcagaacaaccacgccgacctcccactggcggggatcccagcaagtccttcttgccccgccccagacagtcccagccttcgggcactgataaatgcagaagttccccaggagagacaaaaggcctcagcctgatgcccacaggcagagcacacaggcagccgagtggccgcagccctgcagtggaggagtgcctcgtgcacctggtggttttctgcaccccaacaggtgtgtctggccactgctcctctcactgcagcccccgctgctccacaccatgcccttctggcccatcaggtgtctgaagaggagcaggcg

SEQ ID NO: 5023 - DNA, 2300 bp, Homo sapien
tgtgtatgggccatacttacctatttttcttgggtatcttacaatcttttgttgaaacctagacattgtaaataatataatgtggcaactctgcaaatcagatttaccttccctcctcaggttgctgttgtagctattttgtttagtgaatttcctgaattaaatctgtgttccctgttgtatgcagtcacccaagtctcttggttagtttattggtcagccaatgatttgtcagaaatatacttaagtgtcttgaagcaataagtcttctaccctttgaggagagtgtgtttgcacatgtatgtttgtgtgttggcgcacacttccattgcttaggaagtttgtgactctgccatagtcttcccttcctgcttgtgcagggactcaaaatcagccagagatgagagacagaggccctctcacgtctttcctccacaatggcatagcgctgctcaggcatatggctttctggatctctaggagtatatcatgggttttcaaagcccccagtggatatctccttccccagatctgcaagttttggccagctcttgtttgccccaattggtatcacagctttaggcagctgtaatgttaaggaattgctgctgattgtttttgacaaatgccctggaattagatcttttcctgcagagtgagctctgagtcagatcaaatatgacaatgctctctcagtgtctgtggaagcacgggggattaaaaaagagtgggtgggggagaaagagagaaaaagcaatgttctgtaaaaggggcttttttaagaagttgcaaaacagatcaaatttttacagtgctctaggaatgagaatctttgagaaatgaattcataccaaggtatatgagcaagttctcaaggcttctctagatgcggccttgtcccccttacctaatctttatctaaatgctaagtggtgacatggaggtgggttaaggtacccgagggcttggtctcaaggaagcagtgtgaaatgttggaagctctggaagcttggagctgggctgacctggttctgaattctggctctgccatctactgtttgtgcagcctttggatgggatgcttctctgagccaaagagggatacctttgtctgtaaattgggatgtctcactaggttgtgttaagggaagagttaaattggcctctgtgtgtaagattgctagcacacagaaaatgtcccaaaatggaaatgattattatttggcttgaggcttaggttaaaatgctaaaaagtgatgagaccagtattgttttgttgaaataaaagcatttttaacacataaacattatgcgtcaagccctgttttaagcactttctatgtagagttcatttaatcctcatgctagccctcaagtggactttattaattgtcctgttttagagatgaggaagttgaggtgcaatttcctgcctaaggccacccacggctgggattcccataggctatctggcaccagagcctgcgctcttgtatctgtttcatgttaatactacacaactgagaagccggtgtgcactttgagaaatagcaatggagaacaccaaaggacaataagaaaagcagcatatgccatttgccaatgaaactggcaacaaaaggcctgggacatcccctagtcaatccagtttggaagaagttaaaggtcagatacaaacttccccattgtggcttcagcctatccaggttcctctctgagaatcagtcatgcagagagcctgctcaccactggagttcctcttgaggtagggctctgtccctggagcagcctcctccctgcccactaagtctgctcaggctgttgttgagactgggggctaattgggggaggtggccagggactgctgttcttcagcctgtcacagtcagatccacttgcgagcccacagaagcggcagagaggatttttaactcagtgctcatcttgacaagctggttcagtgctgacccttacaggccagggccattcaggaccaggcaaccccaccctgggatttgttcagtcattatgacttgaacagtcaatgatgtcattatcaagtatctggtgcattcatgcctggcccagcatggacgctccagtcctcttctggggacttacgggccactttgttatgatgagtcctgggccctatggagccattgttgaggatttccagcagcacccagtctgcatcaacaacttctggaagcagagagtccctgaaccttggagcaaggagaggtatttgagattaggttgtttctgcttcctccgtttaccaatagggagagtcggat

SEQ ID NO: 5024 - DNA, 2300 bp, Homo sapien
atggttagaaatgcaaatggtcctactttccccagacctatagggttagaaactcaagggtggggtccagcactattctgattgaacacttacattattagaaattgaatcaggctgggtggtgtgactcacacctgtaaccccaacactttgggaggccgaggcaagaagattgcttgagcccaggaaatcgagaccagcatggggaagatagggaaaccccgtttctactgaaaattaaaaaatagcaaaaattagctaggcatggtggcatacacctatggtcccaaatagaggtcgaggtgggaggctcactggagcccggtaggtagaggctgcagtaagccatgatcgcaacactgctctccagcctgggccacagagcaagacccaaaaaagcaaaacaaaacaaaacaaaacaaaaaaacaaaaaaaaaacattaaatcgcaaaaatctactgataaataagttatagtaaaaacaaaggttaaaaagtattcaaaatatatcatttcctaacttaatgtactatgacttcacgtactatgtcttaagctctggaggttactgacatccattgcatccatgtggtgcaaacactatggtgcatctcttctcagctccacatgcaatgatgtcataaaatgggccatggagggggagggcatttatatcactgaagttagcaaacactccaaatccaggtactttatagttttcagagaccccattgttaaacaccaccaaaacaccagactctctgtgttttaacaagccctggggtgactccaaggcacgttcaaagttgagacctaccctgagtgtctcagctgaatgctatgttctgactccattcacatcttttcatcacagtcttagcaaatgtcataccagggaccagagagcagactccctctgctccccaggcccccaacccccacccagtcccagagccacattcttgacctgtgggaggcagaggaatctgggcagccgagggccagtgctagggcccctgcagtggtggggggcacactgggattcccctgagaagtgagcagcagatcccacagtcacagcctggctctccacggtggcttcttgcaaacaaagtcagttggtggctgccatgataaagatagggaagcaaagagtaaagcctggggctccagcattgggcacacctgagctgacgtccccagcacacccttgtgggcggtgggcacagggctggttgcatcaccttcctgacctctgtctgcttgtctgggaagacaggaatggtagtgtctacccctctggggtctctacattaaatccagtaatttaggcaaagagccaggaatatagtacagtctttataaacagaagctattactgcttttccatttagctatagtagaaagcaatgtcaatgtcaatattgttactctccttgtacggatgacagattttgggacacaggaaaaaaaacagcaaagtacctagaatgacacagggactctgttactgaaacagcaaacgcccaagatgcatcccgttagccagtgatggatctcacccacaccctctaatgagcacatttctccatcctggggctgctatcctaatgtatttccagtagctccaagttctctagcaagaaagtaaccatcaattcagttacaaagattaccagctggttctctggtttattgctgtaattcctctaaagcaagcatctgcgggtaaggacgatgttctgcctttccacattaacgttgcttaaatgagaagagtcacttccatgtgtccttggagcgcaggattccagcagcacatgggaggctcccatcaccctgtgaaagccaggatttgcctggaaaatattgggggtgtgtactctgtgagtacacatgggggtagaggcaggaggcgacctggatacagcaggtgactttgcccctcacctgggtaaatgcagacacagggatgcggtgccccactaggtgtggagcccttatatacaataatagcaggcatttatttagcaaacacttacacagttctcactgtgtaccagtactaagtactaagaacttccaagtactaattcatttgatgctccaaatatccctacaaagtactttattattcctgtttcacagacaaggaaactggggcacagacaggttgaacaatgttcctgtagctgagccaggatttgaacccaggtagttggttgcagggatggagttcaaaatgcgtttcccattgagaggaccaaaaatatgtagtgaagccataccaagtctgagtt

SEQ ID NO: 5025 - DNA, 2300 bp, Homo sapien
gcgcctgggggtggtttcttaaccaaaacaagcgtgagtggacccagactaagtctcagggcatttccttgcctctgacttggatgaagtggtccaggctgcattactcacaaatggcttcctgattgctcaagacattgtcacaagccacaggacttgccctgtgaccctggtgtcgacatgagattttctagcttgatattctccccactcctcatgggtggcccctgtcccaaccagggcttgtacctggccttaaaggaaaaggaggtcagttctgtcattcagtggtgtttcttggatctgcccatgaagccagagtttcctgtgaggcttctggcctgagtcagcctggggctcagggagggcgtacaagaggggcagtacagggacatagataagggcccaggggaagtgcttagtggctcattctgctggtggaatcaggagaatttcattggggaattgcccaaagaggacaaggcaatgtgaggaagggcattccagagagagggaactgcacgtgcaaagacacagctacatgtgcaaaaacacagaggcacaggagagcaggggctgcacatgcaagaacaggaacacacaggagcaaggcatgtgcaaagtcactggggcacacaggagcaggcgctgtatgtgcatatggttgtatagagcatcggcaagagataggtcagagaggagtccatggatgctaccatgaaagaacctggaatgttatgccaaggtactcattcatccctctgaggagtagctgaagaccagaacaagtgacttgatgctgagtaagacagctttgtgtccatggactctaccttctcccaccagcttggccatgtggctcaccacatcctggtgagtctttcttcttactctgcagtcctcccctctccatagggcacactgttccctagggaggactgccacagtgatctcctggtgggctctctccctctacagctgctaaagttgattacataccaataggacacttggggatctgtggacatggggcactcgagggagtgtggagggtcagatggaggctatggccatctgagcaggggagggcattgttcaaatccctctttaccagctactgaaagggtcacacagttctcaggcccaaatagccagacccaagctcagatgcctaagaggatacacggagtgattatcaggggcacagaggcaggtcaccgttcagcaagttcatcgggggctcaagccaggagctgttaccatgcagtgatgggaatagggtggagaggctggcatcacagagcagcaggagctgtagacacagccctgggttctggtgcccgccctgctgctcggtactgtatgactttgggcaggtgattcaaccttgctgtgccttattttccagatttgaaacgctatatatatagcacctgcttcaggagtttgagagttaaatgagatattgaatgtaaagcaccagcctcagtgcctgacacatagtaggtgcctaataaatgatagctattgttatgattgcattccttgggtaatttttagcatcttgaggctggattccgctcctcacaaagccccagtatacaccctttaaaattatgccagcatcaaacagaaacatggcaattagcagagattcactattcaattcagatcttcctatgaagagccctgagttaagtgcttcctgccctcttattcctgtcaccttactaaagaggcataaatagtatccctaacaggcatcttcctgttgggagtctcctgaggagtttacattgccgggctgcttgctccttcccagacacacctgactttcaacacgtaaaacagtgagctcataagcgggtccccgtggattgggctctggggtggggggggggtctcggctaccttctcaccaaagcgctatcccacccgggcttggcagggagtgcggctcccaggcggcggctgaaaggcgcatttcttccagcctcagcaaaggatggccggaaccccagtaccctctcccgggccaggaccgcgccccgcgtctctggctggccccgcccctctcggccccgccccgcccccgcgctcagcttggacagccacgcgtgcgcccaggccaggcggagggactgccccgccctggtccagtgattgatcagcagtgattactgaggctttaatggtccgcttggatgggaattaattctgggatggataaataatgcatcgaggtttatgtagtccaaggcgagccgtccgtccggagccaggagaggtagccgagggag

SEQ ID NO: 5026 - DNA, 2300 bp, Homo sapien
cttttcaaaaagaaggtggaaacgatccctaggttccggcattgactggcttaaatatttaagcacgtgaaacaacagatagccctgcaatgcttataacaactagaaaaaaacaaacaacgtcgctacgtaaaaacaaaagtaccctaagaactctaattaaacatgatctgcagtgtggttctggcagaatttgaccactggcgtaggatgatggctcagtgagcggagatttccagaagaccctcttggccaacctcatttccaggagcttccaaaacactagatccctagacacgaccctagtttcatggaagccaggtagctcactgatgaggacggattcccaactgctgactagggttgtaggtccccctcagccacctgggaggacagaggaagggcccaaagggaagccactcctgggagcctcaccccaccagggtctaactaaatattaaaggcagtcgtgttcgctgttccttgtcgccaacttgattttaaacactcaggtaaactcaggcactaggtcacctgggagtatttgattataaggtgttcatcccaatggcttatattttaatttatcatgtaaatttaaatgcagaatatctttcaatgtgtgagaaacctggtttgagaagcaaacactgccctaccttctgctgctgctaatgatggacgaagcagaagacacaagcacttccagggcccctgctaaaggttgcagctggaacacaccatcctggccatgggcatgagcatggtgtacttaatgcgagctgggcacttagttaagtgctctgcctgactttcctcgcttcattctctaacagacccagggattcagcagtattactatcctcactttatacatgaggaagggggctcaggctctctgagccccctagagacccggctaagaagtgtccgaggcaggagtcaaactccattctctggctcctgagttctgttctttccaccgaagttcgtgcctcctcccccagcaagcctggagagtgagtgagccctcaccagggcacagacagagaaggtctggcacactcttttcaatggagccccctatagctgtggagactgacggggtccaagaacaggacgctatgaccttgcttctcaggcgccctgagctctggtgctgtggcagacgtgtgcctccttacctctgccagctcccactctccaccacggtcaccctgccccacacccggggtctccaggggcaggcaggttaccacaatgcttcgggtgagtgatggccctgaggctggactgacccagctctacccaaaggctgaatcaggctctccaaggctatcagcccatggctaaccaccctgccttggtcaaggacaagagtgcaggtgattccaggtgaaccttgacgctgaacccaggtgagcacgaggccactccactctcggggaaggatctctctgcccaacacagactctggaagccagttcaacaagagccacctgcctgcttcctctgctttgactttcaaatgccagccatgctgcgtgtggctctgggaccttggggaatgcgctgaccctttgtgaccgtagtttcccagtctacgggcggtgtaggcgccttgggaagtagctccgatccccctcggcaacctcagggctcctcccctgctagtgatttctccagcccccactctctccccatacttaagacacagaactgggccagctatgcagaattcacctgctccgaggaagactcagtatagaaaaccctctaaatcccacacgccctgccaacagcacagggcgcacaggacggtgagctacagatgaggctcgggcgagatgaggttgggtaaccggaagccaggcgggaaggcgcagcgagcggtccgggcacgcaggaggccgcctccccgaggcccgccagggggcgccgtgcaccagggcccaggaagtcgcctccgcccgtggcgccacccgcgctgcccggcaggggtcagcctcgcccggccatccccgacccggctgctgcacccttctgactcgctgggaccgcccgctgcgccgcatcccccccccccgcccccccccccccagaggcgccgagcagccgggagctccgtcctgcctgaggatgcggggcccaggctgcatccccccggccctgctcgcctgctcatcacacggaggccggggacagggtcacggccagggagcctgcggggctaaaggagcgggccgggagctcaagagctgccgccgggcggcgaggaaggagccccaggcaggccccgg

SEQ ID NO: 5027 - DNA, 2300 bp, Homo sapien
tatcttgtgtatttgaactattctatagttgctttcaatgggagggtatgtcctataccagttacaccaccataactgggtgcagaagtaaaactgccattttggggcaattgtttaaaaatcagagaatcttacattgccctttaacaaaaatacacatttacattagcagttcatagttgccctggctgcttcagtgtcttagctttggcaactctctcactaataatagcttgcatttgcacagcccttttcagtatttaaaaactctcttggccgggtgcgctggcttacgcctgtaatcccagcactctgggaggccgagatgggcggatcacgaggtcgggagatcgagaccatcctgtctaacacggtgaaaccccgtctctactaaaaatacaaaaaattagccaggcgaggtggtgggcgcctgtagtcccagctactcaggaggctgaggcaggagaatggcgtgaaccccggggggcggagcctgcagtgagccgagatcgcgtcactgcactccagcctgggcgacagcgagactccgtctcaaaaaaaaaaaacctctcttgcaaatattatttgatttgttccttctaacaaggcattcattcattctgcaaataagatgtcaattatctcagttaagatagtgagaatttcaaccttgagtttctagctctgaatttagtgctctttacctgcctgctgctggctacccggcaaggtgctggggtgggtagaaggtaggagacctgggtgcaggtgggccctccagcagactttgcgagatcccactatgacagactctccgcgcttcctctgggcattcacaggcatggggtcctggcctgtcccatgctggccacccttcctgcctctgtggaagttcctctgtctaatccgctcttaccataggcctctgatttcaggcaatatcttcttgtagattttatttatgatttcattggtgacaatgacgaggggttttcatcatatacaacaaacacttcactgcaaattctctaaggttttctctttcccttggctggcactgcatgtatcctttcaatttctcttttcttttcttttttttcttttttttttttttgagacggagcttcgctcttgctgtccagactggagtgcagctggatagatctcctattttggctgctgtctactgacaagtttgcactggtggaggttgaggttttgtgacaaatgttattttcctctttaaaccaatcttggagctttactccatgtcataacaagtgatgttgttgctgcctctcagtcagtcatgcatggtccactggttttgtgagctagagacaagcgatgagctgcactgaggatcaaggatcaggcattagcgctaacaagtgcccttgctctttggcaaaattctccttttacagagcacaagcaggattgtgtgtgaatggacatgcttgtttgtactgtggagatgacgttatggataggtgacatggataattcagcctagtttatatactcagaggaatgagaatttggagtctgagtttcagagacttccattctatggttttagatgtcctctcatccttgcctcagtgttggccgcaggaggactcccctcattggtggttcaagttctatctgaggatgggggaggaagaaatccaagtgggcaactctgagcttggtggggtgagggctgcccaacccatgccatgtccaggggtgcacttaaacacacctctgattagattcacctaacaccatcattgttctcattttgccagaggcccagagaggagaggtgtgcaccagtggtcacacggctagtgaagaggggacacagaatccagacctactcttctagggctgggctgtactttccattttgtccttggccccaaccagcaccgcttgaccacggaggctgcacagccagccccaaggggccttgctgcagaacccaagtcacccgccagaactccagcagctccgtggtcggctggagagtgggcagagtcaggcatctgccggctctccacttctgctttctccaggaaatgagcagagacccagctccagtgattcagagtgaaacggcgctgaggactgacgatgtggggccgggtcctcttcccccgagcctgaggggctgcagctggggatagggggcccatgccttctgatgtctacaggcgctgacggccacccctccaggtaggccaccttgctcttggcccagccaggccagcctagaggtgggcatatgggcgccgcctgtcagcgtgggg

SEQ ID NO: 5028 - DNA, 2300 bp, Homo sapien
tccttctaacaaggcattcattcattctgcaaataagatgtcaattatctcagttaagatagtgagaatttcaaccttgagtttctagctctgaatttagtgctctttacctgcctgctgctggctacccggcaaggtgctggggtgggtagaaggtaggagacctgggtgcaggtgggccctccagcagactttgcgagatcccactatgacagactctccgcgcttcctctgggcattcacaggcatggggtcctggcctgtcccatgctggccacccttcctgcctctgtggaagttcctctgtctaatccgctcttaccataggcctctgatttcaggcaatatcttcttgtagattttatttatgatttcattggtgacaatgacgaggggttttcatcatatacaacaaacacttcactgcaaattctctaaggttttctctttcccttggctggcactgcatgtatcctttcaatttctcttttcttttcttttttttcttttttttttttttgagacggagcttcgctcttgctgtccagactggagtgcagctggatagatctcctattttggctgctgtctactgacaagtttgcactggtggaggttgaggttttgtgacaaatgttattttcctctttaaaccaatcttggagctttactccatgtcataacaagtgatgttgttgctgcctctcagtcagtcatgcatggtccactggttttgtgagctagagacaagcgatgagctgcactgaggatcaaggatcaggcattagcgctaacaagtgcccttgctctttggcaaaattctccttttacagagcacaagcaggattgtgtgtgaatggacatgcttgtttgtactgtggagatgacgttatggataggtgacatggataattcagcctagtttatatactcagaggaatgagaatttggagtctgagtttcagagacttccattctatggttttagatgtcctctcatccttgcctcagtgttggccgcaggaggactcccctcattggtggttcaagttctatctgaggatgggggaggaagaaatccaagtgggcaactctgagcttggtggggtgagggctgcccaacccatgccatgtccaggggtgcacttaaacacacctctgattagattcacctaacaccatcattgttctcattttgccagaggcccagagaggagaggtgtgcaccagtggtcacacggctagtgaagaggggacacagaatccagacctactcttctagggctgggctgtactttccattttgtccttggccccaaccagcaccgcttgaccacggaggctgcacagccagccccaaggggccttgctgcagaacccaagtcacccgccagaactccagcagctccgtggtcggctggagagtgggcagagtcaggcatctgccggctctccacttctgctttctccaggaaatgagcagagacccagctccagtgattcagagtgaaacggcgctgaggactgacgatgtggggccgggtcctcttcccccgagcctgaggggctgcagctggggatagggggcccatgccttctgatgtctacaggcgctgacggccacccctccaggtaggccaccttgctcttggcccagccaggccagcctagaggtgggcatatgggcgccgcctgtcagcgtggggcctactggctgcctcctgggaggctgactatggggcacatgtgacccagtgcctggtttgggtttgtgaatgtgggagaggaggtgagctggggagcaggaagtgtgtgtggcgtggggggcccatgtggtcagggccactccagggcctgggtctgcctgagtgtgtgtcactgctgaagtttgggagtcaggctgggctccagcagcactcctcgacctctgacggtaggtcaagtcctttctcggggtcctgctatgaagggaaccctgggaagggctgacacgggctttcctggttgtcgagggggcggagagagcaggccgacaggacagtgaggctcgccctccaagctccctcataggcctctgaggagtgcagagttggagggccatttccaacgggcctcagagggagctggtctatcccggccctgtcattactccactgggttctggtaagtaggtgcctccctgggctcacttccctcatctgaattattacagcaaaccattgaaacgcctgcattttctgcctaagcagggccacctgctcagtaaggactgattcttcttttcccctgaaatgaaactt

SEQ ID NO: 5029 - DNA, 2300 bp, Homo sapien
tctgagatttgagaattatattttagttttttagataaaatacatttttactatgagatgagaataagatgcatcatgttatatcactttgtatttacttgattaactctgagatcaaacactactcactcttgtcctttttattttaacagatgttatacatccaggctctaccagggcctttcctttctatggatccatccgcatttgtggatgtttatggatatattgctactcctcgagtctggaaacaaaagtcttcattaatctggcgtcttggccccacatacctctttgaagaagccatttcaatggaaactctggaagttattaacaaacttggcccaagatattgtggtaacttccaagctgtgcatgtccaaggtatggagtgttttgatttacaatgttcttgctgatattagtttttaaatggacatccagttatttgtagcagatttgcagagaataagctcagcgttaaagtcagtcattagggaagacctctgtaattgtatcattatatatttacaacccaagagaaaatgtcacagaaaaggaaatgacaatatctttagatttcaactccaaagccctaatggggaagaggtgggttgggcaataccatcagcaaagaaagagagaagagaatgagataaataagttacattgcttttaatgaagaagctttttaactaaagtatactgttgacttcaattattaaacaggcagacaaaacatccacattttcattattgattgttgttattcaagcagggagcattgttctctgtgctctgtcaagtcaaaggggtcagctcccatctggaaagaatgataaatgaatctatgtcagcagcctgtatgtgctgaagggcgattgagtgctcttgagcatttctgtctccaggcccatgatgtctttgaatttcatttcctgtggcaaatggcactggccagagcaatgggacgaggtcaggtctagagccaaagtcttaccaattctatattcatggcacctttctctactagcacattgggtatcattgacttagagaccagtatgttaattcaaactggggtgtttgccgtggctgtgcagctcattgaaaattagacatttcagatcagcctatttcaagtcaggtttcttgtcacttaagagtttggttttagggaatgaggttatatactttacagatgttttaagctctggtagtttcgcacctggagtgcatctatttcatggtaagacaaatcttgggagagttcgccacagttttctttttttcttcctcttcctcctcctcctcctcctcctcttcttcttcttcttcttcttcttcttcttcttcttcttcttcttcttctttcttcttctttcttctttctttcttcttcttctccttcttcttcttcttcttcttcttcttcttcttcttcttcttcttcttcttcttcttcttcttcttcttcttcttcttcttcttcttcttctccttctccttctccttctccttctccttctccttctccttctccttttccttcttcttcttcgacagagtctcactctgtcacccagactggagtgcaatgtcatgatctgggcccactgcaacctctgcctccccggttcaagccattctcctgcctcagcctgccaagtagctgggactacaggcatgcgccaccatgcccagctgattttttgtacttttagtagagacgagatttcaccatgttggctagactggtctcgaaatcctgacctcaagtgatctgcctgtcttggcctcccaaagtgctgggattacaggcatgagccaccatgcccagcccacggttttctataactatcagagaagaggggaaaacaaatgacatgcaaacatacaatgtgcaaaaacatgcaatgtgacaacatacaaacatcctctcaatgattactttgctgtgtgacagagatattaaattgtatgaggattaatttcctgctctgtaaagttagactagaaatgtttaaagatgtgttgttacaggggaggacctggacagtgaagccacgccctttgttgcagaagaaagagtttcttttggacttcacatagccagctcctctatcaccagtgtagcggacatcagaaatgcttacaatgaggtggacagccgcctgatcgccaaagaggtacatcttctaacttcgctgctaatctctgttggaatctggtttcatggtttgcattagctttcagtgcttaagtaaacactatttcatgtttgcacttgtgtagatgga

SEQ ID NO: 5030 - DNA, 2300 bp, Homo sapien
ggaagttgtgggcttctaagtcttaggttttggtttctttctttctttctttctttctttctttctttctttctttctttctttcattctttctttttttttttttttgttttgagatgaggtctcactctgttgcccaggctggagggcagtggtgcgatctcagctcactgcaacctctgactcccaggttcaagtaattctcctgcctcagcctcccaagtagctgggattacaggcacgtgccaccacataaggctcatttttttatatttagtagagaagggatttcaccatattggtcaggctggtcttgaactcctgacctcagatggtccacccacctcggcctcccaaagttctgggattataggcatgagccaccatacccagcctctggtttcttaaagaaggaactgactagttcatttctaagagtacagtcatctcaggggtggggagagagcaacacctgacacattatacagtccatactcaaacaaatctaatccagacatcttaatatagtccttagtacaggcttatgtgacacagaataacaatcaaaagattcagttattcatgtttcccaaaattctgacatttggcattatgtaatttcctgatgagctaggcagcctcaaatgggtgtggcaacttattattgttgctgtgttctggaaaggaaatgtgagaggctggaacttttgtgggaagtgtaaaaggtgcaccttattgtactggtgggttcacatctgactttcttagttctctcagcccttagccccaggcctggcatatcatttgttgaatgactgccttcatgaatcaatatcctaagtgtgcagggctcttggagccctacagacatgtatgttggggtgccatgctggatacccatgttttcactagagctgccttcatcaataccagctgtcccaaatggcagctggcccacctctgtgtgtgcctttgggcagtggctgtgcttaaaaaagcaggaaatctgtcactcttttcctggcggaagaacaatccactcattttattttattttgtatccactcattcttttaaaaaatgtaatgcatctttacgaaagatagtggcatgtatgatgctaggttccagggattaaagagggacagtctctaccttcacaggcctcccgataaacttgtgttcactggggttcttttgcatttcctcttcagcaagagtaagcaaagtcatgggtaactgcttagcttcaagcaaggttgagtattgaccctatgggtcactatctgtaggtgatacccatgggtacccagtgtggggcaagggaatgggcttcgtagtcaggtggattgactttgaaaacagtctctgccaattaaaaaaaaagtctggtgccagaaaagttacttagtctccctgagtcccattctttctagctactagatgcagataataggccgggtacggtggctcacacctgtaatcctagcaattttggaggtggaggcaggaggaacacttgagcccaagaattagagactagcctgggcagtaaaacaataccccactctacaaaaaaattttaacaattagctaggcatggtggtgcaaacctgtagttctaactacttgcaaagctgtggtgggagaattgcttgagcccaggaagtcaaggctgcagtgagtcatatttgggccactgcgctccagcttgggtctctcaaaaataagaaaataaatacataaatgcggataataatattttgggtctttttatggcacctcttgccaccaggaaatgtatcagttattaagtgcaagctctttttgctgctatatgagtgcacgcttataatcccacacctgaaccttgtatagtctgggccttaggaactgtcagtatttagagaagaaaaatattagagttctctaaagggaagtagaaataagacatgatggcatccatcaattctgccccagaaggatcactagcagctacatttgtttactatgaatgaaaacaacctgagtgatcaacttcactttcagaatctcagtgaatttcatatctttgtttcacttacaattttgtcatgcatgagatgacactgtggtttgggctgaagaatgtgttgcctgcgcaaattgggtatgtagtcagtacagtgtaaaacctgaaaatctgtacctggcttctatttcctgtcctgccacttgctggtggtgagtggagactgtcactcagctggtctgtctcagcctctattttctcatctgtaaagtgggaacatcatcatttg

SEQ ID NO: 5031 - DNA, 2300 bp, Homo sapien
caggtggaggtggagaaaggccagcttgcatgggtgttggtggcattgttgtcaggcctgtggctctcagtactgattgcttctcgctgaagcttgcaaagctggggtgatgttcaagaccttaagtgagaagggtgtgggtaaaaccactcatgatgcaccatctcccagccctctctgggagggtcactgaggccatcctgagtgtgccatgtgctctctctgctagtccaacacaacatccagaagacagtgcagactctctggcagcagctggtggcacaaaggcagcagaccctggaggatgccttcaagatcgatctctctgtgaaacctggagagagggaagtgaagattgaagaggtcacaccgctctgggaggagacgatgctcaaggcctggcagcattacttaggtctctatccactcggctccagggaatgggaactcctgggtctcacagagccagactcccgcaaggttcaactcagtgcctagagccttttccacctggaccctctgtctcatcccttaagtggatgggatttatatcactgaaatcttatgtatctttcctcacaaataatgaatatcacatggcaccttgggtgaaagcaaggccacaggagccaaccaagcaggaagattccagtaatttcttagaggaagaggcccatgtggaggctgtggcctgggctcaggaacttgaggttctaggtcctaccctgttatccaccgaccagctttgaaacctttcactgtcatgcaatgtccttgagcttaggttcctcatgtcctgtcacttcatgaaatgaaagttttcatccccaaaatattaatgtcccttgcattctattctgttagtgacctcaacatttttatcatattagtatttggtactaataaacaacatttttgcatattagtcaatgcaactgcaagaatgaatttttaattttgttttcaaggtgatcactgctctcaacttacacctcctatacttgtacatcttccagaatcacaaaatgtgcagtgattcaagagttagttatttccatgtatattgtcccagactgtccagtggcccagaatctccttctaaattggctttataaattagtcctggcaagtgtatatatacatatctggttttgtccatttatgctgctataacaaaataccacagactgagtgatttacaaataatagaaatttatttgctcagttctggaggctgggaagttcaaaatcaaggtgccagtagatctggtgcctgctgagggctgtgtctggcatctgcttctaagatggtaccttgttgctatatcctctgtaagggagaaatgctgtgtcctcccatgttggaagagacagaagggcaaaaatggcctgggatggcccccttcagcttttttataagacactaattcattcatgagcgtagaaccctcatattttaatcacctcccaaaaggtcccacttcttagtaccaccacaattgggattaagtttcaacatgaattttggagggaacacacattcaaacgatagcaatacctgtctactttcatgtacttttaaagtcaaaatgtcagattctatttcagagaaaagtaaaataggatatacatatccatgcacatagagtggaataaagtagtaaaactgtaaagcttacaaatgactctctttttgcccacagtcctatattgaatactttctatgttccagggtctttaaacacatcttatgtaatattcatgacccctcaactggtttagatattgttatccccatttcacaggatgagaaaactgaggctcagcaactttagttaatctgctcaacatctcattgtggatcaacaagccgtggagctaggagtttaggctaagtctggtgacctcaaagcccacagtgtttcttagccaaaggaaggtcagaagacggcagtgtgagcttgtagcctgggttgtttctctttttggaggcaaccacagggggctcatgcccctggctggccctttgaaagccaagctagctataaaaatagtgtgtgctctcacttcacctctgacattctttgcttcccttccctcagcatctgagaagaagtcactggcaagtcgttcaaatgttgcacaccacagcaaagtcactttgtggagtggaagcctgtcctcagccatgaagctgatgcccgggcggcaggccaaggaccctgagtgcaagacagaggtgagcccagaccccttttcctcagaaaagtatcaggcatttgcttcaaaccccatgagtc

SEQ ID NO: 5032 - DNA, 2300 bp, Homo sapien
ttattttgttgcccaggctgaagtacagtcatgtaaatcatagcccacagaagccttgaactcctgggctcaagagatcctcctgcctcagcctcccaaatagctgagagtacagtcatgcactaacatgcccagttatttctttaatttttttgtagagactgggtcttgctatgttgcccaggctggtctttaacttctggcctcaagaaattctcccaccttggcctctgaaagctctgggattagaggcatgcaatacaatgtacatcttggagtttcttattaaccaattggagtactacataaaatgctagcactgtttgggatatgaatttaagaactgtagagaaacaaaatgatcttgttttgaaataggattagcttcattcacagtgataacactgattacttaagctgagtaaggtaccatattaagctcttgaaaatattgtcccatttaatcattctagaagcccgtgattattattatggtactattattaaccacatttgactgatgaggaagttgaagatcctccagattgaactgctggtgattcacagaaacatgatggatgatcaggtccatcaaatgccagaaaccacctgctgggcactatcccccaccccaaagccatgctttcatgggaatgcctctggcaagttatgagaacaatttactcatttaaaatggccaagatttgcaaggcctacatctataagtcttccagttttttgaaatgctagcagatatcatgcactcataaaataatagcccctcagcaaagtaatctagctcccatgctcaaggaagtctttggaatccaacagaccaggtttaaatctctgtttggccacctgttggctttggagaaggcacttctcctttgcagacttagcatcatcatggggatgatcgaaaatacttgtggtaccactgggtagaggaaatgagataaagcaggtgcagggctcagcctaacacatgataatgagtgtcttttctgttcatgttgttatgcttcttgtcattagcacttcaccttttcattttctgaaaacattaaatgtgggacaaattccataaaatatttgaataattgcaaaagtgtatcctgcaaagttgactctactgtgcaaactgaactgaactgcttctttgacaggtgatgcatgtaactttaatgtggtctataaatgcaggttgggggtatctatgtattattagaaaagtttgagtcatactgtagtagcagatgtggcagtcagagaccacagatgcaaactgtgaggatcttatagctattaaatgagattctttgcattactatgaaaggttttagctcctgtgaatattctagaatctctgaacattctggaatctatgacattaggattgaaaggcccttagacatcattcaggccaggtctgtcatttcgttggagattctgagatccagagatgggagtcacttgctcaaatcaatcagttgtcttgagggcttctaattcccactccactccagttcaggcaactggaaaaaagtacattcaaattcccactccactctagttcaggcaactggaaaaaagtacattcagcttcacttttgaagggtgggattgtggtgagattcatgtccatttggtaaaatagctgtccagtccatgctgatgagctgctacaggaccttccagacctgttgctttctgtccatcaccagtagcctcatggctctgaaggccaaagggcagacaactttctcctcccctaacttggattaagatatcttaaagctgagcaactgtttccttatagtcctggctgcagtgggtaccctacacattctgagggtgtagagagaaggtatctttctcaaacattcatgggagacttggcttattcaccccaggaggtttggggccaggcccataaggcccataaggcaaatgtatccagggtgactctgtttctgctccccagaggcgaaaatgtggcaacatcaaggcagccaacgcctgggccaggatccaggagcagctttttggggagctgggcttgtggagccagggggaagaaaccaagccctgttccccatgggaactcgactggagagaaggaccagctcgaatgaggaaacgcatcaaacgcttgtctcctttggaggccctgagctcaggaaggcacaaggtaggagtcaggcgcagtgggacagtgctggttccaggtagggcctgataggaaagcagctcctgagcttccccatcacatgttgtttatatcaggctaagataac

SEQ ID NO: 5033 - DNA, 2300 bp, Homo sapien
tctgacccttaaaaatccatttcctgttccttggaccagaaagagaggctcttgttggaaatcagaaatctttctgtcctcatctggtgcaaagttttgtgttctgggctgcccttgagtccaagccaagagaaacggttgaggggagaaaaaggagttcaggaaacttgtggccagattggtctttactttgagttatggatttcttctccaatctgcctgatatcacttatctcagagtccccagagtgcttctctgtgcattctgcccaaggctttacttgctttcaggagtttggtgggaccaagtgagcatacaaaatcttaactggacttggactccactttgttttttaagctgttttatcctatctggtttctcagagctgaatgatatagacagttcagtattggtgaacatggtgctggctctggaaaccagccaattatgcccgaaaatggggagtccactatttttaaagactagggtcagcttacaaggcctgtgtaaatgaacatcaatgctgccaagagctaagaactgtcattggtttactgtggagaccaccatctatcccaggcggctgtgatccatcaggcctttcgcagggtaggaccctctgacccttcagctatgagtggtgacagtgggattttcagtaggtgtgagacaggcttgtacacatttccctttgacactgggtgaggaaaacatacaactatattcccacacagcctgattgctcaatattcatgtgctatatcaacttgggttctaataaaaggtacaggtgatgaagtacagaaactgtagagcacctctccctgcccatccctgcagggaacagaggcaatgcaagtttgtgtctcccaagggcatacttctgcctggtttggaaatcttggtccaaaaaaaaaaatcagcaagcaggaggcacaggaggcctttaaaaagaaaagggggtcccagaaccaaacagaacagagttgcgtcctcttcctggctgcagaccttcctcacttctgagcctcagtctcgctatgatagggtaatgctgtggaccttgttattgaggattagaaacaatatgtgtagcaatttttaataactaacattaatcaagctattactatgtaccaggcactgttataagtgctttatagtattagataatttacgccccctcatagctctgtaagggtgtctgttttcacaaataagaaaacacaagcactgggaatttaagaagattgtgagtagagtagagctggacttctaagccaagcatgcagaagccagaatccccatcacatcacattgacattctgcttccctgcactgaggcagtcacggccatttatcaagtttctgtgcagaggagttgaagtccagtgtgaaggatgagagaatgggcaggagatggaaaaggcagcattctccatgagctttgcccgcaccccccatccccctgtgtgctcatgatggggagttatggtgctgctgggcccagcaatggcacaccctgatatccctgggctgagcaacaggcttttctgcatggctactgttggactgtagccaaggcctcactagttcctctgggtccatgaggggaagagggatgtgagaagttggtcttagtacccaccttattctctaagatccaggcttatgttggctggaaaactcagcagtccctccccaggaacttgtatgaaaacttcaggaaatcctagcttaatgcaggggtctaggaaggggcagatatccaagaacacacacacatggctctgggttgggggtacgtgacagtctgggacagtggagagtatttataagtcggggcatggcacagctagagggacatttagtgtccttcaggctgaccctgcacctcctattttaacatccaagaaaatcaaagtctgaagaagtcacacagtttgctgacaatctatggctgggctgggtccactttgccctgacttctctccgcaatcctctttcttgctttttaaaccactgaagagcaaagcgtcatgacgtgggggagcccagtgccctctggcatctcctaaccagatgttttcttatctttcagcagtttttcatgatttttcctcacactgatcactatccaatcagaacaataaacttctaacactcccttactaaaagaacatggttaagggtgagaaaggccccaagggcaagaagatcaccctcaaggtggccaggaattgcatcaaaatcacttttgatgggaaaaagcgccttgacttgagcaagatgggaatta

SEQ ID NO: 5034 - DNA, 2300 bp, Homo sapien
ttggcagcatgatggtaaaaaatgagcattagtaaattgaccagattgttatggtacaactatgccataatatgaggctgtacatacgttaaaaatctgaaagttggctggcacagtggctcacacgtgtaatcccaacactctgggaggccgaggtgggcggatcacctgaggtcaggagttcgagaccagcctagccaacatggaaaaacctcgtctctactaaaaatacaaaaattagccaggcgtggtggtgggtgcctgtaatcccagctactcgaacccgggaggtgaagtttgcagtgagccgaggtcgtgccactgcactccagcctgggtgacaagagtgagactatgtctcaaaaaaacaaaacctgaagtttatacaatacaaagttactgccagttgccaaaattatgagcacttttaattttctttttttttcttttttttttttttgagacggagtctcactctgttgcccaggctggagtgcagtggcgcgatctcggctcactgcaacctctgtctcctgggttcaagcgattctcctgcctcagcctcccaagtagctggcactacaggtgcttgccacaatgcccaactaatgtttttgtatttttagtagagacggggtttcactgtgttagccgggatggtctcgatctccagaccttgtgatccaccctcttcggcctccgaaagtgctggaattacaggcatgagccaccacacctggcctgagtgcttttaattttcatacggttttacatacctatattttaaaatgtatttatcttgtatattttcctctttcaaatattgattttatttttatgtgctttatgatttttatattatttaatttcaattttaaattatgtattcacatatattctaattagaagtatactgggtagtagaatttgaggtaatttttaattttctagtcatcttcattcagaaatttatttaatccatttgctgtctacattaaattatgtattttattttttggacttaaaacatgatatggtaatgtttatgtattaaaaaatgttatagttagctctcatttaatgatttgttttgtttttatttctaaattgaagtcattttattttgctttttttgtactttccaaaatttttactacttaaatttaattttggatttgaaattacttatttcacttatttgctagttaatttattttctaatttatgactaggtggaaaaatttagagcatttcaatttcttatttctgcatatacattttcaaatttttttccaatgctttatcatctgcataataattttcatacttaatttgttttcctcattttctcaatttctggaaatttaatgtaagaaaaaaactgaaaaaaaaaagaccatagatgcacaaatagataatttcagccttattcatgataatgccaggctggaaacagcaggaaaagcaaagcacaaggcttactgctgtgtgttcattcaggatgcagatttcagaaactacacatcagcatttaatgacatacaatcaagtaagagaatatgattacagggctgtatgattttatgagtattgtagctactctgatttaacagtggaaaaagggtgcaaagagaaacaaaagagtaacaaataattaaattcaaataaatagatgaaagacagccctctcaaaaaccaaagagcagaaaaaaaatacttgcacaaattcgaagaaaggggagtgatgtttcatgaatgctattaaagtgaaatgtgggtctcttttaagagaaatgtgtggcttcttccctgtgtagccacatccgcttggccgttgccatagacaggggctctgattcgatcctctcccactgactgctgggtgaacagcaggaaaagcccaactgcaggaatcacagggggtgagccctggggttccctcctcgtggcaggcaagccaggctgtcgggaaattagagtgtcttagagaccctttcagccttccgtcctctcactttgcaggctggtgtcaagactgtgctaatgacctccaggtcctaagtctcttgttgcctggtgacaaagtttcacagttgaggaggagaagctgggactagcagggtaagttttgctcgggcggcggccctgcgcttatcgatttactttaactgtgccaaacaactgcttggatctctactttttctctttctcccctcctttgagtaagcagctttggaaatgcctgttttcccagtatgctttatttacaaagcccaggcaacagctaatgcattatttag

SEQ ID NO: 5035 - DNA, 2300 bp, Homo sapien
gtcctggatccccctgtggaatgatcaacacaactaacatagttgctaacatgagccccagggggcttcctggcttactctccacagtgaaggcacctgatgccatctaccaagatggtgccatgggtcagcccttgtggggtgaggcagtcacaggtgaagtgggccatggaatttgttcctaaaatcaatgtgtgcaggagaggggcctgggaaagaaaggagagagagacacagggatacagacacacagaaaggacaagctactcttgctgtaacttgagttcagtgacagagatgatggtgtctgggcctcatctgggatctggactgagatgtgtagtgacaggggaggttgatggtgagatgacaagaacagatccctcatctcttttagcctgcacccctgcgccccagcaggcagggaaaggatggggagtaaaactccacagctggaccagggtgatttctgtgcttctatggggacaaccaaactatggagcagtgtcctggccacccgggctctggccatctggagaggtgctgggccatatgtaaagcacacaaggtggctgagccacttgttcagatgagcctggccagtcctgcgtagggctgcttggatggcagaccttcaggatttgggagaaggagactcagtcctttgtgacctctcatcccttcttaagacatttaatgcagcaaaacgtttctcactagcactggctgctgcttattgcactaatggtccatcggaggctgaggcatttcaaacacaaaacctactcacatgttgcaaagtggtggtttgcaagccttttttgtttaggtcatactaggtatttaaaaccttgattatttatcaacttaaaaattaggagatttctcctttaaaaaaatctggatttccaatatcttttggaaaacggtgagatctggcaactaggaatttttctgagctggcaagattgtgaaagctgagtgtgggtctccgtgtgtcccctccagcactcactgggatcttaagaggggccatttcactcttgcccctgcttctccctggcttttgcaggcatttgagatagtgacacacttggcccccagtggagctttgaggattcactgctagtggaaagaaagggttatgagccaggcgcagtggcttatgtctgtaatcctggcactttgggaggccgaagcaggaggattgcttgagcccaggagttcaagaccagcctggccaacatagtgagaccctgtctctatcaaaaatgcaaaaattagcgaggcatggtggcacgcacctgtagtcccagctacttgggaggctgaggtgggaggatcacttgagctcaggaggtcgaggctgcagtgagccaggaccactccactccataccagcctgggcaacagagcgagattctgtctcagaaaaaagaaaagaaggagagatacacaggtacctcctcctataaagaaatgcaaaccccagcaattcttggctcctctgctaacatacagaacctgaaaagaaaaagtttcccagagcacctggccctgaaactggtcctgttttctctgcagtatattccaagagagggaaggggcgctcacagcatgctttcactgcccagaaaggagtgaacctccaggaaaaatgagcaagttcctctcatttcctccctgaacagatgacttctaacttcctgtaaaatcagtttgattctaagcaaggaccctgaactattggagtacataatgcagtttaggagccaagtgcctcatagacaacacgagttcttttaaaagtgtcttttcagtagctggaggccatgttctgatttgggtcaacttggaacaggttgagtgtgaactcagtcttcccctcctcttatttttcatttctccctttttaagtctttgtggatcactggctctggggccataaaaccccagcctgccagctaaccaccagaggcaggtcagaccaaatgactgtaaatcaataaagagaaccataaaactcaagagcgtggctcctagggcacaagcgggtctggggagttaactccagctgcacatctgccttctagacattgaacttggcaaatccgaagattttccgggatctttcaaagcccatgggggctcagaccaaggaaaggaagctgaaatttatccagaggtttaaagaagttgagaaaactgaaggtgagtagatccagcttgatttttggtgcagtgttattcatcgggatgccctaaaatgatagttgataacaattaaggtggtcacctag

SEQ ID NO: 5036 - DNA, 2300 bp, Homo sapien
acccacgtctctctgtctttctgtctgtctctctcacacacatacacacacagacacctctttcaggcacacacacacatctctcttcctcttcctctcttttatacatgcacacacacatgtacacacacataccttctctcctcaagagaccagtggagagtcccaagtttcacaaggaaggattacagcctctgtgctttggccactggtcctcctaagcagggcaggggactaagctaagcactctaagcaggcagccagtagctaagaacatgtgctctggggcagatggcccaggagtgcattccagtcctactgcttcctgactgtgtgaccttgggcaagccattgaacctccttgttcccacggggattggaatagcattgaatggatgctactacagatttgtattgatgcttagataaatgagcctgcagagagttggtgaggaaaagatgaaaaacatgagaaataggttgagccagtgaagggagccatgtgatttagggagggaagagggtcactctggccctattattgagaaacagttcttccagggaccaggggctcctcaacaaggccagtcagcaagagcgcaatgagatgggccaccttcggtgcccagcacatagtggtgattattagtccatctcttctgaccataattcagtggcttccttggctgccaccaaggctcagagaggctctatagaagcaggagtccactggggtgggggtggttccactggggtgggggtggtcccaaccagcccaggagggaggatctcccagatggaagcagaagagagggtgaggctgggttcctagggccatgtatgtatgaagtcgggtgccagtgtcatctgaggacatgcactgccttggggaaatcccactacactgaacaacatgcaggtcccaaggagtatgaagttaagttttcaatggttttagtggtgtccttttttatccttgaagtccaagaacagtgtcattggcacaccccaccctggtagataaggtgctactgctcttggctctggggaccatgcctccatttgccccaggactggggatccgctgctgcattgaagtccctgggcagtcaggcacagcccctgccctcatggaaagggacatgaggtgcaaaccacatcaacagtaacaagggagctcaaatctcccatgtgggctccaggagactgatgcagatcttaccagccacgggtcctggggatccttcctgaggctcagtttcttcatgtgtaaggtatggaagacaatggccctgccctcaggcttgtgacagtgccatgaagtggtgtctgtcacacaggcaggcaacaagccagcgctgaggcaggagtcctggcagatgctggtgccactccgagcacacacactgggccttgctttaaggggcctggctttactctctccctttgatctgagcagccccagaaggtaagggccattgatgccacagtcccttccctatggggagagacatctcacagtcttatcctggagcctttcctgaatcctgctccctctcttcctcctgggtggtagggtcaggaagagggtggttctcccacttcacccagcacagggcaaggaagggagtggcccccaccaggaggaaggaaaggcccctacgtggtgggtatggtgtgcacagtcttagaaactaggctggcctcagtgttttgagtcaacaagctgcaccaggctctgtgccaggggacacacattgaaaggggcatggttttctctactccatgggaagaggctagggtctgaagagatggaatgacttcaccagcataaccagacttggaatgaggtctgggcagctccaaatcccgtgctgtgagccatattccagctggggctgggggtggctcccagagtggagctgagggaggatgggaattgtgcctccctgtgactcctgccccggggcccggctacagtgggtgctgtccttctgtgcataagttcaagtccagtgtgtctgcctgtcactcctgcccagggcccagctgcagtgggtgctgtccttccatgcttaagttcaagtccagtgtgtctgcctgtgactcctgcctgggggcccagctgtagtgggtgctgttcttccatgcataagttcgccatactaactggggtgtagatatgtacctcttttctctaggctcagagtcccccaaaggggccattggccacattgtctctactgagaagaccattctggctgtagagaggaacaaagtgctgctgcctcctctctgga

SEQ ID NO: 5037 - DNA, 2300 bp, Homo sapien
aaggatcagatggcattgccagggccacagccaactgctgattgccagcaccacctgagatggcatctcttgttttaaatagatgcactaaccctgaagattaaggccagaggggcagactgactagagaagtataaggtctgtctctgaatgccatggtgcccacctatgagaccctgaggccgcaggacaagaagaacaccattctagagggcttccagccctttcacaaggtggacctgtactgatagagaaacacactctctaagaagtgcttactcacccttttccaaaggagcacaggtgttggccatcagaagacacactggagcgcatgggcctcttcactgtgtgccaagctcagtcacctctgattcagcccctgaaggtgtctgctgccaggtgccctcagggtaggagagtgggaagtacacgccaagctggaaagtgtgttctgaagaccctcctcttgccaagtgccttgcccattgcaaccttgtgtgtgaattctaatgggtttgaatgggggtcagggtgcatggggaagttgctctgtggacctttgggacacaggaatcttggacttactggcaggggatccattctgaaagcaccatcctgtcaactgtgttattgaggacatttcttgatgtgagtatagtctgggtggctatttactgcccactatagaaattgtttgactatgtagtggaccatgtatatatgataaattatctattttaaacacagctggggtatgagttgtgccctctatatagctgtgtgaacttggctaaatttcttatcccctaatgacctcagactccatgtttgtgtaaagacgacttaacttcccatagaattcttgagggtaaaatgggataatgaatcttgccagttctagaaactgtaaattgctacacaaatgctctgtgttgacattcatgctaaagccagtctgcattttcaaaatgaaaatttcttcactatttaaggctttcattgcaataactttaaaaaccaaatatttgtccaccaacttagccctacagtaatgttcccaaagactcatgagagtttatggtttattggaaagggtccaaattggaagcagatattgattttctgggagcaaactggtctgcctttacaaagtggaagttcaccctctctggataacacctgtgtctcattcctccctctctgccagatctcgaaggcactgaataaaccatgcagcttttgaggaagaaagaaccatttggaagaactcactagaacttctttgagcatctctttgggaggggaggatatatggttagcacaccatttatataataattatcacagggatttttaattttatcatggcagtgttctgacagatgtatagtgttttgagggcagaggatgatctcctaatttgcccaaagagccttatgggtttgtggggctctgggggtgccaaatgggaaggagagggggcacatgaaaaggaaatggcgggaagagggcaacaggccagggggtaatatcttcccaggccccttaggcctctacagaacggaaatgaacttcattcacccccaaacccacccacttaaatccaaagagagcttagggttattatgcatggacaggaacacattctaccaagaacacatgctcttaagagctagtagctcccagttagagtcaaaccagtcattgttatattatagattgaatccagcctctttctcccaaactgtggtcatcactgcatgaatccacactaaggtgtgtgaatgggaacctgcagattatctcctcctactgaaaatgctgcccaggggaatcttggaagctatggacagcatccaggcagagctggtcccactgttatctccagaagcaaatgcccaagctgtgctcagaactggaagcaatggatgacttgtatcaggtgcttgtttgagaggatatattgacattattgccatagtaagcttaaaaaaatgtgcccactcattcattctttgtccatggaccactaatcatgcattgtcatttccaaagataaggggaaacatatcacatatcattgaaatagaaattagggaaagtttgtcaatttgttttcactataaggcatcaatggcagaaactacatatgagtaattttcaaaatagaccattgcttaaatgtttaaatgaagctaaaagaagtatgaacccattggttagagtgcagtggcttctttcaggcagacagcagatgctctcagatttggtggtgagttttggccttggcatggttg

SEQ ID NO: 5038 - DNA, 2300 bp, Homo sapien
ttctgctctgttttgcaatgagagttggatatttagcaatatacaacgaccaaagcaggagttgcctcctccaagggtggctgacacatctaaggggtcccttctgcttttcaccaactgggagagtaaattgagaccagcaggttgaggtgggaggttaccaaggataccaaatggccctgccacatctctagctgctcttagtacagccatgtcaagacgccattttacatgtgtcaccttcacttgacaaatgaaattcagagaggttgtgctgctccaggacccaaggttgttgcccagccagagcgggtcacagatccactttcagaaccagtgctcctcttcagacatcctccctcagtctgccaaacactgccccaggctccagggctgagtcaacagtctgcagtcagagtccaagttcccagttcagacatttggtgccccacagaaccttgtacgggtccctggtcttctttgagcctgaatttactaatttgtaaaatgaggcctaggacattatgtggatgggacgtgaggctcgtttgctcatgtataaaattggtttccaaactctggtctggaagcctcacttggttctagtttgcattcctgggctgcaggagtccatctgaccccagttctagtcctcacttcttgtccttggcatcatagccaagtacctttgttgccaactcactatcgggtcctcaggcccttccaccaacccaaattatagatggggctgctttctccagcctggctgccttgatggtcagtccagtccctgcagggccctggtccacagatgagtctcctagctggaggatcccatggggtccagagacctctggaagtgcctggggttcagagatgtcacagagcctttgcacccactggcctggggtgcctgaagaggatggtccctctggggaatgccctggggctcacactagtgggctgcaccctctttccatgccacccacacctcctcactcccttagagggaaggagatgagggccctgtctcctcctcctcctacagggacccactcccaaccagggcccacctgctagctgctgctacccctcactggaactccacaaagacctctcctgatagacacacacagaatagacctaacatgtgcttttcttgcttggagatgggttaggctcagaccctaagtttagaacagtggcaaagagaccaggcattggctcagagtgacagggctctgtggttgtgtgacatgggtctctttcatgtggctgcttctgcttccttatgtatagtaataatagtagtgttcactgacacccgtgaatcgggtgctggggcaatgcgttaatgggaatggtgtaacttggtcttcctaaacaccccagaaggggtgggcccatttccccattttacaggtgcaggaaactgaggcacatggagattacagaactgtcccaggcctgaccgcggcggggttcagtagcatctggaaaatcactttagcccaggcctggctgaggcactgtaaatgggcacttttgttaatagtttccacatattctgggctggtctgtgtggaccctctcagttttccaagggttagcacctcggaccccgccctccatttcagggcagcagaaggggcttctcccccctcagctgcttgttggctcccgagggtcctgtggagtgagcgcaggaggcccacgaccagcaggtgagtctcaggccagaggttccctggacgcgcccccaccccctggctcccagatcccgccttcccttaggaataagtgcatctgtgggcagaggaccgccggtcgcactgcagctgtgtgttctgtgagtcaccagcgatcaccttgcagaaactcagttttctcatctgggaaatggggctgttgaaaggagacgccacagatcctggagcgaaccgatcgcgcggcggctcccgcgcccggtgcgggcctcgggacccagcagccccggccccgcgtggcaggcggcccaaggggcgggccgggggcgggcgcgagcgcgggcccggggcgggctggcggcggccgggccaggcggcggcgctctcccgcgtcacagcgccgggcggcggcggggagatgcggctgctggcactggcggcggccgcgctgctggcgcgggctccggctccgggtaagcgcggcggggccaggcgggagcgggaagggtgggggccgggcggccgcgccggggaggccggggctccgggcctggtggggaggccctgccacctccgggcgcgggcggggggcgg

SEQ ID NO: 5039 - DNA, 2300 bp, Homo sapien
agcagaagacttaggcttcaggaaaattcccattctgcattcttaataacttagaaataagggaataagacctctgtaagtcctctacagagacacaaagactcccagcttggagcaagtctagactaaaagtgttagagaagcaatggattgtaaccaaagtctagtatgagctggtctgacacacgtggcagtttgactcctgtggaggtaaaggcatcaagctctatcagcatgcgactcctgtaaggctctgactcacttcccagcccttggcatgagagcccatcacccatcaggagaatctgaatggcattcagttccatattcacagaagaggcaaatcggtttcacaaacacccatagtcacattaaactaatgttgttagtttgagttttattgctgtttgcaattgtgtttaatttacacatttggtttttgttttgcacttgtaaagcaactataagcttagctgtttgtgtttgtgctgctttatttccacagcaataactgaagtcaaggcagggtccataggaatgtttcttggcctttgaaaagaatagtagtcaagtttgccaaacattgctttagggaattctcactctcttttcccaagactgatggcaccccagctcagtagtccttgagggtgtgcttggagggactgcagtaagtccagcagcagatggtacataaatcctcaggagtcaggagtcatttgtgagcctcttcacagggtccttgtgcttggcccgagctaggtgttagcatggcccagtgcagagcagcaggtaacacacacacacacacacacacacacacacacacacacacaaatgtatgcacacacatgcacacatgagctctggcttctggtacccaggctgtgggctgtagacctgacattttcatgaatctctttactctgtcttttctaaagctcagcacatcctctttgtccctgtgcccagctcatttttctgtgggaccttctggtcacagggagggaagcatttgaggctgaaagtagcaccacatccccacacgcctgactctttctgcaaaaccttctgacatgtgcccacatcaccctctgtgctcaggccagagaccaccctgtgttcaccaaaagtgagttgcttgctcccaaatgtatttatgctattaccagcatttacatcaacaaatgtggacagagtgctcaccacgtgcttgtgcccctaaggaccccacctgggaagcctccctacctgaaatgtggacctccctgagcctttgtggctgctgtcttcctgtctctgtctcctgctcttcagaatctatattcattttttcaggttgccgtaatccacaggccaggtggcttaaactataaaaaacgtattgtctcacagttctgtgacacagttggagatcaaggtgtcactgggttggtttcttctgagcttcttttttccactcacagatgccatcttctccttgtgtcttcatgcagtcttctctctgtgtgtgcctgggtcctaatctcctcttcttataaagactctggtcatattggattaggcactcccatatgaatttacctctttaaaagccttaactccaaatacagtcacattttgaggtgctagggattaggattcaacatatgattttttgagacagagtttcgctctgtcacccaggcaggagtgcagtggcatgatctcagctcactgcaacctccgcctcccaggttcaagtgattctcccacctcagcctcccaagtagctgggactacaggcacccaccaccatgcccagctaatttttgtatttttagtagagatggggtttcgccatgttggccaggctagtctcaaactcctgacctcaagtgatccgcccacctcggcctcccagagtgctgggattacaggcgtgagccaccatgcccagccctcaacatacgaattttgagaggacacaatttaacccattactgagcaccacagaaattctcatgaaaggtctgtcaggactccaccattttgacatgaccctcgttttcccccacaatcccccttccaggaccccattgtgatgtcacatttcaggtcaaagcattacatgttattcttaacacctgccacttctctcttcccacctctatctgccttattgaacttcatctttccttcattctcttcaacttccacttcttcttgtatggtcctgttgatgccatcttgtttccgtccccagactcatcatctttaccctctgtcaactgagttcccaccctggttctctctcaaga

SEQ ID NO: 5040 - DNA, 2300 bp, Homo sapien
aagtctttgtatttatttgttaaaaaagggtgcacttacactatttcctcttttagccaggggacgtagtcttctgtttaggtcaggcgtgactttcatggctcagtagagcaccgtggtgtcttcctccacacagtggcctcacattctagagaggagggtattcctcggtgctgggtgtgtgggggatgttgatgttgcttgtggaatattgggattattttcaatccatcacctatctgaactgtttagtatttgggattcaaaggaatagagttgatgagactgaccaagggtgggaagagattagccacagagggaagtggtaagaagcttgttggaggaaatgagtgaagtgccagcgtgttgcagagcagagagatggcaggtgaacattttatcaggctgattgaggctgaagcgtggtttgtgcaaatggagaaggaagaggcaactcccagagtcctagtgggagagaaccaaccaccctggaactgcagagatccagggagcacagaggaggcagctcccagagggagtaacgcctttttcagcccaacgtgttcatcagctatttactcattatttcctgagtgcttgttaatatgtaaaacattgatctagacactagagatataatgaggtggatggaacgaaggaagtccctacctgcctaagcttacatctaaggaggagaagacagatacaggtaaacccatgagatacacacacagacattatatacagcctagggtggtaaatgctatcatggaaaaataaagcagggtaaggtgacagagagttgtagggccaaagaaagctcttttcctgggggtgccaggcaggctcctctgaccaggtgatgtttcagaggagaccggaaggagagagagccacacaggaacctaggggaaagcctggaacaggcacaaggaagagcaagtgcgagagcccagagcccgtgaggggaggatgccgggcatgtccgggagcagtgaagtgtctggagtcacaggaactgagcaagggagtgagtagaggagaggggaggggaggggtggggtggggttgtggagggttgaggagctaaacagggtcagcgtggggacgtaagatgggggagagaaggagagattttccacactgggaagcagggtcattttatgttggctgctgactgtatgtatgtgagcctatgtatggttaattaatctggcatgaatttgtgtgcatgtatgtgtgtgtggttaagtaaatatgtgtgtgaatttgtatgtgtgagcatgttatgtgtctatgtgaacacacgtacatatgtttatgttactgtgtgtgccatatgtgttccagcgtatatgtgtgtctgagtgatcatgtatgcgtttctttgtgtgtgagtgacatagtatggacatgtgtccccttcaaatctcatgttgaaatttgatatccaatgtgagaggtgggcgtagagggaggtgtttgggtgacggggacaaatccctcatgaagggctcagtgccaccctcgtggtaaagagttctcactcttagttctgtgagaactgagtgttgaaaagagcctgtcacttcctccactctttcttccttcctctcttacccatgtgatctaaacacacctgctccccttccccatttgctgagaatggaagcttcctaaggccctcaccagaagcagatgctggcactatgctttgtgtacaggctgcagaaacatgagcccaatacacttctttcttttataaattacccaacctcaggtatccctttgtaagccacacagatggactaagacagcggttccatgcatgcttaagtgtatacaagtgtctctgtgtttatgtgtttgtgtttttatgtgtgtctaaggagttaagagtatgtgtgttttgtgtttctgtgtgtccatgataatacacaagacagaaaaggagttcccatggggaaatgagaacatgttgggaagcctctcctggtatccagcctcagcctctgccctcgccatgggtcacagaacagaccagtgccatcgatgaggtcacacagtagagctaggatcttagcgaccatggggagctcagtgtccactctggctggggccagctggaggccttcagtacagccccagccaactctcactgaacagctggagcaccgacaccctgggcactcatttcaaatcatgaaatgctacttcacagatcacaggggagaacagtcacccaccgatgggaccaccctcagcttgaccagccctgagtccactgaggagagtgtgga

SEQ ID NO: 5041 - DNA, 2300 bp, Homo sapien
gtatctcatgggtttacctgtatctgtcttctcctccttagatgtaagcttaggcaggtagggacttccttcgttccatccacctcattatatctctagtgtctagatcaatgttttacatattaacaagcactcaggaaataatgagtaaatagctgatgaacacgttgggctgaaaaaggcgttactccctctgggagctgcctcctctgtgctccctggatctctgcagttccagggtggttggttctctcccactaggactctgggagttgcctcttccttctccatttgcacaaaccacgcttcagcctcaatcagcctgataaaatgttcacctgccatctctctgctctgcaacacgctggcacttcactcatttcctccaacaagcttcttaccacttccctctgtggctaatctcttcccacccttggtcagtctcatcaactctattcctttgaatcccaaatactaaacagttcagataggtgatggattgaaaataatcccaatattccacaagcaacatcaacatcccccacacacccagcaccgaggaataccctcctctctagaatgtgaggccactgtgtggaggaagacaccacggtgctctactgagccatgaaagtcacgcctgacctaaacagaagactacgtcccctggctaaaagaggaaatagtgtaagtgcacccttttttaacaaataaatacaaagacttgccttacaaaaacaagagggggcagccagcacagaaaataagtaggtcattgggggatggaaggcagttcagagagagatgacatcatggagaattgttaagcggcaaagtaaacagcaagtctgggaggaaaggagactcagccaacaaattatgctgaaaaattatattcgctatttttttgaatcaactttggtctcacttcatgtaaaacaattaagaatattttcataatggttcagagcttacgctttaatgaaaaatgtgtagaaagaaaatatgttaacatttgtaattacaaggtgctttttctcaacttaaacaatattagtcttcgcaagcattgagaaactttgtcatcttttctaatttcactgctttaaaaaactcactgtttcaatttgcattcctctgcttttcagtggaactggaaaaaaaagcaaatgagcaagcagtttccaggggaagaaatgcagagggatgataaatatatgagaagatgttgagtcctactgtaataagggagctacaacttaaaaatgtgtagtatacagtatagcacttttcacccatgagataggtaagagttaaaaagatggacaatacccagtgctggtgaggacgtaaggaaatgaacacttttattctctgttggaacagtgtaccttaactttctcaaaaagtttggtggtacccattagaattaaaagtgggcaggcacttcctaagcagtttactatcatctctttcctagggaacagccacattacatgatatgtgcataaaatagcacctagagaaatatttattgcagcattgtgtataatagaaataaagacaggagactttcctaagatccatcaaaataaagaaactacaacataatcaaactgtggaatactacaccacgataaaaagaaagagatctatacatactgataagtgaattcatgttaaatgaaaacacaagatacaaggaatagatagatgaccccacctatgtaaaaatcaaacatactccctcaaaagcactgaccaaattctatattgtctatgtatcaaaaggcacagaggagatctgaaaataatcacacccaagagaaaacagtgttgacctcaagaaagaggaaaaagattaggtggggctgtgtgagaccaaattttccaaagatggccaaaccaatctatatcacaacccacatgctcttctgataacacgacagcgtccttcttcctgaactggggtggattttgtaactgcctcaatcaacagaatgcacaggagtgatgttttgtgactgtcagtgccagatcataaaagatgtgacttcctcctggttctgtctcccttctcctttggactcagccactatgttgtgaggaagcctaggccacatggagaggccacatagatgtgttccaggcagcagccccagcaaaggtctcaatcaaccaccatatgtgtgagtgaaggaaccttcagataattttgcttcccagacttcaagtctttcagctggggtccaagacatcacaaggcagagacaagccctcctggaattccccacccaccg

SEQ ID NO: 5042 - DNA, 2300 bp, Homo sapien
gcatttcctcataattgctaggggggtggagcctgacatcctctctggccaccactgacacctgatgggagaagggctctgtgttactgtggggtggggtgcaggctaggttctaggacatagctctagaacctgctcagtaattagcacttgtttgagtcaattattgccagaagtggaacgtcagcctcgggcttgggtgggcttcccctttagcacttgcagacagcaccctgctgggagtacccaggctcatcactgctcttcatgtgtcccttgctgacactgtggggtgggggtagcctcgtggtggctgggcagtgtaggacgtcctgactctttcctagcaggaagggtgagaggcaccttgtcactgccaggagcaggtgaaagagcaggatcccacagggtctccactgatacccctgggggcggggactttttcattcattgggcatgaagccctctcttccccatgtgaccctctgacaccaccctcgttggggagtgggggctccttataactgagcagtgagcgtggaagcccaggtctccactcggcctctgttgatgagggtggggcttggggtgagggcacagttttttctgtgctgtttgaccgttgtggagtggttatcacctaaaagtcttgtcttcctaggctgcacctttcccagtctttggctcgtgggagctggcttttcttggggcttctgtgtttgtgcccattggcattacagggttgccagcttctccaattcccatctgggacatctgaggcaaaaagaaaacccagaaattcactgccctgttattcctgagttctgaaggtgcctagccagtctgccttcttctctccatttttgggggtctttttatatttgtttttttaatataatatttagggattttagctatgcttagtgagaggaatagggaaaagtaaacctatttcatctttccagaaaagtaagtttgaaaagagttctggaggatgggtgatttggagtaatgctctttggggagggaccctgggctggcaaacctccctcagacacacagtcctgattctagaggcccctgaagggagtcttccccatggggtgaaagaaggagtggggatgaaggcagaatgcctgctggggagtctctgatcctcaatccctgatgagggccacagctgggcggctataaagccgagccccacaggccaacacatactcagcagaccttttcactagctcccaaattaaactatctccacttcctctttaaagtcactataagcattgttgtcacatctagaccctcatttatctaccacaattgcttgaactgctccctttattaaatttgattccatgaaataactggataatggttcttagtgagatggactgggctcactctcccctgcttgtctgagtgaagcagatggtcagttggggaactcctgcctggaccccagctgcagccaagccctgttcacacctttgcaaactctttggccatgttatcgagaagtcactattcagggcaagaggtgaaggacctggagctggacccacaggctgtcttggaggactgggacacacagacacccagagctttctctttgattaagcaaatattgattttcaccaaggtctactggcacatgaaaataagtaagtcaggctccaacctgaggagctgacagtctacaggggacagttgcaatgcagtgtgttaaatactgagacgaaggactcacagaagaaaaaggagaagctcttgaaccaaactagagtatccaggaaggcttcctggaggaggagtcttattgaatgctaattgcgtacatctctgcctaggtgaaatccttcagcagcttcctattgctgccagcaagtactaaagtgtttactatgtcactggcctcctagacctgtcacgagccatcccctgttgttcctgctccctggtctcagggaacatccatcaggttactgtccagcctcctcacatgtcatctgttttgcatgggatgatgctgttcccctccagggtcatagagatactcccactcccctctgtactgtcaccaccgtcaggggagagatctggtcttgctgggccattgctctagaacctgctcagtaattagcacttgtttgagtcaattattgcccgaagtggaacatcagcctctggagccagtctgcaagaatgggacaggtggcgtgccatcctaagaagagaggacagcctctgctgaggccccgggcaagggcagcatggactacaggggttgtgcaaga

SEQ ID NO: 5043 - DNA, 2300 bp, Homo sapien
ggggtacagggtggggcatccgctcttctgggtgcattgtgccacgccaacaagacacacaccatcttgccaaggtgccgtggctgggtgccagggcatctcgtgagattctagtttacggggcgttttgagcctctgcctgtctaagcagggagcagactgcattttccagactcggaggctacggcagagtgaaagcagaagtagctgcagatgcttcccctcctgggagtatgtaggacaggtcgagctcccaaggatgtttggagaggtgtttgggagcagaagttcatgctggtgtttaggttgactcatcccatgcgaaagtattttgaaatcagttgccgacatttgaaacttattgatttcatataaaaacagaactgcctggtgtggctggaagccctgggcctggcctgaatgtagctccaccgtccccagccactgtctacagattgtcaggtctgcactggcattttctttcaatacacttagaggaaagtgaaatatttttcttacacatgttcccatgaactggggcaaaattaagaaaactccacatattccaggagaaataagagagtatgtttcttggtgcaggtagaaactgatcttaatttcatcaaatgaataaagtgtggacagatggaacttgaaggcacccagatgaagccaattgcttctctcatgaccagccttctcctctcatgtccattatttatgtgaaactcagaaggagccacagcagccatgcagaagaacccagggggcatctgtggcaccagggcaatcggactgcctctggctggaccttggcaggggatggtacctgtacacagagggcacatgcagcctgaggggcataggctgccagccaaaggcctgggtttcgagtccagctctcacatttactgctgcgtggacttggacaggttgcatgctaagatggcattgggctcagtagcaagtgctcacggtgttggctgctaccgttagggatttgactgagggagcccaagaatgaaaagagctcgatttctgccagctcagttgggtgggggactcaagacttgtcattaagttgatttatattttaaaaagtgacatttcctgcacatttgggtttttggctgaacatctaagcattgtgacaacgtgcaggtataaaggagtacaggagcataaggccttcagcctgctggctgagcctgtgtgactaccaaagttcctccaggctaaggacctggacatggggcctgtaaacttggatgggaaaaaaattacatctctgttctctaacctctaaggaacacttagcatcttcttctaatagtagtgtggcaaacgaaccacagaaacattaccacccagtaactttatttctggtaggaatcacaggtctttccatccacattccagctgttacaggtatctctcaatatcgattccatttatcaccatgtcgagatggtggtagctgtttcatctgctgccagatcttgctatttactgtgtggataaataagcatgtatatttctacttcacaagtttaacaaaatattttgataactgtgtgttaatactactgatttctactatgatccttatctattttagtttggggatttaaaaatcttattctgagaagagagtgataggcattcctagactcagaggctcccatggcacaaaaacagtgaccgagctggactattggctggaggggcatttcctatttctgctccaaggcagaggctactgcaagggctggactgcagggcagaccggctttgcccacattcctctctgagacttactagcatgggtcattaggcaagaaaccgcaccttaccgagctttgttcccacactctgtggggaagattataggagagaacactgggtataataccccagcatgtacaatgggtctaatcacagccagcttctggtggagtccagaatgacaggggcttccttcagccctgtcttcagagaggctgagaggaactgaacagcctcctggctgtgacagtggtttccttccccatcagtcacgtgggtcttgtcctgtccccagagccttgggtcacatggctcattgtgcctgcgctgccagcagccaggagccaggagccaagagcagagcgccagcatgaacttgggggtcagcatgctgaggatcctcttcctcctgggtaagtggggactgcgggggtctctggcccgggggagcctcagtgggcaggaaactgggggagccttagcccactggggcttgatccctaaaacataactct

SEQ ID NO: 5044 - DNA, 2300 bp, Homo sapien
aatcagccacttcaagcaaacaccattcgctcctgctgcagagcaaagcttgctgtttctaggatcctaaacaagacatgaggtcatgctctccacctgtgaagaatgaaacgtaagctggggaaggaaggtgctgaggaggggaggaaagcaaattaggaagaccagcggccctgccgaagctttcagctcatgttactcacaccccaaagcaaactcctccataaaatgaggtttagtaatgcaacattttctaacatctggaacaaaatgatttgggtcaaacagatgacatatgaactgactgtaaatttgtttcaatgtgtactgggagggagggaaattaacaaatatgtcaaatccatgatctattaagtattgttgttttccataaagttcttctgttcaagaaaaaaagcaagtcaatttaaattttctttaaaggaaaatagtaagtaaatgttgatacagatggttgaggtgtagcaaaaatcatgggaaaaaataacaaataaatgactaacattttgggaagctttgcaatagacgagcatattcatgtacatgagctcccctgaccctgaatcccacagagcacaggcattctctccactttagagatgggtaaactgaggctcaggaagggtaagtatgtgacatgtcaactgaccaggaaataatggagccagggctcaaaatcctgtgtactttttaaatgttggctcccatctcaagttgatggcttttgtctgaccttttggcatgcgtttgttttggcaaatggggaggtagggaggtgggtgggtaaaattgaggggttcactttgggcctccctcaaagcatctctgagtgcggagcagcaagtaatcatccccacagcgaggttctgaagctctcagggcaaaaggcaagtcttgaggctcccaggaggaggcgggtctgaatgctcctgctggttggaatctcacaccttagtctgcagggcaaggaggagctgttctttgtgacttggtttagacaaaagtacatagacctgggtccctgtggccctggctgtcagccggttcaaggctggaggtggtgccaggccccagcttggggctgggacacaggttgctgcccttgaagagcccacaggggcagaagggacagtctacaaatagacccaaagacacagcacactgcaaacttgcagaggctttgagcgctgcacagagcaggacacccagcgggggccagtcatctccgctttctcaggccacagtcagggaagcataaaaaagaaccttggagagaaagggggaaaaaaacccactcttgcattaaatcctggtagcaagcagactatcctagggccagcttgggagagtaaggaaggcactctgggagctggcatggcacaagccaaggaaaagccagtggaaaaagttgggggatctgtgggcagtttggggagcaggtgaccccagcctgagacagaaagcagccattgggaaggcaggcatgagcccacctcagggttgaagggaggccagcccttcccagaggtggagaggggagcctggcagaacgggacttgtccactggtgcttggactttgcaaacaaccgggcttgctgtagccaagcttaccaagtggacacttaccttgcctcttccccgattatttcatatccttctgtaactctcaccctgagacccagcctggccttcccctagctgcagattattctgctccaaaagcacagcagaggacggctccttactcgaggaatgcgggcggcggtcgtccagagccgatgatgaaacgggctatttctgccccgggacatcagcagggctctgggctctggctccaaggcacacactctcctgtttttaatgtttccctaaacaaatgttttccttcccacctcgggatatttttatttgactctaggtgctggaatagctttagcaatcattctggattgaagttggaatcgtggttagggtccggctaagcggcaagcaatttctcactccccaagtgatctgttactcgtggctgatttggaagtaaaaatagcagctgaggctgtttgtttaatctgactgttacttgacaccacgcgggtgttgcagtgcggactgtttgcctcttccccaccaagaacaccatttggtttcccccggctgggtctctatttaggtaagcttcgcggacttcccgtgtctggccggcttctggtcactgatcttcctcaggtgggtaggtttgtgagctagaggaggcttgggtcctgaatccactctccta

SEQ ID NO: 5045 - DNA, 2300 bp, Homo sapien
tctcattatgtaaactcctcgactgctgaatttcagagtgagtagcaagaattcagatatgtgtatcaggaaagtgtatatatatcaagaattcagatatgtgtatcaggaaagtgtatatatatctgttcagtttctaagttttgatagtaagggatacctatatgccagggcttcttggctttgacattattgacatttgagacttgataactttttaccgaggggtttgggggctgtcctgtgtggtgtaggatgtttagcagcatacctggactcacctgcaagatgccagtagtagtatatcctcccgactccttccacagttctaacaaccaagaatatctctgggcattgtcagattaccccagggtggggttgaagggacagaattgccccctgtcaagaacgattgttgtacaccattgcatttaactaaatttgtaaataacatgaaacccagaagacttttatagccacctagagataattcattttgtccattgcatggagataatttttaaggaaaaaaaataccagtggagaagaagagattgcctttagaagttaagcacaaaaaggacattaaatttttttataaaaagtatcacttattaaactgttgttagatgatagctatttccttagacttggccatatactgcctcttccatttgctgttcttctctggaaatgaccaacagtgcttcattgatcttatttataggtcctttactaccgtgtagtgcaatttcagataaccagttcttgttgatcacaagtaaatttcagctagcccttccttttgttaccttgaagagttgaaattttcaacaaggcaagagtttatcagaggatgtgctttaaggtccaccagtagctacctacatactagcattgggctctgtgtggttttgtaatggatactggacaacacaccatacctttggccaggcagcatgtgtagtattaccctttcattttctcttgccttccctcggacattctctcttactcttgcatagtcagtggcagataaatgccttatatgtgttgctgctcttactcgcttcctatgagttttttttttattgtagtttgaaagcatttctctgtattattgttttattccatttccaccattttgtgaaattcagagcatcagttgcaccatgctgaatgaaaacatcatctttttattttgaaagtgaatagaatttgaggctttttttttttccccactcacgacaactagagtccattatagttatgtaaatgcaaaattagtctggttaaatgggtgcaccttctccacaaccttggtgtattgctaagactttcagatatttagatgaaatatatttccttctgaaatataagtgttcaccttattttatatctgaaagtatcatattactaaatttgtaacttagattttattcagtgaacacatttttttgagtggtagcactatcagtgcttgtatattgctgatgcctcttcccccagttaagtaatcagtaatgtgaacctgattcagtgattttgaccccaaatttgctttatgtttaaggggctttgttgttttatgctgtgactatcatatctttagaacagaaatagtaattataaatctattttttgttacatagtattgcggttgtgaagacactcaattatattgaaatttttactgaatcttttctaggactaatttcatgtcttacgaaccagcagagaaattttcccttagggtatgccagaagaggagcaagtagttttgataatgaaatgagaccttaaagaaatatttctagagcagctataataatttacataagaaatgaattgagatggctggagaagagaattgtttttcctctttgaatatcagtgttttgggtaataatggcagcattaacctaagagaccgttctaatttgcctgttttttcttgtacattatcaggagctatctttttaaatctgtcttgtgatcaaaataatggaaatgtgatttttattttcatggtaggagatggaataaactgagactgcaggacaaagagaaacgtctgaagctggaggacgattctgaggaaagtgatgctgaatttgacgaaggttttaaagtgccaggttttctgttcaaaaagctttttaagtatgtaccatatgttctttcctttctatttgctatcaagccattatgtacaaattaacattttaggaattacatagtagttacctgtgggccctgaaggtacttgcagcaatttgttgcaaaaacagatactgtca

SEQ ID NO: 5046 - DNA, 2300 bp, Homo sapien
ctatccaaaagataaattcatgaaaggcacctattttgttagtcatcagggaaatgtaaattatagccataatgtggtaccactacacatctaccaaaatagctaacatggaatggcaagaatatacaccagttggaactttctgacacagttgatggggactttggaacgtaacactttggaaaactgacagtgtctactaaagcttagcatacccagatatatatatatatatatatatatatatatatatatatatatataaaaatatataaatatataaatatataaatataaataaaaccaaaagatgtgcatcagaatattcatagcaacattattcctagtagccaaaacctggaagccactcaaatgtgcattaacagtgagagttaacaaactacagctacattcaacagtaaggatgcagctcaaaagcataatgttgggtgaaggaaggtggacacagggcacaaacatttccacttacgtagcgttcagagacaggcacaacttgtctgtacgttaggagtccaggtccatcattatcttggggggcgtagaggctgggaggtagcctgaagggctcatctggtggtgctagtaattctgttagttgatatggctgctagtttatgagtacattttttctgaatattcactgagttctacacttaatgatttgtgcactttcagatgtatgttttatttcagtgcaagtttaatgaaaaactgggtatcattggcctgcaagaattgtagattttagaatatggattccttcctattaagccttaggtcttttggtattttggttatgtggtaattttgccagagatgaatttcaactaatgaaagagggatactttctggtgactttacacttatggtgtaatgtcttcaagtcagttaacttcacatatctaacacagtgctgctgtccaatagacctttttgcagtgatgaaaatgttctctgtgttgcccattatagtagccattagtcacgtgtagctcttgagcacttgaaaaagggcaaatgcaactgtggaactgagtttttaacttaatgtaatttaaatttaaatagctgcaggtgactggtaactgccatgctgggcagcatagagctgacatttatgtttttcctttttaggtacatggtgatccctgtttttggttttactgtctcttgaatttaagtccatctgaatgttggttttagcaatgacgtgagaacttcggagcttgcttcctcatggacgactactcagctgataaggaaacacagctaaacttgactatttataactgtatttatacagtaataagcctatctttggatggcagagagtatatttatagtgaaatattttggggaaaagttactgagaagttgtctttttgaacaggaatatattaaatatagcatgatgctataattttattctgtccttcatatgtaacatgctttagtacatggatgattctttttttatatgagttatttgtagctgcctaatatttcttgaaagagtgagcatttcttttgtaccctcggaaagtttcatgctagtgcgaaacgcattgctattgttctttcagagccggggccatccagtcttggcagcatgctcatgcctgtccaggagactgcctgggaagagctcatccgcactggccagatgacaccttttggtacccagatccctcagaaacaggagaaaaagcccagaaaaatcatgcttaatgaagcatcaggcttcgaaaagtatttggcagatcaagcaaaactgtcttttgaaaggaagaagcaaggttgtaataaaagagcagctagaaaagctccagccccagtcacgcctccagccccagtgcaaaataaaaacaaaccaaacaagaaagccagagttctgtccaaaaaagaggagcgtttgaaaaagcacatcaagaaactccagaagagggctttgcagttccaggggaaagtgggattgccaaaggcaaggagaccttgggagtcagacatgaggccagaggcagagggagactctgagggtgaagagtctgagtatttccccacagaggaggaggaagaggaggaagatgacgaggtggagggggcagaggcggacctgtctggagatggtactgactatgagctgaagcctctgcccaagggcgggaaacggcagaagaaagtgccagtgcaggagattgatgatgactttttcccaagttctggggaagaagctgaagctgcttctgtaggagaaggaggaggaggaggtcggaaagtgg

SEQ ID NO: 5047 - DNA, 2300 bp, Homo sapien
ccatttgcaagccatgaggagagcttcccctaaatgagctaaatctgcctgcatttgatcttggacttcccagcctccagaactatgagaaacaaatgcctgttgtttaagctgcccagtctatggcatttgttatggcagcctgagctaaggcagctgggaagaggtgaacagtatgcttgctaggccgtagaagccaattgtagcacacccttcctgggagaagagtaagtagttccctaaatcctgagcataggcatccagggagtgaaggacacaagtgatgcagaaaaattagatggggcaggagtataaaagggcttggacgacttgctaaataacttgggacctcatttaactaaattccctcattaaagaccctatcttcaaatacagtcacattctgaggtcccggggtgggggtggggagtggcggttaggactccagcatatgaattttggggaggggacacaattcggcccttaatagctccagttgtgccaccctgagttgttttcctgaaccccgcccacgtctttgtaaataataactctcaacttccccttttgagtggaccattttttcctgtccaaattctgatataggaagggtctccaaaatagctgcaaagggaacctcagtctcaaaagttgggatccactatatatctgcttttactttcaagcattgaaactaatgtcaatcaactgcctttctattcttaatattttatccaagaaatcgctagaattctttctcctttaaaaaaaaaaaaaagcaagttacaagccgggcgtggtggctcacacctgtaatcccagaactctaggaggccgaggcgggtggatcacctgaggtcaggagttcgcggacagcttggctaacatgacgaaaccccgtctctactaaaaacacaaaaattagctgggcatggtggcaggcgcctgtaatcccagctacccggcaggctgaggcaggagaatcgcttgaacctgggaggaggaggttgcagtgagcccacatcgtgccattgtactccatcctgggcgacaagagcaaaactccgtctcaaaaacaaaaacaaaaacaaaacaaacaaaaaaacccactaccaccaacaaaaacaagttacattgtgggttggggccgctgacaggaggaataagatgatgttatggagcatttcctagtcccctttccgaccccatttccctattgtccgacttcaggcttccaagtgaggacagcacttcccaggcagtgacccgcagtcactgccctcccagaggacgtcctgcctcgcggccctggaaagtccaccttctcctagcaccgatcctgagctgagaagctctgtctggtacagccatcctgcatcgtgggctgcttctttccccaggcgaagctcaacttcctcccattgttctgaacctctgtgtggacatcttctttcttcaaacgcaccacggtaaaattctcgcctgcctcgaaaccccgcctacctctgagatctgaggacggatactaaacgctggacttaaggcaatgtacacatgtaagcaggctctgtaggcactcactccgcccaggtgcgcgcgtggcggagggggaacagagaagcaggacagctctccatccttcccgtgttcagtcgtgggagacaacaagagaggtcacagcctggcgaccaaaaagtgcggctaacttccctgcccaagctgactttctctgcagggttcaaggttaattgtgaggatttacattcgcatggcacacccgcatccccctctacgtggaaatatgtcttaactttcataactgccttgccagcagggtatttttcgctaggggcgaagcgtccttcgcaagccacccagctgaccggcagcggagacagctttctcgccctgctcgcacgcaagtagaaaggcgctgctgagcccgtccctccaaaccacgtggtcttgcccgtgcttaaaaacaaacgctgagccaggcgcatgcgccacgggcctccccgcaccagcagaagtcggagtcgctgttgggggcggtgtctatggttgagctgagggcgcaggcgccacggcccgtcgagctgggttccaaggcggctggcggcggtagcgtctctgtttccttgtgggcgctcgcgcggccctgggtgagtgttcgggggtcccggccgaatgtcgggcagggggtgtcggggcccagctcaggcttctcgggcgggccgcggccccgcgccttggcctcgccgtggtgattgagcctgtcagcgaggacgcactgtagc

SEQ ID NO: 5048 - DNA, 2300 bp, Homo sapien
ttagaaatattggtttgggggtacacaggagatgcaagagcctattgctgtcagagggtaggggaaagcttcagaaaagagaaactttgtctgagtttggaatgggtaagagaattctaagcagagggacctgcttgtaagatcacagaagtgacagaataacaagtaggggtatgtgggaaaagattaataattgcctctcccccaaagttccagtttatagtttgtccatttctgtggtataaatactcctactatggctgatttcaagctattaatgtgaagtcaacaaaggcagagttggtgctatgggctaaactgggtgccccccaaattcatatgctgaatccctaaccctcaatgtgactatttggagacagggtctttaggcagcaaatctggttaaatgagatcataagggtgagtccctaatccaatacggctgatgccttagaagaaagggaagacagagccctctctctaccccatgtaaggacacagtgagaaggtaaccatttgcaagccatgaggagagcttcccctaaatgagctaaatctgcctgcatttgatcttggacttcccagcctccagaactatgagaaacaaatgcctgttgtttaagctgcccagtctatggcatttgttatggcagcctgagctaaggcagctgggaagaggtgaacagtatgcttgctaggccgtagaagccaattgtagcacacccttcctgggagaagagtaagtagttccctaaatcctgagcataggcatccagggagtgaaggacacaagtgatgcagaaaaattagatggggcaggagtataaaagggcttggacgacttgctaaataacttgggacctcatttaactaaattccctcattaaagaccctatcttcaaatacagtcacattctgaggtcccggggtgggggtggggagtggcggttaggactccagcatatgaattttggggaggggacacaattcggcccttaatagctccagttgtgccaccctgagttgttttcctgaaccccgcccacgtctttgtaaataataactctcaacttccccttttgagtggaccattttttcctgtccaaattctgatataggaagggtctccaaaatagctgcaaagggaacctcagtctcaaaagttgggatccactatatatctgcttttactttcaagcattgaaactaatgtcaatcaactgcctttctattcttaatattttatccaagaaatcgctagaattctttctcctttaaaaaaaaaaaaaagcaagttacaagccgggcgtggtggctcacacctgtaatcccagaactctaggaggccgaggcgggtggatcacctgaggtcaggagttcgcggacagcttggctaacatgacgaaaccccgtctctactaaaaacacaaaaattagctgggcatggtggcaggcgcctgtaatcccagctacccggcaggctgaggcaggagaatcgcttgaacctgggaggaggaggttgcagtgagcccacatcgtgccattgtactccatcctgggcgacaagagcaaaactccgtctcaaaaacaaaaacaaaaacaaaacaaacaaaaaaacccactaccaccaacaaaaacaagttacattgtgggttggggccgctgacaggaggaataagatgatgttatggagcatttcctagtcccctttccgaccccatttccctattgtccgacttcaggcttccaagtgaggacagcacttcccaggcagtgacccgcagtcactgccctcccagaggacgtcctgcctcgcggccctggaaagtccaccttctcctagcaccgatcctgagctgagaagctctgtctggtacagccatcctgcatcgtgggctgcttctttccccaggcgaagctcaacttcctcccattgttctgaacctctgtgtggacatcttctttcttcaaacgcaccacggtaaaattctcgcctgcctcgaaaccccgcctacctctgagatctgaggacggatactaaacgctggacttaaggcaatgtacacatgtaagcaggctctgtaggcactcactccgcccaggtgcgcgcgtggcggagggggaacagagaagcaggacagctctccatccttcccgtgttcagtcgtgggagacaacaagagaggtcacagcctggcgaccaaaaagtgcggctaacttccctgcccaagctgactttctctgcagggttcaaggttaattgtgaggatttacattcgcatggcacacccgcatccccc

SEQ ID NO: 5049 - DNA, 2300 bp, Homo sapien
aagttctctgttgcctgcaagttatgctcagatagaggagtccggaaaggaatttaccaagcgttcaagtgaagaggaagccagaggggcggggcctccgtgggaggcttcttggttgcggtggggccggggccagcaccctggacagctcccggcggctggcggggagaagaggctttgccaggtcccatctcggctcagaccctcccgtagccttttgctgcaggggcctgacgcctccttgcaaccccggcactcccgtatttggagccacgatggattgggggggcgttgccctctgatctgaaagttagagaatgagggagtttagtgtctttggagcctccttagggagccagcccaggaccttcctcctcccatgggtcttgatctgctcctcacccctacactgccagcgtgcggccaccttggagatggagcagcaggagcacgacgccgtgccgggaatagggaagcagtgtgaggaccacaagacaggtcccccagcctgggtttaattccaggatctgctgctgggagcttgggcaagcacccagcatctccacgcccagcttcctcacctgataagaccaggggaatagcacctacactgcaccaggattgcaggagaatggagtaaaacagcacacacaatactcctggcacaaagcaagtaataaatgagtgtgcctcctgccatacaggaaccgaggactggagagctagtcatgagcccagagatacctggcttcatgctcaggaacagccatgtgggccagagggctggagatgtggtctgcaccttgaaggccctgggaaagttcctgtcctctatgattcctctgttcttcagccactagacataaaaaaaaattgtccttcaagtcctccttcctcctttctttaatcagacaggggaaatagcatgtgcataaataataattgttttgtaggctgggagactgcccctttaagagcctcataatgggagagtcagaagagcccagaggtctcaaacggaaatgactggagaaccagcaagtggcataagtgtgtgaagtcagctggggcgagattgggatgtgctggagagtgtgcatgtactgacgaaaggccatcaaatacaatttaaaataattagcccactccaaagagtcttctgcagcacgcacttctgctaagggctgcagtgagtgggctctcacctcaacctgaaccagacggaggctgaggctgggccccactgaggggctgtgacttgcccaaggtcatccagggccaggcctgtgcccacattgggactcttttcctccctcagacagagggcacttcagtcactgcagagcaggtggcagcagcccttcagtggatgagtttctcctttcccagggtgactgggtgggtgaaggaattgagcaacaggtggccaggctgccgcctctcaccctgacacattggtccccatcccctcatcctacagccatctcagggacagatggagacattccaatgccctccgggtcctccaccaacccagacagagcctggagtcacaatgcccacctagccagagggatcagccagctagccaagtgccccctgtgtctttcatctgttcttcacaagacccacaagtgaaaaatgaggataaaccgcacattctacacacgataacaacatagcaagtccttatactgctcttactgtgtgcccggcccccttagcagtaggtactattattattcaattttacaaagaaactaactgagggacagagaggcaaagtaattccctgcaggtactctaatgagtacgtggcagagctgggagccatcctggttgtctgcctcgaaagaccacactctttgcactgcatcgcggcacttcctgcggggtggggggcacaatgggagaagcatctgcgtctaatgctgctttacttttgaggccagaaaaatgggaaggctcccctctgactctggaagagagacgcaaaccgtaatctcaacaacacaatccccacctccaacctcagccgccctggagcctctctcccgccagtccgcccactggaacacgggttccatgtgccatccagggtcaacgccgctctggggacgcgtcaggcccagcgcacagcctgggcagctcagcctgtcagctgagcacgggcgcctcaaggggtgcggccctctcagaaggaaggtgagtctccctggagcccctgacgacagcgaagcggctgggcgctctccggggagtgggcgcggcacccaagaagggtttcttacagttccaag

SEQ ID NO: 5050 - DNA, 2300 bp, Homo sapien
tcaacctgaaccagacggaggctgaggctgggccccactgaggggctgtgacttgcccaaggtcatccagggccaggcctgtgcccacattgggactcttttcctccctcagacagagggcacttcagtcactgcagagcaggtggcagcagcccttcagtggatgagtttctcctttcccagggtgactgggtgggtgaaggaattgagcaacaggtggccaggctgccgcctctcaccctgacacattggtccccatcccctcatcctacagccatctcagggacagatggagacattccaatgccctccgggtcctccaccaacccagacagagcctggagtcacaatgcccacctagccagagggatcagccagctagccaagtgccccctgtgtctttcatctgttcttcacaagacccacaagtgaaaaatgaggataaaccgcacattctacacacgataacaacatagcaagtccttatactgctcttactgtgtgcccggcccccttagcagtaggtactattattattcaattttacaaagaaactaactgagggacagagaggcaaagtaattccctgcaggtactctaatgagtacgtggcagagctgggagccatcctggttgtctgcctcgaaagaccacactctttgcactgcatcgcggcacttcctgcggggtggggggcacaatgggagaagcatctgcgtctaatgctgctttacttttgaggccagaaaaatgggaaggctcccctctgactctggaagagagacgcaaaccgtaatctcaacaacacaatccccacctccaacctcagccgccctggagcctctctcccgccagtccgcccactggaacacgggttccatgtgccatccagggtcaacgccgctctggggacgcgtcaggcccagcgcacagcctgggcagctcagcctgtcagctgagcacgggcgcctcaaggggtgcggccctctcagaaggaaggtgagtctccctggagcccctgacgacagcgaagcggctgggcgctctccggggagtgggcgcggcacccaagaagggtttcttacagttccaagagaggaccccagccacagtcactccagagcccacccggggcttggaggaggctctggaaaatgagggatgggggagtgtgcagaacagggggcggaggctggcaggagccgagggagggcttggtcgggtgcgaagagtgcctgggaggagttagagtggggagggggtgcggcggcggggagagaagaggcggagctgggggaccagaccgctaaaggagaaagggggattccaggcaaggggaatgtggccaggcagtgcgggagggcggcagcggccaggctaatattcgcgaccccgactggggcgcggcaacttctgccctcagtccccacaagctcccggccgcgattcgcggccgagaaattctgcggaggggccggtgggtcagagccaggccaggcagttgctgagccttcccctcccctcctggcgggagtgtgtgtgcaaggggccagggggcggagtcggagaaagggttgggggtgtccgtgtccagcgctcctccggacgcggctccacaatccagctgcgagaacagatggacgcagcggcggctcacctcgggggcttcctgctcgctgtgcgccgaggtccaggctgaagcggagatcgcaagcctctggctcccgcctctcccaaggggcctcgaggaaccggctgccgcgcccccttccccaagaggagaagagcgggcgctgaccccgcgagtcctagaaccgcgggcggggggcaggcagggggcggggggcagagggccagctaccggcgcggaacgcccatcccaggggctggttcaagacttccacaccgagagcccttcctgggcctccagccctggagcatctggagagcggacccctgcccggccacgccccgcccccggcccccgccccgccgacgtcgcattagcatgagcgacgtaagtggcccgggcaccactcgggggctgggactcgccgcgtcacagccccgagtggaagggaaaaaaaaagaggaggcggcggaggaggcaagagccgacgcgaggggaggggagcgcagcggcggggctaacgggcgggcaagcgggcgggcggcaacagcatgtccctcggccagcgcgggcggcctcttagcgcggcgggggctgctctgggcgcgccccgggcgaagtgcgcccagtctccggccccggcccctcggcgcgcccgacttcccggccg

SEQ ID NO: 5051 - DNA, 2300 bp, Homo sapien
gccagcgcctacacggccaacacctcggcgtccccgacagctgcgtggccagcgggctcagcccttcggccccgctaccctacggagagcgaagacgtgaagatcggggtgctgtttgcttccaaggctatcctgcagctgctagtgaaccccttgagcgggcccttcatcgaccgcatgagctacgacgtgccgctgctgatcggcctgggcgtcatgttcgcctctacagtcctgttcgccttcgccgaggactacgccacgctgttcgcggcgcgcagcctgcagggcctgggctcagccttcgccgacacgtctggcatagccatgatcgccgataagtacccggaggagccggagcgcagtcgtgcactgggcgtggcgctggccttcattagcttcggaagcctagtggccccgcccttcgggggcatcctctatgagttcgccggcaagcgcgtgcccttcttggtgctagctgccgtgtcgctctttgacgcgctgttgctgctggcagtggccaaacccttctcggcggctgcacgggctcgggccaacctgccagtgggcactcccatccaccgcctcatgctagacccctacattgccgtggtggccggcgcgctcaccacctgtaacattcccctcgccttcctcgaacccaccattgccacgtggatgaagcatacgatggcggcttccgagtgggagatgggcatggcctggctgccggccttcgtgcctcatgtgctgggcgtctacctcaccgtgcgcctggcggcgcgctacccacacctgcagtggctgtacggcgcgcttgggctggctgtgatcggcgccagctcgtgcatcgtgcccgcctgccgctccttcgcgccgctagtggtctcactatgcggcctctgttttggcatagccctagtcgacacagcactgctgcccacgctcgccttcctggtggacgtgcgccatgtctcagtctatggcagcgtctacgccatcgccgacatctcctattcggtggcctacgcgctcgggcccatagtggcaggccacattgtgcactcgctgggctttgagcagctcagccttggcatgggactggccaacctgctctatgctcccgtcttgctgctgctccgcaacgtgggcctcctgacgcgctcccgttccgagcgcgatgtgctgcttgatgagccaccgcaaggtctgtacgatgcggtgcgcctgcgtgagcgtcctgtgtctggccaggacggcgagcctcgcagcccgcctggcccttttgatgcgtgcgaggacgactacaactactactacacccgcagctagcatccccactcctcctccagcccacccaaccgccttgggtcaagggggctgctctgcaagcccactggccagctctggctcagggcccacctcctccagcgagtaccccagccactcctcaaccttgacttctgcccaaatcccctccctgtgacccgttccatatccctttctctcttgtccaatggggcttggagcaccgaggccagcgaagccatcgcgctccttgcggaggtgaagaggaccctgagtccccacctgcggctcccctgtgtagagcctgcatctgtctgtccttccttccattgctcccagtgccaaacttgggccgctgcaccgcggcgcctccgcccaaatcaataaactgtgtctgtcccaggaggccgagtctctttactggtggggggtgcgtggaggcgcgcagggccagagcagaggggagggtgaactgggtctccaagtcccaatccagacctaagccaaactaacacgtaggcacctgtagctgtttttctacctggaaaaggggataggaaggaagcaaacccaacaaaggctgtcacccacggtcaccaaggagcaccatgctcccctcagcccaggatagaccctcttttccaggcctagcgcagagcccggggatgccgcccgggggagcctgaggacccgctccagctaggcacgccaggccccgccctttgaggacacgccccacaccagcctcagagctctgaggtgcctgggctgagcttcccttcagaccagaatcccgccccgttgaggctttgagaaaggagtaggagccgagcattccggcagaggaagaaaaacggcccatcttttagagtccgacctctggaaatgtgtgtatgatgtgatgtgtgtgttcattagagaacttgtcctaggaggagtgggggagccgtggttggtgtttgctgtatccctgtcagtcccgagggtctgag

SEQ ID NO: 5052 - DNA, 2300 bp, Homo sapien
ctgttttggcatagccctagtcgacacagcactgctgcccacgctcgccttcctggtggacgtgcgccatgtctcagtctatggcagcgtctacgccatcgccgacatctcctattcggtggcctacgcgctcgggcccatagtggcaggccacattgtgcactcgctgggctttgagcagctcagccttggcatgggactggccaacctgctctatgctcccgtcttgctgctgctccgcaacgtgggcctcctgacgcgctcccgttccgagcgcgatgtgctgcttgatgagccaccgcaaggtctgtacgatgcggtgcgcctgcgtgagcgtcctgtgtctggccaggacggcgagcctcgcagcccgcctggcccttttgatgcgtgcgaggacgactacaactactactacacccgcagctagcatccccactcctcctccagcccacccaaccgccttgggtcaagggggctgctctgcaagcccactggccagctctggctcagggcccacctcctccagcgagtaccccagccactcctcaaccttgacttctgcccaaatcccctccctgtgacccgttccatatccctttctctcttgtccaatggggcttggagcaccgaggccagcgaagccatcgcgctccttgcggaggtgaagaggaccctgagtccccacctgcggctcccctgtgtagagcctgcatctgtctgtccttccttccattgctcccagtgccaaacttgggccgctgcaccgcggcgcctccgcccaaatcaataaactgtgtctgtcccaggaggccgagtctctttactggtggggggtgcgtggaggcgcgcagggccagagcagaggggagggtgaactgggtctccaagtcccaatccagacctaagccaaactaacacgtaggcacctgtagctgtttttctacctggaaaaggggataggaaggaagcaaacccaacaaaggctgtcacccacggtcaccaaggagcaccatgctcccctcagcccaggatagaccctcttttccaggcctagcgcagagcccggggatgccgcccgggggagcctgaggacccgctccagctaggcacgccaggccccgccctttgaggacacgccccacaccagcctcagagctctgaggtgcctgggctgagcttcccttcagaccagaatcccgccccgttgaggctttgagaaaggagtaggagccgagcattccggcagaggaagaaaaacggcccatcttttagagtccgacctctggaaatgtgtgtatgatgtgatgtgtgtgttcattagagaacttgtcctaggaggagtgggggagccgtggttggtgtttgctgtatccctgtcagtcccgagggtctgagtcttgaagggagagatgcgagtgtgggatctggtgccaacccccactgccaccctgtcctgagtgggagcagcggcccaggactgtcaggaaagtttcccatccttagtcccagccctgagagcctcaagccagcgttcgcgcaacactccatgtcccgaagaccgtagtctgatgatcgaggcagagtcttcccatcatagcgtgaagaggcggctggtcagggtcgcctgtgtgttagctgcgcctgtgagggtctgctctgctgttgtgcgcatgtctgtcctcgatctgcgagtcgggctgtgtgtgcctgggcggagtctgcctttgtcggtctgtctgtgctatttctgtgtgggggtctctatctggggtgggggatgcttttgtctgagaggagagcctgcctcttgccgcagtccttaagcatcctcaggtctgccatcaggattgtcccaagtctgtagcaccccacctctgctccccaccccatagtgccagcaggaatgggatggtaacagaaagggaagtcctgcagtgaatattgatcccagttattgtttcttattattattttgaaagatggtgtagcagggtttgagactggcctggatggtggggagaggagggcagcgagcagagacttcctcagacccaaccctctccaggattcagcagcagcaccccaaggctggaataatggggttggggaagtgcggtgactgggaaatgctgagctaggggcaggaggcatgggcgggacagtgttctgtgcccccttctagagcctaaatttgttgcccgagttcctccgggaagcgctccgggtagattctgggggccgggagctgagatccctgggcggggagctggggaagggatggggctgaggacagcgaa

SEQ ID NO: 5053 - DNA, 2300 bp, Homo sapien
tgtccagcacacaattaaaataaaccagaactctaggagacaagataaaatgcgtagaaaccagcggaaataataaaccgcaggacaaacacatgggttctccaaacaatggaattctcaaacacagtctataaaatacctatctttactacaatgaaggagataaagccaaacctaaaacacttgggaagaaactgaaagtggcacagcagatttgaaaagagaacaaactaaaattctagaattgaaaaatatataactggaataaacaatcaaattcctggcttttcttctcagttaagagccaaaaagaaaattcgtagactggattacaggtaaaaatgaatgaatgcatgcatacaaacgtgtatacatacaaccccaaaagaagtatggaagaagaaaaaagagaaaagcacagagaagacacatgcagattacaatgagaaggtctaacatatacctagctggagtccctgagaatgagaaaatggaacaaaagcaatatgtgaagaaataatgactcaaacttttccaaaaactgatgaaggactttaattcagtttcaagaatctcaacaaatcccaagagaggtaaaatatacagtagcatacgttgagagaattagtgggaaagggttttttaaatcctttactgttacagtaaaactacagaaagcaagagataaagaaacataagcggtcttgaaaacagaagagtaacggaaaacaactattcatacaaaacttttagcaaagttaaaacaacgttaaatttctaattaataaaaacactacagtgagtagaggatttttgcctttaaagacgtgtacaaagtttatagagaaccagaaaataagtccttctaagacaagacaggtaaccacatagagccaagaggatgaataatgacatcatgtacagtcctgccttcctccatagtctgctgggttcagctgtgttggtgaattcagtggttcttgtccgatggtgcgaaactcaagtgctgggggaaattatgtatgacccataataatgtcaaaattctgctgatatcattcctctatttaacaatcgtgtataaactaattctcatcaaagaaatatgtatcatagaacatactgtacacgtggagagaattaaaatacacagtagcatacgttgggagaattagtgggaaagggtttttaaaatcctttactgttcaaaaggagggtaaaaatatcaactacaattgaatatttagaaagtaaagaaatgctgtaatcgcaagggtattgcgattgttaggttgggctaatttctgtaataaacaacccccaaaatctcagtggttatggaataaatgtttccttctggcttcggtcaccaactaatgcagatgggtggggctctattcggcgcagctactcagtggtccaggttcctcccacgttttgggtctgtctccccgggagcctcgggtcctccctgggatcccgtatctggctaccgataagaagagggagacagcaggtgtggaggagactttttaggagccatgcctagaagtggtggatgtcttttatgtccaaattccaatgagcagaactgagcaaataaaagggaattggacgaattcagttttggctccaccaaatagcctaactggtgacagaaggggccgggggaagaaggtgggggaagaagaatgatgaacgaatactcccaatcaatcaaaaagaggcaagaaaatagaagaaatgcaagggtttccaatccatactacacccctgtcactcttgggaccgcaacttgccctcccagagcctcggttttgtaaacaaaaaacataaaatacttcctagggatggtaaactgattcaaccagataacgcagggaaaatgcttcgcacgccgcctgacacgaacttactgtgcctggctgctgctgttatttatcactaacacttgccacaccagctcaaacgcgcgtatttgcggaccaggcgctgagggtcacgtgagcagcttggggccgggaggatcccctagcgccaccccggccccgcccggcgcgtagcgacgcccacgcgcccgggccggaagagaggttgcttagcagcgtgtgtttctcccttgcctctgcggcggcggaggcctggcgatgcccaagaacgcagtggtcatcctgcgctatgggccctacagcgcggcaggcctaccggtggagcaccacaccttccgcctgcagggcctgcaaggtgggcctcctcgccgcgtgcgcccctgagggccccagcctctgagcatccgtgca

SEQ ID NO: 5054 - DNA, 2300 bp, Homo sapien
agttgtctttgtgaatccaaatggggacttgacacttgtcagttgtccacaccacatttcctctggttcgggttcctaaaatgttctagatcctgcctcagtccgctcctggttagcaagccagggtggtgtggcttccaggacttgaccagctggctttctcattcctggttgcttatctcggctggtcttgctccagccagggcccaggtggccctctgatgcacccagagctacctgtcagtccttgccagggactggggttcagccaggcgcccctcacttactgtgcccacctcggctactgcacggtggtttctgcctcttgtgagttgggacagggctggtgagatggtaaagaagccagcaagacggggcaggggaagtggcctcctagggtctctggctctagctggcacctgggaagtgtcttatcaggtcccctttatgggtgaaaagctgacattcagagaggtgccacaactcacagctccttcccccagaccccccagtgcgtggtgtgtgggcgctgctagcaggcagggggcaggctggggaggcctggtgggggacaggctgcaggagggaccacatggctctggttttccacagccttcttggatgccatgttgtgggaccctgcaggtttcctgggacagtgacggaggcttgcctgcctcctgctgcccagctcccctgctccaggtgaacaggtgccagcccacctgccctctgtccctgccccggtctgtgtctctgcagtcaccggcaccatgttctccatgaccaggaggttgaccgcaggacgtgtgtgcctatgaatcatctctggcctgaccaggccccgtacaccgtgtgcaacagctccctctcggagtacggagtcctgggtgggtccacgctctcctgcaggccaggcaggccccagacacctggggacaagagatgggctgggaagggaccggggccagggcctgggaggggcgagagatgctcagaggcccttaggggatggccctgggggatggtgattgggctgccctcacctaaggccatgtgggaggtgaaatcgtgtcccatctgggccccttggggatcccagttggggggacctccttgccttgaggggttttgtgggtatcagggccccagtgggcgcagacagagagcccaacacagtctgctgtgggttccagctgctgagcagtccagtcttggcccagccctctcacattcctttgagccccatcttgcctcctctgccctgcaccctaggaacactgcactgagatcccttctctgggctctgggcttccctgcctgtgtcccctgtgcatgctctccctcagatgcatcattagctggctcacctcgtcctcactgcctgcccctagaggccaggcagccccccgcccccaggcagatgcctctagggctgtttctgccccttctccttagcagctctgcatgtttttaaggagttcttgacagatggtccctgttgcctccccaggatacctaaataaggttgaacctgaccacacatgatagcagggctgagggtagcatctctgagcatgttgtcagcccccaggatggtacattgtaccctttgaatcccagggaatccctgggttcgtcctggcttgtgagaaggatgggtgggggcatggaggatatactgagaaaggctaaatttgactggagccactgccacttggtgactgtgtgcagcaagctctatcttgtcttctgtttaggctttgagctgggctatgccatggccagccccaatgccctggtcctctgggaggcccagtttggggacttccacaacacggcccagtgcatcatcgaccagttcatcagcaccggccaggccaagtgggtgcggcataatggcattgtgctgctgctgccccatggcatggaaggcatggtgagggctgcggtggtggctggtggcttggtgggttctggcgggccttgaaggggcgggatggaccctgggccccttgtcgggttggacggtatatgccttccaggcccctggagcacgtgggtctgtgcagggtggggtctgcacatgtgcatgctgcagctgctgagacgatgatgctacccctggcagcagaaggcgctaccacgtatgagtgcttgctgtgcgccaggcactgttcaatgcttctgaatgttaactcttccaatccatacaacttaatgaagtaggctgtgttcctgcttttcagatgaggaaacagaggcacagagctggggagtaggttgcccaaggtttcaca

SEQ ID NO: 5055 - DNA, 2300 bp, Homo sapien
tatggatataaatacataaacaattttgtaaaaatgtttgccaaactggccagtagttatctctggaaggaaaaaaaagaggtgaggttggggcaggtggaagggggcttttcacattttgttctgtatccttctgtatcatttaagttctgtacaactagaataaataaaaacttccatgttctgacacacacacacacacacacacacacacacacacacacacgccacaggcatgggaaaaaaagaaaggtgtctgtttctgaagatctctgcaaagcctacagccactgccactaatcctctcaggcttctgagaatggcagccaccctcatgggagcgttgattgccccaaatgtttgctttaatcaatgcaattagcagaacaccaattaggctggaaggctgaaaggctctgaagccttttgatttgcaagagccttgttcctgcctgctgctctgtgtcaggctttccatctttcttaatcggtgactctgacttgtaaacttttccactattaccccaaactgcagcttctccttttccctagctcactgagaagttccactgtgcccaagtcactaaagccagacacctgtgagttatctatgtctccaccctcatatctggtcaaccactaaaccccgtggagctgatccccgtaagtctctcaaatctggccaccttactccgtctctactgcaagtacattactgcctctcacccggaatttgaattttgaaaaacagaagagccttgaagagacagttcctctatggctcagccctgcttcctgaagtaaattttcagctttcctctgattctgtgagttgccttatatacaaccttcatatcaactcgttttcggctgaagctagccaggtcatttttggtgcttgtgtccaaagaattcccaatgaaccctgcccttctgcaccagataaaatcttactcatccttcaggatccaagtcaagtgtccatttactcactcagtcattcattcaacaaatatttactgaaaaataccatgatagtgctgtgttaagtgctgaagattcttgaccacatgtatccctaactgtctccaaataaagaacttttgggagacttcaggtgcagaagttagttgtattcctttcttcgtggcactctgtcagcagtgatctgggtaattgattaattacctcatatccacattccccatcctcctccctcgacaagcaaccatattaattggtttgatatgtacttgaatatattcttgtgaagtgcatactgtagttttgagattaaaattcaagagtgtaagtgtagaagcagagaagccagttaggaggctgctgcgataatccaggagagatttgatggcaacttgaaccacaggtatgttatgttcctatacaagaaatccctgcatttaaatgagaacaaaacccaacagaaagctgaaaaaaatacaacagaaaaccccaaactaacaaacaacgggagatgcaaatggttgataaccagagaaatgcagattaaaacaataacaggacattgcatctgctattctgataataattagaaagttgatctctatcccagagaaagttccacgcaggatcctaagggaatgtgtatgaagaagttcattgcagccttgtttgtggccacggggtggtgaggacagcctgggtcaccatcagtgggaggatgaatgggtaaaatgtgtatcagatttggggtaagcacttttcacgcattatctcatctttttttcaaaacatccctaagatagtggaacttttcatagcattcccattttacagacgacaaaacaaaacctatcctctcctacacacaaaggctgcttgtcgtctggtacattcgtcctagttttaggacgagcacacggggttcagggcctcagccccgttctgcggtctcagagaggagtccccccttcggccgtgggcgacctcgggcctgggccgccagcaccgtggacagcgccaggagcggggcggggcatccatggagacgtcacgacgcgcggagtctcaggggcgcgcgcccgtgggcggctgcgtcacgtgacccaggtaattggcacggcgcgcgcgcaccccttccgcgcagccccctgacctgcagcctccggacctcgctgcagcgcggacccggcccgcccgcccggtgagcgcggcggcccgccccctcccggtccctgcgccgctgcttctcctgccgtcctggggaccggccccacagctcctctctcctgggtcctggggcgccgctgcccgcagcc

SEQ ID NO: 5056 - DNA, 2300 bp, Homo sapien
gtagggacagggtttcaccatgttggctaggctggtctcgaactactgacctcgagtgatctccccacctcggcctcccaaagtgctgggattacaggcatgagccactgtgcttagccacattcaatacaatttgcattaagtaagcgataatctgggtgggcctgattcagttgggtggaaggccttaagagcagagctgaggcttctctgaagaggaaattcattctgtgcactgccacttcacccatgcctgagagttccagtgcaccctttggacctgactagtcagctccacaattgtgtaggccaatttttggcaataaatctcttcatatatatgtcctcctggttccatttctctggttgagcaatgactgatacaaatctattgtaaggaaacctgctatgaacattgttctttgcagtttttgtgagcacacattttcagtatttgtttagtagatatctaggaatggaaattgtaggtcaaaggttacgtgtatgtttaattttacaagggattgccaaactcttttccaaaattattacaccaatttatgttctcccagcaatataaaatgagatttccacttgttttccatcctcgtcaacatttagtgttgtcattcgtttttattcttttgtattttagcctctcttttgagtgtatggtggtttctcactgtgattttttttatttgcatttctctgatgactaataatgttgagcaatattttatgtggttgttagccagttgtatatcttcctgtgtgaagtttatattcaggtcttctgtccatttttctaaattgggttgtgtttttattgcagacatgtaggagttcgtcgcatattctgaacacaagtcctttgtcagatatttgatttgcaaatattttttctccagtcttgtctaaacattttcctgaaggtgttttttcattgtttgttcgtttgttttttgtttttgtttttgttttgagatggagtcttgctctgtcacccaggctggagggcagtggcatgatctcagttcaatgcaacctccgcctcccaggtctccatttaagttttctttttttttctagtgtctttttttttttttttgagatggagtcttgctctgtggcccaggctggagtgaagtgacacaatctccgctcactgcaacctctgcctcccaggttcaagcgattctcctgcctcagcctcctgagtagctgggattacaggcacacgccacaatgcccagctaatttttgtatttttattagagacggagcttcaccatgttggccaagctggtctcgaacttctgacctcaggtgatccaccagcctcggactcccaaagcgctaggattacaggcgtgagccactgcacctggccagtagtgtcttctttgttgttatgtttactcctaggtattttatggtttttgacattatgggtaatggatttttaaaaaatgtttattttcccattgtttgttgctagtacacagacatacccttgatctaagtttacttatatgctttttctttattttaatttcccctttcttttcttttcttttttttcttttgagactgaatctcgctctgtctcccatgctggagtgcagtggcacactcttggctcactgcaacctccgcctcccaggttcaagcagttctcctgcctcagcccccctagtagctgggattaaaggcacacaccaccaagcctggctaatttttacatttttagcagaggtggggtttcaccatgttggccaggctggtcttgaacttctgactttaggtaatccacccgcctctgggattacaggcatgagccactgcgcctggcctctctctttagttcagtgattccttaggatttgctatgtaaacaagcatgatatctacaaatagggacagtttgacttatttttttacattctttatgcctttttgtttattttcttgccttattgcactggctggagagaccttcagtacagtgctaaacagaagttattcttgccatgttatgaaaggtggaatgtttttgccatcaagtgtgaagttaatagtgacagattgtttgtttcaggtactgagcagtacagtgaatacacaggctatgctgagacatatcgttggtcccggagccacgaagatgggagtgaaaggtgagtctgtttctgtcttcagtattccatggctaaaagcaaaggaatttgggcttgaccctcacacactctcattctgtctacttgtatttcagcaagtgaacttaaaaagaaaaaaga

SEQ ID NO: 5057 - DNA, 2300 bp, Homo sapien
atacatcaaaagattttcatgaataaaaaccagagaaagtatattgaccaggaaataaattttggatgctctttatttaaagaagtattcactagtttatttgcataagtcaactaacgcattgcttttctacccattcctctcttttgtgcccccctaagccctttgtggagttcttataaaactgttttgtactgagttttatatctccatcttcctctattgaaccttaacattcttgcttccccaaaaactgatagcagctaagacagtaatagtaaatgtccaacaaatactggtaatgaccagctgataatagattggtattgccactcttatctcagaagctgaatgaccatggtcaagtttcttgacacctctaagcttcagttttatcacctatgaaataatataataacggccattaccttacagggtagttatagatattaaacaagaagatacatgcttaataaatgtaagctattatcaatgggtagcctttcctacaagtggatgtaaaccagaacacctcaaaagtttctttgtgctaagtaggtaaggtcaacctggtcaagtgaaatggctttttttcagttctgggtcataggattgtcttaaaatatgtctttgaatcattttaaggtcatttttctcatatccttcttttactcttgcattacagtgtacttggcatcttcccccttgaatgtattgctattggacattgttaaatttttagaatgaaatcaattatcaggattttgatatttaagggaaaattacatgcttctctgatatggaattatctcatagcttatcgaatttcagttttgtgccctgtactgaatgaaatattacaatgcagaatcatttggacctatgagacacaaaatcaaattagaatttgtaatgacttgttaaaaagatgactacgtaaggccaggcacggtggctcacgcctgtaatcccagcactttgggaggccaaggtgggtggatcacgaggtcaggagttccagaccagcgtggccaagatggtgaaaccccatttctactaaaaaatacaaaaattagccaggcgcggtggcgggagagtgtaatgccagctactcgggaggttgaggcacaagaatcacttgaacccaggaggtggaggttgcagtgagctgagattgtgccactgcactctagcctgggcgacagagcaagactctgtctaaaaaaataaataaatgactgctttttttggctattctaggtctaattagaattattactattggttttttttgttttgtttttacagtactttgagttgccattttaagtagaattattataacgaagtagtacagagtttacttttttgtcctgggagtcaaatcatgtatgtcttctctaaaaactaacttggctttctaaattttaggatttcagatactttgaggaaaaagcttaaagtttgttttttcagctggaaatgtatatgccattataagtattgggaatttgaagaaataaattataactagacattttattttctgactttttcactgtacatgttaattaagttctttgtagaaatacagtacaacattgctcttggtcttcagtgtgtaaagctaatggtttgaagaggaaatactaaagagaataaaagaggttgcagtataatgagtggttgtgtagaagttctggagcctactcaatagacttcagaagcttatttaaggtaccgtatttcatcgaatctgagatgtcatagatgactttttaaaaatgctcttatattatatacctctaagaaggaaaaaacactcaggacagggagtttagtaggagacatgacccacaaggctggtacacctaaggataaatgagaaattaacttgaccttccaggaaagggaccataaagaaacgtgcaagtctcaaccttgacactaaatagagaaaggaaaaaaacatttctctgagaatttgaaccacaagccctaagctttgagtgtgcagccttaccaccagtgtggtccacaaaggcctgccacaaaggattaattcagatggtatcaggctgatagtgttcccagacgacagcagaagcagatgcacatcttctctgggaaaattcacctctagtctagacctatggtaagatacctccattataaaagatgtgttccagtttcggaaatgtaacgtgaaaaaacatgccttttagaattgataaactagaattccatcaggaccaacttttcagtgttgttaaacatgtgtattttatatctgatgaaga

SEQ ID NO: 5058 - DNA, 1160 bp, Homo sapien
gaattcaatgtttattgacttgaagaaaacagcaccttagattacctctctttattgtgtcatgtttctccccgctcctggagcctgaatttagactagccccctaacaaaggttagtaccagaattccccgattctttcttgttttgaaagatacccacgtttctgttgagggtagagtaggggccaagggaggggttgtgagacacagagccaacatgcctactttccaggtttccagcaacagatgaaactttttgtgtgaaactgaactgaaactgccctgaaaagattaaaaaatggagaactctaaaggattaagaatgacttagtcttggagtactaggagctattaaactccttccttggaaatcattaagaaataacctcttctatgttcttagataatatcttcattgaagtagaccagataaccttacaatattttgagtcactgattctttgccatggtagctttgaacactttattttatcgtcagatcaatgtatgtttttttgccgttgcagagccgtgtcaagatgagagggaagcgtagaccgcagacccgtgcagctaggcggctggctgctcaggagtccagcgaggctgaggacatgagcgtccccagaggacccattgcacagtgggctgatggcgccatttccccaaatggccatcggccacagctcagagcagccagtggagaagacagcactgaggaggccctggcagctgccgctgcaccttgggaaggtggtcctgtgcctggagtggacacaagcccctttgcaaagtctctgggtcattccagaggggaggctgacctttttgattctggggacattttttccacgggcactggatctcagtccgtggagagaacaaaacccaaggcaaagatagcagagaatcctgccaacccaccagtgggtggtaaagcaaagagccccatgtttcctgctctaggcgaggccagcagtgatgatgatctctttcagtctgctaaaccaaaaccagcaaagaaaacaaatccctttcctctcctggaagatgaggatgacctctttacagatcagaaagtcaagaagaatgagacaaaatccagtagtcagcaggatgtcatattaacaacacaagatatttttgaggtaataggactt

SEQ ID NO: 5059 - DNA, 2300 bp, Homo sapien
atctcatatggcctcaattcctgtatactctcgggtcactccaccaacaacctcctacaccagagccactttgaaacattagaaaatatatttgagcattcagaaatgtataaactaggcagccccagactgcaagcagctcagaggtcccacagagaggcttagggagggtgggggaagaattttatatggtgaatgtggaagaaaaagaaaatacttgattgggtgaagtggagcagtggcctcatttggaacattacagtggaaggtctctagttagatgttagttggtggtttctgactggttaaacttaagtttccttttattatttacactgagtcaagttttgggttatttaaggaggaattgagtgcactgcagccacctcagcctcatggccacctgtttatttgattatttttaacagagaagatcctttaaaaaatatctgttaccctggctggagtgcagtgacgtgatcacggctcactgcagccacaaccttccagctcaggtgatcctcccacctcagtgctccccaccctgagtagctgggactacaggcatgtgccaccacaccaccatgctaggctaatggtttgtatttgtttgagagatgcggtttccctaagttgcttaggcttcttttttagactcaaataatctgcatgcattggcctcccttagtgctggaattacaggccatctaaatcttttatctcaggtttgccttgtgacaaaaggaggggtactttttctgacatgaggcagagaaaggtgaggtgggcgcatcctgtgcatatgattttctcaggtgatgggaatatggttggctcttgactaatgggatatattttctctttgaatgatttggcaagatatcagatgagagaagttgaatgaatgttagaagaacatagaaaaaataggttatacacgttgggtttctgaagaaatgatgtctttggagaaacaaaacttttattgatttctggaaacatttagggccaattttttatgtaagtaatttgaatttatgatgatatctctgaccactttttgatattttttctggttcaggtgagtggtgtcattgagcaaacacaaagtcgggctcatccaaggatgagattttgccagagaaaggacgagcagcaagtcagggagcttaaggtaattatgggaatgtgactatctgcaatttcttaggtagaaggagacagattggatttttgtgtgtttggtatttgggataagagggatgtgggtgtgtacttgacatgggttgtttattctctgtctctctctttttctctcttttttttttttttttttttttttttgagagggagtctcactctgtcgcccatgctggagttctgtggcacagtcttggctcactgcaacctctgcctcccaggttcaagggattctcctgcctcaacctcccgagtagctgggattacaggtgcctgccaccacgcccggctaatttttgtgattttttttttagtagagacgaggttttactacgtaggcgaagttggtctcgaactcctgacctcagatgatccacccgcctcagcctcccaaagtgctgggattacaggcgtgagccaccgcgcctggcctgtttattctcttaagagagaaaatgaggggattagtggactgtagttctggacaaggtggaaaactcttaaagtggaagtattggggcaagtgctctgacaggctaggatggtgcagtcagtcccttcacccagaaatcagtagaatgttaacagttcagactcaaaccttgtgaaaaacaggttctagaaaggaaatccctcacagcaactggcaccataatcaagacagaatttttgcagaataaatagagttacctgctttcagccccaggtcgtagctattgtctgccctgctgatatgtgataataatttgtgatcctgttgtcttaaaatggggtcactcatctccagtagaattaagtccacagtgaagttgtccccccatccccagagataaacatatatgaatgaacttacgtgataacaactactgctgcctgggatcatgagagacctgaactgaactgataggaagtgaaaggtggctgaggtaatgagaatagacccatctgcagaggatcataaaaccagcaaagacaagatcttgtctaagatgccttcacaaactttgtccatgagaactgtaaggtcttctccagacctgttggctgctgctgtgatctctgcccaagaggagcttctgaccaacatccaaagggcttct

SEQ ID NO: 5060 - DNA, 2300 bp, Homo sapien
gcccaggaggtcaaagctgcagtgtgccttcattgtgccactgcactctagcctgggcgacagagtgagaaaaaaaaaaaaaaaaaaaagatagattctaagaggccaaggcaggcaaatgggcagattgcttgagcccaggagttggagactagcctggacaacatagctactaaaaatacaaaaaatgagctaagcatggtggtacatgctactcccgaggctgaggtgggaagatcacttgagcttggggaggtcaaggctgcagtgagccgtgatcatgccactgcactccagcctaggtgaccctgtctcaaaaaaagaaaaatgtggtatatacatagaatattattctgcctgtaaaaaggaaattctggctctccctctcactctccctctccccacggtctccctctccctctccccacggtctccctctccctctctttccatggtctccctctgatgccgagccgaagctggactgtactgctgccatctcggctcactgcaccctccctgcctgattctcctgcctcagcctgccgagtgcctgcgattgcaggtgcgcgccgccacgcctgactggtttttgtatttttttggtggagacggggtttcgccgtgttggccgggctggtctccagctcctaaccgcgagtgatctgccagcctcggcctcccgaggtgccgggattgcagatggagtctcgttcactcagtgctcaatgttgcccaggctggagtgcagtggcgtgatctcggctagctacaacctccacctcccagccgcctgccttggcctcccaaagtgccgagattgcagcctctgcccggctgccaccccgtctgggaagtgaggagcgtctctgcctggccgcccatcgtctgggatgtgaggagcccctctgcccgggctgcccagtctgggaagtgaggagcaccttttcccggctgccatcccgtctaggaagtgaggagcgtcttggcccggccacccatcgtctgaggtgaggggagcgcctctgccccgccgccccgtctgggatgtgaggagcgcctctgcctggccgcgaccccgtctgggaggtgaggagcgtctctgcccagccgccgtgtcttgagaagtgaggagcccctccgcccggcagctgccctgtctgagaagtgaggagccccgccgcccagcagctgccccctctgagaagtgaggagcccctccgcccggcagccgccccgtccaggaagtgaggagcgtctccgcaaggcagccgccccgtccgggaggtgggggggcagcccccgcccggccagctgccccgtccgggagggaggtggggggcagcccctgccccgccagccaccccgtccgggagggaggtggggggcgcctccgcccggctgccgccccgtctgggcggtggggggcgcctctgcccagccaccccttctgggaagtgaggagcccctctgcccggccgccaccccgtctgggaggtgtacccaacagctcattgagaatgggccatgatgacgatggcggttttgttgaatagaaaagggggaaatgtgcggaaaagatagagaaatcggattgttgctgtgtctgtgtggagggaagtagacataggagactccatttctttctgtactaagaaaaattcttctgccttgggatgctgttgatctatgaccttacccccaacccggtgctctctgaaacatgtgctgtgtccactcagggttaaatggattaagagcgtgcaagatgtgctttgttaaacagatgcttgaaggcagcctgctccttgagagtcatcaccgctccctaatctcaagtacccagggacacaaaaactgcggaaggccgcagggtcctctgcctaggaaaaccagagacccttgttcacatgtttatctgctgaccttccctccactattgtcctatgaccctgccaaatccccttctccaagaaacacccaagaatgatcaataaatactaaaaaaaaaaaaaaaaaaaaaaaatactgcaagaacatctgccccagaactgcctgtccaacctggactgacatcatccttgttattgatctttgtagccaaatataattattttaaaacaaacaaaaaaagagaatgtaagcagtataagactttaaaacacacaaatgaaatatacatgactacatgcttcagtgaactaaaactttcatctgtaatctttattttgcaacattctgaagtaacattacagtcttttcagtgtgctgtgtcatttatatcccttactttatcctag

SEQ ID NO: 5061 - DNA, 2300 bp, Homo sapien
cctttgtctgacacaacacgagccaggctttcctcccacctctacagccgcttctcttcagtctactcttaaactttggtgttcctaaggcttctgccctaggtcacctttactttctctacatgtttatgttatctatgcccatagcatccattataatgtttatgccatgaactccccaatctacttctccagcacagaaatatttcttctcaagtatcccattctttcatgaatccatccccttccctattgccagcatccaggcctaagctacaattatttccaacctagattaactccttaactgagtcttgatgctccacttgagttccttttcaatccattctttattttccacacaccagccacacagacttttcaacaaataaataagtctaatcaagtcactcccctactaaaaacccttgagtagcttatcaatgcccttagagttcaaaatccttagcaatgtctacatatccaatttgatctgacttttctgtaccaccctgcagcctcatctctcacactctcttgcgttcactctatatatcaattgcactcctgtttttgttttgttttgttttgttttgtttgaggcggagtttcgctcttgttgcccaggctggagtgcaatggtgccctctcggctcactgcaacctccgcctcccggatgccagtgattctcctgcctcacctgcctcagcctccggagtagctgggattacagttgcccgccaccacgctaggctaattttttgtgtttttagcagagacggggtttcaccatattggtaaggctggtcttgagctcctgacctcaggtgatccacccgccccggccttccaaagcgcagggattacaggcaaaaccaccgcgcccggcctccattgcactcctgaaacacttcttacttcctcttcatctaactcctactcattctacagtcctcagaataagcatctcatcttctggaggactattttcgattccataaattcagttaggtaaaacaatctgtctttcatctatcagaacatccattaccttttattatattaacttttgctatcgtctatctctccagatagattttaaggtatgaaggcagaggccaagtttctctcattcaacactgtataccagggacgggtacaatgccagcttagactaatagctctgcaccctgggacccagaatctgcacaagtgaagttgttttcttcctatctagaggctgaagcgccctactgttttacatacacaattagatctccttgacgactaaggcaatttctcaatcaaacctgaagaagcaaacaggtggtggagtctcctgccattttccgccctgtgagtgactgctcatcagagtttctcacatcaatcgcactgggaaaaatgcggccccattcacccactagtggctttggtagctcagcaagtggacctcagagtgatgatgcacacaagaccagaaaggagtgactggagtccctgagaccagaaggttcgggccgaggcgaaggacaaagatttttattttcccacgtaccaagcgaggtggcgctgcctctgtgctgtcccgcctgccctgggacgcaggctggcgaggacggtgggaccctgaactgcacgtgagcgtccttggggtcgaggacgcgcctctgcctgctcggaaagctccgggcgtccgaagcagccggcgaagttgtagcggcgccccagcggggtcgcttggtgcagggttcacagccggggcccgcattcatgctgggaccagcagcgcactgtccccgggccggccccgggcggagagcctcatttcactaacctgagagagatggactgcgcgtccttctcagcgcctgcctgcaccattccctctctgccgctgcctgcttctgcaattgctgatccgccggcctcccaagtcaggccgtaaacactcgcctgctttctctcttccactggcaccccacctgcctcaatgcgccgctttgattcgggattcgttcactttcccaccaccggaaagctgccgtcaggcgcttccagcttccggggcgcacattgccgcaaagcggaagtgtggcgcttaacgggaaccggcgcccggaaggtcagcgtgtgaagtaggcgctggcaacgcggggttacccgctgttattgaggagtaacggcccagcggaccacccaggcttgaggcagcggcgggaaccactcggtttgctgcgataccatggaaggaggcgggggaagcggcaacaaaaccacagggggattggccggcttt

SEQ ID NO: 5062 - DNA, 2300 bp, Homo sapien
gatccaactcccttgtaactacgaagacagactggcctaagagctgttccttaaacctgccaaatttgttttgtttcaggacatttgcactagctattttcctggatacttgcctcccaagcatttgtactgtatttgggtcacagctcaaatgtcaactcccttgagatgttttccctaaccggctctaaaatggcatcctgcttccatcacaatctcaagactctgctttattccctttacagcacttatcactaacggcaatgttttaatttatgtttgttggtttacctcagtattatgtaagctctgtgagcgcaagagtcctcttttcaaaaaaaaacaaaaaaaacccccacaaaaaccactatagtcctgcccccagaaaagtagctagcacactgtaaaagctcagtaaatggtgttcattccctggtcccccaatttaccttcaaatcttaatcaaattaatttaacaatattgtcacattaaggaagtgtatatgccctttgtgctctgaaactcagagatactaagattaatatgaaactgtgttctaaacaggtaaagtagtagctcaggcctaggaatcccagcattttgggaggccgagacaggaggatggcctgagttcgagagtttgagaccagcttggacaacacagggagaccccatctccacaataagtcaaaaaaaaaaaaaaattagccaggcgtggtggtacgtacctagagtcccagctacttaggaggcttagaggggaggattgtttgagctcaggagtgcgaggcttcagtgaactataatcatgccaccgcaccccaatatgggtgacagaacgaggtcctgactctaaaaacaaacaaacaaaaaaacgaaacaaaacaccatgtgttgtagattcagttttttgacaaaggtgacaccagggaaatgaaaggtcttttatatttttttgcactacagtctgaacatatttcgttgttgttgttccttagtataaaatacctagagaaatattacaaggattctctaaaaagaaagtactttcgtaaaggctttatccacgaccaactgcctatctttaggtccaagttgtatttatctagttgaacaaccacagttacaaagtaccaaagttctggaaaacattttcacaagaccgaggagaggcaaaggcaagatatttatgcctctgtataccttgatgttgcctatttccgtttctataattcttacctggcttctttcttcatgtctatatatcacctttaaagttcagcttacttcctagctcctaaagaaggtttcctagcctgtcccaagtcatttatttctcacttacaaacaatattactgaatattctgccctgacggctacttggaggctcagaatatgtcgctgtgtactaaaaagttaactacgggcttgctatttggaatacatttactcccaaagctcggctctactcttaatcaagggtcaatcacacggcccaccacacacaaaacgtaggaggcttggatataaacctaagaaaacatgcatcatctcgcgagtccaggtcaatcacggacagcttccccaggagatccgtggcccttttttaggcctttctatcttgaaagagcagccatgcagatacactaaccccaccactggtacttaagcttgtaaatgccagcaaggaaaaaaaaaacaacaacataaaacatgggacgcgcaacttagtgtagacgcaaaaaccagtcagaaataatcgcaagctaggccccatacttacgcgggacgccagccaaatccgcgtgcgagtaacctgctccgccggctccgaaaaagccggccaatccccctgtggttttgttgccgcttcccccgcctccttccatggtatcgcagcaaaccgagtggttcccgccgctgcctcaagcctgggtggtccgctgggccgttactcctcaataacagcgggtaaccccgcgttgccagcgcctacttcacacgctgaccttccgggcgccggttcccgttaagcgccacacttccgctttgcggcaatgtgcgccccggaagctggaagcgcctgacggcagctttccggtggtgggaaagtgaacgaatcccgaatcaaagcggcgcattgaggcaggtggggtgccagtggaagagagaaagcaggcgagtgtttacggcctgacttgggaggccggcggatcagcaattgcagaagcaggcagcggcagagagggaatggtgcaggcaggcgctgagaaggacgcgcagtccatctctctcagg

SEQ ID NO: 5063 - DNA, 2300 bp, Homo sapien
aaattatgaatctctgacttttcagagttacctgaaagaaaacatctggttttagaatcacagcttgattgcattctttccttgaccttttgccttttactaataggcacagacattgcaggagtaagctaagcctcgcagaagcatttaagggacactcacaccttctgtgcaatgccaggtgcaggggagggagggggcaggatacagagctgggttgtgggaagacagtgggaggccagggctttgaacctgaaacatttgaggaagcctggaaataagaaaataacagtaaatttctaaaatatgtagttgcccatgccactgatgtacggaaatgaagttgcctaattactcctgagagtgacatgagacattttataacaataattctaggccaggcgcggtggctcacgcttgtaatcctcggctttgggaggccgaggcgggcggatcacgaggtcaggagatagataccatcctcgctaacactgtgaaaccccgtctctactaaaaacacacaaaaaaattagctgggcatggtggcgggcgcctgtagtcccagctactcaggaagctgaaggaggagaatggcgtgaacccaggaggcggagcttgcagtgagcggagatcgcgccattgcactccagcttgggctacagagcgagctggaccctcatagggatggatgcaatcccatcacccactcagatgcctgagactgtgcagaagcagggccagtgaaagcagagggcagatccagcagtgcttcaaggggccctgctatgcggatttagagtcggccatggacatggctgaagatggccaggacatagaacagggagcaacagcagtactcattgcccgttggcaaacaacgccatattgctatactttctgataatcatgcttaagcaattggggaattcagactacctgggatcaaactatggccccacccttagcagtcatgtgaccttggggaggttacttaccttctccgtctcaacaacttctgcaaaatctgtaacatgagattgtttctgagggttaaatgagcatagcacagtggggacactgtcaggcacacactacttgccagatgtcgagtattcatctttattgaaataggactgtggtaagccactttatggctctcgattttgtatgagaaaatcatgcttagtgccttgttagtaaaagaaagaaaacctgaaagtccctgccacggaaggaagaaatagcggggagaaaagggagttggtaagtttcagcatttcagagcttggaggggcaagttaggtttctattttatggagaaggaggtggaggcaggatgggtcctaaggtgtcattcaaaacacacagccataactctttattgagagtagagctagggccccagggattgctgtggtcaagttgcggacaaaaatgaccactcgttggaagacaggagaggagtgtttagttacaaaagcagtcaacaattcaggtgtatctatattcagtcagcaaataaaagttgttcaacttggttgctaatgggacccactctactgaggctttgtatagaactcatagaggaagctggcttcgaggaatgaactaccctttgcttttcttaggactaaaatctcaggaagctggtgatgaatgaaaaccttagtcccactggcactgcacgaggggccaggagagcagcagcatcataagccacagggtggggcagccaaggcaggggcattctgagctgttggggaggggtggcaggcagggtggggcactgtgaggtgtcggggagggcattgtgaagtgtggggtggagcattgtgtgccacatgcctgggctcccacctggggccagtgggcttcagtctgtaggtgactacagaaggaggaggagctccgtctgttctctcttcaggcagttgttgtgtctctcagcgcttgttgggttcacaacctattaaataagccggctggtcttcaccctcccagacaagtcaactcaggggaggcagcagggtgcgggccttggcccgcagccctagccggggccggggccagggctggtgcccggggcctcgctgtgaggtaggcaggcgaggagcgggaagaccatctctgcaagtgcagcatagcctcggcctaggacagcgggagtgcgtggccaaagctgtgagcagaggcacaggtggtggcagacagtagaggcgccccatggggaacatactgacctgtcgtgtgcaccctagcgtcagcctcgagtttgaccagcagcaggggtcggtgtgtcc

SEQ ID NO: 5064 - DNA, 2300 bp, Homo sapien
ctacttgggaatacctgagataacccaggtgaaatcctgttctgggcagctgctttgcaccaggcaccctgctggtcactggaaggcacacagacaggaataggtcacagtcactgtctgggtcacaaagttcttaactgcaaacaatagaatttactctaggtcatttgaggtggaaagagatttgttagagaattcaagcctctactaacggccagagacacaggctttcttggcacaagttcaggtagagcactgaaaccacactgctgcttggctccagcaagaccaccttgctaccagtcacagtcacagcccccatgcactgacactgcacactggactccaagaaacccttgccctaagagccagaaccctccacaccatcattcctagggagattctgcatgatgccagtgtccttggaccctctctgaagaggactttttgagaggagagtgtttgtggagccgaggtttgtgcctgtaccctggaggtaagcaggtgagggcagcaaatcctagttcctctcaatgtaaggcagaacttcccacttcacactgtgggaagttcttcaaacttggagttttaaaagaatccaaggggctacagtgcatgatgaatgtgccccgatttcctggaacttagagtcgatgaacacttaacttatgcaggtaaaggcagaagtgtgtggcaccgttggtgagtgaggaggcagccagacagcactacagctcttctaaggagcaggagagtgacctcaagctgtgttaggggtggtgaggctgattttagggagggtagaggatggtgctggaaagggccactgtggccagctcagatgagcttcaaggatcccctggttaggagcatgaactctcatctgtgggcagagggatctcaggttaaattttaggaactgtagcaagctgtggcgaggagtgaggggactttttgggataaaattgtcttatgagctcaattgcatcccctaaaaattcattggtttaagccctaacccccaatatcccagaatgtgactgtaatggagacacggcctttaaagaggtggcttaggtaaaatgagatagttagagtggaccctaatccaatacagctagtgtccttatcagaagaggaaatttggacacagagagagatgccagggatgcatgccatgtaagaggcagcaagagcatggccatctgcaaaccaaagagagagggctcagaggaaaacaagccttccccaatggcttgacctcacatttctagtctccagaactgtgagcaaataaatttctttagtcaaagccacccagttgcagtgttttgttgtggtggcagagcaaacagataaagtagtaagtccctccagcaccctaggaggttctgcttgttgccattccccaaaggccatcctagccatgatgagggcaggtgcggttgtttgggaggagaccactgtggaacaaagagaaacaaggcttgcttgatgcagcagggagtagactacagattcaagaagggctctagaaaggtccagcaattcagcttgtcagggaaccccgagctgtatgtagttcttgctctcctgtgccctgcaggatggcttgacccatttctgttctcatgtcagaccctaagggcagggtcatctgggccacagacccaggcccggtgggcctggtgggctgacctgtgggctattcttatgccttcaggaaacccacctttaccacctggctgttgtgactggcatcgctgaggctgtttctttgtgtataaaatcgaataaggacacatcacgtgctagcaatccaccagcatagggcgaaggctcagcaaagagaagttctctcctcctctgctcttttaggtcagcagcaaatgcagatcggggtggggacaaggtaaacacataacttgggtggagatgtgattgattaataactcataaatcatctgaaaccatactttccttttgatagtcaaccctctgtaaacactcaatgtgttctcaccttgttatcattcccaatgatgtcgaatgcgtggttgccctctccagtataaaagtttgatgcagctttgcctggatgtacctgtctataaggagtcctgcttatcacaatggtaggtaactggttttatatataaaggctagaaaagcaaaagagaatatgtattcctattttaatatgcgtgtgcttctaccacatagcattgaatggtaaatgtgacctagttaggaaccttatgttattacctgcaattcaatgtgcagagtatgagagtctg

SEQ ID NO: 5065 - DNA, 2300 bp, Homo sapien
ttcttttctttacggtgttcctgtttatccctccttcctcttcatcaggaagtgtcttctatgatgtgtcccccacattcctctgtgtttgcttgaggtcaaagcagcttagaacaagaaacagcttagaacaagcctgtaaaacagcttagaacaagcctgaagaaagtgcccccaagaccacatgcagcccgaggggaattaaaggccaggggctctgccttgcagatggagagtggcctgggtgcaaggccccagcatcagctacctcttgctacacacagaccaccgaaaacttagtggcttaagacaacgacaacattgattctcttttaactgtttctgtgttaaagaacatctgttcactcaacaggtctgtactgagcacctgggccaggcagtgctctagacctggggatacagcagtgaaccagagagatttcaggagagaaccctgttctcctggggcttggactcagctgtgtgtacgtgacagatcagaaatgagcaaacagtcatctgttgaacaatcagtgggcaactgataaagagctttattttcccctgtcccctatctgtttaaacatgctatgtgggccagttgagcaatctagacaggtcccttagctttcttgttcaccttcagataatttaaaaaagtggtctgagttacattttgagttacacaaagtctcattccaggggctgcatctgaattgagagggaatgggggacaggagagttaagggctccttctgcctgaggtcatgttctaggctgacttcctcatgggacttttgtgggcttctctctccacagctccccttccactcacagcctatgactgttatcttagcttctgcatcgtaatctatgtctcctattgttttctaatgaggttgccttgccccttgtagcagagtcactcttggatgagatccataaaaccctgctatgatcacctcctttgctgcggaatgtggggaagcagttggcaactgagtatggaggacctctgtcaaaactgagacagaaagaagtgctatttaacatctagtcacaagtaaataatgtgggttataatctgggctgtaggctggacgtggtggctcatgcttgtaatcctagatcaggtgggaggatcgcttgtgcccaggactttgagaccagtctgggtaacacagcaagaccctgtctctacaaaaaaatttaaaaaccgggcatcatggcgcatgtctgtaatcccagctactcagcaggttgaggcaggagaatcgcttgaacacaggaggcagaggttacagcaagccgagattgcgccactgcgcctgagcgacagagtcagaccctgtctcaaagaaaaaagaaaagaaaaaaagaatctgggttctgccatttatttatttactcaattttttttttttttttttttgagacggagtcttgctctgtcgcccgggctggagtgcagtggagcgatctcggctcactgcaacctctgcctcccaggttcaggcagttctgcctcagcctcccgaatagctgaggctatacgcgcgagccaccacgcctggctaatttttttgtatttttagtagagaaggagtttcaccgtgttagccaggatgctctccatcttccgacctcgtgattcgcccgcctcggcccccaacgtgctgggattacaggcgtgagccactgctcccggcctattaactcaatccttagaaaaacaaatgtggcaaaggtggaatcatacaacatatggccttttgtgtcttacgatattcatttttgcatctgaatgttcaaactaaataatatctaccttgtgaggccatctgaatcacttaggatggtccttggcaccaaatttgccttcaaaaaagcatttgcttcatttaatttcgatttattcacgaaggactaaaggacactgcaagggcggggagggagtgtgcgcctgcgctctgcgcctcctagagggcagtcaagggcttctggctgacccgagcggagatctcgcgagactgtcagacgtatggcgagaggtgtgggaggaagattgtgttgtcgcgagaactctgcctttgggccgtaggttagtgtggggccgtgtctcagtccacccaaggtctcctcggatcgcctggagaggcactcggacctggtaagaacgctgtgggccgggtggaggctcgatgaccgctggcccgctgggcccgggcttgtccgccccttcccgacccgaccgacaccgggaccggtctgccttctccttcccttccctcccctccaca

SEQ ID NO: 5066 - DNA, 2300 bp, Homo sapien
cagtagattagggtgtgggagctgttctgggagacagcaggagagtcagagtgaggccaggaaatagacagctgtgatggttaattttaggtgtcaacttgactggattaaggacatctagaaacctggtaaaatgttattttggggtgtgtctgtttccagaggatattggggtgtgaatccaagtggattaggtggggaaaatccaccctcagtgtgtgtgggcaccatccaatctgctggggcccagagagaacaaaaacattgaaaaggcagatctatttgctggagctgggatacattcttcctctcctgtctttggacaacagaactccaggctccccaggctttgggcttcaggacttgtatcattggccccctgggttctcaggcctttggcttcagactgagagttacaccatctgctttcctggttctgaggcctttgcacttggactgagccatggtactggcatcccagggtctccagcttgcagacagcctgtcatgggatgtctcagcctgctaatcacatgagccagttcccctaataaatcccctctcatatctatatctgtatatatctttatgtctatatctatgtctgtctatataatgttccatctctctggagaaccctaactcaggagccttattgcctttaaaagaaatttggactttatcctgtaggcaaatggggagccataggagagctacgctgctttagatgagatgatctacttgggatggttggttgttgttttgagacagcatagaaattcttgaagcagaagagaggtaaaataccttatgcatttttcccctttagaacctaaacattttataaagacacaagggcaaatactgaagcataagggagtaaaaagctacatgtaaagtggtctgagtgcagaattttagatttttgtgattttctttctccttagtctttttatgtttatgtaatatttaataaatcacatcattatagtaacagctacagctggcttgaggagagaaacacaaatgaatataactgtgaaactcagtgaacatatacataggggagtagctgaagactttactgtgctggggcgttggtcaggatcttttagagagagaacagagaccgttggttaagtaggtgacggccaacaaagtttctttgtatttacattgtgatcagccatttttcagaggcacataaaatagatgaaagttcctgacatgagttatattttaatagaattccttctttgttgccattgatgtaaattagtacaaaggaccataaaattgtaactttagtcattcagaagtatgtctgttttttttgtgtctttacgaaatgtattatccaaggagggcttttggaattagggagaaattttcttatttttgataatgaatgcctggattggggtcccagaaattgtatgcatcacagacaaagcaggcacttccactctgttcatctgaaatctaagggatacttaatttagggtaatggctccttagtgttcccctttggtgtttctcatgtgattttgctttactcttaatattaacaaaaacagctttatatgcatagacaacagcaagtattttacattcaaaaaatcgactgaaaggtaatagaattacaacattgtctagatttcatcttttggcctgattgcatatgcaggctatgaggattatcttggagaaaagggaaagctagaagtaccataagcatgatagtcacaggtaggtagggctatattgccaggcactgtcctaaacattttaattcatgtaattcattatagttcatatataattctcattgagttgggcccattatcgggtggagcaagtggggagaggagaggctggagaggagccccaggtgccatccgaggtccttctagctggccttaccctgggggccgggcgggggcagcaggcgtctagcagggaggcccagcggggagggagctgcaggggggccgcgagcgccagcggggactggctgggagcagggcaacaatgggcggagttttccgctcctccccgcccttggcttgagcgctccagctcgctagtggcccgggcgaactggagttgccgtgtgacgcgtgggcgggacgaggcccgggctcggggacctttcgcactcgggtcaggggtaaagcagcctgtcgcttgccgggcagctggtgagtcggtgacctggcctgtgaggtacgtctggcagcccaggggccgtagcgggagcccttgaggccggtagccttgcagggctggcgccgggcagg

SEQ ID NO: 5067 - DNA, 2300 bp, Homo sapien
catttgacattccttgttttgtgattaacagaagtcagcatccggtattgtagctgtccctttcagcgaatggctccttggaagcaaacctgccagtggttatcaagctccttacatacccagcaccgacccccaggactggcttacccaaaagcagaccttggagaacagtcaggtctgttgctgcttttattgtttctacagtagacacagcagtaggtggagttagttactaatcagtagtactatgtgtcattgttaactttttggttgcagtctggaaacatatttattaatagtctcttcatcatagaaagtttagaaaataaggaactctttatcatagaaaattttaaaaataaagaattttatattaaaaaagcccacaaacccataatctcaacacaaagagaaaaacactgtaacaataaaagtgaagtatttatatacttcagttttctatacatacatattttaaaagaaccattctgtaagtcctgtttcggtaggtagattttttttttcaccaggataacattaacatatttctctgtcatttaatttcttctgtaaagtatttagtagtatataattgattggctgtaatttaaattcaagtttttctggatataaaaaaggattccctaaacatccaggagccaattatttgtgtgcattcttgattagttccttaggagtacatttatagaaattgcattcctagattataattctgcttacgctttaagactttggatacatattgccaatttggcttcccaggaagttgccaacagtttatagtctcaccagcagaatattcagggtacctgcttccctgaaacctaagagtaatagtcatttaggttttttgctctgaatttgacacaaaatagcaattttgcttttgttttttcttccattagtaaggaggttgagtattttcttttttcgtttttttttttttttttttttttttttttttttctttctttttgagaccgagtcttgctctgtctcccaggctggagtgtagtagtgggatctcggctcactgcaagctccgtcctgcgggttcatgccattctcctgcctcagcctcctgagtagctgggattacaggcgcttgccaccacaccctgctaattttttgcatattttttattttttagtagatacggggtttcacccgtgttagccaggatggtctctatctgaccttgtgatctgcctgcctcggcctcccaaagtgctgggattacaggcgtgaaccaccgtacccggccaagtattttcatgtttattaggcttctttgatgacttgcctgatcatatcctttgcttattttttgtgctttatttgtaaaggcatattacacccttttctatcagataagagtatctaaatagagaaatcccttgccttttggctttgtgtacttaaatttcaaaacactgggcaagacagtaaatatgcagacagggccgggcgtggtggctcacgcctgtaatcccagtactttgggaggctgaggtgggcggatcacgaggtcaggagatcgagaccatcctggctaacacggtgaaaccccgtctctactaaaaatacaaaaaaaaaaaaaattagctgggcgtggtggtgggcgcctatagtcccagctactcggaaggctgaggcaggagaatggcgtgaagctgggaggcagagcttgcagtgagctgagattgtgccaccgcactccagcctgggcgacagagtgagactgtctcaaaaaaagaaaaagtgcagacagaatctccaaagcagtcataattgttctggcaaactaatactgtgtactttttgtgtagacttcttccagagcctgcaatttcttcaataatgtcgggggaaacctaaagggcttagaaaactggctcctcaagagtgaaaaatcaagttatcaaaagtgtaacagccattccactactagttctttctccattgaaatggaaaaggttggagatcaagagcttcctgatcaagatgagatggacctatcagattggctagtgactccccaggaatcccataagctgcggaagcctgagaatggcagtcgtgaaaccagtgagaagtttaagctcttattccagtcctataatgtgaatgattggcttgtcaagactgactcctgtaccaactgtcagggaaaccagcccaaaggtgtggagattgaaaacctgggcaatctgaagtgcctgaatgaccacttggaggccaagaaaccattgtccacccccagcatggttacagagga

SEQ ID NO: 5068 - DNA, 2300 bp, Homo sapien
aatatctgggactacagatgcatgccaccatgcctagctaattctttacatttttttgtacagatgggtatcggggaacctgccccgatagtcgcgtacattcttttctattttccttaagcgtcagccagcttgagaaataaagggacagggtacaaaagagagaaattttaaagctgggcatccgggggagacatcacatgtcggtaggttccatgatgccccacaagccgcaaaaaccagcaagtttttattagggattttcaaaagaggagggagtgtgcgaataggtgtgggtcagagacatcaagtacttcacaaggtaatagaatatcacaaggcaaatggaggcagggcgagatcataggactacaggaccagggcgaaattaaaattgctaatgaagtttcgggcaccattgtcattgataacatcttatcaggagacaaggttttgagagcaaccggtctgaccaaaatttattaggcaggaatttcctcttcctaataagcctgggagcgctatgggagactggggtgtatttcacccctacagtctacagaccataaaagatggccacacccaggggggccatctatagacctatacccccaggcgcgtattctctttcccagggatgttccttgctgagaaaaagaattcagcgatatttctcccatttgcttttgaaggaagaacagtatggctctgttccacctggctcactggcggtcaaagtttaaggttatctctcttattccctgaacattgctggtaccctgttcttttttcaaggtgcccagatttcatatttgttcaaacacacatgctctacaatttgtgcggttaacgcaattatcacatggtcctgagacgacatacatcttcctcagctgacaggattaagagattaaggtaaagacagcggcataggaaatcacaagggtattgattggggaagtgataagtgtccatgaaatcttcacaatttatgtttagagattgcagtaaagacaggcataagaaattataaaagtatttggggaactaataaatgtccatgaaatcttcacaatccatgttcttctgccatggcttcagccggtccctccgtttggggtccctgacttcccgcaacagatggggtctcaccatgttgcccacgctggtcttgaactcctgggctcaagcagtccgcccaccttggccttccaaagtgctgggattacaagtgtgagccaccacgtccagcccccaagtatcttaaagccttatagattccactgtcactatgttacccctagtgcatatgccaaagaggattcccagggaagcttgttatttgatggctgagaactaatgtgagaatccttccacaagggccaagtagataccatgttcttagaatgcacaaagcaaagaaccagctagaagcagtggttttgcagctctttccaaagcccatggactgacttcacagtcctgtggattattgacttataggttcaggggagttaatctgaagttgaatgtgtggttataggaaatagtgtctgcaaaagtattgtgttttcaattaccggcccaccagcatttttccactgacaaacagcagtgagggcaccttggctattgcttggtcttacattcagaatggggttttgagttactacattttggctacctgcttggaagaatccttattacactcaaaattagatctaataactgagcgatagcaatgctgttgcagatacctttagcatttattctcctgtgcctcatggcttattttttccacattaggaatttggtctagttcactttcagctctgcagctttttactgatttactaggcagagacatgaggtcgatccttattaaactgaacagattattttgagtatacactattttccaattagtacaatttttcaaccacattgaatacagttggaagtttaattgctgtgcctacagtctgaatatggcaagttcacaaagagatgatgtgaacttcaaggagatacctcatgttatacttttagtggggtttttttgggtttcttaaaaatgtttttggtccccctacatgacagctgtttatagataatgtctgcagtttctgtttgagagagataattatgacacttagcattggaaaactaagaagaacgtaagcaggtcagctatcagaagtcttcagactggagagattcctggagggggagtggccctttaatccatcagctgaagccatctggtaggacgctcgttgcagaaatggttagttctgaaa

SEQ ID NO: 5069 - DNA, 2300 bp, Homo sapien
ccaactcccttgtaactacgaagacagactggcctaagagctgttccttaaacctgccaaatttgttttgtttcaggacatttgcactagctattttcctggatacttgcctcccaagcatttgtactgtatttgggtcacagctcaaatgtcaactcccttgagatgttttccctaaccggctctaaaatggcatcctgcttccatcacaatctcaagactctgctttattccctttacagcacttatcactaacggcaatgttttaatttatgtttgttggtttacctcagtattatgtaagctctgtgagcgcaagagtcctcttttcaaaaaaaaacaaaaaaaaaaccccacaaaaaccactatagtcctgcccccagaaaagtagctagcacactgtaaaagctcagtaaatggtgttcattccctggtcccccaatttaccttcaaatcttaatcaaattaatttaacaatattgtcacattaaggaagtgtatatgccctttgtgctctgaaactcagagatactaagattaatatgaaactgtgttctaaacaggtaaagtagtagctcaggcctaggaatcccagcattttgggaggccgagacaggaggatggcctgagttcgagagtttgagaccagcttggacaacacagggagaccccatctccacaataagtcaaaaaaaaaaaaaaattagccaggcgtggtggtacgtacctagagtcccagctacttaggaggcttagaggggaggattgtttgagctcaggagtgcgaggcttcagtgaactataatcatgccaccgcaccccaatatgggtgacagaacgaggtcctgactctaaaaacaaacaaacaaaaaaacgaaacaaaacaccatgtgttgtagattcagttttttgacaaaggtgacaccagggaaatgaaaggtcttttatatttttttgcactacagtctgaacatatttcgttgttgttgttccttagtataaaatacctagagaaatattacaaggattctctaaaaagaaagtactttcgtaaaggctttatccacgaccaactgcctatctttaggtccaagttgtatttatctagttgaacaaccacagttacaaagtaccaaagttctggaaaacattttcacaagaccgaggagaggcaaaggcaagatatttatgcctctgtataccttgatgttgcctatttccgtttctataattcttacctggcttctttcttcatgtctatatatcacctttaaagttcagcttacttcctagctcctaaagaaggtttcctagcctgtcccaagtcatatttatttctcacttacaaacaatattactgaatattctgccctgacggctacttggaggctcagaatatgtcgctgtgtactaaaaagttaactacgggcttgctatttggaatacatttactcccaaagctcggctctactcttaatcaagggtcaatcacacggcccaccacacacaaaacgtaggaggcttggatataaacctaagaaaacatgcatcatctcgcgagtccaggtcaatcacggacagcttccccaggagatccgtggcccttttttaggcctttctatcttgaaagagcagccatgcagatacactaaccccaccactggtacttaagcttgtaaatgccagcaaggaaaaaaaaaacaacaacataaaacatgggacgcgcaacttagtgtagacgcaagaaccagtcagaaataatcgcaagctaggccccatacttacgcgggacgccagccaaatccgcgtgcgagtaacctgctccgccggctccgaaaaagccggccaatccccctgtggttttgttgccgcttcccccgcctccttccatggtatcgcagcaaaccgagtggttcccgccgctgcctcaagcctgggtggtccgctgggccgttactcctcaataacagcgggtaaccccgcgttgccagcgcctacttcacacgctgaccttccgggcgccggttcccgttaagcgccacacttccgctttgcggcaatgtgcgccccggaagctggaagcgcctgacggcagctttccggtggtgggaaagtgaacgaatcccgaatcaaagcggcgcattgaggcaggtggggtgccagtggaagagagaaagcaggcgagtgtttacggcctgacttgggaggccggcggatcagcaattgcagaagcaggcagcggcagagagggaatggtgcaggcaggcgctgagaaggacgcgcagtccatctctctcagg

SEQ ID NO: 5070 - DNA, 2300 bp, Homo sapien
tgaatgcatcctttttgaaatgctctcctttgtctgacacaacacgagccaggctttcctcccacctctacagccgcttctcttcagtctactcttaaactttggtgttcctaaggcttctgccctaggtcacctttactttctctacatgtttatgttatctatgcccatagcatccattataatgtttatgccatgaactccccaatctacttctccagcacagaaatatttcttctcaagtatcccattctttcatgaatccatccccttccctattgccagcatccaggcctaagctacaattatttccaacctagattaactccttaactgagtcttgatgctccacttgagttccttttcaatccattctttattttccacacaccagccacacagacttttcaacaaataaataagtctaatcaagtcactcccctactaaaaacccttgagtagcttatcaatgcccttagagttcaaaatccttagcaatgtctacatatccaatttgatctgacttttctgtaccaccctgcagcctcatctctcacactctcttgcgttcactctatatatcaattgcactcctgtttttgttttgttttgttttgttttgtttgaggcggagtttcgctcttgttgcccaggctggagtgcaatggtgccctctcggctcactgcaacctccgcctcccggatgccagtgattctcctgcctcacctgcctcagcctccggagtagctgggattacagttgcccgccaccacgctaggctaattttttgtgtttttagcagagacggggtttcaccatattggtaaggctggtcttgagctcctgacctcaggtgatccacccgccccggccttccaaagcgcagggattacaggcaaaaccaccgcgcccggcctccattgcactcctgaaacacttcttacttcctcttcatctaactcctactcattctacagtcctcagaataagcatctcatcttctggaggactattttcgattccataaattcagttaggtaaaacaatctgtctttcatctatcagaacatccattaccttttattatattaacttttgctatcgtctatctctccagatagattttaaggtatgaaggcagaggccaagtttctctcattcaacactgtataccagggacgggtacaatgccagcttagactaatagctctgcaccctgggacccagaatctgcacaagtgaagttgttttcttcctatctagaggctgaagcgccctactgttttacatacacaattagatctccttgacgactaaggcaatttctcaatcaaacctgaagaagcaaacaggtggtggagtctcctgccattttccgccctgtgagtgactgctcatcagagtttctcacatcaatcgcactgggaaaaatgcggccccattcacccactagtggctttggtagctcagcaagtggacctcagagtgatgatgcacacaagaccagaaaggagtgactggagtccctgagaccagaaggttcgggccgaggcgaaggacaaagatttttattttcccacgtaccaagcgaggtggcgctgcctctgtgctgtcccgcctgccctgggacgcaggctggcgaggacggtgggaccctgaactgcacgtgagcgtccttggggtcgaggacgcgcctctgcctgctgggaaagctccgggcgtccgaagcagccggcgaagttgtagcggcgccccagcggggtcgcttggtgcagggttcacagccggggcccgcattcatgctgggaccagcagcgcactgtccccgggccggccccgggcggagagcctcatttcactaacctgagagagatggactgcgcgtccttctcagcgcctgcctgcaccattccctctctgccgctgcctgcttctgcaattgctgatccgccggcctcccaagtcaggccgtaaacactcgcctgctttctctcttccactggcaccccacctgcctcaatgcgccgctttgattcgggattcgttcactttcccaccaccggaaagctgccgtcaggcgcttccagcttccggggcgcacattgccgcaaagcggaagtgtggcgcttaacgggaaccggcgcccggaaggtcagcgtgtgaagtaggcgctggcaacgcggggttacccgctgttattgaggagtaacggcccagcggaccacccaggcttgaggcagcggcgggaaccactcggtttgctgcgataccatggaaggaggcgggggaagcggcaaca

SEQ ID NO: 5071 - DNA, 2300 bp, Homo sapien
gacaccagtgtaatgacttggttaagttgggttgaccaggttcctccactgtcaggttatactttttcattctgtaattaatgtatcgctatatattttatatactttgaaactgtaaacatcttgtcctcataaaaccttcacctactaattttagcagtcattgctaattttttaaactcccattctttctacatttagtagttggcattctactataaggaagaattttccctttttccttatttgtgtatacttatttattaatatttattatttattaatatatatgcaagtatagacacttgcattcttattgtattcagtggattatgatccattgctattttctgtttggtgctaaattgtcccatattccatcagtgggaatgccttcaagttaactattgtgtgcctttgacatgtgcccatcattctttaatgcactttcttctttgagcatctccatctttttagcacaaaaagatgttgtaggctcatcttgtatattccctgcaccagctctggaatcagccatttctgcaggtggtcctggattttagttagttttggaagccaagatttgaactagaacatatatgttacacacacacacacacacacacacacacacacatatacaactgtgaatttatattgatacctcccattcttaaccagcatcacagcctatattatagtctttccccctttccataattggaactctcttctccaacaatgaagaatgtggttcccaatatcttcaatttttctcatttgtttaagcctaatatatacaaaaggtgatttcagaacttctaaaccatgccactgcaaaaagtaaacctgttaaatagagttcattacttgtttacagttcttttatttttgaagtaaaatttacacacattgaagtatacaatgttaagtggataatatggtgagttttggcaaattgatatgcttttatatcccacacccctatcaagacataaaaaaaaaccatgtctatcacctcagaaaattcccttgagcccttttctggtcagtccccaaccccagaaacaaccataatttttattcttttcattataaattacttttttcttttttttagaatgtcatgtaaatatatgtcatacacacttctgtatcttgctgcttttgcttagcgtaatgtgagatctatctatgttttttaatgtgtcagtggttctatcccttttattactaaggagtattcctttgtgtgatcgtggcaaatgttttgttaattttttatcaatagttggattgtttccacctttagttttgtgatagtctttttttttttttaatgtcaacttagctaggctacagcccccagttattctgtcaaacactaattcgggtattgctgtgaaagtattttatagatgtgatcaaagtctacaagtaaaggagttaatcttattgcattcaataagcatttttttttcctttgagacaaagcctcactctgttgcccaggctggagtgcagtgatgtgaccttggctcactgcaacctctgcctcctgggttcaagtgatgcccctgcctctgcctcccaagtagctgggattataggtgcctgccaccatgttcagctaatttttgtatttttagtagggacagggtttcaccatgttggctaggctggtctcgaactactgacctcgagtgatctccccacctcggcctcccaaagtgctgggattacaggcatgagccactgtgcttagccacattcaatacaatttgcattaagtaagcgataatctgggtgggcctgattcagttgggtggaaggccttaagagccttacccagagagaacacaatgacatagtgtaaacaggtaaatcatttatagtaagtctcagaggttaaaggatttgggggcaaacaaaaggaatctagttctttgttttcctctaatactaaggacatgccactagcatcctgacaaaagctcattcctcctttgctttgagagatctgctttaaatcactggggttgtaacatcactatatactgtccaggaaataatcctaagaagatcttgtactaaaaataatcttgtatttttagtagagacggggtttcaccatattggtcaggctggtctcaaactcctgacctcaggtgatccaccctcctcagcctcccaagtgctaggattacaggcgtgagccaccactcccagcttattttaattttttttttaagacagagtctcactctgtcatccaggctggagtgcagtggcacaatcaa

SEQ ID NO: 5072 - DNA, 2300 bp, Homo sapien
ttactgggaaggctgagatgggagaatcacctgagcccaggaggtcaaagctgcagtgtgccttcattgtgccactgcactctagcctgggcgacagagtgagaccctgtgtcaaaaaaaaaaaaaaaaaaaaagatagattctaagaggccaaggcaggcaaatggacagattgcttgagcccaggagttggagactagcctggacaacatagctactaaaaatacaaaaaatgagctaagcatggtggtacatgctactcccgaggctgaggtgggaagatcacttgagcttggggaggtcaaggctgcagtgagccgtgatcatgccactgcactccagcctaggtgaccctgtctcaaaaaaagaaaaatgtggtatatacatagaatattattctgcctttaaaaagaaaattctggctctccctctcactctccctctccccacggtctccctctccctctccccacggtctccctctccctctctttccatggtctccctctgatgccgagccgaagctggactgtactgctgccatctcggctcactgcaccctccctgcctgattctcctgcctcagcctgctgagtgcctgcgattgcaggtgcacgccgccacgcctgactggtttttgtattttttttggtggagacggggtttcgccatgttggccgggctggtctccagctcctaaccgcgagtgatctgccagcctcggcctcccgaggtgccgggattgcagatggagtctcgttcactcagtgctcaatgttgcccaggctggagtgcagtggcgtgatctcggctagctacaacctccacctcccagccgcctgccttggcctcccaaagtgccgagattgcagcctctgcccggctgccaccccgtctgggaagtgaggagcgtctctgcctggccgcccatcgtctgggatgtgaggagcccctctgcccgggctgcccagtctgggaagtgaggagcgccttttcccggctgccatcccgtctaggaagtgaggagcgtctcggcccggccacccatcgtctgagatgaggggagcgcctctgccccgccgccccgtctgggatgtgaggagcgcctctgcctggccgcgaccccgtctgggaggtgaggagcgtctctgcccagccgccctgtctgagaagtgaggagcccctccgcctggcagctgccctgtctgagaagtgaggagccccgccgcccagcagctgccccttctgagaagtgaggagcccctccgcccggcagccgccccgtccgggaggtgggggggcagcccccgcccggccagctgccccgtccgggagggaggtggggggcagcccctgccccgccagccaccccatccgggagggaggtggggggcgcctctgcccggctgccgccccgtctgggaggtggggggcgcctctgcccggccaccccttctgggaagtgaggagcccctctgcccggccgccaccccatctgggaggtgtacccaacagctcattgagaatgggccatgatgacgatggcggttttgttgaatagaaaagggggaaatgtggggaaaagatagagaaatcggattgttgctgtgtctgtgtggagggaagtagacataggagactccatttcgttctgtactaagaaaaattcttctgccttgggatgctgttgatctatgaccttacccccaacccggtgctctctgaaacatgtgctgtgtccactcagggttaaatggattaagagcggtgcaagatgtgctttgttaaacagatgcttgaaggcagcatgctccttgagagtcatcaccgctccctaatctcaagtacccagggacacaaaaactgcggaaggccgcagggtcctctgcctaggaaaaccagagacccttgttcacatgtttatctgctgaccttccctccactattgtcctatgaccctgccaaatccccttctccgagaaacacccaagaatgatcaataaatactaaaaaaaaaaaaaaaaaatactgcaagaacatctgccccagaactgcctgtccaacctggactgacatcatccttgttattgatctttgtagccaaatataattattttaaaacaaacaaaaaaagagaatgtaagcagtataagactttaaaacacacaaatgaaatatacatgactacatgcttcagtgaactaaaactttcatctgtgatctttattttgcaacattctgaagtaacattacagtcttttcagtgtgctgtgtcatttatatcccttactttatcctag

SEQ ID NO: 5073 - DNA, 2300 bp, Homo sapien
attgtatttctatacatctacaagacacaatctgaaaatgaaattagagaaacaatttcactgggcaacaagagcaaaacttcatctcaaaataatcatcatcatcatcatcatcatcatcatcatcatctacaatgtcatttcccatccaagcttgacttctacctttactttctgatatggttttgccatgcccccacccaaatctcatcatgaattataatccccataatcctgatgtgtcgagtgaggggcctagggggaggtgattggatcacgggggcagttatcctcatgctgttcttgtgatattcagtaagtcctcatgagatcttatagggttttgttttgttttgttttttgggatggagtcttgctctgttgtccaggcaggagtgccatggcacgatcttggctcactgcagtctctgcctcttgagttccagtgattctcctgcctcagcctcctgagtagctgggattacaggcatgcaccaccacacccagctaatttttgtatttttagtagagacaggatttcactacattagctaggctggtctcaaactcctgacctcagttgatccacctgccttggcctcccaaagtactagggttacaagtgtcagccaccgtgcccagctgagatctgatggttttatacttgtttgacagttgctccttcacatgttcccactctctgtgcggccaccatgtaagtcggacctgcccttctgccatgattgtaagtttcctgaaggacttccccctctgccatgattgtaagtttcctgaggcctccccagccatgtgaaactgagtcagttaaacctctttcctttaaaaattacccaacctcaggtatttctttatcagtgtgaaaacagactgctatactttctgataatcatgcttaagcaattggggaattcagactagctgggatcaaactatggccccacccttagcagtcatgtgaccttggggaggttacttaccttctccgtctcaacaacttctgtaaaatctgtaacatgagattgtttctgagggttaaatgagcatagcacagtggggacactgtcaggcacacactacttgccagatgtcgagtattcctctttattgaaataggactgtggtaagccactttatggctctcgattgtgtatgagaaaatcatgcttagtgccttgttagtaaaagaaagaaaacctgaaagtccctgccatggaaggaagaaatagcggggagaaaagggagttggtaagtttcagcatttcagagcttggaggggcaagttaggtttctattttatggagaaggaggtggaggcaggatgggtcctaaggtgtcattcaaaacacacagccataactctttattgagagtagagctagggccccagggattgctgtggtcaagttgcggacaaaaatgaccactcgttggaagacaggagaggagtgtttagttacaaaagcagtcaacaattcaggtgtatctatattcagtcagcaaataaaagttgttcaacttggttgctaatgggacccactctactgaggctttgtatagaactcatagaggaagatggcttcaaggaatgaactaccctgtgcttttcttaggactaaaatctcaggaagctggtgatgaatgaaaaccttagtcccaatggcactgcacgaggggccaggagagcagcagcatcataagccacagggtggggcagccaaggcaggggcattctgagctgttggggaggggtggcaggcagggtggggcactgtgagctgtcggggagggcattgtgaagtgtggggtggggcattgtgtgccacatgcctgggctcccacctggggccagtgggcttcagtctgtaggtgactacagaaggaggaggaactccgtctgttctctcttcaggcagttgttgtgtctctcagcgcttgttggtttcacaacctattaaataagccggctggtcttcaccctcccagacaagtcaactcaggggaggcagcagggtgcgggccttggcccgcagccctagccggggccggggccagggctggtgcccggggcctcgctgtgaggtgggcaggcgaggagcgggaagaccatctctgcaagtgcagcatagcctcggcctaggacagcgggagtgcgtggccaaagctgtgagcagaggcacaggtggtggcagacagtagaggcgccccatggggaacatactgacctgtcgtgtgcaccctagcgtcagcctcgagtttgaccagcagcaggggtcggtgtg

SEQ ID NO: 5074 - DNA, 2300 bp, Homo sapien
gacagcagtcttagtcttcttccaggctggagtggagtggtgcaatctcggctgactgcaaccttggtctcaggggctcaagcaatcattccacctcattctcctgagtagctcaaactacagatctatgccgccatgtccagttaatttttttttttgtagatatggggtttcaccatgtttcccaggctggtctcgaaccgccttggcctcccacagtgctgggattacaggtgtgagccaccatgccagcccagccttagtgttaacactgttataggttactgtaacatattggctcacagtgtgtgttctcgggtctgcctctttcctggttacctaatcataagtaagttacttctcctttctgtacctcagtttcctcaactataatttggaaataatattccctccctcatagtcattgtgtgaattaaatgaacaatgtataaaatggtaaatactgaacacttgataaatgttagctattattaaaggagagactgatatttaaatgattacaatacaatgtaataccttaggataaatacataaaaaacaacttttttccttccttattttacagctttattactgatttccctctaaaaagagatccaaataaatgtggagcgactcattctcattatagagtaaggaatcacaaagtaccatagtcacgtaacaaaagcaaaaaaaaaaaaaagcaattgttttacctttcaactgctgatgttatgtacaatctatcacaagaagcatagctgtgcattcatgagctgattgtattaacctctagaattttagaaacgagcacataggagggcgtttcaagtattcctgatactccttgtcatcttctgcgaatctactagcaaacatctcttcaaaatttggaacagctttggcagtgtcagtcattccgaaattcccaaagatttgaggcagctgtattgtttaatgtttaggttgtttaaatccgccaagggctgtgtctatctagctcgggccgaaccccgccagcgagacactaagagaccgcaggagaggtggcctctggcccaccacaccgtggaactccagaccaccccagctctccaatgtagtggagacccttccgctagccatcgaaaataacttaagtcacttaagctgtacttgggataatcaggttatttaatgaggtgataactgaggtgactacaaaagaaaagtctgggattgggtgtgtgagcaaggtgcatggggacagtggtatgttctaggttgaaggctcaccctaggccaagcaccgtggcacctgttttacaatatcataactttaatatcacatccttgcaagatatgtagcttcgttttactgaggaaagctcagaaaagttaaataactcgcccttgggcacacatgactggaaagaaattgggatttttattttagtaagtaagttggtcaggcacaagggcgactcagcagagggaacttcaaggaagtgtgagacaacagctggagccctgagctgggagagtggaggacgaattataaagagttttatgcctgccataatgagaagcttgtccttgaacttgagggcaatgctgagagtgcaaaggactttaagcaggccctacacagtggcagccaagcaggtcataaagagcaagatgatgcccaggcagatcagggattctctatctacagagcgtccgcctaccagctccttcacagcagcggattttgctgcaagagaagaggcagcaggccaggccttttccttcgcccacagcgcctacgtcgaaggctcccaggctggttgctccactggctgcttgaggtcccctctttccagacccgccgaactggcggccggtgctgtggccgatcccgcgccgctgcctcgggccttggggggcagcgccacccggccaacccgcctctgcagcgttcctggcgtcagcccctatcctccagcttcctccgccccaacctagggtagaaccccaaactccagtcccagtccacttccgcagcttcctcccctcagcatggcaggtcggatcacgtgcgggttctgtcacgtgacatcaggtcacgtgaggccggtcacgccccgggcagcttggctggggctaggcttccggggctctgcagtcctcggcgtgtgctggcagcttcggagcccaccgagccgggcggctaggatggtgagggcgccgggcaggagagaggccggcctgggctggggccgccgtccctgccgccctcaggctcagcttctcttctcgtttttttcgctgcagat

SEQ ID NO: 5075 - DNA, 2300 bp, Homo sapien
ttttagaggcttggaaaaaaggacttaaaactttacaaataaaaaagaggtattaatcccagagaaaaaagctacaattaccaagaaccacacttccaccaaaatttaggagggaacctaacagtaagttatttaaaattacaatatctcctactcccaaaaaaggaatgataatataactaaataactcacattctcaatgaactgggtattagagagcataaggaagtcattgaagacattatgcaggcgacaatctgtggctttggtttcccgaattagtccgtccacttgtttcttgatttcatgggtcctagagatagtttgctgtgagaattcctgtagaaactgtagtagctattttaaaaaataaacatacagtagtatcaatgttacatgtaactattctgcatgtcacatcaaaaaagaacccatttcctttcacctttgagtgttagaatgtgaaagaaatgctttttttttttttgagagagtttcactctgttgcctgggctggagtacaatggcgccatctcggctcactgcacctcccgcgttcaagcgattctcctgcctcagcctcccgagtagctggaattacaggtgcccgccacaacgcccaactaattttgtgtatttttagtagagacggggtttcaccatgttggccaggctggtctcgaactcctgacctcgtgattcgcccacctcggcctcccaaagtgctaggattacaggtgtgagccactgtgcccggctggaatgctggtttgacaagtactaaaaccaagtgacattggaaaacactaagaaagctcatcaaaagagtggcagtgagctaatggacacctatctcgtttctggaaaaatttaaaatccctttttggcactgggtatggtggctcacgcttgtaatccaatactttgggaggctgaggcagggttatcgctagagtccaggagttgcagaccagtctgggcaacatagcaagacccccatctctactaaaattaaataaataaacaaatcagacaggtgtggtggacgcctatagtcccagcttctcaggacgctgaggtgagaggatcacctgaaccccagaggattcagtgagccaagatcaagccacttgcactccagcctgggcgacagggcaaaaccctgtctccttttaaaagtcctctttggttgtcaatctacagagatcacagaccaagggttagctaatcaaccaccactcttattcaaaaatcctattcatttgggactccaacagttctgagctttttgggcccccgatttgaaaaatcccattaaaggatatccacatactggcttgtttcccaccccatttagtccaggtcccaacaggaatcgcctccctagtgcccgagcaatccctcagtgtggcggaaacggatctcccctccggatggagctgagccagaaaccccatgaagggaacgtcgcgtctgggccacggtcagtgtctgcccctctccctggtggccggggactgccagggtggcattctcgggggctaaacggggcgtgtgttcctaagagggcaggcaacgggacgggccaggtgcaggggcagtcgcggtccggccctcctgcgcgcaagccaagcgtcacccctgccgctctcgcgtccccggggcccgcctctcacgcccgcgtcggccgccagcgaccagctctggctgctcctgcggatctcctccaccgaccacggccgctcccacacgggctccgacgctggcgccagctcctggtcgggggtcgtccggttcatctgcagcgaaaaaaacgagaagagaagctgagcctgagggcggcagggacggcggccccagcccaggccggcctctctcctgcccggcgccctcaccatcctagccgcccggctcggtgggctccgaagctgccagcacacgccgaggactgcagagccccggaagcctagccccagccaagctgcccggggcgtgaccggcctcacgtgacctgatgtcacgtgacagaacccgcacgtgatccgacctgccatgctgaggggaggaagctgcggaagtggactgggactggagtttggggttctaccctaggttggggcggaggaagctggaggataggggctgacgccaggaacgctgcagaggcgggttggccgggtggcgctgccccccaaggcccgaggcagcggcgcgggatcggccacagcaccggccgccagttcggcgggtctggaaagaggggacctcaagcagccagtggagcaaccagcctgggagcc

SEQ ID NO: 5076 - DNA, 2300 bp, Homo sapien
gaatctgggaatgactattaagatttatttattccctctctaggtaaaatccctctctaggtatataaataaataataaataaataatcagtttcagccgggcacaatggctcacacctgtaatcccagcactttgggaggccaaggccgatggatcacttgaggtcaaggagtttgagaccagcctggccaacatggtgaaaccccatctctactaaaaaaaaaaaaaaatgcaggccgggcatggtggctcacacctgtaatcccagcactttgggaggctgaggtgggcgaatcacgaggtcagattgagaccatcctggttaacatggtgaaaccccatctctactaaaaatacaaaaaaaattagctgggcatgggtggcaggcacctgtagtcccagctactcgggaggctgaggcaggagaatggcgtgaacccaggaggcagagcttgcagtgagccgagatcgcaccactgcactccagccttggcaacagagtgagactccatctcaaaaaaaaaaaaaaagggcaaaaacaaattagccgggtgtggtggtgcccgcctgtaatcccaactactcgggaggctgagacaagagaatcatttgagcctgggaggtggaggttgcagtgagccaagatcctgccactgcactccagcctgggtgacagagctagactctgtctctaaataaataaataaataagcaggaagggtaggagagctctaaatatatgcacttgttagcttatatttatgttcagagcctcaggaaatgagcatacacaccaggcttaaattgggtattccaaggatcaggttggggatagggagggaactattttaaaatacatctcttttacatgtgcctttatattgacttaaaattttaaaaattgagatagaattcacataccataaaattcagtcctttaaaaagtatacaatttggtggtttttactgtactcaaagttttataatcacggccactgtctaatgccagaagattttcatcagttcatttatattgacttcttatttctttctttttaaaaaattttaatttcatttcattttatttttgagatagggtctcactttttcacccaagctgcagtgcagtggtgcaatcagggctcactgcagcctttacctcccaagctcaagagttcctcctgactaagccccacaagtagctggaattacaggtgcacaccaccatacctggctaatttttgtattttttgtagagatgaggtctcactatgttgcccaggctgatcttgaactcctgagctcaagtgatccccttgcctcggtctcagagagtgctggccttacaggcgtgagccaccgcacctggcctatattgactttttataacaagcatgttgtacttcggtagtttttaaaacataaaaatgattttaaaaaccaagaatcacagtgatttggcagagcagtgggtcttttctggaaaagagagtcttgcctacccatgctgtcagggttagtcaaatgcccaggctttctggcaagtcagtggtagatttttctctctgctttcatacaaatgggataataaaaatttatcagccattttaagcaactgaatgaaaataagttttgcctttaccattttccttgttcaaaatcctgaagttctagtttcctagttgataaattacatcagttgacattctccataacctggggtcagaatactgtatcattgcccatcaacattattaggttaaatgaaaaggtgtgaaaactgatatcttactgtttttgcaactcttggtttacaacgaggttaaagtttcatcatgtttcctagtcatttgtatttaaaaattttctttttttttttggtgaatggactattctttgctgtttgtccatgacccactgttacggacacccacctggtagtggtctcagccctttgctgaataaccatttccttccccatctttgtccttagttactgtgtgaattcttatattgtgatttatttccaatgacgtgttgaccttttaacattgagtttgcttccatatttagcgtgtatatgatgaagaagtggaggagccagtactcaaggctgaggcagaaaaaacagagcaggtacttgtataaaatcactcttagctgagtttctgactttgaaaaatgtggtggagatcgatgtgttatgtgggaactgggggatggtgggcggggttgggaaagggagggactgctcctgacagcagcccaagaggggattctttcctttgtttctgaaatg

SEQ ID NO: 5077 - DNA, 2300 bp, Homo sapien
gctcttggggtgggcatcaggatcgcggccctgggaacaggagggaaggtcatgtgtgattagagctgtaagaacttatctcaaggaagttacatatgtaaagatggacacaacaaagatgtcccctgcagctgtattatattagcaaaaggctggccacagcctaaaagccactcagtaggggaatgaaacattgacaaaatggaatgctatggcgcttccaaaaataccagaaaatatatttataaatacaaagtttacatatatatatatgcacaagctttagagataatctttccaggttatatatattatataaactttgtatagtatctaaattttttattagaaaagcaatccattagttccataatgagaaacattttgaaggtaaaaaacataaaactgaatgaattctcttcatctcatttccaaagggaagaagagacagcagctgaatcaagcacaaactacacagagtggtcaagtatgtgtccctcacctgtaagcactgcaggccaaagacctggcacaggtgcgaccacaagccttcctatggctgtccatcacttctgccctactttcagactccgagtgagtccctttttgtttactagatatctaacatttaaaagttaccatcaacattattggtttgataatacaatgctccagacctgacattctaaaattcatccctatttccttatcacagccacagattaaaacttaacaaaaaggccaggcgtggtggctcatgcctgtaatcccagcactttgggaggccaaggtgggtggattaccagaggccaggagttcgagaccagcctggccaatgtggtgaaaccccacctctactaaaaatacaaagatcagccgggtgtggtggcgtgtgcctgtggttccagctacttgggaggctgaggtgggagaatccttgaacctgggaggcagaggctgcagtgggccgagatcacgccactgcactccagcctgggcaacacagtaggactccatctcaaaacaaaacaaaacaaaacaaaacaaaaaaaccaaaaaaactaatgaaaaacttacttctaacaaaataaatcacattaacaataattattattgttatatataaaaatgagtttaacacagcaagtaatgttaaatatttcacaactatggaaaaatattacaaaaccatacacagtaagagactgggagaaaatatatcaaattaatcatattcactgtgtgcagctctcatttataaataagcttatagtattggtataacaaaaaaattcatataacattttttgtagaaataaacatagactatttctttggttagatctataaaaaggattggcaatctatgacctgccaacctggtttgcataacatcaccattgagatcaaattcatataccataaaatctacccatttacgtataaaatgtaatgattttttggtatattcagatctgtgtatccactaccacaatctaagtttagaatattctcatcactcccaaaagaaaccccaaaccattagcagtaattatccattcctgctcactgctactcccagcccccagtaactactaatctactttctgtctccattgatatgcctattctggacatttcatataaatggaatcacataatatgtggtctttcatgactggcttattttatttagaatgttttcaaggttcatccatgtggcagcatgtatcagtactttgccttttttattaccaaataatattccattgtatggatatactatattatgtttagccattgtttccatcttttggctattacgaataatgctgctgggagcaatcatattcaagttttgtgtgaacatgtttttatttctcttggatatgtacccaggaataaaattccggattgtgtggtagctttatgttataagaatttgaagaacagcaaactgttctccaaagtggttgtactgttccacacttgcagcagcaaggaatgagaatttccatttatccacatccttaccaacactcgttacttccctttttttttttttttattatggtcctcttcccgggtatgaagtggtatgtcactgtggttttggcttccctgatgctgagcatctttctatatcctttttggccatttgtctatcttcttcagtaaaatctctattcagatgtctgtcttacctattttttttcagacagggtctcgttctgtcactcagcctgagtgcaatggtgtgatcatagcccactacagccttgaactcctgggctcaaagg

SEQ ID NO: 5078 - DNA, 2300 bp, Homo sapien
tcgtgcctttcaggtgcaaagttttgagtctgagttttagcctttctatgtcattttctcccccagccccagtaggtttttgtaagtactctgttttctttttatcatagagaggactcctgtgacagccacagtcttcagaatgctatttctgaaatgctacctttgagttggttcagccctcatttgagaaagtatttttaagactcagaagccaggattgttttttgcattatgatttttccttaaaatttctaagatatttgatggctttttggtattttttttcttttgaaggtacaagagaaaaagagagtagtgaaaaaagaccactctgttgactctttcaaaaaccagaaacatcctgaatccattcaaggtagtaaagaaaaaggcatatggaagccggaaacacctcaggttagaaatcctctttaaggattttcagctcttgtttgcatcccagtacagagaaattccattatgcagacccacagttattcagacttgtctgcattaaggaggaaacagcaaccagggctaccgctttgtcttcactgcactccccccaagtcatctcccctctcctcgctccacacgccagagtttcatgaatctatactttaatagttagtgttttttgatgccatgccagatttaactctgaagtggagttaaggtaggatgaagaatcttcttcccactaaagaatttatttctccctctggatttccttggaatagaattaaaatagaaataaatataaattacatctgatttcctgcctgctctcagtgttgcctctcccaaggtcattgctgttgggccgtactctgcagcagtcttcccagaacgctgtggagctcctcctgggaacagcccaggactggagagcgagtgccagttccacgtgcaggtgtcccagggtgtctcactgaagccttagtgtcctgagccgtaaacctgaggcacttggacgaacacatcaccactgacccttcctggggctcagatcttttgcttttagagccagtgcattaggctatggttgaatttttgtgtgctccttgaaatttctatttgataaccaacatggtaattttgcctgctggtcagttttaggtgctctgataaactgtgactcttgggaatcttactcatcttgtattccttgactccatatctgatctggcagctttccacttacgtgacagaggaggaggcatacgtgaagtagtgctagtgaaacatcaggccccaggagagatttgaatgcctttcccattaaagagctacagaaagtgacagttttgctccatcacagatttatttacaggcataagaaacacttgtctttctgtttcccaaatggatttttaactggatgtaattttacacaggactcatcaggtctcgctccatttaaaaccaaagaaccatccactcggatcgggaagatacaagtaattaaaacactggaatcttcattgcctgccctgtggcatctataaacttttttgggtttcctacttttgtcagctgctgccaagcatcttctcatctcttcccccgcctcccctcccctgcacctagttgttgtctcctgtgtgctgcgtctttaacatctattttttgagcccagtggtgggcataggtgtaagacgctctgttttaattctgagactagatcgggcgattttcctacgtttctctactcctctcgtattatacattatgtgcaccgaatcttgtcatgtgtcacaataaagataatagactgctgtgttgaagaacaaatacagagtttcatttttcttctttaggcaaatttagcgatcaacccagcggccttgctgcccacagcggcttcccagatctctgaagtaaagcctgttttgccagaattggcttttccttcatctgaacacagaaggagccacggtctggaaagtgtgcctgtccttcccgggagtggggaggccggtgtgagttttgatcttccagctcaggcagacaccttacacagtgcaaacaaggtgatgaaaccatctttgcttccttgctctcttcttttaaccagaacatgcatatgcttctttctagtttatcagttgcatacacagcagtctttgactctccttttgaaggaggtgcctcatccttccttcagccactccccactccattctccccacccccctcatcctgcacctgcttttccgtggcctgcatttggtacatttgcattctgctcagtagccacagtaacgtctcaccactttggctggtgtctgacacct

SEQ ID NO: 5079 - DNA, 2300 bp, Homo sapien
tacacagcagtctttgactctccttttgaaggaggtgcctcatccttccttcagccactccccactccattctccccacccccctcatcctgcacctgcttttccgtggcctgcatttggtacatttgcattctgctcagtagccacagtaacgtctcaccactttggctggtgtctgacacctgcaggtttccagcactgccacctgggggtcttctaaccacagagcagatcatgcccctcctgctggcgcttcctcactactccaaggagagcattcgggctcctgggtttggtatgaaacccctttgcaatcggtgccagcccatgtgtgcagcttcctcactagtcacttcacactttccagcctgactccaggcacaccaggtgccactccctgaacacacatggtctgttctgctgctgcccaaggctcctgctgcctcctcaccaggaatgctcctctctgtccacagctgtgcttccacatccccacttctgtgactgtgccctgcactccccgcaccaagttcccacagcagcgacactgtttcatgggatctcctcaatggactgtgaaccctttgaagttttcctttcattgtagttgggtttcttgtttctatccagtctcccttctctagaaagctttagctgatttccaagtaagcgacaggacacagaatgacctaccccggcaaatagattcatttcaaatgtttccaaacctgtttccttgtgcaaaacaaaaccgccttccttttaaagagaattttcattggcttttttttagttaagtttaaattggcaactaaaattgtgacattcccctgaagttgacaacacaatcatactttgcccaaagtagattgtagcttctcaaaattctacttgattgtatattttggaaactatcataaatactgcatcattgctactaagtgattcatgttttgagattatatgaaaagttctgatttctaagccatatttcttatgtggaatatttaacgtttgaattcaatgtttattgacttgaagaaaacagcaccttagattacctctctttattgtgtcatgtttctccccgctcctggagcctgaatttagactagccccctaacaaaggttagtaccagaattccccgattctttcttgttttgaaagatacccacgtttctattgagggtagagtaggggccaagggaggggttgtgagacagagagccaacatacctactttccaggtttccagcaacagataaaactttttgtgtgaaactgaactgaaactgccctgagaagattaaaaaatggagaactctaaaggattaagaatgacttagtcttggagtactaggagctattaaactccttccttggaaatcattaagaaataacctcttctatgttcttagataatatcttcattgaagtagaccagataaccttacaatattttgagtcactgattctttgccatggtagctttgaacactttattttatcgtcagatcaatgtgtgtttttttgccattgcagagccgtgtcaagatgagagggaagcgtagaccgcagacccgtgcagctaggcggctggctgctcaggagtccagcgagactgaggacatgagcgtccccagaggacccattgcacagtgggctgatggcgccatttccccaaatggccatcggccacagctcagagcagccagtggagaagacagcactgaggaggccctggcagctgccgctgcaccttgggaaggtggtcctgtgcctggagtggacagaagcccctttgcaaagtctctgggtcattccagaggggaggctgacctttttgattctggggacatcttttccacgggcactggatctcagtctgtggagagaacaaaacccaaggcaaagatagcagagaatcctgccaacccaccagtgggtggtaaagcaaagagccccatgtttcctgctctaggtgaggccagcagtgatgatgatctctttcagtctgctaaaccaaaaccagcaaagaaaacaaatccctttcctctcctggaagatgaggatgacctctttacagatcagaaagtcaagaagaatgagacaaaatccaatagtcagcaggatgtcatattaacaacacaagatatttttgaggtaataggacttaacacgtttttgtgtctgttctaagttaaggaaggtatctgattggcttatttgagccatagattatgtctagcttgttgcgtgcataccccatagccacttgcttagtaattataattaggct

SEQ ID NO: 5080 - DNA, 2300 bp, Homo sapien
tacatacacaatctgcctgtccatgctctggggttgggaggtccagctgtcagtcatcttggctagtaggaaggcttagagaaccaaagccctgagcaaaaactagagatactgggtttgaagtttgctggtgaaacagctgctaatgagtagtaattatctgtagatccttagagttcagaggcatgtcttagatgtgtttcctgactcctggaaactgacaatagaagttgatcataagtcacagatctgacttgttttgctccacatttgaagttgtccctgctgctggtggttaagggcattatggtggtgataagtggatgaggaaagcttcccaataaccagaaaatttgggaagatgttccagtctctttgcccactcccagttcagcctaccctctgaagtgtctgctgttagactgatctttcacctctagcccaggaattgcaaaatcaaatgcttgcacagaccaggtagtaacttagataaataaggcctgctgggtagagattggcaggttgaagaatatatcccccatctaaagagaacaacagcactgagttttaggaaactcttggcacacgggaatgctggctcagtgtcatcatattttacgaattattttaggagataatttgaaatttcaggattgtaaatgtaaactctttataaactctgaatgctatttttttatatcttgttacctaagtcaaattgaataaaaaattgactgtactaaatacatctacattgttgccatttattaactcttgggggtagcagcatcttagccacaaatcccctattttgggggcaaatcctgggattccaataccatttcacctctcaggcttcctaaagcacaggttaagaaaatgggctctgaaggtcccacctgtgattccaatcatcctttaacactagcctcctgtaaattcccttaaaggacagggaagagcacagactctttgctactttggaatctattaaaaaatgctaccagtttgagcatttattgaacaaaagaagtactgttgcttcatctcatcttatttttataagaaatttatgagataggttttataagaactttgagataagatgatcataatcatattcctatttatagatggtgaagctgatgttcagtattgggggaggatttcccaaagtcatccagtaagtggcagaaatgaaatttgactgctggagtcagatttcaaaactaaatttttaaccaccatattatatttctttctattacattatatggggttttaacttgtatagttcctctgagtaatgattaattctccctcccttaaaacatcttaaggaatctgtaatgacatttgatacttttgtagaacataggaacattttaaattctcatcctttgatacagggtttgcaaagtgtttgggatccttctgatcactgaagggggatgttttttgtaatgcctgccttcagaccagaggtactaattcccttttccatgcccatttctcaccagatagtaattgaaagttaaaacatagagtgtaaaggccaaagttacgggtttcacctccaggtgaacaagataattctactaagtccatgaccacagagtactgtcctaaccccagccagccttctcccaaatacaagaagtatgcgtgcatcagtcatccttgttaacagaggcactctcagcccagacccatgtacagatccataaacagcatcatcgccataaatgaaagcagtgtgatatggctgaggaatgcaaatagattttagctcagttgagctcagtggccaatgctaaatcatgaatggttgctgccaggaggagtgttgtgttgagaaagatttggaaaccacattcgagcttttcaaaaagaatgctgtaattgattggtcttgtctgccatgggcttggtctatggaatgagtggtaagtgctctgtacttgtcgttcttggtatagtctattaatatgaaagagctaagatatcttaacctcggttggcttaaagcatttgcattttaatttgtgatttcttcctcttcagtatttcttcttccatctctgctgtacctgagaagaaatggccaaacgcaccttctctaacttggagacattcctgattttcctccttgtaatgatgagtgccatcacagtggcccttctcagcctcttgtttatcaccagtgggaccattgaaaaccacaaaggcaagtgtcatgggctctcttagatgcaatttttaggcctgtatgaaacttcttgattactgtggacaccaaa

SEQ ID NO: 5081 - DNA, 2300 bp, Homo sapien
taaatctccagatctttgcaacagtcatcatttgagaaaaaaaattagccccctggtaggtagagttttttttatagtgagatgtagtggacagtggctactggatataatagataatttgagaaagaaaaacaaaaggatatgggtacccaaagacccatctgaaaatcactgcttttagagctaggttatgtttcatgaactttcacatatgatttcttagttaaatatcgacaacaaccctgtgaaggaaatacttgattatcattatcttcattttagaggtgaataagctgaagctcacataatggattatgtatgggagatgctgagagtcaaactgtggtccgtcttctgccaaaggccacatttcatcagctattattatgctttgttaaggagtttgttaaggtcttttatttttaacttttcttgttttttattttgtatgattgtgataaaagtaatatatgcttattaaagaaaaataggtggagaaaagtagaaaatacctacagaaccatcattaagtataactgcagttaatatgtgatatatttctttccagttgttttatacaatattatgtaagttgagtatcccttatccaaaatgcttgggaccagaagcgtttcggatttcaatcttggggatactttggaatatttccagaatgcactcagttgagcatccctgatccaaaaatctgaaatgctccaatgagcatattctttgagtatcatgtcaattctcaaaaagtttcggattttggagcattttggattttgagtttcagcattagggattctcaacctgtgtaccatagttagccatagttacagttatatgtattatatatacacattatacatgtatgtttctatttatgcataaatttataaaattttgaatcctactttaaaatcttccctacagatgtgcatttggttattttcacatagttagtaaaatattttaataagtaaatccactgaactagaactcagaaacttaacttgtaactcttctatgcagactgccatttggccatgggcaagtttcttgacatttctagaactcacattcttcatttataaatgaaggagttggatcagatccttaatttttaaactgtgggatctcacagaacccgagaggggctgagattaagaaagatcaacagagcagtcaggaccttggcccttcacatgggcttcaacccaagcagcggcatttgtagatcttttatctatttgggacctaagcacatatggaaaaggggattcactgattttttttttttaaagaatataaaaatattaaaccagttgattttgaagctcagcaattctgtgagttgctgtatgttatgtacatttttaaacattcttcacgaggtagagtaagcaaatatattttattcttttaaattatctcaggaagcatgtaaggacaaagagaatacctggtctcttgaccaggttgaaaagtgtccaaagcactgtcaagttgcttcttagaaaatagaccattggaaattattattattttttttttttgagaaggaatctcgctctgtcgcccaggctggagtacagtggctgatctcggctcactgcaagctccgcctcccgggttcacaccattctcctgcctcagcctgggcaggagtagctgggactacaggcgcccgccaccacacccggctaattttttgtatttttagtagagacagggtttcaccgtgttagccaggatgctctctatctcctgacctcgtgatccgcccgcctcgttctcccaaagcgctgggattacaggcgtgagccaccacgcccggctgaccgttggaaattctataaaatatgtctcctttgacaacatccattttcagatccaattcaatgtgtgtcgcaaaagactaataaccaggaaatcagtagtccctgaaacgaatacatgtttgaaaactattaagtttaccaataactggttttctactttccttatgtatataaggctttgcgttttgagaggggtaatttggaagtacagcatcttgatattttctcttgctttcacagaaggaagaatcctgctcaaaaatgaggtgaattaatacttgggcgctcaggaaccctggacagctacatgaggtgtttaaaaactgccctgaccatcttgccaaacaagtctctgctcatgaggccccacaggatgaacgagccgaggcaggacagtgtcctgccctgtcggaacagtgactgctgacctgccaagagagagctggggactgcctg

SEQ ID NO: 5082 - DNA, 2300 bp, Homo sapien
ggcttctagattgcttttttattattctcttctctcaattttccatctttcattttgtttcacatctgaaattttttttcaactttttctattgttcctattgaattgttcatattgactaggaatttacaggagctctctttttaaaattctctctcctttttgtggtaccatcttgttcttttttgataccttatgtctttgaaaatgttagtaatagtttttcatagtctgttttccaagttcttttagtttgtttgttttttatcttcatctctggcttttatatttattagagagtttcttcagatacctggtgattttttttcatattttaaagtaggcacaaataaaactgtttggaaactctttgcatgaggtgagcttgtttatatggtttcagtgtaagatgatcagtatccttaagtcttttttcttaaaatcttgggtatttctagaaaaaaattcatctgatcattaacctgcaagttattctgggtgcctaagaaggtaaaaggcaagggcagatcctacttaatctttttgcaactttcactttgtcccttgtttttagtcagataccactgctttcaactgtgtttaatgtccactactctagaaactctccatgtctcttttccagaggataaacttcagtattctatggtgtggggaagaggcagttgctcagctgtacaaagtgagaatctagagaaacttattaagtggtcttttaactccactttcacaccatttccaaggtacttgatgccaccaattcctcatacttttaaggctagaggaaatatttagtgttatgtaaatcagaatgcttctttcccctttgctggcttagggctccttgttttgggcctgccagatccgtcaccactgattcatgtgcttcccaacttccgaaatcgtgtccctgttttctcctcttctgttctcttctcttctgttctcttcgactgttttgatttcttgtccctttttttaaaaaagaaaatctttttactaccatttcagaggagtttttggagacagtgagatagaatgtatatgtccagtgaaatacctttttggaaatctgattcatctttcaattaactggattcagttttttatttcccttttcaccccccaaaaaagatgtgggtgctagattgttgagatccttggggcttgacaaaatttgtcagttgtctttatatttatatactttatttttttgctgatttcacttcctcttttgatctgcttttaacatgttgctctctcttctttcctcctgaagtatcagtgggtcacaggccagaggagagaacctagggtttctccgtaccttctttaaacacatctatctttaagaaaaaaatcatgtcttgtttttacattgtggtttcaattctttatttcatagcctcttcaaacctgttttatatgatcaaattcatggtttggtaaacttcctgtttgtcacacctggcaaatctccctcatggtggatcatttccttgtgtgattcataattttcaattatttgctcatcctcagcaaagattactttttccatgggagtcctatgaaccattgctttttgaagcgcctttaaggagctatttatatttatttttcttttatatttaccttaatttcttggcttggaaatttcacactacgcagatagtataaatctggactctgtatcattgtgtgtcagtttcatggatccagtttttctggtcttagagagattcttgctttattcaaggtctaagtttcagtcctctgccctggctgggatcttaagtccccaacccctagcagctagagtccaagtctgatatccctgtgggatataagtgttaacttgtatcttttctactctgaatttgagatttttcttcttttgacacatgagaaattctttttctttattttgaaactgattatggtattaaaatgtcagcagttatattttatgtagatttttatgtgcttgatatataaaggagatacgcatcactgggtccatgttctggaaccataagtcatctcctttgcattctcatttaattaggtattcaggaaacatctattaagtgtgtactatgcattaggctctagagattccaaagcaaatgaaaggacaaaggaaggtataaggtaggaagaatattccaggcagaaggaacaacttgcaaggtatgaaatgactggtttgtgtgggaatctactggaacacttgagtatggatatgatacaggcccagagcttgtagggcaaggctgaaaaat

SEQ ID NO: 5083 - DNA, 2300 bp, Homo sapien
gctttttgcttcacaggcagggaggttcccaccagctctgctcgactccacagtcatctccgctttccagacatcagtgatgcctattgtttgctctaatatagttttctattctttttgtccttatggatttatatcttttttcgtttttactaacattttgatgggcatttagaaggaagcagagataaataggcctattccattggccatctataacccccaaatctgtattgctctttaaaataatatttaaaaggactttataaaatggtttctcatatttcctattgtgacatccaacctctagaaataattgtttctatttctttgcttccttcttgttagccagtttctgtcaagtgacccataagcatcgaaagctagcattaagtgtacttgttacattatttcattattcaaaatagactgagattattgtctgtaatatgagacctggtaaggttttgaatttaagatgatactctctttcctgaggtataatcttttttaagcttttgactttatctttgggtttataaaccatatgttggtattaggagatggtgcccttttatataaatatattttacttcaaagctttattaattttctttttgagacagggtctcactctggcacccaggctggagtgcagtgacacaatcagctcactgcagcctcaacctcctgggctcaagtgattctcctgcctcatcctcccaagtagctgagaatacaggcacacaccactgtgcattgttatttttttttctttttgtagatatgaggtctcgttttgttgcctaggctagtgctgcaattataggcatgagccaccatgcccggcctgaaactttaattgaatacttttaagctaatgtaatggcaaaagagtcctagtttttgtttgttttattttattgctgtttcagttgataactgctttctttgtacctatgtttgattatttacagatgtagcaccatttcttacagatagaataaagtatgattaaaagttgggagggtacggagggatgcctggtcctaagtaagtccttgggactattgagagtagtggattgttttgttctataagaattgtttctttatagaattaagcctgttagttggctcaaggtatcagctctccggcttgacagctggagagcacctatgatttttatcctggggtccagggatagctttaaggagttaacgattgtcctgagatttaagtggggagggatagaacaggcttagttttcatcagatactcaatactgcagggcttatatgatcctgaaaagggttgagagcctacttcttatagattatcacaggaaaaaaaagaaaatgttactgatgaaattaaatatgatcgaactaaaatatactacctttctgactaccattagattctatattctttcacatataagtacaaattactacaaatgaggcactaaatgaacagccctctttgttctttaatacaagacattatctctagcttcctgattatgctaccaggaaatgtgtaccatttacacatatataactataaaagctgttacttatgagggtaatgttttggccccagagagatcatgacacttttataaatcagcttgtaaaaatgataactcagtagttacctttgttttcagtttgaagctgaaacttcaaacttatacttaatttatgataatcagttatttgttggcaactaaaaatagtagataaatatataaaaggagaaacaccttttatagttataggcctaagacttaacttttaattagaaaagatggagtaagctttatattatatgtatatattatactactgtaaaaaatacaacaattaaaaagctagaaaagaaagaaaaaatgggaggaggtaaggaaggttcattgtgaattctttgtttccaagtttataagtactttaatccttttatttatagtgagctggactgaatttacacaatctctctcagctttagaattttgtgattccgttttgaagtgcttaaactgaaactgcttctctgtcccaggcacaccattgagttctttgggatgcccgaaagtgtctggttgggaaacatgaaatagaagacgagaacctgcctcagcaagcgtacctgagaatacttttaaaggaacctgttgataaatgcaaaacagtggctgttgcaggtatgtattgacggagaacttggattgaacctgatgtggcccactctgctctactcagtcaagtggagtcattctctgggaatgagctcttgtc

SEQ ID NO: 5084 - DNA, 2300 bp, Homo sapien
agcatattctggatagcactggagagaaaccaacacgggagagaaagcagccagcagttttctggcactcccttagtttgaaaaaatttacatcacaagaaagcaagccttcctttcaccttttaggtgcaaactgataaacataaccagtagggctactatacttcacagagccttgctcccagtagatactcaaaacatgcagttgaactgaatttcagttgttattttaaagccgtgcttgaaaagcgtatgtgacaaatgtactttcctaatcttcctgagaagagcagtactgtgtcttacgggcgaaaaaaccagaggagccaggagtggagggtgcaataaaacgcctgcattggggcagattgcctcattttgaatccctgactcctcactgtgctttggggaaaactatggaaattttcactgcctagcttattaaaatggactgcttagctgaaatatagaggcgtccatgacaactacccggagggctttgttaatcatattgcaggactccacccgcagtttctggttctgtaggtctaggtggggccgaaaacgtgcatttctaacaaattctagggtgatagtgacgcggcaggtcccgagacaacaggaaacccaagggactcgaggcaggcgctcaataaatattcactatgaacctcagcaccatcgaagcggcccaccagcaggggccgcggggtatgcgctgcagggaagagcacggcctctgtccaatgtccctgccggtacatcactcctctgcagggactaggttagaaccgggaggcagccagagcagcgctctcgctggataacggaagaggactccctcgccaacttccgcctctggggaaaagcggggaccctccgccacctgagttctgttgtctcgatttcgccgcagtttgcttctggcccgggcgagaacctgtcctctgggcaagccaggggtcggtacaggactcctataccccaaggcgaggcggaggcaggtgccgagcggtggccagagtccggcgcccaaagcccgatgggagggcgtggcgggggaggacggtcccgccagctcccaggtcggttccgagcgcccgcggcccgatggccgggcggaagatggctgcccggagcgccgcggacagtcacgtggtacgccgggcccgtagccgcgccccttcccccgctcgccaagtccccgaccccgcgggaggcacggcctcgggctgcctgtaggccaccgaggtgcggcgcgggccggccagggacggcgggcatcggggcgggaaggccagctctccccgctgtccatcctaacttgggcgctggggcttcgctcggggagcagaggaaaaccttccttcaggcgacttgcaccacgtggggctactgggcatgcgcgggctccgaccccggcctagccgctctccgggttttcgccgcagctcggaggggcggcggaaggtgggccccaggcggggcggggcggctctgacgcagtcggagttttcacctcgcgcggttagagctcttgcgcctccgtcgcgctcccaggcgtcgccagaggctttttttttctgttgtgggagaaagatgagagtctatggttagaggtttgaaaatgggccgaatagtcaggtcggccgtttcctaggaatgatccattgggcattaatcccaagtgtcgcagcccttgggcttggtgggaaaaagaatccagtagtagttcgcaaactcgtgcctggcttccagcaggctgagtttgcgttccctgctttgtgaccagctctagcggctcccgtctccggccctgccccaagggatttaccgtcccagattgtaaaatctggctcccgctaggccttacttagtgggcccctaaaaacgctggggaaagcgcccgcctcctcagtttcccattacttgaaagtaaaattcaaggggcccaaactgcgactgtcccttggttcggggtcccgctcggtcccgggaggagccccccgcggaccccgcccggccggcccgcccccccggccgcagtgaacacccggaggagcggagtcgcgtcgcgcgggaagccgggccggctcgggcagcggactgggcatgctcggcagcccgggaggctcgcggtggcaagtcgaaagcgttcgcaccagcggggcagcggctgcgggcggcaggcggcgggcaggtcgggagtgagaaggaccggcctgggctgactgctctcccctcgcgcctagggagccggtcggagagcgcgattggggtgcggagccccgacgctgccc

SEQ ID NO: 5085 - DNA, 2300 bp, Homo sapien
ctaggaaacaaaagtgaatcacctccaagtcacaatctgtcattagaaatcttgttaaaaataatactaagagcaaatactgaagcaaatgcttcacttaccaaaacagctattctgaagtaggtggtttggttccaaatgaatgacttttctacctttagaaggtaaactacctgatttaaaatgtggttttattcagtggacctttcagcagtagccatcactcaccattgagaaggtgggcttctctcaccaccttaatctctgtaggtctctttcaccctctagcatacatcttactaaggcatctaaagtacttactacttcgtactcatgggatccaatgatgctcacataatgtcatcaatagagtggaccagtgtgatgttttgtggaatgtcagaacaatcaagatcacttcagactattatggcagtgagcaagagaactaatggagcccgtggcaacactgggaagacatattgttggccctgttgggtaacagcaaatcacttctgatggaccttgcaaattggtatggaggaaaaggcattagccaggtaaataagtgcataccaaatgtcagatctgccccaggtgcataccaatgtgttaatctgccccagtaaaggtactacttctgggagagcagctgaaattggagtccccatctgattacatttatgacattccacagtcattcttcaagatccatttgtcttctgcacagtctaaactggggaattaaatgggagatactataggtatcactaccaaccacctgtagtcaaagttcaaatagtgctctggaagcaaggagacttttgtttctatccatggaaatttgtctcaatgtgatccagagccacgtagcctgaataacaggagcaagaccttaggagcccctgcttagctctttaaactcttctggccaacctgggttccaaaccaaggctaaccaaaaaagctagtcgaagacaacaaaggtcattccaagtattggccccgaggcttagatctgataatactcaacattctgtgctcattcctgtgtacctggctaggattcctggcttcaataactgcttggcttctattcattgacaaaaaacttggaatttatttgaagataccagggtagatcagggatgcagctgagcctcgggatgagatggaaaccaggaactggagtattgaaaggaacccagaaagtctccctctgtctcctctgcatttctatttattctctccctgtggtttctggcttttttccttcagttccatgaaatgaccacttgagagctcccaagtttttaatctcttccagagagtaacaagaacaaccctacctatattcattaaccctcttgtctagttgaatcctatttccccagattcccactggccacttaatcttactaatatttcaaggtccatctccaatttcacctttttttgtatacaaatgttcataacagctttatttataacagccccaaactggaaacaacccaagtgttcatcggtaggtcaatggacaaatctgttcaatgaagtggtactcagcaatgaaaaacacaaaaacaaaaactcttgacaaatgctaccacatggatggatctcaaaataattatactgagtaaaataaggctgaccaaaaaacggatacatattgtatgattcaatttacatagaattctaggacatgcaaactaataatggggcaaaagggcacttggggatgatgggtctgattttcaccttgatcgcagtgatagttttacgcagggtatacatatgccaacacactgtacactttagatatgtgcagtttatcagcggtcaagtatacctcagtaaagctaaaataaaaatattaatgggctccacattctggagacactggcagtagaactattattttcagcttgaaatattagctacactttggtaaaaatacttttgaattttatcttcacagttgtagcaaggaaaccaaaaggtataaacattcactgattgaaaaacaatgtcataaagtcatcccagtatctgtgaggagttggttccaggacccctgaggacaccaaaatcctcagatgctcaagtccctgataaaaaaataaaaggtacagtatttgcgtataacctccccatatcctcctgtacactttaaatcatcacaagattacttatattacccaatacaatgtaaatgctgtgggaatagttacactgtattatttagagaataataagaaaaaaagtctgtacatgtttggtacagatgcagttttttc

SEQ ID NO: 5086 - DNA, 2300 bp, Homo sapien
caggtttgcagtttcaacagaaataatctgtaaatgacacaagcaaatttacaagttagattagcaactttacattccttaaaatctgatgttatatttttaaaaatgcctctgggtacaggcaaaattatgtcatatggccactggaactgaagtccttaccagctatatgaagaatattcagattgtttctgttatctctgcattttaaagtagcaaaatactaagccattaggttattgaacctgtaatattcccacaggggttttatgtctaccccatgggattcaattaattttcctggactctggttagactgtttcctttccctcttaggcatttggcccccaaagtcaggaaggtaaaagtgtcatttttaaagattttacctgtcagggaatttccttgttggtgctcctggaaagcatgcagctggccggcaggagtctgacattctcagtcagtggggagagaagacatgtgtctcctaaagccaagaggtagccaggtggaggacagcaggactttctagggagtccaaggggaaagttctgagtggactctgggaagggacatgggtgccccatctgagatgacctgtgtccttccaatgcctggtatccccaagaggtgcccagacatggacccgccctggggaacgaggatgtggtgctgcctggaggagctaacactgaggtttggggaagtcaccacacagctcccagaacccagaatctccgacaagcaaccatgtgtggagagggaatgaggacagtggaaggacacagctcaaatgaagacactgcggacatgtttccatggctttctacattcttcatcatcatcaagtgttctcctctacacagtgagcacaacattttacccacgtgcctgatggacaggccaagctgaatggaagacttctgaggcactggagcagaagggaaaacttgcacatggtcacaaaggacttcacactgttccatcccctctactgccatccaagaggcctcttgactcttccagaatcagatgtaaaagacaaggtcagtaaaatcagtatccatgccacctgaagctgtgattaggcattgtacacgaacatggcacttttatttacttatttatttatttattatttattttgagatggagttttgctcttgtcgcccaggctggcgctcagtggcactatgttggctcactgcaacctctgccttccgagttcaagtgattctcctgtcagcctcccgagtagctggaattacaggcacccaccaccatacctggccaatttttgcttttttttttttttaagtagagatggggtttcaccgttggccaggctggtcctgaactcctgacctcaggtaatccacctgccttggcctcccaaagtgctgggattacaggcatgagccaccgcacctggactgaagatggcacttttaaaaagatttttttctaagtaaaatggcccccaaagagcccaatgatttttttaagggtttatttttaatttttaaaaaactggataaaaatgaaagctgtaaaatatgggaagaggagcaagagagctgctgagtttgcatttgaaattgtgaggggctggggaggacacgaccaggtagagaggaccgctacccactagtccctgctctcacagcttgcgctccccacactcaggctgcaccgccagggaacacaggacagaagtctagaggacaagagaccaaactcaagtcttctttcttgtggttggttgggtgtttacatgtgcaagtgtagtaagccacacaccccacggacataaggtgcctgtctgtggatgccataggcatgctcctaagctcagtctctagtgaccccgagtctctgggcaggccatgggccttcacttctccactttctaggctttcttgaggatgccgcattttttcctgttagggcagtggcactgctcatcattgctggggatacattcgcagtgccacacctcctccaccttctccacggggtagacggcttccacctagtggtagatgagccgcagctgcgtagggtccagctgcttcttgttgcaagcccggaaatggttgtactgcagccggaagttctcggcggtggaggagccccgcggcaaagttgcccacggagaggctctgctgcacgatctcgcgcacctccttgtcggacagcaggtagggagagcgcactgggaagctcggtgaaggaccaccacctcatccaaggggatcttgcagaagtccttgctgctcctctcaggggcagcgggggac

SEQ ID NO: 5087 - DNA, 2300 bp, Homo sapien
ttagaaatactgtttccaaaaccatgaaagtaactgttaacacatgtctcctatccttggaaaatggaccaaacttcactagtgcattaatcagcattactgaccaaaatgaatgcaccaagagtggattcaatttttgttcaaaataatccaaccagcttcctgccaccactttctgagaagccactagaaaaaaatcaatgtgtctggggttgggcaggcttctactgcacataaactaaatggggtttaaaacaacaatgaaaaataggtgcccatttgtacttaagtatacttctctctttttcttgctatcttttacaatttctggataatctcagaaatactcaggttttaaactaaaacaatacagagaaataatgctttagatagtagctaatatgctctcttcttcaaaagtgaatgctcatccactagacacaatgctaacatgaaagcgcatagattatttttttaattctcagatactttggttctctgaggcggagaaccagcatcaaggcctctgaatacaacaagcacaggcttgatgaggggcttgggaggtaagaaggtgcttttgccattcatagttacatgtaaatatggacaggttaggcatttgcttttaaggtattatggaaaagcacacttaacctttacagtatttctcctactgatctcccagtctttacacatcttcttgggtaaaggcaaatgttttaaatgtttcatttaggcaggtgtggggttacaggagaaccagtcccacagatccccacctccccacataccatgcccagccagcccctcagtcaccttttctcatttataaatttggagaccctcaaaacgctaaaaatcacaagctttaatcaactcagtatcctgttaagtttctctttcttggaccctatcccaagcatctttaattctcttaagtataaagtgattctgacacaggtggttgaccccactttagggaacattgtcctaggactgtttaaatatcattgaaaatcactgagtccacatattgtgtccttaaggacactttttaaaacatatatattaacttttagctttaagcaatatgttaaatgttcgtatttctaaaagaagacaaataagccaaaagggagcaaatgtgaattcctttcatcaagttttctctgcctcttcctccaggatatgctgtccctaatgcaactgcacccgtgtctgcagcccagctcaagcaagcggtaacccttggacaagacttagcagcatatacaacctatgaggtctacccaacttttgcagtgactgcccgaggggatggatatggcaccttctgaagatgcttttttaaatttaagaataagacacacaaaactctattaaaaaaaaaaaagaaataaacctctaactcggtccccaatgatcataaataatatgtttcctaaagaaatgcctttccagagactgtatagcttataccaattatagaatcatgaagtaagaacgttattctgaaatgaaatcaaatgttaaagagccttttgtttaacagaaagctggagagccactgccccaaaagttgttcttccagtcttcctgagtgtttggggagtatgtttacaaatcctgccagggtgaagagagatcttgtagctggcaagatttgggagggatggagcagacctgggcagtcagtaataatcaagggaagccaagtaaactccagagtcttacctctggctcacagctgcttttgtgatacacaaagtcacaaagaggaaaagggaagggaggaggttgcttttcaaaatgcattcaccatggctcactgtgtggggcatgattgcaggcctgagctcatgaaagactgtccaagattttgtggtttcaacctctcttcagcctgaaaattccatccagtcgatttgtcacagatcaggatcttcctgtcccctgcagcccatggggacttcctagaaatagatatgatatgttgtagatgtggttaaaacaaatccaggccccattgtttattcagctcattagtccacacctatttttccctagaactcctaccttttccaataatcatgccagcatgaaatgaccttttctactttaaaattttttgacttgttcatattgcttgattttcatcatctcagactcatttttctcctacctaatatcataaaaaagtaaatcagatatacagaatatcatttatgatacttcttcctttcagcaaattgactgaaaagtcattttaaagagagaagtgcagatttgctctcatt

SEQ ID NO: 5088 - DNA, 2300 bp, Homo sapien
tccctcattttaaaaataggtgcccttatttttaaaaaggagaagacatgagatctctctttctgcatgcatgcaccaaggaaggccatgtaaggacataaccaaaaagagggtcctgctggcaccctgattttggatttccagcctccagaacgatgagaaacaagtgtttgttgttgaagctacccactgtatggttttctttttgttttcttttgttttgtttttagatgaagtctcactctgttgcccaggctggagtgcagtggcatgatcttggctcactgcgaactccacctcccgggttcaagtgattcccctgcctccgcctcccaagtagctgagaccacaggtgtgcaccaccatgcccagctaatttttttgtattttagtagggatggggtttcgccatgttggacaggatggtctcaatctccttaccttgtgatccacctgcctcagcctcccaaagtgctgggattacaggcatgagccaccacacccagccttgtatggtattttattatagtaacctgaatggactgagactctagttaatatcgttccttttacctgttgtgttttggtgtttccatcagatgcctaaaaatcctagctttcctttcttcatctccacttatcaccatctaagcccctatcacaaaaaacaataaaagaaaccctctcaaaactgtccatcttacaacatcaacagttctttattggactgggcaaactcaaagaattccccactcaattgggaaccatgcaaccccagactgagctttcactaggaaaccatcagggctactttgtgagggaatcccttcccaagaaggaagtagagggatgtgtccctcattcagctatctagctgggtggggcataaatgctttctctaggtctaacatcaggggagcaattctggggtaaaacaattgttcctggggtgtttttgttaaactctatcatccattgctatgggaaaatggtaaatcatttcatgtttgagaactgaaataattccatgtttgagaactaaaaactgtaagcagaactagcattccaacagtatcttttatctcttctcttacatattcatagatgtgcttaattgatggatcttcctttgcgtctatattatagaaggattgcttgttttgtgcttttctatagacaaaaatgctctcttaatagttggttcctagaaaattagactccttttactagaactaaaggcaagtaggggtatcctctaattctagttttggaatgtgtggtttccaagctcttaaaccaaaatttactcaaaattaggaaggttttggttcttcttccttttttaaatgtgggctttattacccttagggatttcttctgtagactacagctcttaccagagaactcagagtataatgtttgtatttctgaaagcaccatttctctatttttcaagaaactcagttaccactgagatttcaggcaatgaacaatagcatcagctatcatataaccccagtatgtagctgattattgtgcttctcacacagtggcctcctcttaaaatctaaatgagcagcttgtatacaaagaagtatgctttccccaacctgatctggcctaaatctatctactttgttatataaatgctttgtgtattttctgtttgtaagccagcatttatctacgtacttgacctaaaactccacactttactccatgtaatatagtgatataaaaagtgtaaaacaaagaaatattctcctaaattaccttagctataatatcactttgacatagtaaaaaacaaaggaagtaacataaaggaaagcttaggtatccaattgcagtgagtttttactttttaaatatatcgtataagccaataaaatatcttcaaaataatatttaccccaacatttttacaacatttattttaattttataaacaaataacaaagatagttttagtagattatatctgggctgtagtgacccaattatctggtcaaagggctgcatggatgcaagagacagggtgagttaaagtttaactcccaggaattgtaaaccaaacctaaagccactgaacctttggagtttgatatgacgattagagcataacccgagtgacacgttgaattcgccataatcaaggaaaccttttccgggtggggatctctgaaattactcaggtatgatccatgtgttttgcttttttctatttcaactctgtgaaactgtgtattgtggtatcagtgggaatgcagtgaaaacagcttttaccctcttctgttatc

SEQ ID NO: 5089 - DNA, 2300 bp, Homo sapien
aaaaagaaaatttgttgaacgttgagtgaatctggggtagtatggacttccatgaagttccaagtatgtattcatgctttactattgaactaaattgttcacaattctgcaacagcttgtggcttaatgttcagtaggataaacttttttttttctgttgctttgtaattacttgaagtacactttatggagaataacacccaaaatttaattgtgtgactgtgttcttatacatatgggagagggtatgggagggaaggtaaagagattcctttgccaaggggtggaattttaaaatgcagttcatgtgttgtatttgccttattgacatttatccttcaatataacctagagtcaggctatttggatgatcaccacatcacagtcaagagctatgaatgaccttcattgattttgttatttcatttctttagtacatacccagcaatttgcccatccaaaattacagttgtgctgtttctgaatctatgctgctttagtgtttataggtatgaaaggaatttgggaaatataattttctgattatttgagaaagatgagatttttaaaaaaatgttcactgagtcagaaaattattttaatagttacaattttttaaagaatcagtataagatagcagttgatttctccataattatcagaattatttatacttgaggtcttgactaagtggggctgaaatcaacataaggtcttaggctgttggctcagaaatcatcccaggaagcttgtcttattgatatgtatcatgcttagctcctatgagatgatctggtcctttttaaaaaaagtatctctttcttcattctttggaggcttgaagtgaatttggcagtattcgttaaacaccttccagctcctttcatttaccactcttcaacattcagttctgactgcatccatttcaactttttctgctcttttctaagttgctttaataatgttaaatcatccaaatttttatctttctcttcttggaagttttttactactgctgtggtctggactatacaatttttttatggctctttccttactggcatgagctgccatcaaagactcataaaattgtttatagttttggctggcatcaatttttccctgcaaaggaagctgtgggaaccatagtgtttaactcatgtactattctgtcatcaattttcctcatcaccttgagtaataattcctgtaacttaggaaactcctcacaattcacatcaccactgggcgccaccatattggatcagaaaaatgagatgttttaaaccacttggcttgcattgatttcctacctgtacaccttggaaaagtcaggtcctctgatttcttcttctacatgagccactggaaaggatgaaatgaggctggggatagaatagtatgtgaagagcactatttactatatgcagaagaggaaaatcctaccgtacatatgctcctcagttaataggttttctgtagaatgtaaacttcttgaggccaagaaccttgactgtcccttggaagagctaatccatggtgaatgcttaataaatattttctgaaaaacaactgaaaagatggttgaataaagaaatcttcagaaattaaacaaataatgccataactttcattgtaaaactcagggtccaattacgcttttagcctaattcaatcctattaacctgaaactgagaggtgaagctggctgggcttctgggtcaggtggggactgggagaacttttctgtctagctaaaggattgtaaacgcaccaatcagcactctgtgtctagctaaaggtttgtaaacacaccaatcagggctctgtgcctagctaatcgggtaggggacttggagagctagacagaaagtctagctaaaggattgtaaatgcaccagtcagcgctctatgtctagttaaaggtttgtaaacacaccaatcagcactctgtcaaaacggaccaatcagcactctgtaaaacggaccaatcagcactctgtaaaatggaccaatcagctcactgtaaagtggaccaatcagcaggatgtgggtagggccaaataagaaaataaaagcaggccacccagcctcagtggcaattggctggggtccacttccccactgtgagaggttttttcttttgctctctgcgatgaatcttactgctgcttactgtatgggtctgcacccgcctttatgagctgtgagactcaccactaaggtctgcagcttcactcctgaagccaaggagaccactaacccaccgggaggaacgaacaactctggacgggccgcct

SEQ ID NO: 5090 - DNA, 2300 bp, Homo sapien
ataattcagtgtttattcttctaccagcatgtcttttctcaagctttccttgtggtctaaattaaatacttcttaagccaatggacaagatttaacgtcactagcaatcaacattatttaaattaaaactgacctattcaaaaatagttttattttggaagatggggatgaattttgggttttgaggtgcatgcgtgaaatctaagtttaaaggtttattttttaataagcagaagaaacatttgaatatcttcatttaagatagtgtaagacttggaaaaaaccttttaagagtcattttaaaactatttttttcttctgtaaataaagttaaagctatgcctagatttttgaatgtgatcaaaggttttttctaatgtattatttttaaatgtcaattattttagtgtgtgtaaaatgataatagcagattaagttcatagacagaagcaacagaatagcaactgtcaacaacactaagaaccctttctcaaacatcagtagacatagccagactttagcatctggtgcaattaagaaattcagatgtggtttaaaacatttttaatgtacaataatcagataagtagaatagtaaataataaatctccagaataaaatatacacctgtttttcctttatttagttgtttcagaaaaggtagaataattttttttttgtaagtagccagtaattatacattgatttttcttttttaagaaaagttacaatttaggaaagaatctcctggtatcttagttgcaactatttttttccttaaaaaaattaccaatgtgttgactattatcagaagaaatacttctcattccctatcaaatcaaactctcaaatagtgacttatgttatgtaaatgctctctgtgatagatataaaaaaggaaattgtaagaatccgtgaatacgcgattattctactgtgcagaataatccttttagcatagggtagatggtggatgcacaggtaagacctaaacacagataattaaagatgcaatttctcccccaaactggaactggtagtgtgacccagcttagcactggtggccaccacttctgagccattgaggaagagattgtgatataatttggatgctctgtatacaagactgaagggtagtagatggaaaaaaagccagacacaaaaagtttacagttaacacatggcctttctcttttccgtaatcatttggctcattaccctatgttcatccaacttccccaccaacaattttagttcactctgtccagtaaggctttacgctgaaaaaccttggaactggtattgccctgtcattcttactagggtcagaaccatgagacttcaaagtaactaacacacacacacgcacacacacacacacacacgccttcctttctgaatccatccaggcatcaaaaatagaaaagaagtaaaagtcaaagaccaagatgaatttgtgcaggttactgtctaaaggcagtttaatatttacgaaatgtcacacacatacacacacactcacactctttaggatccagttacaagcgctgcgtcatccgccagatcacatggtaattgttgctatttcaaggatcaagtggcataaatctccccccccccaccccacccccttcccttggtaccatacagcgtggaagagtgagttttgtgtgatggagtgggaccaggctctctgatccaaccctctgctagcaactcggctgtcggtggggtggcgcgcgcgtattctcacggagtgactaggagagggggacgagggagggggtctcaggggaggaagggcagctctaattggtttctcaatgaaagataatcacctactccccagagaggctggagattagcactctgcctctcctctccatcgcttttagacttctcatcctcccctcggtgcttttagtccattcagcagaagcggatcgaagcaggaggctccccgcgccgcattaggggcgcactccgccgcgctcgagtacttagcgcccattcactcgctcacccgcgctctccgctgccggctgccgtcccagccgccgccgccgccgccgccgccgccgccgcccgagaaaaagtttcgcggaggggctcagtgaaaaaatgagcgagctagaggaagactttgccaagattctcatgctcaaggaggagaggatcaaagagctggagaagcggctgtcagagaaggaggaagaaattcaggagctgaagaggaaactccacaaatgccagtcggtgctcccagtgccctcgacccacatcggcccccggaccacccg

SEQ ID NO: 5091 - DNA, 2300 bp, Homo sapien
cccagaagaaggaaattttcatggaagcttttttagaatacagtgagttatacaaagtcacagtacttctgcttggtttacttttaattaaaacaacagtaattcagagctattattattttcaatatttgtaagttgctcatttcttcattgcaaaagaaaatgttttgagaatgatccattttatatatcacatttagaaataaatgcacttctgaaagtctgtgttggaaagcagaaaaatgaagtgtcttgtgtaatctgcattaagagaattactagatcataatctacataaaagaatatttaggactatatattttgtcatttagtcctctaattaaaaacaaggacactttaaatgaacaagcttgttaagataccttgacctccctccctcctttcctcccttcctctgtctctagcttaaatacaaaaagttgtgtattcaaaagcaacagtgtgcaagttattttgatactattctttgctaagtttagaattgcattgcaattcaattttattttctgtccactttgttttagtgttaaggaataaccaaatagagcattgaggattataatattgagtgcccaagaatagtaatcaaaaatctgccaataaagatgctataaaattggatgagttcgtaatgtcttaagcaaatattagggatttaggtacgtattaggcagatatttggggattctaaacatgtgttcccatgatgggagtgtaacacttggatagaaaggaagttacctaattgtgatcattttggggaatattgagtgggcagggatgagggtgggagtgggtagaggtgggggtgactgcagtatagtgtacaattcactgcagcctgcgtggtctccctcgctccttcacgattttccctcttcttcaaagtttgtgtcaggatgtcttcctggccattcaagtggaaagatacattcctaacagcttggttgtgaggaaagtaatatttttaaaggtatgattcagtttcaagatgaaatttttggagctcgggaatgatttttaacccccaccctctccccgccaaattcagcaaatggaagaagcaaggcccatccgagaactattcccaggcaccagctcaaggcggagggctcatggggaagctgagtgacctgctagggcccaaatccgtttttggcctttgccctaaaacagttccccgatgagagtttggaaggggcagaaaggaaagtaactatctggagcaggcgaagagtagcaacgcctcgggtgctaaaatcggaaaccccaccccctaccccacaaccctttcccaaaggtagtaggctgaaagggggaattcctcgcgggcgccgactcgctcgcatctcctgagaggcaagtttcttcgcaagcgttagccacctgtgtgaggcgctctgggtgggaaaggtggcgtgggagaagcgacagctcggccacaccgctcgggagctttccttagtgaggccggccgtcaaaatacctccagaactcagagctttgatgatgcagagtcccctatgcctcgtacgtcgctaggatcgtagctcaacattctccaggctggtctgctctggagtcagctgaggcctcccgagtttgcccggggtcctccctgtcccctccctcccacctccccacccccgaagtagcgctcccgcctcgctccacccgcacacccccggcgcgcctcggaggcttatcaggctccccgcacgccccgcaagcttccttgggcgcccggcgcgagggactctgagagcccagccgctgcctcggagcccccattcacgtcccctcctcccgctcccccgccaccgcgcctccgactcttctcccccgcgccgcggcgcccaccgcgtctcaggtttaatcccgggttggacctgctggtttgctctccccgctctgagcctcacagccagcccagagaagtggaatctgcactgaaactctgggtggctggagccggcggactgggcatgctcagaagccagggctggctttggtctcaagtaggaagctttggcactcgggaggcagcggcgactttggggaaagttgatcggagaggggaggaagcctcaagacgcggagcagcggcaggaaggagcccccggcagcccggaggagcatgggcaccttgcgggatttacagtacgcgctccaggagaagatcgaggagctgaggcagcgggatgctctcatcgacgagctggagctggagttggatcagaaggacgaactgatccagaagctgcagaacgagctggaca

SEQ ID NO: 5092 - DNA, 2300 bp, Homo sapien
ttacccttgacagaatgtgtataaaaaaggtatgccttctctttgtaaagtgatggtatagaaggaagaaaaatagatttgtctttagtttttttaaatgatactatccttaacccctcccctttcgtccccaataaaagaatcacactggggaaacattgctagcaggtgactattccgtttctttgacatagcaggaaaatcttattaggtgatgtaaatgaaccttgtcacttgcaaatataaactgtcgcgcatcttgggtgaacagctaagtgcagaactgtttcaaaaacttgaaggtaaatggatgtcttatttgcagctaaaccatcatactcatgtcaaatctattcattggaataggatactgaagatacataatacaatttttttgctgaaatttaaaagtttcataatccacttaagaggcatatttcagaataaaataattctctgttttggaattaaagcacaggcttggagcagtccagtccacagaagtataatgcaatctatccatataattttaaattttctaatagccacatttaaaaaagtaaaatgaaatgaataacattaacttcaaaataattttttactcaaatatataaaaatattacatttcgacttataaaaaatataaaattgatgggctatttttactttttttgtatttgatcattaaaatctttcatgtatgttacatgtatggcacacctcaaccagtatgttaaattttgactggaaatactttctttttatttgtttttattttttgtcttagtgttcttcaaaatgatttttatttagaacacaatttattattgcaaaagtagattctatatccaagttgttctaaatactaaaaaagttttccaatagcttactgaacattagtttttatatttaaataaaaaatgagatttaaaattcatttcttcaatcacactagcttcatttcatatattcaatacacgtaaggcagtgtagaattggagctatgcgagaccaagctgggttagaatcctgacttggcctctttccagctgcttgtccttgggaatttacctagccctctccaagcttcagttctagcttcgaattgcaggcggggaaacaccacactgaatatgttttaactcctacctgcaaagctaacagcagaagacaaacacccgctatttgtttctcccttcatggaagtggtggactcactgcatgatataataaaaatcagaaccaatcaacgtagggatagttaagtaaatttctttattccatactctgaagccataaaatactaataactaattaatcactaatttatttaatcaccaattaatattgaaatcggttgttattaaggaagaaaaccgtaatattaggaatagcacgacggctgcccgtgtgctcaggaaaaacctagaagggtctgccacccatccattaacagcggttataggaagcaacagaatgggggcagggcccagccggcacacgcttcagtttatatttcttgtcagttaatttccaaaaacgttgttctaaaaaggagatataatactgttttagtttaaggggcaaatctcaaatgtgctgaaacgactacgcttttccctcagtctggaatgtgattttaaatctagcttaactatactataataaaaggccacatgaaaatactttgtcagaacgaaaaacacgccgccttaaatccgctttcggttggcggtttcccgccagcggaacggaagcaaaaccgcctttgacgtcaagggaagagtcccctcccagttactacggtgaagtctatgcggccatctttactgtggtcatctcgtaccaagcgtgtcgtagtggggctgttggggccccacagaaagtcagcggaacgtgaaatgggaaaggaatcatgcgactctgtaataagaagctgacagaaccatgaaggatcagggactgaaagcattagataagttgttagtgggatgcaggttccacaggcaagcggaacgattcaagcgaattagtaaagtttctgcccggatcttgaaagccgcttccgttgctcagcggaagtgtcggtcgcaagaggacagacgcctcgaagaatccgctatcggctgtctgcacaaccggaatcatgtcgagtttggcggtgagagacccggcaatggatcgatcactgcgttccgtgttcgtggggaacattccatatgaggcaactgaggagcagttaaaggacattttctcggaggttggttctgttgtcagtttccggctggtatacgatagag

SEQ ID NO: 5093 - DNA, 2300 bp, Homo sapien
cttactacatgtgctttatttgatgttttctgttctattccatttttttaaaatgctgtttgcagccctctaaatagatttcttgatacctttaatggattgcatagaacaagggacacagcagcatactcccagatggggttacagcttctcttggttccttagacaccataaaaatgcaaagctgccagtcatttctgttcatcctggtgacagttccgttatttcctttaagaagcttcatctgggtccactgcaggaaatctttaaacctttgtgtcaactccaaactgcttgagaggcagacatacagcaattctgagtctcagccagcctgttggcttagtacatttgggtgcaagtcacaaattaattttctaaattgtttacatagtaccagtacttcttgccctaggtactttcacatctattcctttcatccatgtgggagctagtaagaatcaatcccagcaccttaataaggcaaattttaattatgtgtctttgggatctgaccatacatagctggtcaggatgaggcttaggcctgtctgatattctatccccacaatatctgtcctatctagtggggatcaggctgatttatagagcaacctaagggctttaaatactaatgggtacctcagtagaaacaaggtcctgagactactatcaaggtaggtagaaatgtaatgattcaaggagaaaggaccaagcacaaatgccttgtagctagaatgcatcacaacaccagaaagagcaaggcaaagttcaaggtgaagtagtttgagaaacaatgttacaggtaagtgaggaatgtttcatccagggttgttatgacataaaggaatgtgacaagggacagctgtgtacatatagattcttagcaatggaagtgacacagactcatatttgtgcccagctgtttgtgtcttaaataatcttggtgagctaggcaagtttggtgtcttgagggacagtgatggacaggctctctatccagaagtcttagataactatacttgatgattaaaagaaaaaaaaacaattttttgtccacatttgggtttctaccaaggagtttaggttttctaggtgctctgagtcagccccagaggaatggagggacacacttcattgatgtttagagctctctttgtttgatatccacattttcactcctgggggcatgatggttcttgcagggaggagaaaggctctgactgtggttatctggaaaccatccttccttcccacagtagagtgatcctggtgaaacttttaagcagtcaaaatgcatgctgatgtttgctgagattctggttttgactctttaggatgtgtttctgtatttcttctcatccacaggacattaactagggagatctctgaattttgaatacaaagtaaggttggaagtgaactttactattgtgatttttttgtgatagaggagagaatggtaaagacattaaactttagattgttcagaggttgaaggtcactgggttaattatattggatttggagaatgacgcaataaaaataaattcatttctattttatgagttataagattcagtcactctgaccttctttttttatgtaaagtacatgcactcatcatctgagcacctttacatttgtggaggtatttgtacctttacaaacactgttctctacacatggaaagcccttcccccttcttccccatccagtgaggaatcactgcctgcctcggaaaagctttgtattatagattatttgtatactgttctatctctgtacactgaaatttccctaaaaataatcaaactaacaatttataggtatatcatgattacaatatgacagacactgtgttttgttattattaactcattcagtcctcacaacaatctgtttatggaggtatggttatattttgcagaaaagaacatggcatagggaagttaagtgactttcttagggttccagagctggatttgtaaccagggagcctgcctccagtacctgtttaatcacaatgctatgctgactctctaattgttgactgtgtcttgtgtatctttgcagcctcagtgtcaagtgcagtgtctcattcataggaggcacacataaataatgttggtttaattaattaaattaacaaaaggctgcactctcctaaccagattgtgtatctcctctgcacctgaagttcagacttggtaaagcaggattttacacattaatttgagaagatctggaggcaagtttttattctgcccaagaaatgtggggaagtgttggatgtaaat

SEQ ID NO: 5094 - DNA, 2300 bp, Homo sapien
ttgttttcctttttttttttctttctataatttttttttgcacaagtttgaggcttaacctgtttggctttgctaatgggcatgtaggtagatagatagatttgtcttttgttccatagactcaccttggataaaaaacagctgccagagataaatattactgttttatcaatttataggactttttgagttagaaaggagaagtctggggacacagaagaaagctctcaatatgactctcaataaaaaaaaaaaaagttagtgtgaaattaactgggcatggtgatgtgcacctgtagtcatagatacttggtaggtcaaggcaggagggtcccttgagcccacaaagtcaaggctgcagttagctgagattgtgccattgcattccagcctgggtgacagagtgaggccctgtctcaaacacaacccacccacacaaaagaaacattaatgtggtggcctgtattatgagcatgacacacagggctataactaagaatctaaaggtaggtctgcaggcgtaacattgtaatatttacacttgggtatcatttggatgatcacacaatcaatccatttctttcaaatttagaattgattcctattgtcattcttgaaaaattgcacactgatttattcccactgaaattagtatgcacaagatgtgagtgatgtagatgcaacatcatcaccatcactgacgtctcctcctccctatccttctaatgattgtgttgatctgcgtgctcctcccaaaactgtgcaattagtacaaaaacaaaaccctttcatgatcaagaagaacactcttagattaagggtatgaaaaatcatataacttaaaggatggatgttaaaagcttatattacagttctatttgcagaagaaatgaaattactggatgtgcaatcgtgacatagtattttttcaagtggttttattgactttatctgaaaaagttaactgaatttctagttttcatcaaacaagggttttcaactcactgtcactggcaatgtgaggtcaaaaagacaaaaacaatgtaattgagagaatcttcatgctgcagccagttttcatgtgtgcatcatttactgcagagaaggacaaagggatgtagaaagaatatgtttaactaggctttggagagttgaatttgttgtaatcatattgttccccaaatgtttcttctttgtgcatatgatgaagccaaggaatcaggtgaaaaatccttggacaaagactcatgaagttgcttttcatatgaaatcatttcctcctaggatgtagtaatatacaagaattgtccctttgattgttttgcctagtacagagtttgactagggatagcccaaaaaaggactgtgtggtggtcatgctcagaaatctgctaatttctgagtttgtgtgaatatctatattcactttgcttttcacactggatggcccaacattattcctatgaattctttaaaaccaatttgttggattagttttatattagattataatatagtatattatttcatgagggatgcttggattataggtatttcctactttgttatagtgacattctacaacagcactacctggtatttcatctagtatgatataccaattctattcttggaatcttgtctggaattaaacatcaactaagttcaaaagtaattatttttttatttcaactctataaagtatacaacaggcactcagcaattacagctgcaggaaaaatacagagcaaatcaaagcaggtaaatttatgaaaaagtttttaatctacatcaaaagagtgcaagtggtcaatgaccatttgatgacagtttgttgcattctgactaacaaagaactctttcatgtagaacaaattgtaagaggacaatcaaataaccatagctgtaagaatacaaaagaactgaccagttgtaaaaacatcatacattgaaataaatttgatagatgatgcttaaagaaatgtccctttactcagaaagccccaacctctgagtcattgccaaggtcccagagctctgtctgttgattcaggggcagagaggagggctaacaacacactttcaatgttttgctttctaggtctgttgaaaacttgcctcgtaaatgatttgcatatacaagaactcggaaaaagcatcctgttttgttgagaggtgcaccaagtgactttttcatcattggtttcataacgaggtctggttagcagtcatttccaatttttcttttcggttggaccattgtcaatggagtctataaaatgagatatgttagaacttga

SEQ ID NO: 5095 - DNA, 2300 bp, Homo sapien
taatcatatactatctcttcagaaaaaaaggcaagagattggcctttagtgtggcacaaatatatttctagattcaaaatatttaaacaggttaataggactaaaaagaaacattttcaaccttctgattggcaggcggatttttctctacgtttcaaagtcattcaaacttaacacagcttgcagatttcctagtacactgaaggtgcttaacgcattgattcctgacaggataatttcctggacagatggaatttgggatgggaaggacactaatataactagggtaccattcaagaattgtttagatgatcttcttaatattacctttgaaactgaaggaactagaacacagaccatagtaaattgtgttttaattactccttctcccagtaaactttaggatttttttactttaagattgtcactggctttacttggtggtggccccagttctgactatagtaggtcagcatgtggagtcattatagacagcctaaatctatacagcttagaggaagacaaaataaatatatcttactcttttttaattcaatagtgattattcaatcatctctcccttttccaaactcacaaaacagttgcttattttctgacacttataatatcaacctgtttttaaaagaattatgtatgcttttatatttattgctataattttattgttactacatcttttattattactgtaattagaataaagagaactttattatttaaaatgagagctgtgtctcataaatatttgtattcactgtgcccctccccccaccacccatctcaccaaaaaatttaaaaaataaaaataaggtaacaacccagagggcagcccaatgccagggctctaggcttccaataagtttttgttgaattaaatagatcatttcccatttataagcatgacatcattcttatacaccagccttactttattatatccacacaccaatttcaatgacgtcaaattcactttctaattcactttcagctcttcttctcctcaaggttgtttcttttctccctagaaagggtattgcgtggtcccgtgcaaggtaagacttgggagcaaaccctgcattcggaagcgttgcgatgtgatatactaatgaggaagtcaggcgctaagccctaagggtttcttatttctccacattagcccaccactgagaagggagaaccggggaaaggcgactgacctggcacgttggaccctgtccgctttggtcccggccactttgatctcacgcgtctgcctaatcaagttcatctaccgccgcgattgccctgattcaaagaacaacattaaatggtttgattatcggatggtcatttccctcttccctccacccctgatctaatttctaaacgccagtctctcgcctccctctctaaacttcccatcaaaagagaattagctcttcttccttcttaccctcgtttgatgtgcaaatttccttctctttgcacatttttctcgcagtggcggggggaggtgggggaggagggcaactgaaggacctcaaagccggggatctaactcagatctgcaaactgcgactctaaagggttaatgagcaacttgcacccgccacctggccctctcagaggcgtcttgctagagccattgaattacagaccggtttgtatttaatactgaatatgacttgtgtgcacagtcagcgagtattggcataaaggagaggggcaaaaagtgcttttgcagagcctatcacccctcggctctgtaaagtatttcagatccggataattcaacccttactgccaggcaagggcacccaagttcccagagttcctgctgccgcctgcatttattaaagtcgtctgctataacgctcgctggtagccttcaccccgaaggtgagccgggccagccgagcgactaagcaagggaggggcggggtgaagagtgtcaaaggccccccttcatgtacacaaacacaccccctcccagcccctcccagcgctttgaaatcccatcccggctttgttgtctccctcccaaggggccggaatgctccgggcccgcggtataaaggcagccgcggtggcggtggcggcgcagagctctgtgctccctgcagtcaggactctgggaccgcagggggctcccggaccctgactctgcagccgaaccggcacggtttcgtggggacccaggcttgcaaagtgacggtcattttctctttctttctccctcttgagtccttctgagatgatggctctgggcgcagcgggagctacccgggtctttgtcgcga

SEQ ID NO: 5096 - DNA, 2300 bp, Homo sapien
tggcagtctgttatgccagcatcaacttgagatacttcattgcagtgacatcattttaaacacaagccaaacttcctctttactgttaatgcaaaactctccagatggacagaagcaccaatgtgtatactgtatacagtcagtcataggtaatatccccagtatagccatttaaaatactttcccaccaactgtggtaggggcaagtgagatttctgcccattttaatattacctttggggtaagaaaaagaaactcagtcactttaaaaatgttcttaaaaataacttctctgcccctggtgctatatgggtcctaccagactaagttaagcaaatgcaattccagctgcctggaacattgcaatctcaccggccagttactttactgtgtaatttctatattacagagatttacttagttcatcctggagtactgctgggtcctaaggagggtcgtcgccctgttagcttatttctggagacctctttagctgtctaaatccaccttttgaaaaattaaaagttagtggatctgtggttggggggaggagtacttatattaaggcagcagagggtagagggagggggaaggatggagaagtcaagttgtgagggtaccaagatctctcttaaaaatggccaatgcagataaatcagtcctctggctgacaacagtttcagcaaaaatcagaaggcgaggccagtctggcaaaactgtgagaatcacaataagaaaaatgaaaaggacagctgaacgccaaagctggtttctttgatatctgtatgatcccatcgtcctcctcatcatcccccttctcaattgacctcaaggttctccccagacaaatttttatggaagagtccactacgaggtgaaccgttgtattgaatcattgagggacacggaggaagataaggacctcagagacctcccaacttctctcttcttcccgattaaacacttgcaatgaagatacttcagcggaatcctgcatgctgaacacccatttgcaggtggcgccgcagtgttctcagggcggagatttctccccccaccccccccaaccccccgcccccgcccaattcatagacgctcaaaggctggacagttttagtgtgaaagggagctttcaggactcaccatttttgcagtaattcccggggcagcacatagcgtgacgcatgcagcgttttcggcgcttcctgcaggcgagacagatttgcacgcctgcgtcccctccgcgggtgggactagcgcagtactcatcagtgccgcactcctcgtcctctgcgcacgggtacggctgtgggaagggttcggggagagggtgaggcacccagacgtccaggtacccgccctcttggacccgggcgctgatcacagtccttatctgtccacctctccaaaacctgttactgcccactgctcccaaatgcagggttaccaaatgctccctgaaccgcacacattcagcacgttctactccctcgtctccagataggaccctttcaaggtcagagcatcctctgagtgcccgacccctctcacctggtagttgtcaatggtctggtacttattcccgcccgggtacaggattcccggcgcggcgctgactgcagagcctgggtgccccgcagcgccgcccagcggtgggggcaggttcttgatagcgttggaattgagaaccgagttcaaggtggcgctcactcccagcagagggtggccgccgagagccgccgctaccatcgcgacaaagacccgggtagctcccgctgcgcccagagccatcatctcagaaggactcaagagggagaaagaaagagaaaatgaccgtcactttgcaagcctgggtccccacgaaaccgtgccggttcggctgcagagtcagggtccgggagccccctgcggtcccagagtcctgactgcagggagcacagagctctgcgccgccaccgccaccgcggctgcctttataccgcgggcccggagcattccggccccttgggagggagacaacaaagccgggatgggatttcaaagcgctgggaggggctgggagggggtgtgtttgtgtacatgaaggggggcctttgacactcttcaccccgcccctcccttgcttagtcgctcggctggcccggctcaccttcggggtgaaggctaccagcgagcgttatagcagacgactttaataaatgcaggcggcagcaggaactctgggaacttgggtgcccttgcctggcagtaagggttgaattatccggatctgaaatactttacagagccgaggggtgata

SEQ ID NO: 5097 - DNA, 2300 bp, Homo sapien
taacagttcagtcagacagatagatttctctcaattgaatttaaattaaataagtcaaatggctgtcttttaattaacactaaattacatcctattaatcaagtatattctgctattggaatgttgttgcatttattaagtattttattgaaaaaacatttcaataatataattaagtttctgtcatattttatgagataaatatttgctagcctattgtgtacacaacagagatacagaatggcatattggaatagaaatgcaaccagacattcaggcctggctttgagtcatagatctccttctgggtaaccctgaaaagcaagctaaaatttccaggtctcagtttatctttcagcaatgtgaaagaattagtctaggctgggtgcagtggctcacacttgtaatcccagcactttgggaggctgaggcagaaggatcacttgaggccaggagttcaagaacagcctgagcaacatagggagaccctgtctctacaagttttctttaattaggcaggcatggtggtgtgcacctgcagtcccagctacttgggaggctgggatgggagaattgcttgagcctgggaagtcaaggttacagtgagctgtgatcataccacggcactccagcctgagtgacagagaccttgtgttaaaaaaaatagtctaaagtagggtcagcaaactttttctatgaggacaaaatagcaaatattttagtccttttaggctttgtgggaagaagcaaaatgaaagataatgagaaaaaacaaatcttctaaatacatttctaaatacatttctaaatacaaaattttctaaatacaaaattcaaaatacaataattactattttttgtaattcatgtttactaatgaggggaataaaatttcctctcaataaatgccatgcttccagaatgttccttctcagcctctttggctggactcctctgttcaatttctagatgctggtatgttccagaaccctcatttctcttccatcttgattttcttcttgcattagcttatctagttccacagttttaaaaaccatttacacattatgactttcaaatttgtatcactatagttgacctctctactgtagggtatgtttatataaccgattgcctttttctcatttattccatgtctaagaggtacctcaaatgaaataattcctaaaattgtttcctacccttatctctctctcagtaaatgataccttcacctaccaggtaattcaagctgaaaatctaggaatcatcttagatcattgcctaaactctctccaacaagaaccagtttattagcattcatttgagtattctttgtataaggagaaaaagcaatcagagttgagaagctgtatatctgtgttcaacatagaaataaccagatatattctggctgtaaagtaattataaatgttattaagtcagccccctaaacaaattttggacacatccacttctcctcatctctactaatatcacttagtcccagctaccattacctcttacttggactactgctcttgcttcctaaatggtgtttctatttacattttcaactccaacccctgctgcacccaatccattctctacagagtggtcagaatgatcatctcaaagcacagtcagactttgtcacctcctgcttttaagtttttgcacagattcccactttttaatttgacatatattagtatctgattagtatgttcctagcactattctcattgctggggagatggcagtgaatagacagacaaaaatccctgccaaatgtaacttacactctaatgaggggaaatagataataaaccaaaaaaaagtgaatcagatagcatgttaaatagtgataaatgctttggagaaaaataaagcagggagctaggcaaggagatggggtttggaggcattacaactttcaatagggttgtcagcaaaggccttattgtgaagatgccttttcagtaaagacctgaagaaggtgagtcagaaaggaggtggagtttgagggtaatagcattccacggagcagaaaaagcaagtgcaggaacagcaagaagcagagtgagagaggtggggagaattcaagatgatgttagagagatgacagagtctaggttagggagggcctgagtccttgtagactctgagtacggtgctgagcagggaagagacaggctctggcttagggtttagaaggaacacaggctactgcgatgaggattgtctgaaggggaacaaaggccaaggtggggagaccacttagaactctactgctctac

SEQ ID NO: 5098 - DNA, 2300 bp, Homo sapien
aagtctttaacacagtttacaattcttgttatgaggatgaaatttgaagacattgtgctaagtgaaataagccagatacaagggggctattgtatgatttcacatatatgaggtacctaggatagatgaattcagagagacagaaagtaaaacagaagttaccagtggctgtgggtaggggtaaatggagaattctagtttaatgagttgagagtttcagtttgggatgatgaaaatcatcccatgatgtggtgatgatagcacaaccgtgtgaatgtacttaatgctactgagttgtgtgcttaataataatggtcaaaatggtaaattttatgtctattttaccacaatgaaaaactggaaaagtaaagtcaatgactataatatcataaagtgtaagtaacatgagagaaaataattcaggctaagaggatagagactgctaggtaggactattttagaataagtgatcaaggtactgatttctctgaaattggaatatttgaatagaagagaaagagctagctggcgatgcccgtaaggggtccaggcatggagacatcaaatgaagagtctgaggcaggaatggccttaatgcattaatggcagcaagaggtctatgtggtttcatggatgggtgtgtgcgtgcatgcacgtgtctgtgtgtatagttggtgtgcatgagcatgtgtatgcatttgtgagtatctttgtttttctgttggaaacaaggatgtcaacaggactaactaggtgaacctagctgtggtagttcagcaatgagatttgccaaaatggatggcaattgaaagaggaattgtgctgtattaaagcagacagctgccgagcactgtattggaggctcctaaatttctcatagttctgagaagagctgtttattaatctggagttgaaggccaggcccaggatatccttgttcacaaggttgattgggccctacattgctgagcccagcctcctccctcactctgaggcatctgccagagccccaggctagagggccagcgtccttgtcactgagtccctgctctgcagaaacaccagtaagtcatttctggtgaataaatctgggtttccggatcaagggtttggggagctgacatgaccctggaggcatggaggaggctttctaggggtggggggagtgggatggaaagcagaaatcaggttgaggatgtctctttttctgcttgtgctggagcatctgtgactttcctccattatctgttcatctgcagtggagactgtctttgttttcaaagggaaacttggaggcttagacctatggggctaggctgctgaggtttcttagggggcaatagctggaagaaagctctgaagaacaaatgaaaggttaatactgagaaatgggaggaggattcaaggcaagttttctaattgccagtggtttttgactcacagaacatggggaattcctgccagaaagtagagaggtatttagcactctgccagggccaacgtagtaagaaatttccagagaaaatgcttacccaggcaagcctgtctaaaacaccaaggggaagcaaactccagttaattctgggctgggttggtgactaaggttgaggttgatctgaggttgagaccttcctctttggatcaccagctttcagctcagggcctgccaatgagtaaatgatagttaacaggtcctggaggggaatcagctgcccagatacaaagatgggattcaggtggcagatggacccgaagaggacatggagagaaagaggaagctcctacagacacctgggtttccactcattctcattccctaagctaacaggcataagccagctggcaatgcacggtcccatttgttctcactgccaccgaaagcatgtttatagtcttccagcagcaacgccaggtgtctaggcacagatgaacccctccttaggatccccactgctcatcatagtgcctacctttgttaaagtactagtcacgcagtgtcacaaggaatgtttacttttccaaatccccagctagaggccagggatgggtcatctatttctatatagcctgcacccagattgtaggacagagggcatgctcggtaaatatgtgttcattaactgagattaaccttccctgagttttctcacaccaaggtgaggaccatgtccctgtttccatcactccctctccttctcctgagtatggtggcagcgtcttactcagaaactgtgacctgtgaggatgcccaaaagacctgccctgcagtgattgcctgtagctctccaggcatcaacggc

SEQ ID NO: 5099 - DNA, 2300 bp, Homo sapien
gaagagatttaattgactcacagttccacatggctggggaggcctcaggaaacttgtaatcatggtggaaggggaaagagaagcaagtaccttcttcacaaggcagcaggaaagagggagtgtagggggaagcaccccttataaaaccattggatttcgtgcaaactcactacatgagaacacattggggaaaactgcccccatgatctgatcacctcccaccaggttcttccgtcgatacgtgaggattatagttcaagatgagatttgggtggggacacagagccaaaccatatcacctactatgtggaagtcacaatgcttccataattaatatacccgtaaagcttaaacaaaaattgtcttaaaagaaaaacagcataaaaaattgtttgtgtgtttttaaagtgaggaactgacttcaatctcctgataccaacaaattaacaaatataaatctggtattccaagcatttaaaaaattctctgcaataggactgtttgaagaatctataaatcatttatcatgataacaattttaaaaatcatttaatgtgttaggcaacgatacgtaacaataagaaaagcacagtcctttcctttaaggtttgaggaaaatatagtctagtgtatgttttttaatcagactaaacttctacattcccaagtacaggaataaatatttctgtgatgtatatttactggcaatgactagagaaatggcttggaattaagaatattttagatggagagaatgtcaggaacagaggccagaaggcagtgacaagagtggaggtaaacaggcttgagcccttgactttataggacacagtcaaaaaagagtataaccaatgtgtgatcaaataattacagcatattttgataagttccacattaaaggcatgtgcatgcagatggattgaggagagggtattactatagcatttggaaactttccattttatcttaactcatctaattcctctttctcttgttatttaacttggggtttctcagcctcatcactaatggcattttggcccaaatattttgtttgtttgtttgttcgtttggggtaagagcctgttctgttcatcacagaatatttctcagcattcctgacctctactcatttaattccagtagcactacgttcccctatccacactgttgtgactaccaaaaatggctctagagcagccaaattgatcccagttgagaacacttttaactcattggcttcttattcagtaaggctttctttgaaaatccagtgcagtgtaggcactagattagtcatgtggataaatgaaatggattcatcttgaggataatagggccttcctaaaaagaaaaaactagcatcacagtcttgattattaaaagtaagggaagggaaaaatcaaactaaatttggtcttaaaaatcatagagtcaagttgaggttaatgggtatttaaaatcactcttctgaactccttctaccatgtttaaatgtctaaaatagaacagaagtgctattcaaggaggtaactatactaagacttacattttcccctgagcttgactacataaaagtattattttctctttctttaaaacattgcaagaaggtatctcacattttcttacctcaggagtcatttttaaaacttctggcttactaaagccaaaagttctagccaaagaaaagattgtcccatagaaaattggagaaaaaagttaataatggaagaaaaataaggcagggtgccccaaagcacacagaaaaattataatgtctcttaaccaaaacactttccaaataacttttttgcctactttgtaatttctttcactgtttgtggttctctttccaatacttgcattgtttagatgagccagaagggagactggaggggaatactaggatattaggcacgcacgttgttcccttaacattatttttctatctgtgctttcctttctctttctagtatctttcttttgttatgtgtttgatgtctacattaaataaaggatacaacatggaaaaaaagtttttgtaagtactcaaggagataaaaagcaggctatcttaaaagaatttaaatcagagttgcttccaagcttctgccttgaaataatcaatatccaaatttggtggaagaacatggtacaatccttagtggggaagcacgtgagccaaggaaattgatgatgtcatgtacattgtatacacatgaataaaaaagtcaaaaagaacgctgttctagtgatttaactataggtgtatacttatttgcttttccttttcttac

SEQ ID NO: 5100 - DNA, 2300 bp, Homo sapien
cgagtgatgccagcccactgaattgaacagaaagacagtgatgattctttgtgaagagaaaaaatatacatacacctctataatgtgaacagagcataataagtggcatttttgcaatttggctgcttgacatcctgtgtgaagttctgaatatcctttttttgagcataaagcaaggacatggctttttttccccttcatgcactcaagggactcactcaaacacctaataatgctgttcaacctttaatacattcataatggaattccccagttagcgtgttttcacttgcctgggtagaggcaccagctacaacctcttcaaatacttaaaagaaaatactgttcacattaattgtaagaatcttcaaaagaatgctagaatacctcaaatggaaaattcacaagtagtagcagacaagaagacatagagcataggagtgaatagtagctataaatcagatacaagccacattaatgaattgagataagaagtgtgaaataaaatcgatccccgctcatcagagaaggaggagagggttatttttaatcttgggatgaatttaaaatcaataaaaaagtataatagtctcataaacagaaatcgaacgacaatgcaaggagttggaaaaaaattaaaaacaaagggaaaaaagtacaccaatttacttcaacagttacaagaagccttgtttgatagtgttaactgtattcataatgaacatgtgtatagagccttttaaaacatcccatcaagcactgcacagctgaatgtgaccactcaaataatatttggtgaacataaagaagaatgcccataaataataatcttccaagtcaaacatcttagatctaaaagttaaggctacaggaagagtgagaactctttgtgtgaagacactcataattaacaatatataagcaactacataaggctgaaataggcagggattgtgaaattccacaatatgagaacacttattttcttcttttcctctcataaattttgttcagaataccaatttggggaatcaagcagaagtaatccctgctaatagtgctgacactatgtcaaaagttttgagcaataaaaaaaaatctccgactttctatataccagaaactttcattttaccctagaaaatcaaaggacccctttaactaaaaatgtgtttctagaaaagtgttccaaaatacgtcatatggggatctagctcctcagccaagcaattgagcctcttttccttttgtaagcagcatatcaaagtaaggccaaagttggatactaagaaaagaatggagttacttatatttaatatttaggatacaaaataagagcaaagtataattgcataatgcttgctacatttcaaatttgtctccttctggaaggaccttcatctctgctccctgaaagccaaaaacaacaggctactatttttgtttttcatgaagctagatattagccagttgctagacttcaactgtgatatattcatgagaagacacaagctggagaatttcagcctagtctaagcaggacagatggagttgctttttacctttatacagatcacgagtttttagccatttatttttcaaaagtctagccttcagcagggagcatccatatgcgtgtgtgcaattcacattgagttctgaaacaagacttctggtttatccataaatctggcaaaataaattctcgaggcatagcctggcaacaaagaacttgaataaattctttaaagctcttttgtagtgaaataatattagaagttggggcaaagacaaagccatgagaggtgttgatctctaacagttttatgaaaagatgtttaagtaacttttcagtggcatcaatttaaaaatctagtcaatgatgtaacgttgaggatggagtttgctgacttttatcttccatgagcagtcagactaaccaggtgttagtaatttgaatctaagcaataaagactgtgaagccacattgatatagttaccataaatgggaatcagtgagtcccaccagcgtcacagagaacaattcagtcagtagcttgggcagggccctgctagtcattaacaactccattaagctaagacagaaactggaagcattgcccagagaggtaatcagaagcactatgctcccaagactttccttaacaggtgctcattttcatcctggtaagatttagaactaagcatatacatatttaagagaatcatattagagtatggatatttgaaatctatcaatatttactattttatattcttaaaatatttcagataatttg

SEQ ID NO: 5101 - DNA, 2300 bp, Homo sapien
ttcagaaagttaagcgtcttaaaccaggattctacaaatatattaaaattagaaactatctgtcaaaaaataggtattttgttaaagaaaatatacatatacatgcaatgaaacatagatgataatttaaacctatatgtgtttatagaagtgaatgttcacgatatattttaagagaaaaaaggaagttaaatgtcatattcagagtaggattcaagtggactttacaatgcaggggaggtgacagaatattatgcaacacttttttcaaagaaaatatcatctctagtagtaaatattacagtgactccattttgcttactgtgttttcaaactggttaaaacttaacctttattcatcccgaagtaaatattgcattttcacatttcattaaatatgttgttctgaaaactagatattgtaatttacttttgaaaatgaaaatcagctgttgtcattgacaagtgttcaattagtaataattgaattgctctgagaagatgaggaagggataaaattttctgttttctagctatatttctgatgtgtcatcagagttatcattgaacattaccacgaatgaggctgaattgtcattagaaaaataactacacttaataattcttatggttactgaaacaatcttaaaataccagctgctctattcaacaaatatcaatatatggattgctccacaggtgagacatttagtgaaatgaacagaaaaacttctcacacaaaatatgctcattatttaaacatgtatcaataaagttatctttattaacacatcaattttaaaatctaaaaatatcagttctaacaagtgtataatgtattcacttattacaagtcctcattgactcccactgatctgtggttttaaggaagcaagtaatttagtttgtttcagtggtacataaaataaaaacaaatgggttccacttgaggctcaaggggttcatctataattatctgatttacttctacacgtgttaatgtttaaaatgtataacacatttggcttgcctcagattatttccatattcttaaagatttttccctccctctggaaaactgagcctgcaagataagtccattttgttttaaatgagatgttattttctgcaaatgcttgtgcataaatacggcaacatttctggaggcatggttttctttttcttcttagagttaatgtatcatcctagtaaataatccacatggttcattaagaaaacatgtgttctggggcttttgtctgtgatagtcttcacctgtcattttcaaccagcctcagcctatctgctctgtcacaatcactactaaaatatgttcctaaattgcttgtttctagatccttccttctcatatgctcaggtgaacacatgggtgaaatttaatatggaattgaaatatgtactatgcaagatagattccttaagaaatgtttctctgatttatatgacataattgtattttactagtttacctgtccatctgtaaaactttgttttggagatttcatatattacaatgtttaagaaatatgctataatgttttgtatagtatatttcttcgtgataaccttatatactaccagtcacacgtgtttgtaaaaatctaaagagtacttttggctcctacagaatgtgtgaagttgtgaaattgtttttttgttttgttttgttttgtttttatgccccaaagatgtggagggcttcatataagagggtagatttaatgagagagagagggagagacagagagaatgataaaagaagcttaagagattattttatcttgtcaacgacattgttattgaatgtaagctgctaaacttcttagataaagtaaaacagtaaaaacaaacacacaaaacagaacagagaatcatcagacaggctgacgaacacagtacaataaagcagccagtaccgatgatcagtggacatcaatttgtcttttgggctgtagcacctgctactaattggtgcaaagcgctcaccagtcagtgcgtggtttagcgcactcagctgtctcctgtatgtgctgcgagaagcaagatagctaattgctgttgcttcagtgccagtgaaatcaacgtgctgagctaatagcgacagatagagggcagacagattcctgctagcagcttagtgttagttgcttgtggtaactaaggcaggtggcatacatctcagaacgtggagaatgatggtatgctttctgagttaacatgttgaactgttttgcttttctaaaaattttcctagtaacattttcttgatgatatgagag

SEQ ID NO: 5102 - DNA, 2300 bp, Homo sapien
gaagtggcgcctgagagcctaccggtgaatggccctggctaggaagagaaggaggttacacaggagagcctacagatatttgtaagctctcttagtgatcaaccttcccaacataaacgcgccagcgcacacacaccaagtgaaagagagagacagactccttgaccgccgctagagggagggccgctgggcagttgtgcaaaaatgaataaatatggaccctgctgtctggcagaatttgtgtttatgtcactttaaaaatactatttttatttgacaaatcataactgttatatagttatgggatacattctgatgttttgatatttgtatgcagtgtggaattattaagttaagctgatgtcactgttgaaaggcttcaagtgactaagcaaggaagaccctaccttggttaggctggaactaaacaaggaaaaaacgtacagctataactgcctttcacgggttcctttggtcttgagattctctattctgtttaccgattcttcactacttcctacacaacaagtctcaaggtgctcagcacagaacctgggctcctaatagcacagacaatattttatatatacatatgatatacagataatacacacacacacacacacacacacacacacacacacgtatttcctcaaaggaattgtaggaaaggaccacagtaatgtgaattccgtttttttccacctctgtttgatactgtggctttaagtaatagctgatataccatgcaaaaacgtaaaaataagttggaaacataattgatcactttagacaggaaaaaataaatccactttccattatatttctgagttttagaatttaattcttcattgtctatctggaaatagttgcagaatcctcagaaaatatcacttatagaagggtattaatataagaaatacaacttccttgtgcaaaggctcttaaagttactaaagggcgtctaagtatgcaaatcgtcttagaatgcagggtaatggtcatttgaagacatttgaatactttcatccactgtgactctgagttaggaagtagacagtgggggttaaggaaagattgagtattatcttgattggaatttcaagacaggaaagtctaatccctttcttgtaaaagacatctcgatggatttcaactaaccttgagaaacgaatcagaatacctactcaaaccagagctaaagagaaagtgttttttttttttttctttctaaaaaccaggtgttgagctccttggtaacccaatactgggtgcgcgcgcgcagagtggccagacccctctccacgcagctctggctctttttaattcggcaagtgcactcacagcagaactgccaccagtataacgtcttgacgatgggctccagggtttgacactccgcagcgccaccagctctgttttctccccaagtaagccactctacctcgcgagcagcagatcgccctgtgcgcgctacaatccgtggggcggggagacctggcgctcacccagcgagctcgactggtgctgacgtccattcaggcctttaaatgtctctgtccctgcgcaggagggaacggactttgtagcagtcactttgcccgaagggcgacgcgtctctgcttttgcaggcggcagctcggactcccctcactcttcccagcgttgcgtttgcctctgtctttgcctcgagttccccgcagcctctccagcgggaggcgcttttggtattcgtaccctgggcatgaaccaacaggactccccatgccctgtgctttttcagtgggttcgaagatcagagattgcgaggtgctctgggtgatcgctcaaggagcagggagcttcctccccctgattttggtagggggtgattttttttttaccccgaaaagcgtcctccccgctcctgaagctgcaacttgttttggtttcttctcagtcctgtgtgtggttacaacatcaaagtttttctcccttacccttccaaaaatctatccttttaatccaccctcctccccccgcgctatctccgccaggccttctcgctgtgcggtgagtggatagcgggcgcgcagtgtggcagtggcggcgaagattggcgctatcaggaggagcaaaagggaaggatctgctgctgggggctcgctgggtgaccctttgccagacgaaaagagctgggtaaggcgcagaagaggagccggaaccttctgggaccctggtgcctgacactggattttgatcaccatccttgtgtgtctctgacccttttttttctcaattggtaactagtcgagagagaa

SEQ ID NO: 5103 - DNA, 2300 bp, Homo sapien
tttaattctttaaataacttgagacattgctaactatgaaagctaaactagccggtctaaattagaccttctaaacaaacaaacaacaaaaagcatgaagaaacaataaaaaataaaaggcatgaaagggataaataaaaagccaagagaaagcaaataaaaaattgacacaactagaaaatcataaagacaaatgtgacaagagttttttttttttttataaataaccctttaaatgctgtatacaagtggtaaatataaagaaaggttgaaactaaaaaagaatggaaattcaagagaaaggatgtcaagcaaagggtaaccaaaagaattgacagttatattaatattaaaactagtagttttcaaggttaaacacattagcctatagatgaagcaggctaccacacaaagagttcagttcagaagaaaaatataaatgtaaatttacatataccttaataaagtaactgcaaagtatgtaagaaaatggaactataaagacaaatgcacaaatccactatcatagttggagatttgaacacacctctcaggtgacagacaacaaaaaattaagtatataagatataaattgaaacaaaaattgcaaacataatctaatagaaaatactacacacaatctaaaatgcattctttccaaacctatgtgaaacattaaaaaagatgacatcactctttatcagtaaaaaagataattcactcaccaaatttcaaagtttattaaacagatgatattctctgaccaaattaaacttagattatcttctcacaatcaatagaagaccaaattatttttcaaagaaatttatgaatcaatgaaataattataacagaatataggaaatgctatgaattgaatgattgtgaaaataaaggaagtcagaagaaatgtataaccttaaatatttatttgagaaaacaaataaagatccaaatacgtgagttgatcatctgataaaagtaagagttgacaaaaaaggtacatcttctccaatccgaaaacagaaagtgggaaagatcaaggtatcactagaggtcaatgaaacaaaacatacaatagtggatgacaaaagccaatctctgaatctttgaaaagaatataataaatgaacatctgaaaccagtgatcgagaaatgttttagataaggcacaaaaagataccaagaatgttaacactaggctgtacatcctaaaacagtcagatgagctcactgttataattctggttcaccgcaagaaccttagcacaaagaaaggactcaacaaacatttggatccatgaataaaattatcttcccacatataaccacctgcctaaaacattctcctcctccttgaattaaattcaccatgtctgcatcataggaggcccaaggccagtaccccctccccatctgcacaccctgtgttcaaaccagtcccagctcctgtcatgttattggcttctgagtatctgtattaatagttgttcctgccagcatatgaagatgaacaaatacacaactgagagagatccagggattttaatccacagatgccagagcttgctgggatgtagtcagaaatcaagctgaactcaggagttcacagtctttcctgtaatgatggttgggaggtgagggaagtcagaggcctggggaagaagacaggggttagctctgggtgggctaagcatgggaatgaggtgtaacataagctctttcctgttcccaccatccatctgctccatgggtagcagagctcagatgcagagagaggtaaaccaggctttccctccttccacacttgcagtccagggacaccaaggcctgagttgggtctgaccttttctaggatctttctccatgctgctgtcctccaggaagtcatggcaaatttacatctccagcaggttgtagaccaacagccttggagaaatacagtatagacagtgggtaaggccaatctcccagcttctgtctccacctgccagcccatgcccacctgttccatctctcatttaccttgaaggacacaccagggtctctccccatggtgtctcctgtactctgctcctggggtcgagtcggctgctggggtttatcatctggaagattctctgcctcagcctcagcctcagggaacaacagcttaccctgcagggtatacagaagctggaggaaggtctgatacctacaaagaggaggtaagtgtgaaggaaaggaatctcagctggaccattttgaatctgcagcccatgctcccgaacttacctctgcagcttgtcccgctcctgttc

SEQ ID NO: 5104 - DNA, 2300 bp, Homo sapien
aagactctgccccaaggctggtgctcagcgccaggagggatcccaaggcccagcattcttccccttccttgcatatctccctggcttccttcacatcttgactcaaatgatttctcttcagtgagacactccctatttaaaatttcagctcttttctcaaactccttatccactagccctgctgattttccttttggcacgtattaccaccgtgtgccctccatgcacgccattcctggttgcaggctgtggacccttcaggcccttgtgtaaactctggtcaaggcaagactctcaatactatatatactgatatacacatccacatttgtttgtgtacacacacgaactgtagaactagcaccacaagaaactgcaatttcctgtgtttccttgcccctccagggtcctggctgaggtggcaggcatcttggaacctgtaggcctgcaggaggaggcagaactgccagccaagatcctggttgagtttgtggtggtatgtacaagatgagagcgagcctttcagaagccagggtctggtcctggctcctcttactgagatacagggcagcactggcagagagcagacttaaggaaacctgtaaggaggtaaggatgttccctgtctctgccctccctctgagcaggactctcagaagaaagacaagctgctctgcagccagcttcaggtagcggatttcctgcagaacatcctggctcaggaggacactgctaagggtctcgaccccttggcttctgaagacacgagccgtgagtaggcaggggattgtagtagcagctgacctgagtggggaaggaaggaggatttcagttaggtctcccatttggctgatgggaaggaggcccagtgttgcagggaggcaggctagcaggccaccctcactcatgtactcattcctggtggctcatctcaggacagaaggcaattgcagctaaggaacaatggaaagagctgaaggccacctacagggagcacgtagaggccatcaaaattggcctcaccaaggccctgactcagatggaggaagcccagaggaaacggacacaactccgggaagcctttgagcagctccaggccaaggtacacccaggggtcttgagtacagggagggaagggcagttagaaaggaagagggaaagagtgagcaagctgagttgtgccagcttgcaatctcccaaaattctagccagaaaaaatagacttctcttggtctttctcccttgcttatctgtagaaacaaatggccatggagaaacgcagagcagtccagaaccagtggcagctacaacaggtaggttcgtccccctaggagaatatcccttcccaccaccatgccattgtatcggctgtgtcccctgtctagaaaaccgttttgcttcctcctttgaggcactataatataaataccaacatgggcttgaatctcagtgtcaccacttaccactgcatgatcttgggcaggtcacctaactttctgtttctttatttaaaatgaaggcaataataccacctactctagagagttattaagatgattaaatgatcattacagcaaggactttaaaatagtacctggcacatagcaagttaaataagtgttatcacctttgtgccccttccccgcaagaatgcctcaccctagaacagctcattctgatctttccttttctctaggcccctactccaccctgaagtgaatagagtccctcttttcatcattgagcctgagccctgagctgggtgtaggctggaggggttggagggagtttctaagacttcaacatctgatgcataatgtctgcatgctcactcctggcaggagaagcatctgcagcatctggcggaggtttctgcagaggtgagggagcgtaagacagggactcagcaggagcttgacagggtgtttcagaaacttggaaacctgaagcagcaggcagaacaggagcgggacaagctgcagaggtaagttcgggagcatgggctgcagattcaaaatggtccagctgagattcctttccttcacacttacctcctctttgtaggtatcagaccttcctccagcttctgtataccctgcagggtaagctgttgttccctgaggctgaggctgaggcagagaatcttccagatgataaaccccagcagccgactcgaccccaggagcagagtacaggagacaccatggggagagaccctggtgtgtccttcaaggtaaatgagagatggaacaggtgggcatgggctggcaggtggagacagaagctgggagattggcctt

SEQ ID NO: 5105 - DNA, 2300 bp, Homo sapien
accttggtctccccagaatatctgttctattttgccaacgcaggcaatcggctgggctctgcttgagttcactctcctgcatcgcatctataaaatactaatatctttgaaagcagctcgctttttgagcgcagatcatttgcttcctgtatctcccggatcactattctttactgattcccagcgtcttagaaacagccccactgtttttcggggttttgtttttttttttctacagcagtagtgaatattttaaataaagtgtcaatgctgtaagtttcccttaaaacgcaaactcaaggaaatgctttccctttttcgagtagagaaagaacttccacaggcgcgcggtcgagctcaagcccacttatagtctctggcaccgcgtaaggactagcgcgcaggcgcagagcccgtgcgcgcctagccataaccgcgcttgcgccaagcagcgaggcccgccaacgagcgaatccgcgcctgccaattagagcgcacaatggtccttgatgcccgcccactaacctctgcagccaatcgcctgccccggcgcgaagtcgactgtgacttcaaagtaatcttagggattgtgggaaggcagctgaactcggcgcctggaaagatggaggcagcggagacagaggcggaagctgcagccctagagtaagtgtttgcggctaagtggcagctggggccgggcctgggaggaccttgtgggcccctatgtgtaatgattggtgccctcgaccctgtacagctgttgaggttcgaccctgccgtgaagtgatcctcaccgcagtcccgtcttaggttcctgaggtgtctgttgcctgctccaggagtacagcctttgggggaccgttcgccgctccccacatccacataatccacaggatgtgctctaggagacggtttcacttctgtcttcttgtcccaacacgacacattcccagtcacttctcatccccatccctgccccttcgtagattgctccagtccctaataatgaaaaaccctagagtagaccgaggcatccagccctctgccctgagtcctttctcagctattccaagactctgccccaaggctggtgctcagcgccaggagggatcccaaggcccagcattcttccccttccttgcatatctccctggcttccttcacatcttgactcaaatgatttctcttcagtgagacactccctatttaaaatttcagctcttttctcaaactccttatccactagccctgctgattttccttttggcacgtattaccaccgtgtgccctccatgcacgccattcctggttgcaggctgtggacccttcaggcccttgtgtaaactctggtcaaggcaagactctcaatactatatatactgatatacacatccacatttgtttgtgtacacacacgaactgtagaactagcaccacaagaaactgcaatttcctgtgtttccttgcccctccagggtcctggctgaggtggcaggcatcttggaacctgtaggcctgcaggaggaggcagaactgccagccaagatcctggttgagtttgtggtggtatgtacaagatgagagcgagcctttcagaagccagggtctggtcctggctcctcttactgagatacagggcagcactggcagagagcagacttaaggaaacctgtaaggaggtaaggatgttccctgtctctgccctccctctgagcaggactctcagaagaaagacaagctgctctgcagccagcttcaggtagcggatttcctgcagaacatcctggctcaggaggacactgctaagggtctcgaccccttggcttctgaagacacgagccgtgagtaggcaggggattgtagtagcagctgacctgagtggggaaggaaggaggatttcagttaggtctcccatttggctgatgggaaggaggcccagtgttgcagggaggcaggctagcaggccaccctcactcatgtactcattcctggtggctcatctcaggacagaaggcaattgcagctaaggaacaatggaaagagctgaaggccacctacagggagcacgtagaggccatcaaaattggcctcaccaaggccctgactcagatggaggaagcccagaggaaacggacacaactccgggaagcctttgagcagctccaggccaaggtacacccaggggtcttgagtacagggagggaagggcagttagaaaggaagagggaaagagtgagcaagctgagttgtgccagcttgcaatctcccaaaattctagccagaaaaaatagacttctctt

SEQ ID NO: 5106 - DNA, 2300 bp, Homo sapien
aattgtacaaccttcaccataaccgaagtgtagaacattttatttatccctttaaaagaaacactatatccatttgcagtccctccccatactctctcaacctctcattcccaccaatccccagccctggacaagcactatataaatttactttctgttgctatagatttgtcaaatctagacatttcacataaatgaaataatatattatgtggtcttttgtaattagcttctttcacttagtatattttcaaggttcatattttagcatgtagtaaccattatttagcatgtaataaagttctctttactactgattaatacttcattgaatgaaagtatgcattttcactcaccagctaatgggcctttgggttgtttttacctttcagcttttgtgaataatgctgctatagaggtttgtgtacttttgtgtccccatgtttttatttgtcttggatatataactaggaatgaaattgtgactcatatggtaaccctacgttcaaagcctatgcaccagtttacatttccatcaacatgagaattccactttctttacatccttagcaccacttacctttttcattatagttctgatatctttttgaagatatgggatatagttacaataactgttttaatgtccttgcctgttgattctaacattacttcagttctgatcagcaattgatttttctcctcattatgtgtttttttttttctttttgcaagcttggtaatttttctttgtatgacatatgtaaattgcacctttggtgaacatttttctatttctataaatactgctgaagtttggtcttgtcatctgtcatggtttgttaagtttgatccatttgggtcttacttttaagagttagatggcactacagcactgatcagctaggactaattactgcctactaaataattagtaaacaactatcaaatcaagacttttttgtgtgtactctgtccagtgtcctacggactatgaagttttccagcctggttagtggaaatagagactatttctgaccctctgtaatgtccatatatatatatttatatatatatatatatgtatttttttttttttgtgagacggagtctcgcactgtcaccagggctgtagtgctgtggcgcaatttcggctaactgcaacctcagcctccctggttcaagcaattctcctgcctcagcctcccgaatagctgggattacaagcgcccaccaccacgcccaactaattttttttgtacttttagtagagacgggggtttcaccatgttggccaggctggtctcaaactcctgacctcgtaattcacctgcctcagactcacaaagtgctgggattacagacgtgagccaccgcgaccggccatgtcctggtatctttaaaaatcttttagctagtttcttgagacacatactgctcagtactcagctgaatgaataccaagttctctctcagcagttatctttctcctgtactctgcaaagaacattacctaccttggtctccccagaatatctgttctattttgccaacgcaggcaatcggctgggctctgcttgagttcactctcctgcatcgcatctataaaatactaatatctttgaaagcagctcgctttttgagcgcagatcatttgcttcctgtatctcccggatcactattctttactgattcccagcgtcttagaaacagccccactgtttttcggggttttgtttttttttttctacagcagtagtgaatattttaaataaagtgtcaatgctgtaagtttcccttaaaacgcaaactcaaggaaatgctttccctttttcgagtagagaaagaacttccacaggcgcgcggtcgagctcaagcccacttatagtctctggcaccgcgtaaggactagcgcgcaggcgcagagcccgtgcgcgcctagccataaccgcgcttgcgccaagcagcgaggcccgccaacgagcgaatccgcgcctgccaattagagcgcacaatggtccttgatgcccgcccactaacctctgcagccaatcgcctgccccggcgcgaagtcgactgtgacttcaaagtaatcttagggattgtgggaaggcagctgaactcggcgcctggaaagatggaggcagcggagacagaggcggaagctgcagccctagagtaagtgtttgcggctaagtggcagctggggccgggcctgggaggaccttgtgggcccctatgtgtaatgattggtgccctcgaccctgtacagctgttgaggttcgaccctgccgtgaagt

SEQ ID NO: 5107 - DNA, 2300 bp, Homo sapien
atgggaggagaaaatctgaaggtaaatgtcctgtgcttctttcttctctcataccatccatggttatcttttagacacagaagcttgggtgtattccaactccttgatcaggatatttccacttgtcccattagttttcacagacagcagtttcatatctctgtcaagatcttttgttttctcttatcctgaaattgtctgtctgggaaaacccttctttcaagtgtggaaggctccttgggtgtgtcagtgcttctcccttggactgcagtaacttttttgtcatatttgggcttaacttcacttagttctacagagttataaccctgctctcttcttctttgactaaagcataaaaagtatctcttgtcctttgaaggagaagatttattccttttaaatctgaggggcttaaaaatttttcaagccctaactgggttctcacttttgtttgagcataaacttctttattgtaattcagcagctatgctagtcttggtggaatggggataatgaaaggacatcagagagtaaggcttctcttaccccggtactcttttatttaattcagagaaaataaacaccttctctaaccttatttgtcatgttcactgatagtaatcttttctgtgtttgaggagaaatacttcttgttacattcctaactaaaaaatgagtcatgatctcattcagaactttgagatgattctttttttttttttttttttttgagatggagttttgctcttgttgcccaggctggagtgcaatggcgcgatctcggctcaccacaacctctgcctcccaggttcaagccattctcctgcctcagcctcccgagtagttgggattacaggcacctgccaccatgcctggctaattttgtattattagtagagacggggtttctccatgttggtcaggctggtctcaaactctcgccctcaggtgatccacctgcctcggcctcccaaagtgctgggattacaggcgtgaggtacctcacctggccgagacggttctttaacccaggaaaggagggaagaatttctttccttactgtttcccttgggacctggaccctggctttcaaactaaaactaaaagcaggtcagccatgtatgataactggggcttttataatactgtatttgaatctctatttaatttttttgtggaaagatgtgtgcaggatgccagcatgatatacagaacaacttttggggaatgcctgtgttctaaaaaaaaaaaaaaaaaaaaaagcaagatgggctgggcatggtgactcacacctgtaatctcagcagtttgggaggccgaggcaggcagatcacttgaggccagaagttcgagaccaggctggccaacatggcaaaacaccatctctactaaaaatataaaaattagccaggcagtggtacacgcctgtcatcccagttatttgagagcctgaggcacaagaattgcttgatcctgggaggcggaggttacactgagccaagattggccactgcagtctagcccaggcaacaaagcaagaccatgtctcaaaaaaataaaaagcaagattcgtgtttttcctttgaaactggtgagacttgaatgtatatttgacaattatcatcatttggataggtttaccctttcttaatctgtacttctgttatattactctgtgggaaggatttattcctattactaattttaaatgaatcaatttttaaaaattattaaaatactaagagttctgctgaaacatatggcataaattgtattcacaaggggaatgcattctggaaaagcttttgaaatgatcccattgcctttttaatattgttggaaacctcgtatctgctgtcttttgcttgtggttgaatttatttaattcacctcctgcaagagcttctctgtgatgtttatacttgttataaatttgttgtttaggttttttttttaggtagagttaagaataattattgactttacatttattttaacttttttctctgttttaggattttctcatcttgtttttccctggcaagtacttgagtagtaatatgtttgcctattactaattaatatttttctttaataacagatttatacctaaaactggaagatgtgacccataaatttaataagccctgtataatggatgtaaagatagggcaaaaaagctatgatccttttgcctcatctgagaagattcagcaacaggtcagcaagtacccattaatggaagagattgggttcttggtgcttggcatgagggtaagagtgcttattagtataatatg

SEQ ID NO: 5108 - DNA, 1382 bp, Homo sapien
cccacctcctgcgcccccgccccctcccgccgtcctccagtcccctcagctgccgcgcgcgcgtcaccgccgcccgcaccgccgctgccgccgctactgagcatgcccagaggccgtccaacgggattccggccccccaagtcagcggggcgggcgcgccgtgctgccaggacctggcgacggcgacagggatagggcgagcgcacccctgtttcttctcacccccaccccgcgggcatttcgaagtcacgcgtgctgctgtggcctcattcattcaacacgcttctcagcgcgtcagctcagagaagccagggacttctaagtgtgcggagcagtccggcaagaattggaaggcactagcattgccaagggtggctctaaaggccacccctaactgcactcaactccctccaactcccaccccgcacgaaaacaacagaagtaaaagcaggcagcttattagagatgcgccttcaaaatacccttcgagttaatctcagcccccctccccggattgctgtctctaaaccgctcttaccaaaaagtaaaacacataaaaataaaataaaattggaaccgacacgaatttcagactgtagaagacagagaaaacttctaatttttttaagtgaacatgttttttaaagaaaggagcaagttttttctctcccactcgacctttaagatagtgcaggttccaaggtcctgagtagataattatatcaaaagcagaaagggatggacaccggtagctacgcgaggttctggaatgggactcagtcattgattcctgtatgtccgccgctggcatgttatataaaagctggacctggccttgaaggtaaatcgtcacaagccccgagcaagaaaaactggggtcaaatcttaggtatctgattaaagtaagtgtcctattaacacctgtttctgcccccagaagcccacacacctggaagagacgtaaaatctggcctggattccctaatcccagggccctgcccctcggcttcagggccccgcccctcggcttcagggccccgcccctcggcgttgcgcaaactctgttgctacctaagtcttttcctcctcccacctcccgtagctgtcaaaatccggagtccagacttccttatggccaggacagctccacgcatgctcagcacctaccagggtcgagctcacacacgtgcctacgacccgccgcggcgcctgcgcggtagcatcgcggagtcggtgctttagtacgccgctggcacctttactctcgccggccgcgcgaacccgtttgagctcggtatcctagtgcacacgccttgcaagcgacggcgccatgagtctgacttccagttccagcgtacgaggtgaagtggggcctgggagcg

SEQ ID NO: 5109 - DNA, 208 bp, Homo sapien
ccgccgtcgccgtcagggccccagggagcgcggggcgccgctgctgctgttcttcggctcggttctgtctaccgggcagcgccggggccggcggctgcggcggcagaggaacaggagccgggagccgcgttccgccgagagttgggcagaggagcgcccgcgccccggcggcgtcatgggccccctccccgcgcttcagagggcacca

SEQ ID NO: 5110 - DNA, 2300 bp, Homo sapien
atcataaattatcataattatataacctatgccataaatagtgtgagcttctaattctccaaaatgtttctctgtctcaattatatggtctacagatgcctaataaatgtctgttgcatgaacagatgaacaagatttttcacattagaaacttctcaacctagtacactcttcagaaataactagaatataaatgacatagagaaaaaaaagatgaaagccccacttgtcttgcctcaacgaaatgaaaagcacttagaagcattaaggtgcttagctagaacagtaattgcacacaatgatttttgtgtaaaaaaatctcatattaacctaaccacactcactttggtttttaggtcaaataacctgaaaagggttttaatcataaatgaatgctagttcaaaagcatgtaaacattttaacatgaccttgaaaatacatttacctaattattttggcctttcaaaatgctcaagatctatatttcacagtaaggtggtcatttataattttgccatatgtatacacacactcatataatcctatagttttgagaactggtaccaggttccccctgacattacaaaaatgcatgactaacaatataatttcaaattcaagataaagaatagtctgttaagttagaaggatgtccctttatcagaaacactgggagttgatgcatttatttttctttaaaacagttcatctttaaaagcatgattgctctgttttgctgacatgcatacttatcttaaaaagaaggaggtgggcaaagaaaaaatttaccctaagaatctaatagaatcagtttgtaggattttagattttatgatgaatatgtgacttaaagacatgtccaagttagttacatgggcttcttaaaaccactgtacaattttgttaccaacttttatctacagtaatacacaaaactacatatttaaaaatagccatgatcatatattacataggatatgctgctgtcaggtttgattcctgtcaaggtaaatggattttagcaagtagaaatttgtgattgactactactgagaattcatgtatactaaaataaatgatgatgtttacctgctttatcaatttcaattgtttgcccaattttctgtaaattttgccatgattttccttctaacctatgaaattcaaaaacctaatctctttaaaaatatttatgaactatttgtcttaaatcttttattgctaattattttcagtttttatattttcttttttctgaatcaacaatgaatgcaatgtttctgctcggagtctttgaagaatattacataaacaaacacttgtcttcaaatttttgcttttaagaaaaagatcatacaatttaaaagccatgtgcttgattagctagagtgggaaaaaaaaaaatcttcccacgcctttgatctaatcttgtgactactatttctgtcaggatatgtggcttagtgatcaaaagacttgacattatatgttccaattccttcaaaatcctcagttcaagtgcttaccattccttgggccagaattctggaacattagattttaagacattcttcatgactaatttaaatctaatatcacctttaactaaattttcactattggctcctttaatggatccatcttcattaaatatctgtgaagataaatatgaggaagttaccacccctttattattgacctgacttatgaaattaaacagaataacatttatcaatcattttgattgaaaacggtgaaaaacagaagccatattttctcagtgtcattaccaatgtcaagaaaatcaaggctacaacaggtctttcctagattgtattaagaaattaatgtagctgaatcacatcctatttagtttccaggtcaatatgaaaagatggtaatttttctttgaaacttacaagtacaatctgcaaatacataattttgagaataatttaatatgttgacttcaagatacaactatattctatataaggtacaactctatatgtcagtattttaaagaaatggatccttacaagaccaaaataacccacaggccatgcaggttggtttttcctttttttttttttttttgtttaaacaaatgtgcaccacgatgtttcaacaagacaaatgccataaatgtgaaagctgcagtttgcaatataccacatttagaatccagcgaaggtgaatcagacagaggtggtagtcattctaattaaacaatcaggtaacttcacgacaagctgatttgcagcatcaaaagtgtccatttaagtttcttttttcttga

SEQ ID NO: 5111 - DNA, 2300 bp, Homo sapien
caagtcttgtaccctcctccccaccccataggattttgatgttctgcttgtgagtagggatcttgtctattttctttatcatgtgtcttcagtgcctggcatatagtaagcattaagtaacatttttgaattagttatgcagttgatcacaaactatgttttgaaactacatcctgggagaaagagtaggagattaaataacacactgaactactatatgttgcacatgtatttgcatgttgcaaaaatgtgtgtgaaatgttttgaaaagcttaaagcaattttttttttttgagatggagtctcactctgtcacccaggcgggagtgcaatggctccatctcggctcagtaaaactgctgcctcccaggttctagcgattttcctgcctcagcctcccaagtagctaggattacagacatgtgccaacacgcctggctaatttttgaatttttggtagagaaggagtttcaccatgttgaccaggctggtctcgaacttctgacctcaggtgatccacctgccttggcctccaaaagtgctggaattacacgcgtgagccactgtgcccagcccatttaaagcaatcttaaagtgtaaactattattgcaagataccaacgtagatttttttaataagtgttaatttctcttttgttgggaggtaaactgccctaggaaagacaaaaataatcttgtaagcttactttttaggtttctttctatttataaagaagagaaaaaaatcaccattttttgtgcaaatcatagacctttgagttagaagggcaccaaaagtttcagctctattccctttaaacaaatacaacatttattgcattagttatgggtgaggaaattgaggcttagaaggatttgaagatttgctcaaggtggagattctcaaaagtgtcctcagatacctgcatcctaacttcctgggaagtttgttctaaagtttagactccagagcttcacccaaaacttactgctaaattaaatcctttaaaggaaatctgcatttttaggatctcctcttatgccttccagcatagtgcttctcaaaccctaatgttcatctgaatcacctaggagtcttattaaactgcaaagtgtgatgtagcatgtctggagtggggctcaagattctgtttttgtttgtttgtttttgtttttcaacttttattttagatttagaggccacatatgcaagtttgctacctgggtatgctgtgtgatgctgacatttgtggtatgaatgattttatcacccaggtactgacaatagtacccaacagtttttcaacctttgctccctcggtcccctctctagtagtccacagtgtctatttgttgccatctttatatccctgagtgatatggtttggctgtgtccccacccaaatctcatcttggccaagaagccaagttttaatgggtacacaagtgcataggaattggagagtggggagcgtgagttgactattggtcagggactgtcaacggaagggaaggaaccaatgatgggagtgagagcccagaactcggtgttcgaagtgggtaatttatgggaggggcatacctacgagcagacaatgcactcagacaaggaagatttgcacattggacagaagagacacctttttcctctgcaataagaaccaaggaggtaagtagggggtctgatatgagtttgtgcatgtgtgcagggtgagtgagacaatccatatatttgagaaaagacagtgaaatctttaaaggtaaaaataataaaaccagctgtggcacctattggataaggaattactaactgatgatttagaaattcctttatgtgcgttaggagctcatttgttatccccattttacagatgcgcagccccaggttcagcaatttgctctaaatgagactgtagaggctaattccagcccccggcagctctcaccttaagctgcctggctgaggtcagcagtaagttacctggcagcgtccgggggcctgcagccgaggacagggctggaactacacttcccagtgtgccaggcggggcggggcgcggcggggagggcgcaggctccttcccagaagcaaaagcggaaacaaaagagtctcgccggcgtccccgcccgcacactcgcgcacactcgcgctcgggcgcacacggagcagggaccggcgcccggagcgagccagggagcggctaaccggggacccaccgcgcggagccagcctagctgccagcgagcccaacccgcgacgacccacgcccctgagccccgcagccgacccctgccggccg

SEQ ID NO: 5112 - DNA, 2300 bp, Homo sapien
cactattctaacacctgttatactttttaccgtatgcaatctgcatatctatataaaagaataatttattttgatttgattctctaatcacttgcatttgtaaaatattgaaatttgagatatttatcttctactgatgaaatttttctttaaattttattgctgattcaaataataccaaacaccttatgtgaaaggcattgtgctaagtattatggcgggatccataaataaagtgcataaaattcttagttttaaaaaacattccggtagaagaggaacagatgggggaaagttagcatttattaagcatctattatacatgtcgggtattaagctaggtgctttacctatgtatttttatacatgggtatgaaattttaattctcagtacagttcttaaaggtaaccagagatgtccccatattacatacggcacacttgagactcaaagaggttaagtaaattgcccaaggtcacacagctagtaattggactttgaaaagatagcattaaggaaagcaggtaaaatttgatcatgggagatgaaaggaaggttattttagaagaaagaaaattataagggccagaaaacttaactgtgtctaggaaacatccaagtagtcaggttatacctgcagttcttaaactttttggtctcagtacccctttaatttttttttttttggttgccactgaacaaattaacctttaatattattaagtattgtagaatccaaagaattgtttgtttctgtgggttatttgtattatcatttaccatatgagagattagaacaatttaaatatttggccgggctcagtggcttacacctgtaatcccagcactttgggaagctgaggcaggagttcaagaccagcctggccaatatatagtgaaaccccttttctactaaaaaatacaaaaactagctgggcgtggtggtacatgcctgtagtcccagctacttgagaagctgaggcaggagaatcacttgaacctgggtggtggaggttgcagtgagctgagatagtaccactgtactccagcctgggcgacagagcaagactccatctctcaaataaataagtaaataaataatagaaaataaaacatcttaaatagtaaataatttaagaataacaaatccactgcattaacataaataacatttttttgtgaaaaataactatattttccaaacaaaaaagtagagtggcattgttttatgttttcaaatctcgttatagtcaagcttacagatgacagctggattctcacatatgcttatgcattaatctgttaaaataccacatgtcattaagcctctggaaaactctactatatactcatgagatattgagaatgaaaagatagataacatctgagttttattatgaaattaattttgatctcatagacttcctgaaagtgttttagaaaacccaagggggttctttggagaatcactgggcaagtttgtgaaggggaacccaaataagagtgtaggtttgggactagataatgaaaagatgttcactgggggaatttggtctttactaagcaatggggagccactgaaataaagtagaagagtgaaataaaaggagctgtgcttttagaagattttttttattgcaagtaatgcctagagtatcggaagcagttacaattgaactgtaattgatatttgaggtaactgtgggaagcaacgtaatgggttttgaggaagaatataaatatagtacatctgattaaatacaaaggacagacaaagaggaaagtcaaaacagtgctaagattttgagccttatgactggttggcttatgtcccattaacaggcatggggagtacaggaaaataattaagcttgggaaagaaagtagggaattaagttttagattgtatataaaaagttttacctctaacattttgaaataattttgtcttacaaaaaagttgttaaaataataaggttcatatatatccttaacctaacttcccctaatacaacttatataaccactgtgcagttaaacaaggaaagcaaccttggtatcacgctattaactacacacataattcaaatctcaccagttttttttcactaatgccttcttcctgttacaagatccaatctgggatcccacactggatttaattgttgggtcttcttagtagctatcctccaatctgtgacagtacctcagtctttctttcattgtcttataaaacatttttaatgaaaagagaagatgcttaatatatatgtagaggaaaaaaaaccaatgccatttt

SEQ ID NO: 5113 - DNA, 2300 bp, Homo sapien
taccagcatattactggcctgaacaaaagcaacagcaatgggactagagagaaggaaatacatactagagggatgaatgaggcagaatcagcaatactcatcatcagttggttaatggcaggtggagtgtcaatggggagattctaaaatgatttatcaagttattggctcagatgattaaagaggaaaacatgtgcatcttaccaagagaaggacttcaagatgggtgaaagatagtggattttgttcagggaatgttgaaattgaagtacttgtgggacatgatggtgaaaatgtacagaagacagtggttatgtggatacggaactcaaaggagaggactgggttcaatatggcagtcatgaggctataactaatagctgaagtcatgggactagagaactttacaacaaagggaccctgggaaaggctgcagtaagtcttcatgttttataaagtaattatataccatgtctttttgttaaaagacagttttagtggataaagttatgtttctttgtaaattctgcttttagaagtaaaattatcactgcaatgtaaatgagttttaaggaagattggtatctgatgaaaaatgttatggatttgatttttaaggtctttacagcaagatttatacaaatgaaagtcgaaaacaacaaaaagtttaatatccaaaagaagtttatgtcaaacatttgaaagaacaaaaacattctagaacaaaaagggaaacaaattattttagaaatcaacttaaatgtaacttctgtctgagccccatgttgtaattatttgctactttgcctcacctttggggctgggggcggggggtgggctggggcacaacactgtgtcttttatctatgtttagggcgttgtacatagtatatactcaggaaaaaaacctgtttattccatgccagaatgggaggtttgaacagatgacttggaaggtccctttcaaccctgggagtctataaaagggaagtggttattaccgcttaaaagaagaagtaggcttagtcctacttccagagagccaatgttttcatagttacagaaaggtaaatagactgtcagctcaatatgacactggtaagaattttctaacaattacggctatccaacagaagaaaggctgtctcagaaggtggttagctctgaaacaactggtatttaagggctggaaggacccttaggtatctttaggtcttcctaatctttttcatgccattgcctatacagaaaatggtatttctataacacaaataaaaaaattatacagcaatttttgacacatcaatgtctcaaggcatacttgtcacacgttctcagggctttggctgggaaaactgatttagtctaacatcctcgtttgcagagggggaaactgaatcttaacgagggaatgcaatattcccaagtcaagacgttaatgttaatactggaactagaagaattgagactagcgactgtggacaactagccagtttcctctgctcaaattaagcaagctggaggccagactgaaagactgcagtagatggtagaataaacagtctaaagctatattgctttaaatgtggtctcaagaccaccgacattagaacttgttaaattctggggaactcgctaaaatgaagattaatgggccccacatagacacacggaattaagctctgcggtaaggccttggaatctgcatttttaggtttgcgaatccccgcctctcccgttactatttctgaactccgagctccagccctggcttgaactgagacgctccgctgggcgcgcagcagccgccgatcggacctcggggtcctggatgcaggactgtctgttacgtacagcccttgtgaccgtcacgggcggacaccggccaacgccgggttggggtgaggccgccgccgcggtccctccatcaccctcctggcccggcagaggaacccactgctccgggcggccggggacagaggtggctcaacagcgccgcctcgaagccagagccctccgcaggctagaggattgcggtttcccttcatctccgcggctcttattcctcccccgcaaggccgcccaccggggtacgctctcccgcgcctgcgccaattccgccccgccccgcccccatctaccgaccggatgttagcagatttcccatagtgcctcgctagtggcgggcatgataacacacgccggagggtcgcacgcgggttccagttgtgattgctggagttgtgtattgccaggaggctctccgagattggggtcgggtcactgcctcatccaccgga

SEQ ID NO: 5114 - DNA, 2300 bp, Homo sapien
tgcttactgcgggcatgattttatatttgtgatttattttttggtcagtattccttctcattagaatttcagctccaggagggagtacagggatgtgtctgtctttgcttactattccttgggcttaacagtgccaagtacatagtagggtcccaataaatatttgttgatagaaaaacacagtaaatgtccctgatggaaaacagtgggaatgctcctacataaaccctttgggtgctgaaactagtgccttggatagaaattaacagtaattaacaagtttataaaaggaacacatggtggtgaatcagagcagttaagtgtgcagatgctctcagttcttcaggaggtgactctgggcaggaggggtctccgctcaaaaaggtaagactttatataaagacccacagacctgggtctgattaattggctgtattatctgctgctggacaaccttagtcaagttactttatttcccacggtctcagtttcctcatctgtacccatcacagggtcaattcctgttaactaggcagctgaacctgaaataattttgatttaccttcagcatattccatgattatccagaggcctgtgccagtgatatggctcttcctacatgtgagccaggcagcctccttctgtggcgcagtgacaaactgctatccccatcattcctccccgcaagtctttgtactttgggtcataaaataataggctatgaatctgtgtgaactgggaaaacagagttccaagggcacacccagtacgagcgagtctcctcttcccccgcgcttcatatccaagcttgacagaggccgtgggtgggctggccctcggcagtgaggctcagaggttactggccgtcatctgtcagagactgaccttgaaaacagagaaaagccctcagtccctgacaagacagccctgcccacgtgccagctggatccagctcgccaacacagcgatctccgagccccttttctacttaaaaaaaaaaaaaagtctgctgagtccattccttgagaatcacagagaaaacaattccttccttactccattcaagaaaaaaaaaaattccctttctcagaataaaaagagtaagcctcttgtccacctctcgtgcagcgggccactttgctgggaggagacgaggtgtctgggtttgagcccttcctggaggtatgaactacatgcgagccacgtccatggcgatgcctgcgaaagacgggcatgatttcttctccaagccttctttttcctcttcctcacgttcgagcttgtggaaccaactggggctgtgagtttcagggtgtagggtatgtatgtaaacagcggaattgtgtatgcgcttagtgtgcgttcaggactctgctgtgcttgaacttggcgtgtttgtgtttgtgtgtttggaggattatgagagcatgtagggggaagagatttgtatgtgtaagtgcagaaaagtagtagtgtgtgtgatgtgtgtgtgtagacaggaattacgtggatactccatgtgcgttcaggagtgtgtgtgtttgaggagctatgaaagtgcatgtatggaaaggatttatacgtgtaagtgcagaaagtggcagtgtgtacgtggtgtgtgtgtgcgcgcgcgagtgtgtgagcgccaggggccgcccgcccgccgcggctccccgtgggctggccgggccaatgagcgcgcggctgtaggggcggcgggcggggagggggcgccgagccctgcggatggaggcgcgggcagcgcggcgcgctcattccgcgcgggcgttgctggcggggggcggcgcagccactggacccggaccggggccgcgacccggggtggcgggtggcgtgggcggcgcccggggctgggatgcgccgggggctcagtggcggcggcggcgttggcggtggcgtcggcggctgcagggggacgagctagcgccgcggcgctgggagccagttgagcccggccggcgagcggaggcggcagcgcaggcagagcggcggcggcagcgggagcccgagcgctgcgcgcccaccatggccgcccagggagagcccggctacctggcggcgcagtcggaccccggctccaacagcgagcgcagcaccgactccccagtgcccggctccgaggacgacttggtcgccggggcgaccctgcacagcccggagtggagcgaggagcgcttccgcgtggacaggaagaaacttgaggccatgttacaaggtaggcatccctcgtgttctcggactctccgactgagcctctaactccttttcggacatcccca

SEQ ID NO: 5115 - DNA, 2300 bp, Homo sapien
gtgaaggacctcttcaaggagaactacaaaccactgctcaatgaaataaaagaggatacaaacaaatggaagaacattccatgctcatgggtaggaagactcaatattgtgaaaatggccatactgcccaaggtaatttatagattcaatgccatccccatcaagctaccaatgactttcttcacagaattggaaaaaactactttaaagttcatatggaaccaaaaaaagcccgcattgccaagtcaatcctaagccaaaagaacaaagctggaggcaccacgctacctgacttcaaactatactacaaggctacagtaaccaaaacagcatggtactgataccaaaacagagatatagatcaatggaacagaacagagccctcagaaataatgccgcatatctacaaccatctgatctttgacaaacctgagaaaaacaagcaatggggaaaggattccctatttaataaatggtgctgggaaaactggctagccatatgtagaaagctgaaactggatcccttccttacaccttaattcaagattgatcaaaaattaattcaagattgattaaagacttaaatattagacctaaaaccataaaaaccctagaagaaaacctaggcattaccattcaggacatatgcatgggcaaggacttcatgtctaaaacaccaaaagcaatggcaacaaaagccaaaattgacaaatgggatctaattaaactaaagagcttctgcacagcaaaagaaactaccatcagagtgaacaggcaacctacagaatgggaaaaaatttttgcaatctactcatctcccaaagggctaatatccagaacctacaatgaactccaacaaatttacaagaaaaaatcaaacaaccccatcaacaagtgggcgaaggatatgaacaaacacttctcaaaagaagacacttttgcagccaacagacacatgaaaaaatgctcatcatcactggccatcagagaaatgcaaatcaaaaccacaatgagataccatctcacagcagttagaatggcagtcattaaaaagtcaggaaacaacaggtgctggagaggatgtggagaaataggaacacttttacactgttggtggtactgtaagctagttcaaccattgtggaagtcagtgtggcaattcctcagggatctagaactagaaataccatttgacccagcaatcccattactgggtatatacccaaaggattataaatcatgctgctataaagataacatgcacatgtatgtttattgtggcactattcacaatagcaaagacttggaaccaacccaaatgtccatcaatgatagactgaattaagaaaatgtggcacatatacaccatggaatactatgcagccataaaaaaggatgagttcatctccttggtagggcatggatgaagcgggaaaccatcattctcagcaaactatcgcaaggacagaaaaccaaacaccgcatgttctcactcataggtgggaattgaacaatgagaacacgtggacacaggaaggggaatatcacacactggggcctgttgtggggtggggggaggggggagggatagcattaggacatatacctaatgttaaataatgagttaatgggtgcagcacaccaacatggcacatgtatacatatgtaactaacctgcacgttgtgtacatgtaccctaaaactttaataataaaaaaaattttttaaagcaatacaaggaagctttttaaaaagaaaaataatcgtcagtaatctcaccatcctaacaaccattttcatttttctgccttgaattagagtttatgtagttgctggtatagtatttactgctttgtattcagtattttaatctattaaatgttttctgtatttctaagcagttttcagaattctgtggttgaataatagtacatttggttgaaaaaaattttttatagttatgaactacctaataacgaatgtgattacatggcttttttttcttcgtgactgtattctgaggaagaaatttgaggaatctgagtactgaagaatgatggtagttgcaaaagcagcagccaatttgtattatctcttactttgtgtgggacattgtctttggtgatttatgcctgtgcggtcatctcagcttctcagcaacaactcatgacatacagatgcccattgggatctgtactttacagagaaaaaaaaaagctgtaaacactttaaatttggagccctgatttctttttggaattccaagtagacctagacactagttttccaattagggttgt

SEQ ID NO: 5116 - DNA, 2300 bp, Homo sapien
ttcttataaaaatcacttcctggctgggcgcggtggcttacacctgtaatcccaacactttgggaggccgaggcaggcgtatcacaaggtcaggagttcaagaccagcctggccaatatggtgaaaccccatctctactaaaaatacacagaaaagttagccgggcatagtggtgaaggtctgtaatcccagctactcaagaggctgagacaggagaattgctcaaaccgcggaggtggaggttgcggtgagccgagatcgcgccactgcactccagcctgggtgacagagcaagactccgtttaaaaaaaaaaatcaatttcttccacaggagaaatggagcatagtattttatttctttttctttttttagtttaggtgaggtcttactctgttgctcaggctggagtgtagtagtgtgttctcagctcactgcaatctctgcctcctgggttgaagtgattctcatgcctcagcctcccgagtagctgagattacagtcatatgccaccatgcctggctaatttttttagttttagtagagatggggtttcactatgttggccaggctgatcttgcactcttggcctcaagtgatccacccacctaagcctcccaaagtgctgggattacaggcatgagccatggttcccggcttagtaattcattttaatcctagtgtgcttaatggtaacctctcctgatatccatttacaaattccagcacccagtgggctaacactggaaattctgtgcatcagagaaagtatattacattgttcctagactcagtagatcagaggctgtgagtagagcattagagaaaaaaaaaaaatctaaaaaatgaggtagttaaaagaagggacagtagtaacaatttactccaggaaggaggaaaggtttaaactgcattaggttaagtaggatttatattggtgaagaagcttttgatgagttaaggcaggggtcctcaatccccgggacaaggaccggaccaatactggtcagtggtctgttaggaactaggccacacagcaggaggaaagcaagggaagcttcatctgtattaacagaggcttcccatcactcacatgaccgcctgagctccacctcctgtgagattagcagtggcataagattctcataggggcatgaaccctattgtgaaccgtgcatgcaagagatttaggttgcatgctccttaggagaatctaatgcctgatgatctgtcactgtctcccatcacctccagatgggaccgtctagttgcaggaaaacaagctcagggctcccactgattttacattatggtgagttgtataattatttaattatatattacaatgtgataataatagtaataaagtgccgaataaatgtaatgtgcttgaatcatctgaaaccatcccccttccctccccctcccctggtccatgaaaaaattgtcttctgtgaaactggtctgtggtaccagaaaggttggggacccctgagttaagataccaaagtacaagatcctcttaaaggatcgttgggaggctggcctaacctggaggaaggggaagacatacagatataaatctgtggttgaacaagcaagtctgggctaaaatgtggaactctttaaatgctcgatcatgtttagttttcattcaaaatacaatcaaaagctgccactggaagtcattgagcaaaggcaaagattagtacccttgatatagtcgagaatctagtttctagcataacttaacaaaactgaagttagagaataaaggaattttccaaggtgcacagtggataaaaaaagtccggggccaaaaacagaaacttaagacatataatttcgtcatccaaaaatggttttctccccctcaacgttaatgccacacctgtcctctaagctatgtgaacttatataattcagctttaatacttcagtttagtctttaaatctgtaaaatagtgcattatttgcaggcatgttaaattatcaggtgtttaaatgattaaatttttacctcctacacattctattgtgacattttctagggttgtcttcctcttgtgttgatgtttgatatgaaggaagaaattgaagtagatccacaattcattgcgcagttgatggaacagcttgatgtcttcatcagtattaaaccaaagcccaaacagccaagcaaggttggttcagagtctgaatccagagaattatgtatcatatcatatgctgtatagttttattttgcatagaagtatttatttgcatatacatgaaactgttactctatacaggttgaata

SEQ ID NO: 5117 - DNA, 2300 bp, Homo sapien
tcgatttaaaaaatcctatatttaatatcgaaagttaaaaagtaaatatttcttttgtattttttatacaagaatccaaatcctcagcagaaaggtgccttggattgattaagttgtatacccagaaagtgacattaatacacttcttgaaacattaccctttccgattacacaaatattctagccgacaaatctgatcatgctaatttcctatttaaagcctttttaataatttctcattcccttaagataaaatcattttggagatcttcctgaccatctaacctaggttataaacctcgtgcgtgcttctacaagctcccatacttcctctttcttaacacccatcctacttttactttttcaatatatatctttcttgataaatttgaactccaaattttcaacacatagcacagtgtcctggacataggtgcttcataaatatttgcatgagtttgaattaaatgcatgtcgtatttcttacttgaaaatcagtaaattgttattctagtttacacagttccttttttttgagatttataaatttgagactactctaaaaaatgaacccactgttgggcttacaataccaatttctagttctacagagccaggctttcgaacacagaaaattcaccagtaagtactttcttgtcatatcctttgacaggtaataatttaccctctccttggggacacccctaccttaagacaagaattctttcaaacttcaaaaacatccatcttcattaataagttcataatgaagacttttcactttaagatgcctaattatctttcacagatatttatgaaatttcaattgtgccaagatttttcacaggcttattttactttaagctggtccttccatttattgaagcttcaattaattagacttcatcatgttatagctaaatggatgtgactagaaagagcagcatacagacatctatgtgtaaactgttacttgttggttaacatttatgtttgaaatggaaaatcaataaaagggaacttatattaatttataagcacattaagaaaagaggggacactatttttgatcccaagatagcaacaaaactaaaaacttttccaaagaagcaaacgggaacagaggtcaataggctgtgacctctattttatgtttaaaacgtttgcacatccactaagtgcactgcagaatcttaaatgcaattaaaatcaatgggcatacaagttatagagtagcttgaggaagcacaagtcaatcttcattagctattgtagcaaagattccttccaaatccatgggagcaggtgctgtttatactcccttcattgacgcccagaacaatggcatagggtgagcattgaatacttatttgctacgcgcatgaatgaatgaagctacgctgcgaaggcagactgcgtggctgctggtcccgtggctgctggccccgcagcatgtctgccgccttttcagcaggcttgctgcatctcctcattccctcacctttctggcagtaaggagttcccacgtttgccccgcttcagtgtcgtggactggcaaaatgctgtctctaaacccctccacgcctcaggtaatccgctcatttctcacacagacgcagctgtttccgaggaatgtccggccgagcccgcagggtgcgggcagcgagtatcctgggaccttcaggggaggaggtggctcccacaccccaataccgtacagagagtccgaagagtccgggcccttatttttccaattcttggtaaacaacaaacatgctcgccctcgcctccccgtgcagacgcctcagggccaactcgggcttcgccaggcaccgagagcagacagaagacgccaaatggctatcaccaggagagagggcgaggcagccgcgcggcgtatagcgctcgcccttcccgcgcgctcggtcgcccgacgcctcacgcgcgaggttgccttggcagtggctggagggcaggtgggggcgcgtgcgcgcagaagggcgggggagggaccaccgcgcgccagcaggtgggcgcgttctcccgcgcgcgtgcgcgcgtcgaagccctatacatcacgttccccgagagcagcgtcccctccccgccgggagcgcgcgcctcccatcctcgcgccgggtcctgctcggtctctcagagccgcacactccgcggagctcctgccacagccgtcgccttcgcggcggctctccagccccgcgcctcagcctcggcgccgcatcaccgcgtcccaggcctccttccctccctctgccactccccctccctttcccgctctt

SEQ ID NO: 5118 - DNA, 2300 bp, Homo sapien
ttgaagcttcaattaattagacttcatcatgttatagctaaatggatgtgactagaaagagcagcatacagacatctatgtgtaaactgttacttgttggttaacatttatgtttgaaatggaaaatcaataaaagggaacttatattaatttataagcacattaagaaaagaggggacactatttttgatcccaagatagcaacaaaactaaaaacttttccaaagaagcaaacgggaacagaggtcaataggctgtgacctctattttatgtttaaaacgtttgcacatccactaagtgcactgcagaatcttaaatgcaattaaaatcaatgggcatacaagttatagagtagcttgaggaagcacaagtcaatcttcattagctattgtagcaaagattccttccaaatccatgggagcaggtgctgtttatactcccttcattgacgcccagaacaatggcatagggtgagcattgaatacttatttgctacgcgcatgaatgaatgaagctacgctgcgaaggcagactgcgtggctgctggtcccgtggctgctggccccgcagcatgtctgccgccttttcagcaggcttgctgcatctcctcattccctcacctttctggcagtaaggagttcccacgtttgccccgcttcagtgtcgtggactggcaaaatgctgtctctaaacccctccacgcctcaggtaatccgctcatttctcacacagacgcagctgtttccgaggaatgtccggccgagcccgcagggtgcgggcagcgagtatcctgggaccttcaggggaggaggtggctcccacaccccaataccgtacagagagtccgaagagtccgggcccttatttttccaattcttggtaaacaacaaacatgctcgccctcgcctccccgtgcagacgcctcagggccaactcgggcttcgccaggcaccgagagcagacagaagacgccaaatggctatcaccaggagagagggcgaggcagccgcgcggcgtatagcgctcgcccttcccgcgcgctcggtcgcccgacgcctcacgcgcgaggttgccttggcagtggctggagggcaggtgggggcgcgtgcgcgcagaagggcgggggagggaccaccgcgcgccagcaggtgggcgcgttctcccgcgcgcgtgcgcgcgtcgaagccctatacatcacgttccccgagagcagcgtcccctccccgccgggagcgcgcgcctcccatcctcgcgccgggtcctgctcggtctctcagagccgcacactccgcggagctcctgccacagccgtcgccttcgcggcggctctccagccccgcgcctcagcctcggcgccgcatcaccgcgtcccaggcctccttccctccctctgccactccccctccctttcccgctcttcttgcccacccggccggcagagagagcctggatacgaagcaggcgggcttcagagtgggttggaaaaatggaggtgccgcgcctggatcatgccctcaacagccccaccagcccctgtgaggaggtgatcaaaaacctcagcctggaggccattcagctgtgcgaccgggacggtaagagcggccgggaccgcgaggaaagggacagagttcgcgccgaggcgccggggccactctggctccgccgacgccgctcgccagggcggcagggtcttttgttgtcccctctgtgcaaataaatgcagatgtgggttaccctccgcccaccgccctcccctcaccccagaaacaaaaggaccccggggctcgcgccttggcgcggaaagtagccgtccacaaccgtggcgcccttcgccgccttcgcccgcctggcccggacgagggcgacgttcccgctcgcggctcctgccccgacgaggcgtttccgatctttgccgcagtccggatttcctgggtctctgggcactgaaggggaaatgccctcgggatgtttctagcaacccccttcccccaacacacacacactagttggcattctcttccagaaacttatcattttcttttttaaacctcccatcctcagactccccaaattaacaagtctttttagcctcttggattgggattaggatgacagtttttcagtgagggcgcagaaaaacagtgcatttcagcaccaaggacagacacaatcttcatggttcctgggctctgagtcagactgtcgaaaatattggcctaatatatgtgctgtgattcagactttgtggcgagtacgtaccattgcgtgttgatattatatcgtttattctgttgttgaa

SEQ ID NO: 5119 - DNA, 2300 bp, Homo sapien
tttattagtcttgtgtttctctcaaccctaagaaaataaaaatatttacaacttgcaatggttacattacaaaaagtcatttcataaaagtctaaactaaaatccaaatgacttcctatgcgttattaaaaataatctttacagtctataatcatgcaagcttacatatggaataccaaaatgataaatgtttttagataccataaatatgtgcacttactaccatggtgactaaaacagtctaagaataaaggaaatacaagctgtctttgcaaacgtatttatttattcatatactacacctgtatcagaaattaaagtggttttggtttcaaaaagtttgaattctggtttcaaaattattaaatataaatttatattaataaatataaaatttagtaataaacaaattcggtgcttgcttgatataaacgtgctgaatagcaatgcgtaaccaagtgattaccatttaaatgactttggaaacaagacctctgctccctatttggattaggctgataaattttatgaccttactgtgagcgtattagtatctgtacataactttggttaaagacatgttttacaatcattacctctatatacagttaaacattaatttcatttacagtcaaaagtatttggggccctcttaacaacatgtgaactgtgtttcctttgtcagatgtagaattttacaattattcggccaaccaattactaatcaaatgatttctttacaaatgaagttttgtaccacattactaaagtagcagactctaactagtccagctaacccagaagcactgtaactaaccacaccgcacacagcactagcttatgtcttcaacgctcagacctgtattcaatcaatttccttccacaggagcctgccaacttcaacaacagaataaacgatataatatcaacacgcaatggtacgtactcgccacaaagtctgaatcacagcacatatattaggccaatattttcgacagtctgactcagagcccaggaaccatgaagattgtgtctgtccttggtgctgaaatgcactgtttttctgcgccctcactgaaaaactgtcatcctaatcccaatccaagaggctaaaaagacttgttaatttggggagtctgaggatgggaggtttaaaaaagaaaatgataagtttctggaagagaatgccaactagtgtgtgtgtgttgggggaagggggttgctagaaacatcccgagggcatttccccttcagtgcccagagacccaggaaatccggactgcggcaaagatcggaaacgcctcgtcggggcaggagccgcgagcgggaacgtcgccctcgtccgggccaggcgggcgaaggcggcgaagggcgccacggttgtggacggctactttccgcgccaaggcgcgagccccggggtccttttgtttctggggtgaggggagggcggtgggcggagggtaacccacatctgcatttatttgcacagaggggacaacaaaagaccctgccgccctggcgagcggcgtcggcggagccagagtggccccggcgcctcggcgcgaactctgtccctttcctcgcggtcccggccgctcttaccgtcccggtcgcacagctgaatggcctccaggctgaggtttttgatcacctcctcacaggggctggtggggctgttgagggcatgatccaggcgcggcacctccatttttccaacccactctgaagcccgcctgcttcgtatccaggctctctctgccggccgggtgggcaagaagagcgggaaagggagggggagtggcagagggagggaaggaggcctgggacgcggtgatgcggcgccgaggctgaggcgcggggctggagagccgccgcgaaggcgacggctgtggcaggagctccgcggagtgtgcggctctgagagaccgagcaggacccggcgcgaggatgggaggcgcgcgctcccggcggggaggggacgctgctctcggggaacgtgatgtatagggcttcgacgcgcgcacgcgcgcgggagaacgcgcccacctgctggcgcgcggtggtccctcccccgcccttctgcgcgcacgcgcccccacctgccctccagccactgccaaggcaacctcgcgcgtgaggcgtcgggcgaccgagcgcgcgggaagggcgagcgctatacgccgcgcggctgcctcgccctctctcctggtgatagccatttggcgtcttctgtctgctctcggtgcctggcgaagcccgagttggccctgaggcgtctgcacggggaggcgagggcg

SEQ ID NO: 5120 - DNA, 2300 bp, Homo sapien
tcaaccatttaattaaggttgttcttaattaaatgtccaagtcctatttcaaattaaaagcattgaacatttccattacaagtggatcactgggagtatttataggagaaaagtgtgatctttctccacactggaacacttggaataaacaccatagtcaatgagtacaaggggtttctggaaattaacaaccatatgggaaattaacaaccatgtaatctatgaaaccataagtcagtcagaaggctgaatatagacttaccttcatcagtctgaataaacaaagaacagatctcactttgaaatggctaaataatgaatacagtgaagcagcgatgtctcttactcctgaacctagctcaaatgaaatagtaggtggcttcggaacaaatatgtactgtatagttatacatacaaaggattaatattcctgaacttattttagtccatagaattcagtctaagaccatattaggtttttatttagctgattttaaaaatatttggagagaggaaagcaaaattgcaaagaaccttaatgaaacctgtttttctttgaaaactcaatttttatttttcaaggtataaatttaaaaagttaaaatacaactctcatacaaacataggcaggcagcagagatctattcacttattaatggggaaaactgtaagatgatgaagctggttccaaaagcattttgaggatctgtggatttacaggtatttagaaagaaagtttggttagatgcaaaatgattatttggttagatgcaaaattggttatcttcctatattgcaataaaatcataaacgctgcgattatctttttctctgaacaggctgaataaaatgtgcaagtgaccacagaacttcactgtggctggaatctaatcaatagtgaagagcaaagccaaacacaactggagaattaactggcccctgggtggacttgttaaccgatgtctcagtttgacattgaaaggtcatgctcttccccattatttccaagttttggtaaagtttttaattgcccaattagaaaaattatgagttttttgttgttatgttaactcattaacttacataggtttggactaaaaaccactatcctagctgcttctgggagtagaaagattaaaaagggggatgggaatcttatttcaaaattcaaataaaataattcaaattcaaataagaatctttaatagatgctacatcccatatccaggtcaacatggcaggagaaatgaacaatacaaagagggcagaacaaatatccccaagggaaagaagccagtggggggactgacagtctttcctttccctaacaaggctgcctttattcaaagggatagcgtttgcggattccgtctctccatcctttgtaaaggtgctagctagggagctgagctcaagcgggctgctctaggcatagcaagccccaccccttgcacggtgtcctaatcaccagctaacccctggaataaattctccactcgccctgcgtgggttcattcacagctctgtagtccggggctgggcgcttcctctctgggactgaaataagagcgctctagacagatcaggtgtgatgcagccagccctgctttagagcctattctttttcctaggcaacaaaaaacacacacacaaaataaaacaccaaacagcagcaatatccccctcccccttcttgttctctcctgactttttctgaacgatggatgaatctctgcgagcctccatccctgggggtggggtgggagtgtggggggttggggtgagctctgtaaaattggtaggagacatgtggaagaaagcaagtctcccgggtatttcagcacttcggcagaaacactggggcattctcattgccagcctcggggggtggctggcacaaagagcccaagattaaacgcggcgcctgggctggcgaggtcggggtcgtgtggtaactctccaggtgctcctcgctggatcccggggtcccagccccgccgccgcgccccgcccagctctgtccccgcagcctcgcgggctgccgggctttgtggttcgcccgtgccgctgggcccctgctgggggtgtcgttacgagcatgtgcagacagcagcccaaggtagagcgagcgtgccgggcgagcccggagacttgccttgcaatgccatgtttgtgtatgtgctcactcccggagagcaatcagggagacggctccccggccagacttggctgatgttttcttgtttctgtttcagccttcaggataattccttcagcagcaccactgtaacagagtaagt

SEQ ID NO: 5121 - DNA, 2300 bp, Homo sapien
gttattacttctcagtagttagcaaagagatactctcttagcagtcccaaaagatactattttagttgccattacattaacatgaaacattaatatttgcatgcaaagttttttttccttttgggaatgaaggggttaactttaaaaaatgttaagaagggacaactgaggtcccaaagaaaatattttcttacaactctaaggcagagccatttggctatttggaagaattgttttattagatgggtttttatagcaatcatatccatgcaatcagtgatgcctctgagcttggtcctattggcatcctgatgagattataatgtaatttaatactgaccattttaaacatatgatcaaccttttcagactatttttttcctgatttttcacatgacatttcccaatgacatttacatttaaaaatgctcagtttattaaagattgaaatcagaaccagatgagaacagtaccaattgattaggctaccataacttggcaaccctctgtgtttagtgtgatcagtgctaaaaaggtgaattattcacagtgttacatagatgtataaaccagcatactttgtaatttaaataccctaaaaaaattctacttttctcataattgtattaatgcatgaaaaggatgactcactcattccggtgattcagcaatggatttgaactatcaagccattataaatatccttaaactgcaatatactatttttaaaaagtaaaatatgaaaatttacttttctggaataaatatgtagcatggagcctggcacataataagtgcaaagaaaatagtttcatgatgatacttggtttttgggtttttttgtttgtttgtttgcttgtttgagacggagtctcactctgtcaccaggctggagtgcagtggtgcaatcttggctcactgcaacctctacctcctgggttcaagcgactcttctgcctcagcctcccaagtagctgggactacaggcgtgtgtcaccatgcccagctaatttttgtatttttagtagagacggggtttcaccatgttggccaggatggtctcgaactcctgacctcgtgatccacccacctcagcctcccaaagtgctgggattacaggcctgagccaccacacccagccgatgatacttgttaagaatatgggctattgggttcaaactgactgagtgtgaatcctatttatgttctttacagatttttgatctatggcaaatttctcaaccattccagccctaggtcacttcatctctagattgggaataataataggacctactcaatgggatcagtaaaagcattaaacatgatcgtgcaatgtaaagtgcttaacagtgtctgagctgcaaattctaattcttaaatgttctatcagtattactatattattgttattattgttatcttctatcttcttaatatgattttaatatgaagttacatataaatgccagtataaaaaataaattgaattgtgatattacaaattctaatcctgagagcctcagattacgaggttgaacagttcccattccctttttaggttcaagcgttggccttttcatatatgctgctctgcagaggatgctggttgagttctatggactggatggatgcttgctgattgtgggtgctttagctttaaatatattagcctgtggcagtctgatgagacccctccaatcttctgattgtcctttgcctaaaaaaatagctccagaagatctaccagataaatactccatttacaatgaaaaaggaaagaatctggaagaaaacataaacattcttgacaagagctacagtagtgaggaaaaatgcaggatcacgttagccaatggtgactggaaacaagacagcctacttcataaaaaccccacagtgacacacacaaaagagcctgaaacgtacaaaaagaaagttgcagaacagacatatttttgcaaacagcttgccaagaggaagtggcagttatataaaaactactgtggtgaaactgtggctctttttaaaaacaaagtattttcagcccttttcattgctatcttactctttgacatcggagggtttccaccttcattacttatggaagatgtagcaagaagttcaaacgtgaaagaagaagagtttattatgccacttatttccattataggcattatgacagcagttggtaaactgcttttagggatactggctgacttcaagtggattaataccttgtatctttatgttgctaccttaatcatcatgggcctagccttgtgtgcaattccatttgc

SEQ ID NO: 5122 - DNA, 2300 bp, Homo sapien
atgggagtagacaacactggcagagtactcatttctttccccttctctttttcttattctctcttaaaagtctacctgccttttttattttggggtgaaaatagtagatgaaatattttactacccaaatcttgccacgtttttgatactgacgttcattttaagttgagtatatatggggaactttggtgtaaggctttgaaaaccacttatttgcctttacatcccctgtaaaagggattaagaatgcttctaaatgtcctgcctaacagacgtttggtaaactgttccaacaatgtggaatgcagaccacaaattccaggtagtttttaaaacctgttttattaatacagaaatgtggaggaaattaaatgtttgatgtcttagtaagtaaccaaaacatgacagacaggatcttgaggaaagaaaaatacctttttttttttttttttttgatcagtacctgccttttttcatgtcttcaaattctcacttcctggtaacaccaatagtacaagttagaggaatagcagcttcaccaatgccaataaaaatgattgaaatgactgcagatacttgataaataaacttactacagataacatgaaaagggaatggccactatgaaagttccttgagctgtttgttttagaaagaaaggcaagtttggcatagagaaaagcctgtgattttgacagaaagtggtcaaaataaatgggagaaaaatattttatttcattgattggttacaaataggtgtggaatattccctggaagacttaccttgttcacaatctttttatagtggaaatattagattgagttgaaagaatcagtattataaatgtgttcatttgaggatacttttctcttttttcctagggagcgggataattctggatatgactggtaaaaactggatattaatttctactactactcccaaaagtctagaagatgaaattgtgggaagacttctaaaaattttgtttgttatctttgttgacttaatttctattatatatgttgtgataacttcttagaaagctgacttcctttccatgtacatttcaaactgaattacagtgaataaaaatttgtattttaacttgttgagtgactcacattttatgacattgccaatttattctagaagccaacaggacactgcaatacaaacaacattgtgtattgtttagttctttatggtttatgaaacattcacatatactgaagtgaatttttttccccaaaaacatctatcctactgagtcatgaaacttctagatttttagccaggtgtggtggctcacacctgtaatcccagcactttgagaggcccaggtaggcggatcccttgagtgcaggagttcgatacgggcctgagcaacctgaagaaatcccatctctactaaaaataaaaattaaaaaaatttgacaggcatggtggtgcatgcctgtatagtcccagatactcatactcgggatgctgaggtgggagaatcgcctgagtccaggaaatcaagtttgcagtgagctgtgatcacaccactgcactccagcctgggtgaaagagagagacccagtctcaaaacaaaaacaaacaaacaaacaaacaacttctggatttttttaacatagtcgttatttggtgtattgactaaaatttatacgtgagattgtgagtgaagttgattttttaggatgtgtacctatgtgacattttatataattctatttttaacataccaagtttaacattccagtagcataatctttacatatgctgtaccaattttcttatacacatatttcatctgtttgtaggtggattatttttcttaaccctgggcaattggataagtgagaaatatttctatcaacaaagacttacgaatgaaaatacttagaagagattcttttaggaaaacaacttataagaaaggagagaaggcagagtataacctatgttgagttcctatttgggactaaatgctcactctatgtcatttaatctaaggcttacaataaccctaggtggcaggcacttcttgcctccattttacagatgaagaaactgaatcttggaagaattgtgccagtttgaggccaacactaggaagtgtctggaaccggatccggaggcttcacaatctatatgttgcctccaaaggtaaataataactttataagacaagtgtagttaaaaaccaatctgtagagctaaactctttttcttacagtaattctttattcaagttcctcttgctgtatttaatattgcctctgttttcttattc

SEQ ID NO: 5123 - DNA, 2300 bp, Homo sapien
tcagctgcagagtggagtgtccatgccccagggaccagtaaagatgacccattggaagtgtggtaagaaaatattagaatgtctatttatttttacatttcttcttttaaaaattgtgtttatattttatgatttaaatgatatatttacaatagtatatgcatatgttctataaataaaaatacatatattcagtgggtactcaaaattttttaattgaccagagaatggaaaaaaaagaaaggccatatacctattccactccttctctcccatctattaaactgagcgtcactagcatatcagtttctctttttcacagttgcctcagtagaataacattccactgggtgaggtttgtagtgaggtatccaccccaccgaccacagcgtttagctgaaaaaggtttagtttgacaaaagagcagttactagatctgagccagggtgagaagtagctggaaccttaagaatgaagcagttggctgggtgcagtggctcacggctgtaattccatcacattgggagacagaggcaaagggtcacttgagtccaggattcaagaccaggcaagacctcatctctacaaaaaaaaaaaaagaaaatttagctgagtgcagtggcgcgtgcctatggtcccagctactcaagaggccaaggtgggaggattgcttaaactcaggagttcaaagctgcagtgggctatgatcatgatactgcacttcagcctgggtgacagagtgagtccctatctctattgaaaaagaaaaaaagaagcaatttaacaatctttatgtatttcagtaacttttctctaattgtcagttttcttttttattttttgagacagagtcttgctctgttacctaggctgtagtgccatggcatgatcttggctcactgcaacctctgtctccagggttcaagtgatccttctacctcagcctcctgagtagctgggactgcaggcatgtgccaccatacctggctacttttctgtattttttttgtagatactgggtttcaccatgctgcccaggctggtctcgaacttcggagctcaagccatctgcctgctttggccttccaaagtgctggtattacaggcatgagccaccactcccagccacataattgtcagtttcttttaatacttcagacagaaccagtgtttaatgtaattaggtataaagacatactgttaatattataaacaatttgatgccatttatgggggaggagggaaggcacagaatttggaatgttttgaaatataagtttccaaaagaggagagccactgccaaccagaagtaaagtgatgattacacctccattcttaccacatgaatttatgtatgatacaatcccaagatccagcctccaacccccacatgtacctatatgtttccaggaattgttttgggatctctaagggaagccagctgatatgctcacaggtaaacaaactttaaaaagttgataacatgcatttcaaaatccatttgttgatagatttttaaaattgaggagtcaatataaacaaggtaaaatgtataaatttaagaagatattcagatgtccatggaaaataattgttcagaagagcaaaggatagtataacattaaatgagtcatggtgtctttttgacattcctgattttttgtattattattatacttcaagttctagggtacatgtgcacaacatgcaggtttgttacataggtatacatatgccatgttggtttgctgcacccatcaacttctgacttacattaggtatttctcctaatgctatccctccccccggctcccaccccctccccgacaggccctggtgtgtgatgttccctgccgacattcaggatattttgttggttgtttaactcttcaaaaacttgacataagggtctattgattgtggaggaactgatctccttctcatgggttctttgagctcctgtgtgggcataagtatatctttgttataatttgttccacctgtgcctgtcaatttctttccacttgcctcctcccgtgacattctggctcatgtttcttcataaagctctaagccagttattaataacagaccagtgagcctcctgatccaccaagaccatatggtgtttttcataaaagagagagatcattcccttgactttggacttcgcttattgaacccctggacagtaagtgttttttttttgtttgttttgttttgttttttaatgtagcattttaagacgttgattttggaggaaagtttagtgtgactctaaagtttatgtgcttctgat

SEQ ID NO: 5124 - DNA, 2300 bp, Homo sapien
tctacttaaagcactttagaatgcaaatgagtgggagtgacgatgcctaacctgccaacactgccttttatatttttttctaaatgcaaataattggtaaacttttatacttgagataaactttaaatccatatctcatctatgtgtgggagaatgagaaagaccagatatcttttttgtttctttgttttttgagacagagtcttgctgtgttgcccaggctgaagtgcagtagctcagtctcgctcactacaacctccacctcctgagttcaagcagttctcctgcctcagcctcccgaatagctgggattacaggtgcctgccaccacgcccagctaatgtttgtatttttagtagagactgagtttcaccatgttagccaggctggtctcgaactcctgacatcaggtgatccgccttcctcagcctccccaagtgccaggattacaagtgtgagccaccatacccgaccagaaagaccatcttgtaacaattccctctgtctatggcataggggctgaactgaagtctccttttttttagatttggatatgattgcatgaaacatggtttaattgaaaactctgacttttcagattcagagaaaatggcacagtatctggaggaggaacgtcacatgagagaagagaacttgaggctccagaggaagctgcagagggagatggagagaagagaagccctctgtcgacagctctccgagagtgagtccagcttagaaatggacgacgaaaggtgtgtgcatgtcttatgagccttgtttttgtttaaaaaataaaacccaggttctacagaggttttctttggtatcctgttaggtgtataaggggatggcttaaatatgtatttattgtgctaatgaatgccactgcgttatagtagatgccaagaatgggataaagattgaacattttccttaaacacaaaaagatgaaaaaaatcacctctctaaaatcatttggtggggagagaaatggagacagggttatattagagaagcagcagagtttgcatttgttgttgaattagtttaatccagtgtcatatctgtttaaagcatgggaacatattaattcctgtactgtataaggataagcaagctatagtgcagctcgaggaaaacagtgcatgcgtaggttgaaaagaatcagtagggacacaggtgggggttgttgaaatcccaaggacttgccttaacacacttgataacttttgagcctttttgtagccacttaaaaaaaaataaaactaatggattgcattcatctgttcaaacctaagcaatgaatcccctcattgccccactgtgagtgatctggaataacagacccatcctttggttaactagcagaaatggtctcaagtatttgtgcctcatccagttctcttccctcttcctcctctctaaattcgggataaggtagtggtaagataacaaacaagtataaatggaaaaagatgttcaatctgcagagaaacccagaagttagagaattaacctttctctgaaccagatcatttctgcaaggaaattctccattctggatcagcgatgccctggcgttacatgggcggtatcttagtgtgagaggtgagactgagtattcttgggggtccctccagcaggactgggcattcagtgtctgaaaccaggcctactcatggctgtgacgagtagtactgcctgttgatgccaatacgtgctgtccaaaacatgtaggcaatgttagcacatctgtactctgtttctattatggaatggatctagaggactaacaacgctgttgatcagtttgctgtggacagtgactttattgttaaaaatttaagattatctataatgaaagtctatatttttataatgagaaaaaaaggaaaacagtaacaggttattctattttaaatacctatgtgtatgcctcttcatttggaaataataaagattattctttctcaaaactttgccttataaaactacagttccccattcttcctaaaatctatatcccttaagaaccatttgactaaaactgccagctagaatactaaatagcttattaactatcttcagatacagatcatatatagcatctgggacccagtttggggtaagatacactctaaggaaatatgtcttttgactgcagtgtcaatagtgaagcaatttcagccttccagataaatatttttttccagaaccggtattcatttcagaaagtttgccctaccttttgtaggtcagattatccacagctgcccaataaatactttccctactag

SEQ ID NO: 5125 - DNA, 2300 bp, Homo sapien
cgcttcaaactccacccctctgctgacttgaagcagtgtgagtccgcctttccaaggcggttagttttgtggtgacgctaagagagagttaatttgccccctgctctgcctggaaggaatgttcctgttgcaataagctctaaaagtggaagctttaagataatatggaatagggagcaatagaaacttgtgaggtatggcagccagacctactcttaagattcgatcacagtgctgaataaaggggaaagaatgttgttaaatctgtttccccctgtggtgcttctccctgctagctttactcttccatttcaaccctcaagtgagctttccagaatccgtttccaatttaactcattgtctcatgtactagatcccaaaaaagtgagagaactaagtttcagtgcaaattaaactggatcacttgtaacagaatgatttagattgcctatatgtttctcaagagcaaagccaagcatttcctccctcctgctatacaaacagtgacagagttcagaagccctccagcactaagctaaaaaatacctgggagaaactggggtttagttgctgttggcatttaagctgtttgctaaaagcagccatcttggtgaaagatgatgtcatttggaacacttggtgttttcgagtttattctgaggtgccagtttccaagagccattgaatcaccgtttaatcatgagatcaaatttaggtttaaagataatgagggagtgggaataagaatcattcttctttcttcctaacactttagaaatctttcagaaagttcaacccaacagaaaaaaaaattacacttttttttctattttctattaccatgtgtttgttgtaatgttaactaagcgtgggtaataaaactagtctggtcagtttcactttccaatttttatacataagtgaaagctgttttgtgtcaacagggcaaagtgtttagaatcatctcacctgctgggccaatttcctgcaagcctttctttgggaagaggaagggggaataaaagtttttgatttttaatttcttaaactgcaaagctagaaccatgaattagaccgcattacagtaattactgttttatttttacatgctaaagttttctaggagtgagcaagaggatagcaaagacgggtgatgttgcactcccactcaatcattactatttgtatagcataatgttatgtccgcagttactttggaaaattggcacttaaagaggtgtttcaatcttctactaaaagtgtttcgccttcctttttttttttcttcattaggtaaatgttactgtcttaatcctactacgagacatgtgctggaaatgtttgcaaaatgcaaagagaaaaagaaaaaaacagttgcaccttgtttaaacaattgagcgcagtgtggtttatgaggttattaaaggagatgtgtgtctctcctgcaaattcttacttaacaaggttaacctgtggctgctgttgtttcatcctcctcggcctcttgtagaggaactttgttctcttaggtttatccaagccttcctagtcaaaaacaccttgcttttgagaatataaaactgcgtgtatgtgtgaaacagatagagggagacacgcgcacacacagtcggcggaagatggggccacaacacggtagaggatgggtgccggagcccggctgacctttccacgtgtccccggcacctgcgaggctggtggggcatcaggtttcctttttctcggggcgggcgcgagcccggaagaggctgggcggccgtgggcttagatcagggggctcggaggccctcccttggaacacgtgtggctggcgagctggtggtgcgggggcagtccttggctttcccgcacccgcagtgcctgcgcgttcccagcccgcccgtggtcaccagacggcggcgggcgggtcccggagctttcagccagctttgctgggcggcctagggagcgcgcccagcccggctggagcgagccccagtgcaatactgcccaagcccgggcggggtctctgttctctggcagaggaggtcccttggcagcgggaagcgccctctctttctctcgccgccgctccgagtctgcgccctggtgccaggcgctcagctcggcgctcccctgtgctcgcccggcgcccactcattcgcagcccggccttcgtcgccgccgcctccctgctgctcctcctcctttccccagcccgccgcggccatggcggacagcgccagcgagagcgacacggacggggcggggggcaacagcagcagctcggccgccatgcagtc

SEQ ID NO: 5126 - DNA, 2300 bp, Homo sapien
ccagcccaaattgctgattcacagaattgtgagcaaatacaatggttgttgttttaagccactaaatttagcacggtgtctggcttaacacaatgcctggcacacagtaagtacttactaaatgtcaaatgtaatggcgttatcattattatcttcatttaatttaaagctcataagatttctataaggcagacagagcaggaatttctaatctcatttcataggtggggaaataaaaggccagagatggtaaatgctttgcctgacatcacatagtctttaagaaatcaagtaagcatttacaatttgcttttataaattcctctcctgggcagccctattctacaaaaataaatcccttcatgaacagaaacaatgagccacagtgcaatatttgcttatagtttccaaattactaatttcccatcaaagtgcttaatcagcctccccgtacctaagtctttcctgataatgaccttcattcagtacctacaatgtagagttaaacttgtcaacttgagaaaagtaagtaaagcaattattattattattttgagacaagttctcactctgttgcctaagctggagtataaatgacacaatctcaactcactgcagccttgaattcctgggctcaagcaatcctcccacttcagcctcccaagtacctaggactgtagatacatgccaccacatccagccaatttatgtattttttgtagagatggagtctcatttttctgcccaggctggtctcaagcttctggcctcaagcaatcctcccacctcagcctcccaaagtgctaggattatagatgtgatccacagtgccctgcctgcaatttttgttttaattgtcaaggaaaataatttacttggtagagacttggaaaagagatcttctctttgtaatcagaagtgagatttacagggtatccatgtacctgactcagtagtgatcaaaatttcctaagaatgattcctaccactttggcaatggatcccactgacctgtcaatcacaagtattaacaagttccaaaatccaccatttccgaacccattcctgcaggtattttttttagtcatatatgtatctcagtgagttttaaaggttcttgctctcttacagttcaaagatgagttctatcccattgagccaaaagagatccattttttttttttttggcaaacatttctaatctttctctctacaccaaagtaggccttcaaacataattaatttatctctttccttcatttccccatatccaattcataagcaaatgtcttgctttatctgaaaacctaccctgagtacaagcacttctcaccaactctactgtcaaagcacctagtctaagttatcaatatgttgtttttttctatgacagcatttacagaggacaggcaatgtgttctaaaaaagaatccagaacatataaggaattcaaacaactcaatagttaaaaaaacaattttaaaataggcaaaagaccttaatagacatttctcaaaagacatacaaatagtcaacagtcttatgaaaaaatgctaaatatcattaatcattagggaaatgcaaatcaaaagcataatgagatatcaccttactccagttagaatggctactatgaaaaagacaaaagataacaaatattggaaaatgtagagagagaattggtgagagtgtaaattactacagccattatggaaagcagtatggaggatccttaaaaaaattaaaaatagaactaccgtataatttagcaattccactacttggtatatatccaaaagaaatgaaataagtatgtgcaagagatatctgtgcttctatgtgtatcacaatagccaagatacaaaatcagcctaattgtccaccaacagatcaacagataaagaaaatgtgatgtagatacacaactgaatactatttagccttaaaaaagaatggaatcctgtcatttgcaacaacagggttggaactggaagacatcatggtaagtgaaataagccagacacagaaagacaaataccacatgatctcactcatatgtggaatctaagcagctgatgtcatagaagtagagaatagaacagtgattaccaaagactggggagaggaaggcagatgggagaatggagaaagattggtcaacaggtacaaatttataattagctatgaggaataggttctggtgtgctattgcacagtagtgtgatatatatttcaaaaaacctagaagaattttgaatgttaacactacaaagaaatgataaatgtttgaagtgacaaat

SEQ ID NO: 5127 - DNA, 2300 bp, Homo sapien
acccgggaggcggagcttgcagtgagccaagatcgcgccactgcactccagctggggcaacagagcgagactccatctcaaaaaaaaaaaaaaaattgagattactttctcccattgaagagaggccttagagctctctcttaggtaacatttggtctctaatatagttgacagaattaaagatggataaattttttaaaaatgtattttatgactccctgctgtctttcctatctatttaatcaactcctatctaatctattcctcctattcattttggcttattatttataaataggttttgctttttgtaaggctattaatctaagtcaatgaatctaagtcaatgaatacatacttgtatgtattcactatgcttatacatatgcttacttcatagtcctttcagagattgtccaaacaattcaaaaattaactgacatcttttcccacaaaaagattcattcagtacctgcccaataggataccattttagggattttcctgggttctttaattgtctatcactcaaagatgtgtacatttccaaaagttagctcaaaaatatttgtcattcgtgtttaagctataaggaaaactttcattactttttattggctttttttgctgtccttatgactttacttttaaaataaaattttgggttttctccaaacatttgaaaccaccaaccatagaaaatacaaataacactgccattaaaaacgtgttgcaaattttagtgtatttacacaagacctctacatttttccagtttttctcccctctcttcactgcgctgattcaaacttgtcataagcaagattggagatgcactaaacaagatcaagcaacaccttgttttattttcattccacctataccacagtgaggaaaaacaagttaaatgtcccgcccattgtcatgaactatgcacccacaaactgtaagaacacaaagtcactttgtaataagaaaaaaaaaaaatgagaacaaaactttgctagcaaaacaatagtgttctagtctttattctgttattttgaaccagaactgcctttctactgattgtgacatatggtcacatgacatatggcaatcatagaatgttctcaccattggctggcactgaccaaattatcagagccactatcttttccatgccagtaacacaaagagttagaatctcacttttccaggaaggcagctgtttttgtgattggccattttccctaaaacaaaacaaaaccacatctgtacactgccaagcagcattatccatttcaccttttcagtaagaagtttgactgacagatcaataggaccctggaatactagtccatccttaagatctttatccttgttctcccgaactataagtggcacaaatcttaagttaaacacaaatgaaggtaatgtattgcagatatggtcctacttctgctgagtagtttgtcgtgttatacaatcatagagctagtggagagatactatggagccatctaaatccaccaagctgtctatgacaggaaaataggcgcccaccctggagagttaagaatgtattctatttttaaaactcatagtgagacctttcagagtttcccctccaaaattagataacaaatcagaaagccagattctaactctgtattactggaatgtaaaagatagtgactctgataattttgtcaatgccagccaatggtgagcacattctatgactgccatatgttacagccaatagagatgcagcagttctggtttaaaaatgacagaataaagactaaaacactattgttttgttctcatttttttttattacgaaacaactttgtgttcttatagattgtgggtgcatagatcagaagatatcatcttaaattcccttggtattgattttatctatttttttgcctatggcaatgaagatacttcagtgtataaactatgtactatatccgacacaattattctcacttaagagctatgaaagattcagtcttcaagattctctctgtaccctcaacttttctcataatctttcaaaaaatgtgtgtattatctttagtgaatgaatttttaaataaaccagagtgataaatatcatgcccaaactaaggtactatcttagttcaagttagataaaactcaatccacaaaaatctctagagattcggtagaactaatgaagaaacagtgcttaaagtgagacgatctaatcagagctctaatccttggctaaaatttgtctcaacatatgaagcctttcggtttacagtgtgtaactgcatcctata

SEQ ID NO: 5128 - DNA, 2300 bp, Homo sapien
cagaggtcaagagtagagaaaaatgagattcaagtaaaggtattagagttggaaaagtaacggcaggattcatgactgaaaacatatacaaagaattggaatttggggtacttgggggaataccacagtcttgaccacaggaatttgttttgttcttttttggagacagggcgcaattttttgtacagtagctcaatccttgctcactgcaacctctgcctcccaggctcaagcgatcctcccacctcagcctcccaagtagctgggactacaggcatgcaccactgtgcccactaatttttgtagttttttggtagagacatggttttaccacatcacccaggccgaactcaaattcctgggctcaagggatccttctgcctcagcctcccaaaatgctgggaatataggcaagaaccactgagtccggccagcagtttattttttactggtgatagagaagcgttctgaaatctcttctcctttaagattggtgggcttggaactctaggtatgtccatgagcctttcaggatcactcatcaagatgatagaattcaagtagctgtagaactgcagtttgtttatttagacgagagcatagctaggcaatttggcaactgagatatgggggatgtctagaagctgtgtagcacctcctgacaccgcacccatgagagccctttacattttatttatttattttgagacagagtctcactctgtcacccaggctgaaatacagtggcacaatctcagctcactgcaacctccacctcccgggttcaagcaatcctcctgcctcaggttcctgagtagctgggattacaggcacgtgccatcacgcctggctaattttagtatttttagtagagatggggttttgccacgttggccaggctggtctcgaactcctgacctcaggtgatctcccgcctcagcctcccaaggtgctgggattacaggcatgagccactgcgcccagctacattttaaatccagtggccacacttttcacacttttctattttatgccttcagaagtaggcaaaagacacagttcttaaaactttagagtttctgcaacctatattcagtcatagtttgccattgtgaatttgcaaattttctgttgcagccctgaccagtgtagagattccattacctcatatctcaaaggagaagctggcaaatttgaagcaaatggaagccatacagaaatcactccagaagcaaagacaaaatcttactttccagaatcccaaaatgatgtaggaaaacagagtaccaaggaaactctgaaaccaaaaatacatggatctggtcatgttgaagaaccagcatcaccactagcagcatatcagaaatctctagaagaaaccagcaagcttataatagaagagactaaaccctgtgtgcctgtcagtatgaaaaagatgagtaggacttctccagcagatggcaagccaaggcttagcctccatgaagaagaggggtccagtgggtctgagcaaaaggtacgtcatctggtcatccggtagcagtcattgaaatggaaagtatcggtgctttacttctttggattgatcttgcagccgggggcccaaggttttttacgatttctaaattataaatgtgtgaaattgtagcactaatggtggaggtaaagaaagtactgagttaaacacataggtaaaaaaaaaagttccaagtaaaatgtatgccatttcgttataccttcattcatggtgcaggaaaagggaataagtatctgtttagccatttttaggagggacaagaaccagagagacgttaagtaactagtttaagacccagtattttatctgggatttaggtttcctaactcccactccgtgttcttccttatgggaggaggataatcattctgatcctttctggctccttggcataaacagtctatagcatctgacccatctaagttctgttctgtatggtctgttgtctgaaagcgtgttttaaaaattaaagagatgaaattccaagcctaaaatgaggtgagttgacagcagttagttagaaatttaaaattagaagtataatttttataatttatataagttgatgatgattgtcttaacatgtatttctaatcactttaaaacctcactgtgatagatttgcttgttctttgtacttttgtggtacaatctaatagatttttttctttgaggtttactctatttttagatattaaaagtattttaaactgaaatgatgactcatacgtggatataagaaaataaaaagcagctctgtttc

SEQ ID NO: 5129 - DNA, 2300 bp, Homo sapien
tatttttatgtcattaataagcttcttgctcaataaaaattcccaaagagggagtttacaaaactacttttgaaaaattgcaggcatgaatgaactttatctacagcctacaaaagagacagttgcaaagaagacaaacagtactaattttgatgtctatgttcagatatagtcacacaatttatagttacatatcagggaatagatataggaaaggtgttcatcattattaaaccgctgaaattccttgttttatataggctctgccagtgaattatatagaaaaaacactagtgaatcccctggttccatagaaggaggaaaatgccagtcactttgctcctgttatcagaatatgcagggtaggagaacgccggcaagcaatgtggactggggaatagaaaattaaaccaaagtcataaagctatatgttacaggatcttcacagtatgcttggattgtttatccttacacataaagaatagagtgtgctatggatgtcttttaaaaataagtatgttcagataatcagaatctgatttaaaggaatacacacacatatataagtatatattatacatataaagcattgtactagttattgccttctagcggtaataaacaaagatgctcaaaataatacgcaagctacaaaaaaagtgaaaaatagtctatactgaaacttgtaaaaaacttagaagtcaatttaaaagaaagcattggaaaggaaagagttttaatagttaagggaaaaacagttctctcagtaggtagaaaagggtgtgcaaccctcaaatcactagtgagattagcagaggtcaagagtagagaaaaatgagattcaagtaaaggtattagagttggaaaagtaacggcaggattcatgactgaaaacatatacaaagaattggaatttggggtacttgggggaataccacagtcttgaccacaggaatttgttttgttcttttttggagacagggcgcaattttttgtacagtagctcaatccttgctcactgcaacctctgcctcccaggctcaagcgatcctcccacctcagcctcccaagtagctgggactacaggcatgcaccactgtgcccactaatttttgtagttttttggtagagacatggttttaccacatcacccaggccgaactcaaattcctgggctcaagggatccttctgcctcagcctcccaaaatgctgggaatataggcaagaaccactgagtccggccagcagtttattttttactggtgatagagaagcgttctgaaatctcttctcctttaagattggtgggcttggaactctaggtatgtccatgagcctttcaggatcactcatcaagatgatagaattcaagtagctgtagaactgcagtttgtttatttagacgagagcatagctaggcaatttggcaactgagatatgggggatgtctagaagctgtgtagcacctcctgacaccgcacccatgagagccctttacattttatttatttattttgagacagagtctcactctgtcacccaggctgaaatacagtggcacaatctcagctcactgcaacctccacctcccgggttcaagcaatcctcctgcctcaggttcctgagtagctgggattacaggcacgtgccatcacgcctggctaattttagtatttttagtagagatggggttttgccacgttggccaggctggtctcgaactcctgacctcaggtgatctcccgcctcagcctcccaaggtgctgggattacaggcatgagccactgcgcccagctacattttaaatccagtggccacacttttcacacttttctattttatgccttcagaagtaggcaaaagacacagttcttaaaactttagagtttctgcaacctatattcagtcatagtttgccattgtgaatttgcaaattttctgttgcagccctgaccagtgtagagattccattacctcatatctcaaaggagaagctggcaaatttgaagcaaatggaagccatacagaaatcactccagaagcaaagacaaaatcttactttccagaatcccaaaatgatgtaggaaaacagagtaccaaggaaactctgaaaccaaaaatacatggatctggtcatgttgaagaaccagcatcaccactagcagcatatcagaaatctctagaagaaaccagcaagcttataatagaagagactaaaccctgtgtgcctgtcagtatgaaaaagatgagtaggacttctccagcagatggcaagccaaggcttagcctccatgaaga

SEQ ID NO: 5130 - DNA, 2300 bp, Homo sapien
tttgacattctaagaggaaaggaaactttagttttattagatccccttatagccaacaggaatctagttattttaaggcccatccgcactgttccagtggaacacagctttacaaagtgatgattaagactctgacaccttccctgtagcagcgagcattctgagtcctctggatagggagattgcagagatggagtaagaaggagctaaaatgtcagcagggctgcaaaagccatgcctttgtgtagatattgtgctgactgaaagaacataatttaattgggttttcaacctttttttctccttttcagctgatgccttaacttcggtcttgacaaaaattaatcgaatagatatagtgacactgctagaaggaccaatatttgattatggaaatatttcaggcaccagaagttttgcagatgagaacaatgttttccatgaccctgttgatggtaatcgaatttagtgttcatatttatttaatcatttgataaaatttgaaagtgcagtcagacaaggcagtcacttaaaagcaactaaactgtgatttgcttgacttagtttctcattttctctgccagagtctgcaaataaacactctgatatcagagcaaacttggtaaatacctctgtttatatacaatataaatatacaatataaatcatgacgtatgaacgcctaaggtatctgaaagagttggtatttctaatatttcataaaagttaaatatctagagaatgcattgcttttgtcacttttaatttttatattaaccctcctaaactagttacctcttttattcgtatataggtaaaacaaacgatgagccatttttatcaaataagcaaggtattgagtaaagtgtaagcatatagtatacaaattgtaaggtaaaatggcaatttactgtgtggcaccaggtatttaaatgtgcactgaaaaaatttaatgtatcattcaagtatgtgctttagttatttagcgttcgttgttattttaacttcatgaatatgctgccatttattctttggaaaaactgcttgatctattgtatatcaaaggcagcataatttctaattcagtcggcatacatgttactaacaacaattcctctttcacattagcttaatttatataatgatcttgtcattttttcctcattatgtaaattgtgctttcttcactgaaatattaagaaaaacataataaatatcttcctatgtttttcaaaatagtcctgtcttaggctcacaaatgaaaatttattcctacaatgaatttttgttctgtttttgagacgaagtctcgctctgtcgcctaagctggagtgcaatggcacgatctcggctcactgcaacctctgcctcctgggttcaagccattctcctgtctcagcctcctgagtagctgggattacaggcatgcaccaccgtgcccagcaaattttttgtatttttagtaaagatgggggtttcaccacgttggccaggctggtctcgaactcttgacctcaagtgatccacccacctctgcctcccaaagtgctggaattacaggcatgagccaccccacccagcctctataatgaattttgagtagaaaatttgatgatggtgtggaggcaggaataagaactaaggatatttttctagtattccatttttaaactggcaaagttagattaacaagagtcacaaacttctaattaacttctaattctgcatatattttgtggaaaaaatcttaaaattcttagaaagttcctgcttattaaaaagtttaagtctggccaagcactgtctgtctcttaaaaaaaaaaaaagtttaagtcaacaaaagatttaaagcatacttgttatacatgtaacaaacacaatgggtaatgaagtaaaaagcggttctttttaagtttataaagaccatagaaccttggaaaaacgctccctttgaggccttgtcttatatgcaaggccatatattagtaaccacatgctttttgcactagataaatatagatcatcttatcaaattttaaattattgataagttatagtttatacattcttctaatattctttattggaaaaaatagttgttaagtaactctaataaaaaagatcaccagaacacaacagaagtagttgtgttgaaagcttcatttaatttgaacattttaaaattggaatatccttaaaatacagtcaaaaatgaaatggctttttgttgctgtatcttaatatttttaaattcctttttcaaaatttcttagggaaatttagaaacatgtatatgaagt

SEQ ID NO: 5131 - DNA, 2300 bp, Homo sapien
tagccacgcaactgtacagagaattgatatgtgttccatatatggccaagtttgttgtttttgccaaaatgaatgatcccgtagaatcttccttgcgatgtttctgcatgacagatgacaaagtggacaaaactttagagcaacaagagaattttgaggaagtcgcaagaagcaaagatattgaggtaccttgttcacaaaaacaagttcatttcattacgtactccagatatgaggttttattttgtggtcttaatagcactcactataaaataccaagtgcattattgattttacttttactttaaaaaatttgatatagattaatactcaaatttttttatcttttttaatttaatttaatttaatttttttttttttgagacggagccttgctctgttgccgaggctggagtgcagtggcgcggtctcagcttactgcaacctccgcctcctgggttcaaacaattctcctgcctcagcctcccaagtagctcggattacaggcgcctgccaccatgcccagctaattttctgtattttcagtagagatggggtttcaccatgttagccaggctggtctcaaactcctgacctcgtgatccacccaccttggcctcccaaagcgctggcattacatgagtcaccacgcccggccaatactcaaattattttaagtgtctctggggctgtcttagctggttaaaacatagcactaatgaatttaagttatggtctccattttcctgtggccacttgagttacctacttttcagaatcactgtttatacacattactatgattttcctttttcaaacccagtgagcatgtaagtatctaacagtgcaaaaaaaaaaaaaaagctttcaaaatctatacgaataagtgattgatgtcaggcacattcttaaatatttttaaagttgccagaataaaaataaatgtgtaattctgttctgtatatgtccatgatatggattccaattacagttggtgagttgtaagcacacaacattatttttgttgcaaatagcaccacagaagtaactgcctaatagagacacgtgtaacatagtaacgtcagtcttttaacgttacgtgacataaaatctcaaaatattttaaactcagattaacattaaattgtttatttcttttactctaaaaggttctggaaggaaaacctatttatgttgattgttatggaaatttggccccacttaccaaaggaggacagcaacttgtttttaacttttattctttcaaagaaaatagactgccattttccatcaaggtaaatcatctttaacagagaatctgtgaattatggggaaaaaatactcttagagaataaaaataaaaggttttaatgatttatttaatttgaaataccccgtcaaatctgaactcataaggtcagattttgttctggttctaccagagtatactttcaagccagtaaagctttacaattggtaaaaaggatcattatttttcaaagagtttaataacatttatgtttaagcaaacatttgtaaaaccaaacaatttagagtaatacaatgtgttatttctggttaatgttcagtaatcaaataatggatgaaatgcaaatacagtattcaagtttcattttcatttctggtggagcccagggacgttctagagggatcaccttctctctccaagaacagaaggagagaggaaaattgttttgtcattattatttgctgttactgttgcaaaagctggagctttcagaaaaaaaaactgttagaaggaaaatgcacataactcagactgtactatgaattgtcaggattagatcatcagacacaacaatcctgcgtttaggaatcgggcatctaactcttgctgagttcagatgtgaccaccccggttgctgcataatcgtaatcatcatcttttccctttacctttcctgcctctcatagggcttgataaaacaaccatgcttaactcttatacagttaaaaatcctcagataagtctcattctataaccatcaactaccaaaattcttctagattagagacaccagccaagagccctgtggtcgtctgtcttttctgaaagaaccaaagacaacaaaaggactgcctcaaacagcggtttgcaacttaaatatcactctgccagcacataaaaaggtatcttttaatactgctttaaattgtctttccctggtcttgaagaagtgggcctttggtatgcaattaaggaatgctttgtaacatgaataaagctcttgaaactgaagttgtattagtctcctcgt

SEQ ID NO: 5132 - DNA, 2300 bp, Homo sapien
aaatgctatttgagttcatgcattcagatatttgggcattggaaaaaattgtgcaacagaataatagtaatcgtgctgattaagcccttactttgtgcattatttcatttaaatctccccaggaggcttgagggtagaggcagacttattacccccagttttatagaggttggaactatgactcagagcagttaaatggtatttcaaaggtcacccagtcaatacatggtacagcttggatttgaacctagagcacctactgtggaaaacagcattaaaagaataccattgcttttatttctaaattccatgtcttttaagaaatgttctcaccattctaaaatgctaagtggataattacttaatgttataaggctattttattttcattaatctttggccaagtgtgttgacaactcccactcctaccccagacttctttttgtttcatagtgaccatttctgaagtctaagaagtacggctaaagaataatggaaacttactttcattgaaattttactgtataccagtcatttaacataatatttgaaaagagtgctaagttgccatgacatgtagatttaaaagataaacataaaaataacttatatttattatcagtcatggattccaagattatttatgagaacttccaatatacctggcccaggaagaatatggctcctaacttaggggatctcaccagccaatgggaaagactaagcagatgtgtttactggcaatacattctgatgagggacacctaatggtgagtagagggtgcgacggcttctagaaagagtcaaagattagagaagttcatcaggaaaaaacgataaagtttccatcaagagaatacaccctagtaaaggctcaaagtctaaagagtttaaggacttctagggactgaaaaaattctgtataacaggagggaaggtgggtgtggaagaatagccaagaaggaaaaatagccaagaagtcagtggaaggaacattgcatcataggccttgctgagaaattggaatgaatgacagtatttgaataacgctttgctcagttctgtagtttcgattcgaaatacagacttaaaaagtcgatgaacattcagacatttctctttaaacaagacttccccttctattctttagagttggaaattattctctgcttgggaatagttttcaatatgttccagacattataaatgacttcccttctatttccatgtatttcccatgttgattacagccaggctgatcagagtaaagcaccaggtgtcatagcatcctaatattatatgaatcatgcatttatccattcatctatgcatgtatccagggaaaacagatttttccccctactttatcggttctacagattcagattcctgtatatttaggtaacattccaaggggatagatgtgctcttataaaagactgcttacttcagcaagacagtttctaaaccctttacttttgagcccaattctccaggtattctcgggggcggtgggggctggagggaagcaaaaaaaaaaaaaaaaaaaaaaaaacagcaattgaaatggcctctccagtgtacccagatggaagatggggaagtcctgctagttttttccttcactgccaacataaacagggtggagcagctgagaaggaaggccactagtggagagagaaagaaacaatgtaacagcaaagtgacagacctcagtcctgcctcctatctggggcaacagaggcctctccagccaaccccagttctccctttgctttgcacttcctccagggacctctcgaaggagcaccagtgagtccctccatattaaatagttgaaagaacttgggccaaaaataaagcagaacacccatttgctttttccaacttgtctcacttctgctcccttcttcaaactcctgataaaaagcagcggcaattagtgtattgcaaagtgcctcttggagagttatgggaatcactgctgctttccttagccccagtttcacaacctcaactcaagggcaggccctccctctctctttttcccctccttccacctgacagggaccataaataactgaggctcccagtgttcccagctgagaacaaagttgaaagtttgcctggagctccatgccactccccgcctgggccactgctttgttttcttctaatgtttttcctctacctgggttggctgtttcttcattcatatttgagaagaatcacctcctaattaaatgtagcacttcgctctctccctacatgaaggctgtcttggttacccgactaggcaa

SEQ ID NO: 5133 - DNA, 2300 bp, Homo sapien
tgggggaagcaaagagttattctagagagaagtatgttgaaaaatacctgtggcttattttcctaatttccaactatacttttgccgatagaaatcaatgagaaagtatagtgctttgccagcctcagacggagaagttacttgatcaagcacacttctaaatatattttaaagtatcattagcgtctataaagaaagaaaagatgatccaggagccagtgggaaagacgccagctttttagctggctgttctcttcaacttgctgaaaataaaagaaattgtatgaacgtttttcaaaagtataagacgatttatattgggaaaatgcatacgaagttttaatttttactctgccccagctgttactaatacagtaaaatatcttagtagaaaaacactcatttttactacaaagacccaaatacctttcatctgcttttggagctgaattacatttaatcccccaccttcatttttctccatttttgtatggtttcataggcaatggagaaactttccagaactctttcttcatgaagatagtttgtgtggaagtcaagcatgtgagcatcggtgcacatagtaggcccttggtaactctatgaccagcgtggtttccctgtggttcaccgtgaggcctcagagaagtgcgcagtccattggtagtaggaatgggatgccatggtccctgattctttcccttcccatttttatcactgcttcgcagagactataaagcgtcctacaagaggaaaagaggaaagacctttgaaccccaaatctagaagtatggtgagtaaaagttgtttgcaggaactcacacttggcactctttgtgaagcagacaaacaacagctccagagaaccccaaccaaatcctcacatgatgcattggacttggtgctgtgtcctttacacacctacactttcagccctacaaagtcaaatgcaccgaccgccaaagttatggacttttgtatcggaagcacacatgctaacaaagtattttcatcagaacatcttttttttttttctgactcattttcttggtgaaattgttgtttgtgtgtgtgtgtgtgtgtgtgtgtgtgtgtgtgtgttcttttttttactaggtctcatatgttttaggcccagcctgacatttcagcagtttcttgctaaagcgcttactgtgaatactgtgtagtatgtgtgcaaatgactcccgacttattagatttcttccggtgtgtgcatcctagcagaagacaccccagcaggccttgagcactgctgctgcttcacttcacataatgaatattcagaggctgcagtcattgagaactcaggtggcaaaaatagtaaggtgattgaagcaaaccctaacatgaaagcaaatctgcatttcagtgactcagaaacactgattacagcacagattcctgaccctcagaccccatgagaggagagtcctggggaacctcctatgaatcaggcatctgttccatacaccaatatgctcacgtctttctgtatgatgtgttgtaatcagcatgttgtttttaaaagacaacaagcccttctgtagtcctccccacaaaatgcatttagattgatagttcagcataaaggatgcactgttgagacaggcaatacatgcattgttttccctgtaatgcagtcaggatctccatagcaaaatttagtgtgttttttgaaatcttattttatatattttgtcaccatcagcagttgaactaaagtaggaacagctccattctatcaggggttaaattattctccgtgtagatctagtggtgatgtataaattgcagccttttctttttttcaaaggattctaaaataggttttcagaattagcgctggatttttgcttctgcatgtgtggtgactcttgattcttcccctttggagaagcatcctttgcagcattcccccttccgaggaatcacttagacacttccagctggtggcaggggatacagccataatacagcttcctctgtcccagctgtcttcttcactacggtaaatgcattacgatggctgcactctcctgtaaaggttcaggtagaggaaggtgtaggatgaagtccggacaccatcatttgggtttttaaaagcttcagcttctccagcatctttgcattgtgaatatcttcctgcttctagtcaaagctttctctctagtgattggaatgctgctgtaagcctgattagaggtgcctgaggatatcaccttttacaaggaagccgtgtgtgcttgagaggatctttttaaatgcattatggctca

SEQ ID NO: 5134 - DNA, 2300 bp, Homo sapien
tattttataatcccaattaacttgtaaatttttatgtaaatgaactaaatttaatctcaatttttataccccctcagttgtttttgtttgctttttgtttttaaagaaagaggcccatgttctttggatagtcagtaaatagttgttgacaaaggcttcttttgggaggtaaatcctactgcttggaatctactatagacaaattactttaggtggatgtactatctctgttgcttacctagtaaagaatgtcaagatttaggtgggaaagtcaaaattgaatccacctgcttagactcttcagcttatgaagaatttgtataaagcacctacctcatcctcatccctcaaaagacacacgactaataaacaaggttcacccgattgaagtcaatgagcggtagaagcagtaaaggtactgccagttccccagatttccctgtgttttgaagatgagcaagggttgaatcactgaagaacttgaaaggtttattttgccgtcttgagatgttctgccttttatattgcatgacaagaggaatgttactgaatagtggcagaaaatggaaactgtggttaaatagcagttcagtgtctgagcagaaatgtagaacatgatgattagatgcccaacaccattcagaattctggccatcccagacttactgagatgtgtattattataattaatgcgcacacctcaaatagaaattagctcaaatagctgccctgtggttggtaaaatccacgtggctctctgagcgtgtcacttgaatccctatgcttggcctgctcagccctgggtaaagcatctaagcatccctctaactcatgtctttctctgggactggtgtttcaggtgtaggagaaggaatcttggttgaatatggacacaaaccccctttatatgctaggtaaaaaatggggacgatttcagcctcaacagatctgttcttttggtttaatattttagcgtcatgtcctcaaccactgttaagtcccccacacataccattgaaaaattagccctctgtgacttgttttttcctgtatggctgtgttttacattcatttgaatcccatttctcctgaaaaagttaatattcatttgaatgctatgtctcctgaataacaatgttactgtgtgtggaactgatatgatttattcctggctcccagcccctaggaatggacctgaaccctctctccccttctttctccctttcccacttgttaccccactctcactttgtacttctgtcagttatctgctcaaagtgctctgttttcatcttagtggttgtctgtggttgctcctagaaccttatgctttcctgaatcagaatgtatctggcatgcttctaaagatgcttaaatgacagctcataatagtaatttggctgtgtttaaatggatggaaggcatggtgagggggtttccacccaggtgtgaaataccccagacactcagaaaataaccagattcctggggctcaggatggcgtgcagtggggagtgtgggcacagtgtgtggccagggcagctggggagtgtgtaatgtgatctgagacctgcactgccctaaacacagtcaagaagcacagaatgtttctgccacagagacagcagctttgctcttagtatttcctgaatattctggagggtttcttgttagttggttggttggttggttggtatattcatggaaggaaaccaatgattaaatatgaatcatggcaaattgggtatggggctttccgtcataaaccctgcattagaaatccttaggtgaagattggcatcttttttgcatgtcacattaaaaaaaaaagagtaatcatggagaaaatctagcctgtgatgtgacttctccagtagtggtaggtctcttttattgtttgaatcattgaattttttttttacagaccaagtaacctgatcttttatcactctcccgactgcctcctccggtatgccctgatgcattcaacacatgtgttagtatgggaggctagcagcacggagagcaatttacattcagcttcccagcctgctagaagcagcaaatcagcccctgggaaggcttcggagacttgtcagcagtctgtagcttatttctgtgtgtgtgagggtgtgtgtgtgtgtctctctctctctttctctctctctcaccatttccaggctcaaatcactgtggaggaacaagcaacaaagtcttgtcaggaccttatctcagggtaacgattagttaaaaatgaaaggctaaaatattgattttctttagaagaataattgactgtt

SEQ ID NO: 5135 - DNA, 2300 bp, Homo sapien
tctcagaaacagacagccagatcaacagacttgcctggaatagctctgcagggaagcacccctttctgagcttctctcccaggtgctgctccttgtgctaacttcctgtagagtttttttctccctctattgtctacctggctggctgcttgcctcttgtttaagatggctctgtggctgtatcggtgccagggagttggcttgtaaaatacctgtgtctctgcaggctttaccaaggtgatgcgtctcccaagccactagcacctggcccttgtagtctctattgtctgcttcacacattcaatttgggcaaccaattcctatgagtgcctgagggaatagagaactaggctaggcacagtgagagataaaagaaaacaggacttttgccccaacggaccttaaaatccaaggcataggatagccttggaaataatgatgacagtggttcttaactttctggggacacacaaatccttttgaaaagttgatgaagatgatgtgctttctccctatgaaatagcacacagaatttaacataaaattttaaggggtttatggacttgctaaattctgaagtggtttataaagctcatgttaagaatgcctaaagagttattgttactctattagtgtgtgaccttggctaaataatgtttctgacactcagtttccagattgtgctgcctgtcttgcaagggttttgtgaagactaaatgagaccacatgaataaagtgcttagcacagggtccaacacagagctaatgcccaataaatgttatttcagtttaatgtgtgttacggagaaaatgagcaaggtgttagatgggagacatagctaactcactgcagtgttctctggtaataaagtcattccagtatttagttgttacttgttggtaaaagtatgtttcccatactttagtcattccctgcctaccttttgaaattttgcttatcccagtcccacctggacaattacccttttaaaatattttttaaacatatatatttgctaggaaagaacttctggatccctaccttaaatagaaaacccactttcacttgccttaaatagaaaataacagtaacaataaacaatggaactaaacaatgaaaatgaaacaatgttataaattccagttagataccagtgcttacctagggctttgagcctggagcctgctctgtgataaaagggagtttactgtttgagagagaatactttctccttgtatacagaagaactgaaagagaatgcaaaaaggaatccatttcttactatgtgattcacagtcatttaatgccctggccctgctcggtgcaccgactagacctatcttccgtgactccaagtgagatgtcctccctttaggagacatgacgtgagggcaatttctcccctcgccccacaccaagtagaatagtaaattctgtgggggcagtggcctgatatccacctatcccgccggccttgtccaggacaggagtgcagcaaaacccttatcatatgagctcctagaaacaaggacgctcagaggtcccctgctccccattctgttgctggaccaggctcagtgcctccctcccaccccggacagctccagagtttaatattttcattgggcacgtagctgaagcaatctgagtgctgccaggacctcggcggggtggaagggaggctgggggcattgctcggaagctatctgcctgggaaacattgcttttacatagatcgcatgctacagattaataataataaaaatgcaaaaacaaaattgcctaaagatgattttattcccttaagccatgttattttattattattattattatggggatggctaatgaaactctattcagcagcccggaggaaagaggactcgccctccctctcttcctggagctgcctctgctgctcctagtcaccctaaggccgtcttcctcttaccctggcccctgggccctggccgactggatgtgatcgccgggagctgggtgcagcgcagcctcggcctccggcccagccgcgcctttacctgagccgggcccgcccccggcgcaccggcccgcgcgggcacctggcggtcgcagcggacacagcaggaggaggataggccgcgctgggcgggcgtcgcggggccgcgcttggtgttcctgagccgcggccgaactttttcccaagaagtcccacgtttggaggcccgaggagcgggacggggaggagagactggagttcctggaaggagcagcagcagcagccccacaacatggcctcctccgcctcctcctctcccgc

SEQ ID NO: 5136 - DNA, 2300 bp, Homo sapien
cagcctttgttcaaatgtcacttctgctagcattagcagtttcctcctctgggttctcacattgccctgtaacataagttacaaggtaagtaccagaagagaattcccaattatcatcctgctcccctaccctcaacacctccagcggtaactgtatcttattcatttttgtgtctatgaagcacagtgttgcactttggagatactacatagaagttggcccaaagggtaataaactgtatttgccaagatgatagcatggatttacaataacctctgaaactttataaagaaagatgattgagttaaattgatacacctagcatcacagctgtggaagcttgtggtcttctttatgttaaaggtaaaatggatataatgaattagttgccatttttagatgatatagaagttgaattcctcttaagcctctcaaagagaaagacatattaaaattcattaaaaccagtaccataaactgcacagaacagcctggttccctagagcacttctctggggcagtgagttttcatttaaaaaatgaagtttggattttaaacataagttttaaaagtgattaggctccagcaggagttcttaaattcctacctacaccatgactcccaaatgctctgcctctgttgcctaggaacaaaaattgtcaaggttgagccagatgcaatgtataacaccagatgatagatgcagctcattgtgttaaaaggtgttaaacacttaagtgcatgtgatatactctatatcacaagggtaaggaagttccattccatatcctgatttgggtcttctaatacatacttgtagtggatgtggtaatcagtctttgttctatgtcccattaggatcaatgcaaccagaaatccttaaaatggatttttattatgtctagctctgttttactgttctatttgtttattttaaaaagattttagaatggtgtttaggttgggctggtggctcacgcctgtaatctcagcactttgggaggccaaggcaggaggattgctggagcctaggagttggagaccagctagggcaacataaggagacattgtctccgcaaacaaacagaaaaaaaaaaagtaagaaagaaagagagaaagaaggaaagaacaagaaaaaggaaaaaaaaattaactgcagtaagtgcagaaatctctctcaaggatatgatggatggcaatgaagacagagtttttgacactggattatttaaagcataatttaagcctctttctctcccctcatagaattgtgaatttttgtgttttaattatatttaagccaggcgtggtggcgagtgcctgtagtcgcagctgcgctggaggctgaggccgattgcttgagcccaggatttggaggccagcatgcgcaacataatgagacccagtctctaaatgcatgcctctctctatatatttaaaattctgatgtgaaaatattttaaaatttaatacatttcaaatgtttttaattgtataataaacaaaatgtaaataataaaataatttaatattaaattcaaaaatgaggtagaaacaaagcacagcgatataaataataaattttcctttacatttttgaggcggtcttttgagttttccatttccttcttaaggtcactgaaatgtgctccttggagccagcccgcaaatcacgcatttagaaaaacataactatacactcctaaccctaagtattagaagtgaaagtaatggaatctcgatgtaaacacaatatcacttttttgatgagctattttgagtataataaatttgaactgtgccaatgctgggagaaaaaatttaaaagaagaacggagcgaacagtagcttcctgctccgctgactagaaacagtaggacgacactctcccgactggaggagagcgcttgcgctcgcactcagttggcgcccgccctcctgctttttctctagccgccctttcctctttctttcgcgctctagccacccgggaaggcctgcccagcgtagctgggctctgattggctgctttgaaagtctacgggctacccgattggtgaatccggggccctttagcgcggtgagtttgaaactgctcgcacttggcttcaaagctggctcttggaaattgagcggagagcgacgcggttgttgtagctgccgctgcggccgccgcggaataataagccgggtacagtggctggggtcagggtcgtgtctaggggacggccgagggcctcggagggcgagtattgaggaacggggtcctctaagaaggccggactggaggtcagggat

SEQ ID NO: 5137 - DNA, 2300 bp, Homo sapien
tcatcctgctcccctaccctcaacacctccagcggtaactgtatcttattcatttttgtgtctatgaagcacagtgttgcactttggagatactacatagaagttggcccaaagggtaataaactgtatttgccaagatgatagcatggatttacaataacctctgaaactttataaagaaagatgattgagttaaattgatacacctagcatcacagctgtggaagcttgtggtcttctttatgttaaaggtaaaatggatataatgaattagttgccatttttagatgatatagaagttgaattcctcttaagcctctcaaagagaaagacatattaaaattcattaaaaccagtaccataaactgcacagaacagcctggttccctagagcacttctctggggcagtgagttttcatttaaaaaatgaagtttggattttaaacataagttttaaaagtgattaggctccagcaggagttcttaaattcctacctacaccatgactcccaaatgctctgcctctgttgcctaggaacaaaaattgtcaaggttgagccagatgcaatgtataacaccagatgatagatgcagctcattgtgttaaaaggtgttaaacacttaagtgcatgtgatatactctatatcacaagggtaaggaagttccattccatatcctgatttgggtcttctaatacatacttgtagtggatgtggtaatcagtctttgttctatgtcccattaggatcaatgcaaccagaaatccttaaaatggatttttattatgtctagctctgttttactgttctatttgtttattttaaaaagattttagaatggtgtttaggttgggctggtggctcacgcctgtaatctcagcactttgggaggccaaggcaggaggattgctggagcctaggagttggagaccagctagggcaacataaggagacattgtctccgcaaacaaacagaaaaaaaaaaagtaagaaagaaagagagaaagaaggaaagaacaagaaaaaggaaaaaaaaattaactgcagtaagtgcagaaatctctctcaaggatatgatggatggcaatgaagacagagtttttgacactggattatttaaagcataatttaagcctctttctctcccctcatagaattgtgaatttttgtgttttaattatatttaagccaggcgtggtggcgagtgcctgtagtcgcagctgcgctggaggctgaggccgattgcttgagcccaggatttggaggccagcatgcgcaacataatgagacccagtctctaaatgcatgcctctctctatatatttaaaattctgatgtgaaaatattttaaaatttaatacatttcaaatgtttttaattgtataataaacaaaatgtaaataataaaataatttaatattaaattcaaaaatgaggtagaaacaaagcacagcgatataaataataaattttcctttacatttttgaggcggtcttttgagttttccatttccttcttaaggtcactgaaatgtgctccttggagccagcccgcaaatcacgcatttagaaaaacataactatacactcctaaccctaagtattagaagtgaaagtaatggaatctcgatgtaaacacaatatcacttttttgatgagctattttgagtataataaatttgaactgtgccaatgctgggagaaaaaatttaaaagaagaacggagcgaacagtagcttcctgctccgctgactagaaacagtaggacgacactctcccgactggaggagagcgcttgcgctcgcactcagttggcgcccgccctcctgctttttctctagccgccctttcctctttctttcgcgctctagccacccgggaaggcctgcccagcgtagctgggctctgattggctgctttgaaagtctacgggctacccgattggtgaatccggggccctttagcgcggtgagtttgaaactgctcgcacttggcttcaaagctggctcttggaaattgagcggagagcgacgcggttgttgtagctgccgctgcggccgccgcggaataataagccgggtacagtggctggggtcagggtcgtgtctaggggacggccgagggcctcggagggcgagtattgaggaacggggtcctctaagaaggccggactggaggtcagggatctgcgcggggcccggctgggcctcggggggcggtgggcagggccttcgcctgggtctggccgtgtgagccacactgggctggctttagagggaggctatgggagcccagcctg

SEQ ID NO: 5138 - DNA, 2300 bp, Homo sapien
cgcatttagaaaaacataactatacactcctaaccctaagtattagaagtgaaagtaatggaatctcgatgtaaacacaatatcacttttttgatgagctattttgagtataataaatttgaactgtgccaatgctgggagaaaaaatttaaaagaagaacggagcgaacagtagcttcctgctccgctgactagaaacagtaggacgacactctcccgactggaggagagcgcttgcgctcgcactcagttggcgcccgccctcctgctttttctctagccgccctttcctctttctttcgcgctctagccacccgggaaggcctgcccagcgtagctgggctctgattggctgctttgaaagtctacgggctacccgattggtgaatccggggccctttagcgcggtgagtttgaaactgctcgcacttggcttcaaagctggctcttggaaattgagcggagagcgacgcggttgttgtagctgccgctgcggccgccgcggaataataagccgggtacagtggctggggtcagggtcgtgtctaggggacggccgagggcctcggagggcgagtattgaggaacggggtcctctaagaaggccggactggaggtcagggatctgcgcggggcccggctgggcctcggggggcggtgggcagggccttcgcctgggtctggccgtgtgagccacactgggctggctttagagggaggctatgggagcccagcctggcggggttaggcggcgtgggggtgggggttcggggctgcagtcatgagtcgaggtcggctgttctcaggaactgcctgaagaggctttcgggtcttgattgaagcaaaatccgctcccccacgctgagcgcctgcggagtagcaggctctttcctgggcccggcccctgcgcgccctgccatcccgcctcgggggtgggaaagtgggaccgcacctgggccaggtacaggcgcgggtccctagagccaggccgccctgagaaaccgatcctggaactcgtgggccttcttgggcttgctctgcccacggccccggcccacctggagctgttaagaacagtcagcccaggcacttaactctcatgagcagtgtagtgcagtttttttcatttaaaaagatacatctctgcttctttctggattgatttttctttgaagatgaatgtgagaaatagaacttaaaggtctattctgagtgtgctttataaatgattttatcatcagtgatgggtgttagaaaaatctaggtaattatgcctggagttctgacgtttcattggcaaacttcagaggaagtcttgaacttctggttgtcagcttttttttttaacccattcattgtgattcaagtataccgtttttctgcttagtccttgacattgtttaggttataattagaattttatctgtggaattgcacttttcattcttttgttttacggtgcttaagtgatatttcctactcttggaaaaagtaccttgaaagtcttgagcatgtttgtctgtgacctcagcaagcagaggaaaaagattaaaattgtcacgtgggcaactgtaaacacttaaaatgtttttgtcgttttaaacaaaattttcctaatgaacagtctgaacacattttagttctgtcctcataactttaaaaaataatgttttgaataaaattaggagtatcataaagcggtataaatttgttgaaatatttgggtataactttggcacacgcaggtactactttaaagtgtcacaaaaagggaacataattctggtttttgtttggaaagaatagacaagttgatacctgaatttgagggttattttgattggaagaagctaaatactacactagtatagaatatacacgtttccaatgtctcaggagtcaagaaggatggaaagttattgtaggagtccttacccttgtaaatattgtttgaatgtaattaatatttatggaatacttatgctgcagtaggcactgtggaaaatgctttacatatagtgtttcattaatgcttaaaactactcgagttagtggcatgtaattaagtcagtttttccttcactttaggatctaccatacccattgactaactatggaagattataccaaaatagagaaaattggagaaggtgagtggttttagtaaaataaattttatggaatgatttaacaatgctacaacttctgtaatatgaacacatttaaatatttattaaaattcaaccattaagttgtcttgtagtaccagtgtgcattaacatatgttctttacttaataa

SEQ ID NO: 5139 - DNA, 2300 bp, Homo sapien
gatgagaaatagcttgtaatgaagaggactgattgctaggagtgaacagggttaattaacttttcccaagaaatttgtacctgaaaagaatgtattttgtttaaggctttcaagatggagtcattttgcaaaatactaagggaagtcagttttttgttttttttttttctgagaaggagtcttgctctgtcgcccaggctggagtgcagtggcgcgatctcggctcactgcaacctccgcctcccaggttcaagcgattcttctgcctcagtctcccaagtagctgggactacaggcgtgcgccaccgcgcccagccaatttttgtatttttaatagagacggggttttaccatgttggccaggctggtttcgaactcctgacctcgtgatccgcgcgcctcggcctcccaaagcgctaggattacaggcgtgagccacccgcctgggccgggaagtcagttttatgccaagtaaatgatcacccacctcttggatgtgttcttggagtagacacctgtacttgacttttcactaccctctctttctgatatcaaagactagggccttggtaactccattttcaaaaatactgccgtgggaatggcttaaacaaatgaggttgccggtgataactttcctcgtaaaaacattggattccactattttctggggtctctgggggatttagagagcaccaggcaagcctttgacttcaagagaatacaagcaagtgaggaagagtagaaatatccactggactggaagtcacctgggaatcttggctggagggtaattcatcaggaaactgaagacggtttcctggaagaaactgagggaccaagaagtgtgtttgcttttagaattttttcacgcatcctgtttttggggggataagccaaagaagcatcccttataataggatggactctcttttcccagtccttcagtatcttaggaacacattacctgagaaccggtgaggccaagaatgacattgtttccatctttgtatccctagctctctgcacacagcctactcaataaaggtttattaaatgaatatattcattcctctcggtagctgaacacagttgtgtctttattccccagtgatctctttacaggctaggagtgatgggtttcataaggcatactaattttagcaggctgactgaaagctccctgatggcaggcacccggttgtttgctttcactgtcacctccgtagagcttggccaggcacctggcatcttgtcactctataagcatttatgtgaatgcatgaaaactacccctggttctgtcctcagaactcacggtcagcctggaagagagagaagtttctgtgaggaggcatgggctgtcttggaagaccaagacagcccatggaggccacagtcaatttcacctcctcactcagccatttgcaggaggttataaatcacctctgtacccgggtcggggtcagcggtgcgtccctacgccccctggggggacccctcccgccaagtcgcggaggaaggtaacccagagtggaggagccagccagcacgtgcagccgcccagggaggaggaggctgggctaatgcagcccttagtcagcagctgggctcggttttgaaacaaaagccaatgtcctccctcggagtccgcggccggtcagctcctagggggaagaaagccatgctgcccagccggttagtggcccaacttacttttccagagcctgggacaaagggccagcaaaggcacgggagtgggtgggatgttggggcaggggtacggggacacagatggcccagactctcccctcccggcagcgcggggaaagggccggggtctcccatgctctgtgtcggtttgtcccgggcgatccgcctccgtgcccgggcccgtcgggtctgcgtagagccgaggaacctttgccacccgtgtcccagagcacagacacaccaggccccggtttcatgaatgaaatccaatcgtgtggatataaatagccgcgaaggctgctaacgtcacagtgcgagcggcggccgccacggcggcggagcgaggtgccgggtgctccgttccgcctggctgccccgcctgggagcggggtgggggcaggcgaaggggagggctgcgggtggaaaggggcgagcccctctcgcccgggactgggaagagcggccacggcgccgggcgaggcggcagggcgaggcagtgccatgctgcctttgtgcaaagttgggcggcgggcggcgcgccgcgcgcaggggccccgcacacccgcgaccgcgcgcagccgtggctg

SEQ ID NO: 5140 - DNA, 2300 bp, Homo sapien
ggatagcttttggagaaatacctaatgtaagtgatgagttgatgggtgcagcaacccaacatggcacatgtatacctatgtaacaaaccagcaggttgtgcacatgtaccctagaatttaaagtattataataataataagaagaagaagaagaaaagaaatgaagaatgaatggatgtccaaagctttgagcaatctttaaattatatcttattagaaagagaaacagttgaaggaaatagagatattgaaaaggaaagaattcattaaaaggcaactaggactataaaggttctgttttctagcataaccatttgcataaactccaagacaaaaccaattttactacttcaaagagttgttggatctcctatactatcagctcgtttcgttcgttcttctgtcaatagagttttaccctgatctgacatcccagctatatcatacttttaatctacttaattcttagaaaagcattatttctgctaaaaataatagctatctctagcccttcattacgcaagctcatgcaaaaaaatggtaaaactgcagttaggtgtacagataattttctaatcttatttccaatgattgcagactgcctctcccataaagttttacaccagctgttaaaagctcttcaaactgattttgttgcatcttatttttacctctccttaatatcaaagggaaaatgaaaaagaagagtaaaaagaccaaaagttctgtagatgaggaagtgcaggatagtgattggcctagatcatcttgaccactggaaggtctgaactattcaaaggtggccacacttagagcttggtgcacagcaaacgtataaatgtgcgggtttctaatattaattgtttatttaaaaattaagttccttacaccctgtcgctgacatgtcactagcttggggcctccaaaggcgaacgtgcagaaggttgcagtaaggatggagagtctctatgtaaacgacacgacaggaccatgtgtaacgactaagtaacgacaggaccattagtaaacgactaagccatgtgtgatttgtgatgtcagcagaaccccctgatggaatccttgagtttccatcagttggctagagaacgtccctataagaaaaggctgacccttgacatcgccagaaactttccccagacttggcgtccatttgcaggagatgcccccgcaagtcccagaggtgggtgggtcctggggaggcctccaggaagggcggcccctcgggccctgagcggagaatggcgaggccgcaggcactggggccacaggggccaggtccaaagaccggggtcccagtaggagccccacgcgccagcgggtgacagccctggggggcggggggaggcggcccagggctcccgggaccgcctaggcgttggggccccgcccgcaggactgtccggcaggccgcgaggatgtggagggacccgtggtccccgccccgcagggcggcggctgccgggccgggagcgaggtggcggaacggggactgtggcccgggatgcaggcgggggaggcggccgaggtgggagagggcggggtcggcggggcggggcggggtcggcgctgtcccggcggctttacaaagcccgcgccagcctcggccgcccggcgggacccagagccgccgcgggagcttccagcgtccccaggtagcgcgggcgtcgcggggcgtggcggggcgggagcgcgcccgggaggagccgcgccagggtgggcgggattatggggggtctctctgcccacccgcagtccccacatccgcaggctcatggggacgcgagagcttggagcatccctttgcacccttgaaaggagggtgacctggttacctttcgctgacctcctcacagctagcccagctgctctgacaaagcacagggccccagagggtgcttgcttccagaatactttgggtgtcttgagcagcctcctacctaagcgtcccccagcacacacacacacacacacgcgtgcgcgcgcgcgcactcacacacacacacacactggcggaggcgggggtggccagagggattagagagataaagtcactgtcagtcagaaaagataagaatctgggctggacgtgccacactggggtcttctgaaagtaggcgcagcatctgcagctcctcatgcccggccctaaggtgatgcgggattgatttttcttggtttgttagccgtgaaagccccgggctgtaaaaaggtttgggtcaagaactagactttgatttattgaggcttgctttgccctgctatgccacaccttgtggtgt

SEQ ID NO: 5141 - DNA, 2300 bp, Homo sapien
actgttggtgggagtgtaaattagttcaaccattgtggaaaacagtgtggtgattcctcaaggatctagaactagaaagaccatttgaccctgtaatcccataactgggtatatacccaaaggattataaatcatgctactataaagacacatgcacatgtatgtttattgcggcactattcacaatagcaaccaacccaaatgtccatcaataatagactggataaagaaaatgtggcacatatacaccatggaatactatacagccataaaaaaggatgagttcatgtcctttgcagggacatggatgaagctggaaaccatcattctcagcaaactaacacaggaacagagaaccaaacaccgcatgttctcactcataagtggaagttgaacaatgagaacacagggacacagggaggggaacatcacacaccaaggcctgttgggtggtggtgggctgcgggagggatagcttttggagaaatacctaatgtaagtgatgagttgatgggtgcagcaacccaacatggcacatgtatacctatgtaacaaaccagcaggttgtgcacatgtaccctagaatttaaagtattataataataataagaagaagaagaagaaaagaaatgaagaatgaatggatgtccaaagctttgagcaatctttaaattatatcttattagaaagagaaacagttgaaggaaatagagatattgaaaaggaaagaattcattaaaaggcaactaggactataaaggttctgttttctagcataaccatttgcataaactccaagacaaaaccaattttactacttcaaagagttgttggatctcctatactatcagctcgtttcgttcgttcttctgtcaatagagttttaccctgatctgacatcccagctatatcatacttttaatctacttaattcttagaaaagcattatttctgctaaaaataatagctatctctagcccttcattacgcaagctcatgcaaaaaaatggtaaaactgcagttaggtgtacagataattttctaatcttatttccaatgattgcagactgcctctcccataaagttttacaccagctgttaaaagctcttcaaactgattttgttgcatcttatttttacctctccttaatatcaaagggaaaatgaaaaagaagagtaaaaagaccaaaagttctgtagatgaggaagtgcaggatagtgattggcctagatcatcttgaccactggaaggtctgaactattcaaaggtggccacacttagagcttggtgcacagcaaacgtataaatgtgcgggtttctaatattaattgtttatttaaaaattaagttccttacaccctgtcgctgacatgtcactagcttggggcctccaaaggcgaacgtgcagaaggttgcagtaaggatggagagtctctatgtaaacgacacgacaggaccatgtgtaacgactaagtaacgacaggaccattagtaaacgactaagccatgtgtgatttgtgatgtcagcagaaccccctgatggaatccttgagtttccatcagttggctagagaacgtccctataagaaaaggctgacccttgacatcgccagaaactttccccagacttggcgtccatttgcaggagatgcccccgcaagtcccagaggtgggtgggtcctggggaggcctccaggaagggcggcccctcgggccctgagcggagaatggcgaggccgcaggcactggggccacaggggccaggtccaaagaccggggtcccagtaggagccccacgcgccagcgggtgacagccctggggggcggggggaggcggcccagggctcccgggaccgcctaggcgttggggccccgcccgcaggactgtccggcaggccgcgaggatgtggagggacccgtggtccccgccccgcagggcggcggctgccgggccgggagcgaggtggcggaacggggactgtggcccgggatgcaggcgggggaggcggccgaggtgggagagggcggggtcggcggggcggggcggggtcggcgctgtcccggcggctttacaaagcccgcgccagcctcggccgcccggcgggacccagagccgccgcgggagcttccagcgtccccaggtagcgcgggcgtcgcggggcgtggcggggcgggagcgcgcccgggaggagccgcgccagggtgggcgggattatggggggtctctctgcccacccgcagtccccacatccgcaggctcatggggacgcgagagcttggagcatccctttgcaccctt

SEQ ID NO: 5142 - DNA, 2300 bp, Homo sapien
gacatgaaaccaaaaataactaatttgtagtgatctaccataatagcttgtgtcacatgctgttctaagagctttatgtgtttaacatgtttaaataatatacttaataaaattattatataatccagtaattattattattgtcttcctcataatgtaaatgggtaaactaaagcatgcagatgttaaactacttatgcatattcatatgactaataactgatcaatctggaattagaatctcacatcctatttctttagtgagagttggagctggtgttagaattctggtcacttggtaccaaagccccctgctttgccactgctttctactgccttgcaggcaaattgcacatagtttttggtagaattattgaagtttgggattagatgaaacttcaaaagatcttgtgaaaaatttcttttgcatctattgaaaaaaccttgtgaaaatatcctcaacaactttttctgcaggctctgttggaaaaattccactaatagaagacatactaaccccaagtggcaacttgttctattttgaggtaatattattagaaactactttcctctattgtgatgaaatttgaattctcacaggtgcaactgaaatcctttgagcctgaattggccatctcaagtcaaaagaaatgtttcattccttttccacattatagtccttaaacatatgaaataaaacttctaaggaattatctctagtttttagtttcttgaactgtctcacatagatcatgactctgaatgctttagcactctagttctccccctttggtacaagaaactttataaatgtttctcctaatatatgaagcatcacacataatatttcaggtatgttctgaacattgtagaatagagcagacctaaaagtttccgtttcattcatggaaataatataatgtaatgtccaaaggagtaaatgctgaaatcagctgtctagttttgatttctgctctcaacactcataactacattattttggacaaatttcctcaactctcttttacctccttgataaaatagagataacaattgtgtctactttgttgagctggtgtgagaattaagtgtgatcatagagttaagcatttagaaaactgcctggcatgaatgtctgaaatcagaaactgtccataacattatttaaaaattcaggcacttattgaacatctgttgtgtatagacattgactgtgtaaagagggaaaagctacagtctgcattcccaaggcatttccacttaaaattttagaccttatatttcttgtgaagcaacctatgattttatttgattttggtaaatcataaatcatgtcatactgtggactcataattagataacaattagggaaaatctttgagcccttttttatggctgctgctgtgaaatgctctttcttctatccaattctattctaatctaggtcatccagttacttcttttggaatcctgattgtgtcttccagggtactggttttctatccacgttctatgccatatgtgcatgtgagaagccttccatcaatgtccaccaagtcatgataaaatgtgaagtagaaaagaatcaaaagcacagccttcaacaacccattggagagtccccctgtggggagccatttacacaggaatccacctaacagtattcacacctggaatatttcttaattttgttaatgaggacactatgggagactttttcagaagccttgtttaaatctgaatgtctgtcatcaatttacataacattacctgcttggtaatcctaactatattttttaagaggaggaactaagtttaattgagtgcaatttttctcagaggacctgtgctgatgcttcgtaataactgtgttcttctaaaagggctctcagaaatcttttaaaggatcatttatataatctaactagagattaatagtaaatgtgccttttgtacttcaagacatatttctgcttcattttgaaagttgagactttatttttttatcaccaaccttgtctccaccattaactgccaagacagataatgatggtttagaaatctcatttacaaattctctcagagttttgagatttaattttgtatttaatgcctctacacttgaagcatttaaagatatcccttacaatcacctcatttcttttggtttcaattactcctccttgatgcttttcagacctcttcaatctgaaaatctcttttgatggaagatggaaacaaaatctattattatgctaccaagctcaaattgatgacttcctttctatctttgctaaaaa

SEQ ID NO: 5143 - DNA, 2300 bp, Homo sapien
tatttggtaacatcaatagaataaagcattattaatcatattcctatttagaccatttaccaagactcatttgttgctgaaattttatactaagtcaaatcaatcaacttttttctttgcttattttcaaatatgagtgtagatactatgccagcaagattttccttgaattcatgttataatgcacaatatatataatgggtctgttcttccaaaataaaggtgagaattttttttttgacgtttttgcctggaaccaatggtttattggctagtcactcaagtaaatttgtctgacttgtgcggacataaagtgtgcctagttgatacaataatatttttaataagaagaaaataaagaaaaatctttggatttagaaaagatcattgctttcttattcatcaccagtcaacatatattattttatataattctctaatcacctatgaggtaagtattcacaggtaagaaattgaggctgagacattaagtagcctgctcaaggtctgacagcaagtaggaaaacccagattttaccccattatctgtctgattttgaggtgcgtactctaaacactagtatatccccagttccctgtataacttgacttattgaccatcactcatttttatcccaaccatttttcctctctcggttgtaagtcacatgtcagtaccaatcagcagtaaacaaagatgtagacgtgaaggtaaagttccattggctatagtatttacacacaacaggaatgtttgacttaatgcgagttaaggcctctggtctactcttggagggggagagcagcccctcttctgaggctgaaggtctcctagaaactctggcggttggtggcaggactattttccaatgaacagttttcagcctcagacttcatctttctgtgaccaaagatatttccactctggcttattaaacctactcagtcaaagttaaatcaatgttatatgacctgctgagtgaacaaacacttttctccccctttgtttctttatccctgaggcttacttgggaaactaacaccatttttctttgagatttccaaaaggcacactggaaagtacctcaaatgtctcacgcttaataaattcttcatgggggtggggaggtggagccaggggtagtcacattcccatcctggtcgtattaaattaggattgttcttgaataatttcagcattgataattctagaaatttttcaacagtagaaaatgtaagtaagattcacatcatcttcagaggcaacatgttttcttccgtgaactgtcaggaaatacaaagccttttgtagtttagtatgtaaaactgtagaggggttgtttcattttttttgaacacaatgactataatgccattgtgtatgtaattgtaaattgcctaataccattttctcctttctcatagcatgagatatttttaatgtattgatatatatatatatatatatgaaaacacatcctatttaaagaattaaaagagaaagaggcctaacttggagaagttctggatgaacttccagatggattcctctgggggttgggggaggctcttcgtcaatggcaagagaatctttttctcaattatttgattgccattcaagcctttcggggaggaaataagcaccacacgtggcgtgtagttattgcacacagacgttaagactgaaccactacctgctggtcccttcaccagcgttacaacccgttccttgcaagataggcaggccgttagccaagccccaaagccagcaaacccagacacctgaagctggcgctgtgctagagaacgcgcgacgcgcgcggctggagggaagggaagcggatgaaaccacagacgtgcagcgagggtcttctcgtcttaggagggtggccagtgtgctcagctcttgcgaaggtcgctgatgcccagcgaaggacattcccacatgtgcacgcacgcagagtaacccgcgcacactcacacaccccagtttcagaaggcacactacatggcaacctccttgtcccaagactcccctatttgcgggcacattcagcaaaatagaccagcgcttcctctctttactcatcttccaagtttccaaacctgagactgggtgactcttgcctaggctcacagatcgagccttcccagtgttgcactgggaccctagggtggccctggggtgcccaagagatgcgcaagcatctcgcgccttccaagcgatcagcgaggaaaaacggggtccaaattcgagtagaatctgcgggttgcgggaagatggcctgcgagtgcggtgg

SEQ ID NO: 5144 - DNA, 2300 bp, Homo sapien
agagaaagagaaaaacaacccctgactgcaagcaagtggtctggcaccatcagccaagcattggtatcctcctcttgaacatacaagttttacaaaacatcaggtaaggccactctgagatcatggtggatcaaataggaccgctccaaaattatgtctgaacatgaatattgtacaaaccacaaatatccctttctatattagatttatcaacatacccaacataaaattaacccagcttcctaatagcattccatctagagtaaagccccacttctgtaagccccaaaatcacctcagtcaagcccaaatcatatctaataagttatctccaatgctttttaacctttctaagactttcatactgagacgccccacagtggcccatggagtgtgccccctccctaaaaaagtaataaactcaacttgttcagttccagatgtgttcatctggggttttttgacaggaatgttatgttgctccactccaatcctgttattacttgtctcagatcatcgaagagcagttcccctggcgtaactttcttggccctcccaataatcactgatgtctaccaagcatttaccacttgccaggcccttcatatggattaactcatttgatccccacaatgaccccgtgagtagataggtttagtaccaaatttacagaaggacaaaaggcacaatactactaagtgacttagtgagccgtctaagtcagctggttggtgggtacagggctctaacccccacagcacactgcttccttccacagcattcatctgccacactatgctcttccgcttcactgaatggcgtgtggtcactgtgtcatcagccaacattgaaggacactataaactagaataaactgcaccaggaaatcattgctgggtttcctgtaagatgtgggagaatgctgacccacaggagaaaacaaaaattctctcagctctcagtattggaaataacttctaagcttcttgtgagcagttagatatttctcaactaatggagacattaatcacataatttgcaatttttcaacttgattttaagaaaagtatgacatgattttaacttgactaaacctaaccaggaaagatattccctttgtacttttctttcaatgttactaatgtggtcaagggagcattcctgcttggtattatagtaatatgactaattaattctatatctccctttataacaaagaaagagggagtttgaggcagagagctttggaaggcactaattaatatctagagagatttcaataacatagttcatcatattttagctatttttgtaattactttccaactatagccaattatacaggctttccatttacaaatgatacaaagtttctttttaaaataaatttatttgagtaaaaatttgaggacatttaaagaaaaatattaagtcaatagtagtacaggtggtaggacaccaaacaagcaaacaaaaatcatgaaggtgttttgggaaaccccgacttcatttcttgtgttggacgctggaaagaggagagtttaattcatggtcattgatctcaagagcacaggtccttgaatttgagagtgcatgcattttaccttctaatggcattcctggttttatcattcctctcctcctccactttcccttcttccgtcttatcttgctacccctatatttttttcaagaaaaaaaaataaccaacaggggtggggtgcggtgggggatggcacaataaggaatcttcgagtagtaaaagtgagcagggctacccactggcccagggaggtgcgctaaactcgcagaaagcccagagggtctgactgcctctgatcctaggaagttttaattcaagctgggcagtaacggggtttctaaaattgcttggattctttggccctcctgcgtcccggcttcgggtcagcatgacagcgtgaaacgtgttagtgaattaaagtacttcggtggaaaagtaaggcggagctgccagagatgctctcctcctccgcctttctggctgtgctgcaccttgaccttcagtcctcctccctcctctttccgccccctcgtgatggggaagttcttgggaacctcacagaggcccgggggcggggataccggacagggatggagactggccccgagattgggagggggatgggcagcgctggagaataacgccctggagacagggcagcgcagccccagactccctggaaaacccagcagtctggaaaagctgggtttggactcacccctctttgaagagttctcaggaagtttgggggaggggc

SEQ ID NO: 5145 - DNA, 2300 bp, Homo sapien
attttgcaggctttggttagaggcctttatcttcaaaagagacctaggagggaagacttaactgacctttccatgtaagaaagtatatcacctactgagatttgtctttcttgttggcacctacctacaaaagaaatgggaggctaaaatcagcttcaacttgtgcaaattaaaagtaaccttcaggctaatgggttttaaacatcacttcttactgagcaaaacatttgtgtcccaaaaaattaaattaccccctcaaaactgacttctctaacaaattacaacattaaattttttaaagtaaaattgtaattcctacaaaacaattcccctctccctgagataaccatcctattactgttagaattgattccatctttaatggagttttgcatctagttctggggtccaaaaccaaaaacaggagaagaaaacctaaaaactgtcaaagaaatggcagcaaaattaaacgcctgaaaagtaaaccaaatctttgagaaaactggaactccacgttagagaaataaatgctttatcattttatcaaacactaaattcaaggaatatggtagagtccttaccttgaagaaggtgaccagctattttcaatttctttggagtggcgatcagaaggaaggaatgaaaaagattaagcactgtagtgagtggtggcttttgtactaactctagcaatcactaaaaagtgactatattttcaccaattgaagaaattttaatacggtcctattgaaatggggttgtaattcataaatgtattgttgcatgcattctttgtactgagaactaaactagctccttcagaagtgaaaataacaagggaaacagtaaaacccacttgaaaagatgggccatacatttacaagactagagacaactcataaacacaggttgacagtacaaactgtatactttgaactatgagacaatttgaaggaaaggcacaattatcatgaggttatataaagctaatgtgttatatttggtctaaaagacaatgggctaatataaaggagaggttcatgatgaaatattatattatcctggcagctgtctacaatatggactaacatcaggagaagcacaatattaatactaacactaataatatcaaacacagaccactactaggtgtcaaggctgatataaacattttcatatatatattaatctgttcaatcttcacagtcatgttttgaggccaatactgttatttcatttaacagatgaggaaaccgaagcacttaaatgatgtctgattttcacaggaagtgtcctgcatagcaacctacatgcaggtaaatacaagccaagtacatttcgttttcaaaggaggcgttgatcatccaaagaagtcaagaatactcatgctgctatgtgacatttcttattgtttgtaaatgtttttgttgtggaacacttcaaacatatacaaaaggagaatagtacactttctttctagtgtactattaagtgcactattaaagatcgaaccccttccattcacatgcctaatctagatgcatgtgctataccaccactcatttcctgtgcccctccctcattattttggaataaatcacatattttatatcatttcatcatcactaaattgttcggcatgtatctctaaaagataaagacatatttttccttctaaacatgaccacaataccatcatgatactttaaaatttacaatgattgcttagtatcaaacatcaatcagtggttgaagttctaataatatatcttactttaatatttgttgaaacttgcaatgtgctagcattaggtactttgacatatttcatttaaattactactacttgaattgccttttccccactttcactcctactaacaggaaagactcggtctctcccagaggattcagggcctccgtagcgggctgctgtcggcctccctcccggcctcctgctcctctgcgcggtccccagccctctacccggcgggcagaggctcgggcccagcgccgccttccgctgggatctgttcccaggcccagggacgccggccccaccccagttgcctaggtgacgaggggccgcttctctcggccgagattgcggcgatgtcgcaggggacgactccctgggggccgaccccggcgggaaccacgcccgaatcggaggtacaccgcccctttcccttcccggtaccggtgccggtaccagagacctccgagcgctcattcccagtccgcggagtctgcggccaagccaaatccggtctccgaagaggcgccgcacgtctggcccc

SEQ ID NO: 5146 - DNA, 2300 bp, Homo sapien
agagataattaaagagtgatgtgcaagtcataatttggctaatgttaaagatgggagactgcgaattgtagtcctccatggtgcagagttgtgatattactttaaattattaaaatagttttcgacagctttcagaataccggctctttggcatgggcttttattatttattgtaattagaggatctgccattttctttcgtttatctctgtgtgtatagaaacgagatagattttgccttttattacttccccatattctgaatcaaaaatgtggtttagataatgttaagtgccctaattcttactgcagcggacgcagacgttatgaaaaggcataaaaatacacacagagggtctttccacctcaagtcactgaatatgaggcatttgtgctctgccgggtgtattaacttcagccatgtgaatataattttcattaaagtaatcctgtttcaactagatgctgtgactagaggtgaaacgttgcgaaagcgttaaaaatagcttactagtaatttcaacatcctgtaattttatcacagatcaagtttcaactgtcatactatacagaccttattccccatatagtacatgtttacttttttagcatgccagacccactttggaaagattggtgccaatataataaaagctggagggggggtgtgctggaaggagtgggaggagagcggggaagggggtgggggaacgtgggggaagcgagtacaccattttaaatcaacactgcgaaaatgcaatctagcctggcggaggaccggcagctgggtcggagcttgcgagggctttgcagtctctgcctgttccttgttctgtcgctcttaagtttctctgtgtttgcataatagccgtgcatgcaaacctcgcaatgctccagggctccagaacaataaatatacacatttaaagcctttattgtcttacggttcatgcccccggttttcaacagcttaatttctggttgtatttaactagtttgcaaatggattttttcagtttcaaactattattgaggaagctcccctcccttttttggcgggggaggggatgggggtggggtaggagtcggtatattattcctgtagcgctgggttatataaacacattatcatttgagagcgcccttggcgtccatcagcattgtaaacacgtactagtgtatatacttcaaaattaaagaatgcacacgcagaaccgggagcctgaattcatattctgagcagactcgcttctcgcatttattgatttatcatgcatcgtttattgttccagtccctaaatgcagtcgctgtccgttcaatattgtttgcgaaatcctaagatgtgtgtgcactgctcacttgtctcttttttttttgctgagtatttttttgcgaagcgaacaaatgcattaatatttatatgtttatataatcgataacccacttttcccttccatgtaaataggcatcaaaagataatttaacagattagttctcgaaaacatggcagtgaggaagcgtaatttaactatcaaacaaatctacatgtctaataacagcaaatctgctaagaagcattagaaagaggagcagcgccccggaatctctgcaggaaatgttctttatattagacatatacaagcaggtcctgtcagatgcacagtggagctcgctacccctcctctcctccaaaaatctcatcagacgatatcccagacaggagcggttagagagagaggaatcacatctccacacagttttagggtgctttttatttttacaaatcttcttgtgtgttttttgccttgatccatcctcttcccgccgagatcgtatggcgcctttctctcgattatgaatttgatcaatccatctttggaagaaaacccacatagttttttcaggagctgaaaattgagtcgttatagaaatattaggacatattttcaatcatttcggtgcccgaagggaggcaagagctcagttttatattgagacattacgccggctgaaggcagagaatgcgtttccctgccaggacctgatgcaatccattcaagccaacaagtttggagagaatgttgagttcaatcaattcagaacgtcgagatggagcccaactcactccaggtatttcgctctcctccgctcctccgatcccggcaccccccggcaccccccaaccccccagctcacccacacctctgcacccacccacaccccccacaaacttttcaccaaacttttaccctctgcatcccccaaaatcatttttattgtttaaaaaaatccctgcact

SEQ ID NO: 5147 - DNA, 2300 bp, Homo sapien
tgccagtaaccatttgtatggtctgagacaagtaatttcatctctgtctcagtttcctggtctgtaagatggggataaggatcatgccttcctctttggcttgctgtgagttttagtggaattattgtatgcaaagcactcagaagagtgacttgtacagagaaagtgctcagaaatggttagctactattattattcacttagctactcttattattcatgtataatactgaaaacattcatgcaaagagcatttactgaactctgtgataagccaggccagtgaatcatatacacacgtaaaagtaacagtacgtctattgctttgcactgttttttttctaataaaactgactgaagccagatatgctatcagtaagggtactgctctctccctagcagagctttttcttggtagagatcagtctcacctaaagaacaagagctggtctaattctggagtcttaggatttaggttctgtcagtaagtacatagcactgagctttcaaggagagggcaggtgtaggtccttgcagggtggctggaaggaggtggggctgtctcttacatgagtgaattaaagtccgcagacccatcccactcctgcccaccagcacaccataatgcacctgttttcactcactgacctagcaaatgacagattatgactctagagggacaaagatgtggcctggggaccagaatttttgctgtccccaaagccagtccttcaataccaaaactttacctggagtcttctgaatccaaaaggtctctgattcgattgcagaggcacctacccagtcctttgtgttccattccccccaccccgtactttgaatatttgtgctcttcagggtgtttgtgcattgcatgtggggactagattatagccttactgagataccaaaggcctttggtttcctgtctccattcccagtgcaaactcaagtcaccagtttatgtttccagagcataagcataagtagtaaaggtgaatgcagttttacaagtgcccagtgtgacaagtataccacgtgtgaggttggcgggaccagtctatgaggacaggaaagaacagtatgtgggcatctttatttccattagtcactttttcattcaacaaatacatgttatgcaatgcagccttttgggtgttgtgctgggcagataaaagacacatcccacagggtcttgcccttaaggattctccagtctggtataataatatgccaaaaaccacagctaaagtacaaggagtacagtgatatgttccataagagaaggagggaaaaaaagttcagaggggagagtaggagaggaatttgattttgagtcctgaatgactggtaggatttgcctaaccatacctgaaatacgcaagtacttgccttactaagaacaaagggctttttctcttgatcaaatcccatttagagtttacgtttgtgtgaccagaatattaggtgctagtctgttctaaatttgtaattctcagaatctgctgggggagtacatgtgcttctctgggttctgaaaacagctcaaagaatggagaaaataaacccagtttggggatgacttcttgtcagttcccggaacctttgcctttatttaaaaacagcatgttcgatgcaagttctgtcgaaaaggcctttgggatttgaaagcttttctagaaataaatgccttttaggtctaagtgcttttcaccaaaatgctaggaagggaagatcatagtaacaagtcttagaacagaggggatattgttttgtttgttttaatgaaatgcctgcgacctgctaccccaagttttgtttgtcagctttctgctcagctgttattttgataagggacttgaaagtacatccttccctcgcggtcattaaagtcttagcacttgggtcagttgtggaaacacttctgtgctacacaaagtcttctaaacaaaacaaatagtccatgccctggctccaggctgcggaccgtgtcaaattcatggaacgtggcatcgtgctctgacaaggagagcaagaggtcaggatccacaaaacaggccggatgaaatcaccatctccgtgcggggaggtggagagagcagagccctccctgccagtctggcaactccagcaaagtcctcaggctcatcccacacactcggtgctagtcactgctgtgtgtttacatgagtaatggagctgccgggggaggggagttgtaagcagagcgctgagcctcgcagctcgcattcggagggaagctgacatccacaccaagtcgagacttccagggatgtggc

SEQ ID NO: 5148 - DNA, 2300 bp, Homo sapien
tttcccctaatgtttctgtaatttagatttctttgtttagagccatgattggggagtaataaagctttacagaaacttcacgagctgattgacaagcctgttttcaagtaaaactgctgtgtggaatattttatttcatagcaaaacatgtctgtgtatttggttttcttctgactgtcttttgaaatatgttaccaggtttcatcagagcaagaaaaagaacaagagactttaataagccagaaaagcatccctgagcctctcccagcagcagacatgaagaaaaaaatagaagggtatcaggaattttcagcgaagcccctggcatccagagtagacccagagaaggacaacgaaacagaccaaggttccaacagtgagaaggtggcagaggaggcgggagagaaggggcccacacctccactcccaagtgctcctctggccccagaaaaagattcagccttggtccctggggccagcaaacagccactcacctctcctagtgccctggtggactcaaaacaagaatccaaactgtgctgttttacagagagccctgaaagtgaaccccaagaagcatccttccccagcttccccaccacacagccaccgctggcaaaccagaatgagacggaggatgacaaactgcccgccatggcagattacattgccaactgcaccgtgaaggtggaccagctgggcagtgacgacatccacaatgcgctcaagcagaccccaaaggtccttgtggtccagtcgtttgacatgttcaaagacaaagacctgactgggcccatgaacgagaaccatggacttaattacacgcccctgctctactctaggggcaacccaggcatcatgtccccactggccaagaaaaagcttttgtcccaagtgagtggggccagcctctccagcagctacccttatggctccccaccccctttgatcagcaaaaagaaactgattgctagggatgacttgtgttccagtttgtcccagacccaccatggccaaagcactgaccatatggcggtcagccggccatcagtgattcagcacgtccagagtttcagaagcaagccctcggaagagagaaagaccatcaatgacatctttaagcatgagaaactgagtcgatcagatccccaccgctgcagcttctccaagcatcaccttaacccccttgctgactcctacgtcctgaagcaagaaattcaggagggcaaggataaactcttagagaaaagggccctcccccattcccacatgcctagcttcctggctgacttctactcgtcccctcatctccatagcctctacagacacaccgagcaccatcttcataatgaacagacatccaaatacccttccagggacatgtacagggaatcggaaaacagttcttttccttcccacagacaccaagaaaagctccatgtaaattatctcacgtccctgcacctgcaagacaaaaagtcggcggcagcagaagcccctacggatgatcagcctacagatctgagccttcccaagaacccgcacaaacctaccggcaaggtcctgggcctggctcattccaccacagggccccaggagagcaaaggcatctcccagttccaggtcttaggcagccagagtcgagactgtcaccccaaagcctgtcgggtatcacccatgaccatgtcaggccctaaaaaataccctgaatcgctttcaagatcaggaaaacctcaccatgtgagactggagaatttcaggaagatggaaggcatggtccacccaatcctgcaccggaaaatgagcccgcagaacattggggcggcgcggccgatcaagcgcagcctggaggatttggaccttgtgattgcagggaaaaaggcccgggcagtgtctcccttagacccatccaaggaggtctctgggaaggagaaggcctctgagcaggagagtgaaggcagcaaagcagcgcacggtgggcattccgggggcggatcagaaggccacaagcttcccctctcctcccctatcttcccaggtctgtattccgggagcctgtgtaactcgggcctcaactccaggctcccggctgggtattctcattctctgcagtacttgaaaaaccagactgtgctttctccactcatgcagcccctggctttccactcgcttgtgatgcaaagaggaatttttacatcaccgacaaattctcagcagctgtacagacacttggctgcggctacacctgtaggaagttcatatggggaccttttgcataacagcatttaccctttagctgc

SEQ ID NO: 5149 - DNA, 2300 bp, Homo sapien
gtcccagctgtaggggcccagaggggaggtgaacatgcctgatttttgtgggacaactctagcccacaaactgactggctggtgagtcttgactcccttccaacacagatgcccaggcacctccagatcattcacttcgcacgtgggccttgtgaagggatttgtgaatatccaggaagaacttagaggaccccatctgagttcggatggtcaggaaacaatctgggcaaaaaagaggcaggcatttcaaaggaaggggcaaggaagactggcaaacagatggcaagggatgcccctctttttcataaaactctccaaggttcaatcaatgcaatgtatagtgaaacttcaatagatctttcattttgacactattaaacaatccagagaagtaaacactgttaaattgactgtatatatttgcttcttaaaactacctgtatcactgtttgctcacctaatttatatacaggtagttccattttctcccagttccttctcgtctttttttttttttttttttttttttttattaaatggtattgcttttgtttgcaggtctttttgtttttgttttgtttttgaggctgactgactgtcctagttgttgtgtgtttgtaatttttccacatcttattttgagcagctttgggtggtaaagttattgtttacaaattgaagcaactgattctagtggaacaaatgaaaaagaaacagtcaagcacacaatagtgcaaagaacgttcctttgtagatccgcaacttaaggattttgttcctcataaatggcatagttgaaagagcttatacactgcttacccagccaaatgctttgctttgaagtattgggttctgtgaaaatattgagcattgtacttaccttatctaggctgtgaaactgtcctacataccagagaatcataaaaacaaaaacctcactggcagcaagctgccgaataacaacagagtctagaggacatatttgtgggctgcacagatattttaggaatttcagaaattagaacaggagccaaaatgatttacattggcgttggcactgattcctttaaatggtctgggaaagggggttgggaagaggatggagctcaactggccagaagaggagcagctgcagtcctgatagcttctctagcctcggtcttttgagtgataagtagtcatgttgttttcatccagttggtttcttgtcattcccaagaagaatctcccaggccacatctttggggataactgacatactggattagccttttcaaaagaaaagtcatcctatttggttttatggggtgtgagttttgtgtgtacacacacagaaacatgtaaggtggtttgggtcatgtttttaaccacctggcaatacagtccactttctggtttcttttattgtgggaagtaaatggtcaagctgctcaggcagtgaaaagatgtggagaatgtccgttgtcattcttgccactgtattccatttgctaccgagatataacattaaggtggacacattttctaactgtattaattaaaagtcaatggatacagagagtggattttctccccaagtcccatccctgctgaagaccgcttggatgaactccccaacccactgtgcccctcccgcaacactaccagtagactttagaaccatagttaactaagtcttttacctctgagatacttaattctgggaaaattggtgacaattttcaacttctaaataggtaactcgactgcaaaataatcaaaactgataacaatgaaactgcggctcttaaacaaagccatgcatgccgtgcatttgtattgaaatgtctccatgatatgaagccaaatattcaatgtaacatacttaatatccaaaggtggaaacaaaagaatgtagagatccagtgttaagagttccatttgcttcaattaattatttaccttcctgtggaataatatatatatatatatttaatagaaccatagatagactagtagaatttagattataaatgtgtgagtgcagattatcctgctattgcacaagctagaggggggaaaaatctcaattccagctggcaagatgctagccaggacacatataagaaagttgcactagattgaatggtcacagaatcggaggacatggaagaaaaaggaaacttcggtggttctgcagcagacatgggctaggtcatatgtggtttctatgagttcgtgtctcaaaaaaaaaaggagggggggcatctgtccccggtggagctcacctatttggaatatggggcatttgttttttccac

SEQ ID NO: 5150 - DNA, 2300 bp, Homo sapien
aactttttaatcattatttgagttgttcttttcctgtttcatttgtttattctttaaatattttttagccatttactgagtactaggcaatattttaggtggcagaaatatgggggggaggcagggaattaccaagttccttgttttcataccctaagaggagtcacttatataaacacataagcccataaataacagtcctaaaattcaccttagtgttttctaatcacttccttttttgagaattgaagacgtgagaactattgttgatatttttccacagtgaaaaaacagcttgcatgaactttctgacactctaagaaactttacttgtattaatcactttttcttcaacacgcatttttttgattaaaagttttccattaaattattttggatgataacatatagaagttaattcaaattctgcatttcatttgcacctttcagaaacctctgatgttttaaaaatgtagtgatatttatggctaccagaattaatggagtatatacagtagtatttatatatttttgcattatattctcttagaaggatataaatgattgagttcatcagattttctatgtagtggtttcatatgaaatgataccttggtaaaaatatccaaattcatctataaaaatcaaatttcccttatttaaagattgaatccactttaatcctttatacaaaaagtagtcagaaatgtttattaaaatggaattggtggagggaagcacaatttcagtaacaagaatactttttattttattttattttgtaacacaatagagggtttttcccctactatgatttaaccttcaattagtctgataagagtagcatatcaaagattcttcctagagcttaagtcattctctgcttgtgattataagctttatatttacagtggatgattaggtgcatcgttgagctccaaggataccatttagggcaaaatttgttacataataaaaataattacttaaaagaactaattcacaaagtttattaccaagacatagaagtgtaaaaagactctattatgataaaattaagatactgggcgtatagtcaaaagtaacatatataatgtataattttatactctattatgataaaattaagattacagtcctctaaagacactcacattcctagatttctactgtgacaggatagactgtctctaagatggttaatgattgttatattttgtgatactctaaaggttcaaagttatgttgctgctttatacaacatacatttttcccctgcggtgtttgaataagaatttattccttcagaagggaattccttgtgtagtatatatggtgttcacctgcctgtatttatccatttttcagggaatggatagcttttcttcctaaccctgctacttctgtaatgactacataatatccatattgtatgtatatgtgggttttggtgtgtgactgtatagcctctcttcacactttactcagtgaagaatttctttctattcttaatcagcctttattactaccagccaaaatattattgtcacacattacagtaggcttaaccatgattctcttgaaccactatgtacagtgcagtagccactatcctggagtgactgttagacacttacaatatggctggtccagatcgagatgtgctgtaagtgtaaaatacaaactggattttgaaggcttagtatgaaagccttcaacatatttcagatatgctgagttacatgaaatacatcgttaaattaatttcaggagtttctttttacttattgtggtttttagaaaattttcaattacatatgtggctcacattgtacttatactggacagcattgccctagaatagtgtaagtgagtcattatctaggcatcaaatctctatctttgtgtaatagatagttctagtacagactttatcccccaatattccttggtcaaagccacatgtagttgccagcttaccatgtggcatggctgtgcctgtgtgtgacttgggaatagacttctcagaatcttctaagtatagaatcaataagtgtcatcataatagcattctagtatcactcagaaaaaaggtttagactatcagcgtgaatgaaaccattgtccttgtggtagtgttgtacttagcactttaaaaataatttaaacattttaaagattatattattttatggatctttagctatgaactttgtaaatgaacgttacgtacaaaataaatgttaatgaggaaaacctgttttgctacagtaaacactaagttacggttttactgcttt

SEQ ID NO: 5151 - DNA, 2300 bp, Homo sapien
ttgttagtcattaccaggaatactgcatgtttaaaagttgccaaataataaactataaaaatagctggaagttattcctgggattttttcaaactatagattggccatttatatctttaaaagtctgtgctccattttttaaatctctgaaactgatggatcttccatctgcaagtaacatctgctgctgatggacctcttttgcagtcttaagtatattttattgttagtaacaccaccacagtctttaatgctaaaggtagttcaaaggtagttcgttgtgtctgaaaaagggtaaagccaatcttaacatttgctaaaattgcagaattttgcgtatttatttgataaatatatatctaatacctcctacattccaggccaatactagattaagaacacaaagatcacccagacagcacccattctcaaggagttcatgctttgaagtacatttttcccctgtataaccagatagtaaaatgttatttatagttattaggtacaaaagtgggggagggtcaggggacacagtgacgagtgcactataagtgactctttataaagaagaaatgaaaactaaaggtttagcagattttttttggaagaacagtcatttcagaaaattacacatataaataccttaaaaatgtattaaaggaatgacaaggagaaatagtattggcaacaaaatgaccagggtattttatgctttctttaacatgcctatgtatatattggttaaattgagttaagattgccctagttttgaagctgatatctgtgaaagttgcggtaactctctcaggccatttagatgctaaataaacactgagagattctgtctcattaacatacattaacataaacttattccaaattcttattttttttcccataaaccttgcacttattgaggagattttgcaatcttctcttggctcccctgcagtcttttatttattttaaaaagaaattttattgtgtatatttgaggtttataacacgatgttacaggatacatataaatagtaaaatgttactataatcaaacagattaacatctatcatctcacatagttactttttgtgacaaaagcagctaaaatctatttaacaaaaatctctaacatgatttgattaacattcacctcatgtttttacagtacattatatctctaaacttattcatcctacatatctgctattttgtgtcctttgacctatatctccccatttcctctcccccagtccttgcccatggtaaccactgtttttttctctatttctatggttttgagctcttttttttttaatattccacatataattgagaacacacaatattttcatttctatgcttggcttatttaacttaatatcctccaagttcatccgtgttgtagcaaatggcaagatctccttttttaaggcagaatggttgtccgttgtgtgtgtgtatacacacgtagcttattttctttatctgttttaccattgatggacataccttggcgattgtgaataatgctgcattcttatagtttcttcaatatcttggctattgtgaataatgctgcaatgaacaggggagtgcagataacttcacaaggtaatgattttactccttccagtataaacccagaagaaggactgctggatcatgtagtagtttcccttttaatttctttaggaacctctatactgctttccataatgactccgccagcagtgtactagggttcccttttctccataccctcgtcaacaatttatctcatgcctttttgataatagccatccttatgggtgtgaagtagtatctcatagtggttttaatttgcattttcctgatgttaaatgctgattttaaatgttacataaacataaaagaatggtataattttattttctactgagttaaatttccaacattatgaatgcccttgtttttagtaatgaagcagggccagactttcagataaaggtggaagtgtatagttgctgtacagaagaatcttctataaccaacacaccaaaaaagctagctaagaaactcaagacatctataagtaaagctacaggaaagaaaataagttcagtgcttcaagaagaggatgatgaaatgtgcttgctcctcagctctgctgttttgtaagtttttaatactgtatttatggtgacataattatacatttgtgatattttaaagtattatatgtgaagtgtatgtttactttataaatggaaaaacatcaggaaacaaaaacaaaacttagttgtttgacatttactcaact

SEQ ID NO: 5152 - DNA, 2300 bp, Homo sapien
atgaagcatacattaaattgttcttaagtaagtacacaacactgttggtgttctgcgggatataaggtagaaagaaggagagaaccaagagttacctcagctatgagttgcctctaagctccaggcaccaaatcctcacagtaatcctgtgaaattaatggtgatatcaattctatttcactgataagaagaatcagacattgtccctgtttccaaaagcttataatttatgaaaagatatgttgcttataaatagctctattagaatttagtatgttatagtgaggtattcatgatttggatggtactagaagtaaaaggaggtaaatagtcattttttgggtccttaccatggacataaaggaataattattttctgaatacaattatcaaggaaactttgaggcaggtgtggtgtcccagaacaagtgggttttatcaagtgagaatgaaagatatggcacttcagtgtaagcaaacacactggagatgtgaaaatccaagaactattttcgggataccaatcaagcatttggctgcaataaatttgtaaagcagaaattgaaagataagagtgcaaggagtttgggatcagaccacaaggattctggaatgcctatttcagtaaatggaaaccaatagctattttttgaaagtagactgaaataaaccatcttttaagtagccatatccagccacagcatgcagaaaaaaaggtacaatgatagtttactagtcaaaagtccagcaaattaacagactgctataaccaagccacgatacctctaaattgaggcagtaagcaacctatgcacctcatcctaacgacctactgcctacccaatccagaaaggtttttacatcctgactccattgggaactgtacagaagcctgggtattttggcttgttcaagcataaagaacaggcaatgtactaggtatttcatacccaaacacaacttagaaaaaagtttttgttatattattggaacagtatggtaatagaacatttaaccagttgccaatattctcaggattgtgtggttttaaaaaaacaacaaatgatattagtgatttcttaactgtggttcctcatctaaagcagagtaaccattgattgaattcttccaagggtggtacaaaagtagcactattctatatgcagcagttaagtcaatgcatacaatgaacttcttaggacattaggacttaattctttcctggaacccgagttttaaaaggctttagaatgaagtaagattatttgacttcttaaataatttcactggattgagaaataacttaaaacttcttgcagaatgattatgtacagagagcactttgagtgaagatctattagaaaagccctaaagaaatccacacacagttttgatttcctcatttctctaataaaagcttacttctttatatgatcatttctatgtctgcctattcttaaatattttccctaaaaactggttatttcaattatttactctcatctttttaataccctgctgccaaataaccttccccaaatacttgtttttatcatacttcttccttgcttaaaataaaatgataaaacataacaggatatagaatattcaagatttttttaattccagaattcaataattaagagaaacaatgtttttatatgaatgatgaagaaatatacatgtgtatatgtaacataaaagatattttcacgggtaagcaaatatatatataaagccctgtaatagctcaccatggcagcttggagcaatagttaaaaaaaagcacaggttcttttttggacggagtgggagatggaggtacatgggtttttaagtcacctggattcatgacctagccacaaaggcactgtgtatccttaaagagttacagcctttaaaagaggtttatatctgatatggtttggctgtctccccacccaaatctcatcttgaattgcagctcccataatccccatgtgtcatgggagggaccatcaggaggtaactgaatcataggggcaggtttttcctgcactgttctcatgatagtgagtaagtctcccaagatctgatggttttataaagggcagttcccctgcacatgatctcttgcctgctgacatgtaagagatgactttgcttctccttcgccttctgccatgactatgaggcctccccagtcatgtgaaccgtgagtgcattaaacctctttttcttaatactcagtctcgggtatatctgtattaacagtgtgaaaatgaactaatacaatatctttctccatttttaatgtgata

SEQ ID NO: 5153 - DNA, 2300 bp, Homo sapien
ctctcagatatttgagatggtaaaacgtagtacttctcactttctgggaactgtaaaataaatagattgatagagaaatcctcaagctaatgaagccactgcatatgaactctttaaattttgtagtttccatggatgagtatattttatgtgcattacatacaccagagaaaactggctgatgaaattagcagtaacaagtaaggacttgaggataaataaggaaacataagtcctactccaaggtattttaatcatcatataataattaagtacttaagcaattcctggggacctctcccggtgtataataaaaacaggaccacatcataacttcttctcccaagagaaaggtctcttgtaacaactgtattctacagataattactaaatatgatcttgcctaatctctttcttctagtatcataaataaatgtatctccagttaaatatctggttttaactcatcaaatactcctctatcagtgtccaattctaaactggttgactcacctctgttttaatgaagtgctggcttctacatgtattttgatctgcaactgagagctgtatgtgttgtaagtactatgtgtctgatgatgggctcgcggtgtgtttttcttttgagtcaggtactacagctaggctcatgcagcctcatactgagtaggagataattataccacaaagtggtagcataagacagagatgtgcattggaggaaagggcacataatgattctgaaattcagacctgtgtttgtagaaaacgaggtgagctccgtgttgataattttgaacacatattttattgttgtaaggatatgggtcattcataatgcaaggggaccatcattcccaactgggaagcttctagtatcacctagtccaaaaggtcttaaagaggcattttacctatttgaggaagggtatccattatatttttaaagtacattctcaaaccaactgcttttaaaagggtcttgcagttaaaatgaccacataatatccactacgggataagtgcaagattggtgcaacattgggacaacagacccagacagggtctgtcccaggcaaatgaaaaaacatgggcacctatttatggaggaaaaatgcccaagggtttctaggcgatgagggctggagggttgatttggtagactcttcaagaagaggcttcctcttgccttttcaagggggaaataaagataaactagggacaatgaattttaaggacttttcaagggtgtgatatctttgctgctttcattttgatttttaaaaatcccatgtttccctttataattaacaaaatccatgaattaaaatgggtctttgtgctaatctttagggcagcaagaaatgaggctcttgagaaatagtaccccattttgctatcaccttagatgttggagagggaaagagagggcgagagagctgaaagaaatccttcgcaagaaaacaaagtaagtggacagagtagttggcggggaacatctgggattataaacactgggggcaaagacaagaccttgtgaaatgcctgacatagtatctcacgaacctgatgaataaaaccatgatatctgggtgaccctggtgacaacgctgggaaaggtgagaggaaacagagagcgctgtgtttgagagtaatgttattggttctttaggaacgagaccgtgggctcttagtgacgctgtgggttcctgagttgtctgggagtacagggactgcagcctcgagtctgtccagctacgatcactttggaaggccttcggtgggatgcgggcagaaagctcccagtgcaaagggcgtgccacgaaaaccaccagccagaaacctgagctgggacaggtgcgctccgccgccgaagctttccccgcggcccctcccactcccgtcccaggcccgcccacatccctgtccgggacttaagtccggcaccgccgccctctcccccgccccgccgcgctagagcctggggtctcggcaacttccggcggcgggagctgcagagcgcaaggcgcgcccactgcgcgtgcgcttcggcccggctcctcctgcgcccccggcccctgcgactgggacttggtacggccgggcggttggcgtcctctgcggctcctgccaggggcgggcttttcaaatcttccctttgaaggagtggcgacggcccggacagttcgcgttggagatggaggggccgagcctgaggggtcctgcgctccgcctggcggggcttcccacccagcaggtgagttgcgggagggaccctgccgcggaaggtgagggagccg

SEQ ID NO: 5154 - DNA, 2300 bp, Homo sapien
ggtcctccctacctcacaggtgttcaaagattaaatgaggtaattggtggtatacacaagtgacactttgagaaccacttaaggtcctaaatgcctgttgaccaagttgaatttcccacaatactcagctttaggccctgcacagaataacctctccataattatttgataatattttatatttttagggtgagaaaaggactttgaaaatctccatcctctcatttaacaggggaggaacttaggaccaaaaaagaagtagcagctgtctaagaaatgggaggagctggctgggcgcggtagctcacgcctgtgatcccagcactttgggaggccgaggccggtagatcacctgaggtcaggagttcaagaccagcctggccaacacggcaaaaccccgtctctactgaaaatacaaaaattggccgggtggtggcagggacctgtaatcccagctactagggaggctgaggcaggagaatcgcttgaacccaagaggcagaggttgcagtgagctgatatcgcgccactacagcctgggagacagagtgagactccgtctcaaaaaaaaaaaaaaaaaaaaaaaaggggcgggggggaagggaggaccagagcatgcttttgttatgttttgccatgaaggcagtgggtgtaagaggttaacctgcaggcacctcacaagatgacggagataacttggcactccaatgagtgtatctttcagactttaagattttgtactaaataaattgattcttggaatagtcttgagagcgagtcaaaaagtaacttcaatgagatataatattttcaaagcaaacacaccccagcacaatagcctatctccatttacgtagaagttagtacatattaattcctcttctccttcctgctttttaaatgtgtgtaggccccttttttatggaattaataataattataaatgaagtagcaacaacgataacagctgactttatcagtgtgtgtccctgtcaggcagggtttttacctccatcatcatagcacattcgatccaccgctatattaagaggtaggtcttgattatcttcatttcatagatgaggaattgaaggaacagaaaagtctagttacttgacccaggccctagaaccaggatttgaatcaagtctgatgccagagcttgggatcttcattgcatttgatgtgataattcatttgtgaaaaaacaaagcaattcatttgttttcatttgtcaaaaacaaaacaaaatttcaactaagataactgttgagctctttaccgttaaaataaaatcgggtgttgaaatgagtaacagcaagccttgagaaaagacaccctgagaagtcaagaggatgcattaactgtctacagatgaacagaatctcttctcttctttgaacaagaaaacccagcagtaacttttatctaggtttcacatttcaggagttacagtaggggtaaaccaaaacaggttaaaaaaaaaaaaaaaaaaaaaaaaaagcaaaagcccagcaagctgagacatcagagtccttcagaaggaatgatttgccgtcttctcttcaggacatcccctctttaggaggacaaattttttctccagggaaaggggcgtccgcctcagaaatgggggtgtaggtgagggatcttgttgctttaactgtttgttcattaatccctgcactttactagatttagttctgcctgttaacgtagcctcaggacacttggctaggaaggctggagtgtactctctgggttagttattttgggacattctcgccctgctgcttgggatgaagaggtcctaattaaatacccggaccttccaacgggtagattttcaaagaagatgcccagctatgctgcatcctcatccacactctcccgctccccccaaactagtgcaaaaaagcttgccagggcctgcagaaagcgccgcgactgcgaggctgacacgcgtctttccttccctcccccggggaatgatcccagcatctctcgcagtgatgtcagtgtaatcctgagtcggatcgggctcccggctgggtggcgggggggcagatgatgctcccgccagctgggcagagcaagggtgttccccgcggaggtggcagccctgggccgcggcgttccggaacccccgcacccacggcgcggtgccccacggtgcccgcgagcgccgcccccgctggctagccgcgcctcgctccgccctggacgccgccggtcccggcgcggaggtgcggcggggagtgggagccggcccggctcagtctgatttacggctctgctga

SEQ ID NO: 5155 - DNA, 2300 bp, Homo sapien
accatggctaggctgtgctagtcttctctctaaaagcatagtctgtggtttacaaattcccagttgagaaggaattagatatttgactttaatgctgctaggttgcagaccgtgcacacagagggtaaatgatatcaaagccttgttcctcctggttcaactatatcaataagaaatgcagtcaaggcacctgcaaatagcaaaaatcaaccttgcttagcatttgcttgtaaggcgattggggtgctgcttaaagcaatggggttagcatcccctgtcagcaacacttactcttctttcctaagaagctcctcctcagattccgtcaggcgttgcctcagtacagctatcatttccacggccacgtccacctgtctgtttaaggcccgctctcgtctctgaacttcctgctttttctgagtcagctgcacaaaagctgcccgaacttccaacagttccgcagttttctgggccaactctttggtgagtttatcaattctcttctcaatggtcctatccacagcctcaaccattcgattgaatttttctctgacatgtgcctcgaaagaagctttggtgtctgaggtgggcagtccaggacccgaccgtgtcccatccagcgagtctgcatggaggtccatggcagtgtaggtctgcacataggacacaggcctctctgccaccacctcaaatggcttcctgtccttggaatgttcatgtgaaatgctgtacaagttaacatagctcggtttctgctttaccacgttgccactgctctgcaattttcccggtttcaggagttctgaggaagtgactaggtctgtgtctttgagggatggaaagagactgcattttgtcaagagggttctttcttcgtagctgtgactgaactccagatgggccctcaaggatgacaagcttctaaatctggtatggtctccacacctcgggcagcgtaatggcaggcacacagcaacattctcaaaggactcctgccagggatatctgctttcctcaaaagccttctgttgcattactctaaaagtcctgggaggggggaaataggtagtttacaagtcggctgaaaaacacactactaaaatgattgctgctcatctccatgacagcagaggctttttggtttcaagtgacttttgcacataatattttatgttgcacttaaaacctacagcccatgggccaaatccatccacatcaatttctgcattatttactgctgccgtatcaatttctgtattatttattgtaaaccacaatggcagtggtgagtaactgagacagagactctatgctcctaaaagctaaaatatttactacctttacagaaaaagtttgccaactcctacctagaatcaaaaaggtgggtaacattccctctccacagaagagaacactgaagcaaggaagtaaagccattaatccaaggtcagatggaaagtggtagatccagaagtggaattcaagtttcctcccctcctgaatttggcacactaaatgcaaaaccgtgccccattttaaggatacaatccgagatgcgtgaacacaagaacatatgaaaactcacatgaattgtcaaaatgggtcctaagacagcaagctcaggacctatcctcaagtacaggaaagattactcaagctatgcacagtggcattaagcctgcaatcagctgaaaatttttcaccctgaaatttttgcctttttttccttcaggtattgctgtgatgacataaaccaaagtgctaatcgtaacaataacagaccccatacgtgagtttcactgaaacctggggacccaatgtgtcaaataccatttggcataagtggggccatggccaagatttttattataatagagtgttctggacggatttgtcttgtctcagatgctattttatatgacaacctctagggatggtcagtgtgtgaaccaggtaggtatcagcatactctcttaataacaggaagttctggtttccttgtaggaatgcattatcttcaccctagcaacagatgactgttggcaacccaattctgcaagcagtgcatatcttctattcctccatgaaaggtttctacttaaatgtaacaagcattggacccgaaatgagggagcccagctggggtctttgggtgaaaagtgtcctcaacctcttcaaaagcagaggtgcaaatggtccccaggcagcgaggcaggcaaggcttctaggtgaagcccccggcccccagagaggggaacctcttcctgtgatgggtacaccgggatgtttaaccactggtt

SEQ ID NO: 5156 - DNA, 2300 bp, Homo sapien
cctttttccctccacgagtaaaccccattaacccgatttcagtcaagcttagtctgttcatttcatttcattgtgaatgttcttgtaagggtaatttatggtatttttagatttgtgaattattgtaagcataatgggtattttctgataattttcaccataactgttaatttagctaatcacaaattattactggacaaaaaaggagttaggtaattttccctttacctgagtccaaaagaagggaaagtttgatcaaggctattgagtctattggttcaagaccattttgtgactattaacttgttgattcaagctccttagtcagaatttggggtgcttccaacaaacatgattgtgtaggggtcacaatcaagagtaaatctagttcatgactatataaatgatttgcctcactcatcgttgtcaagtgatcatagcaaatgtggtagcagtcagtatttcatgattaagaatgcctaatgggaagattcactaaagcatatttgagacagtcaggaacattactgaaagagcatgactagagacaatggttgtgtccaagtgcatattgagttttagtgtgaaatgaactcccactagtggcaagccaatcagaacagtatgtttattacacgtggttcaagtcatgagccaacttcttttaaattggtttgagacaaatgagaatctgtgaaaataaatgtttccatgaaaggttcagccacccctcattgttgctagcaaattttgcaacagttttgttgctttgatgcctccagctgaaatgtccacattggccaagggtctaatactccaggtaaaactgtgaagtgagtgaagtttgtctttgaatccctaccacttactcaccctataccatttccaccatttgtgaattcttacttactatcccctttttatctaaatcacaatctccttcctcctgccttagacaaccctaagtctacaaatttagtacttttcaattctggagttaaaagtctgaaatgagttttctatgataaaattaaggtgttggcagggctctgttccttctggaggttctaagggagtatctgtttccttgtctttttcagcttctagaagccacctgcattacttagatatggcctcttcctccatctttaaaccagtagcatcttcaaatctctctctgactctttaagtagttacacttccttctcaggctctgtctctcctgttttcttcttataagtactcttgtgattatatttgactcacagataatccagaattgtcttctcatctcaaatctttaacttcttcatatctgcaaaggtaacatattcacaggttctgagaataggacatggacatctttggagaccattattctgctaaccatactagtcatgtgagctcaggaaaattattacatctctgtttttcatctgcaaaatgatagtattaggtttctcaaaatattgttatgaaaatataataagataacgcatatagagtactaaacacagtgctggtacttttgtaagcacttaacattttttactttaagaaatacgagagtggggaggacagagtggaatctgttaacaagcaaaatgactgtcactgacttaggcaacttccacaacaactccgtttgaacaaactatagagagcaaagcttaaagagaaaacactagtattcacctgttgtcacaaacatcagtatctttcacaagtttcatgtctctgttccccctaacactgaaacttgattataagtacccactaaatggagaggtaataattcttaagcttggaaaaaacatgaaaagtcatctgattggacacctccagcaaccaacactatctcctgcctataagtgtccattctgtctttagacagtattatggtttgaatgtttgtcccctctaaaactcatattaaaaattaatccccaatgtggcagtattgagaggtggtgcctttaagaggtgattgagtcaagagggctctgcactaatgaatagattaatccatttatggattactggattaatagtttaacgggttaatgaattaccacgggactgggacttctagctttgtaagaagaggaagagagacccgagctagcacactcagtccccttgctatgtgatgttctttaccatctcaggactctgcacagagtccccaacagcaagaaggccctcaccagatacagccccttgacctgggacttctcagcctccataaccgtaagaaataaatgccttttcttttcttttctttccttttctttctttct

SEQ ID NO: 5157 - DNA, 2300 bp, Homo sapien
agtataaaagtaaatatatgcttatttttcaaagcttaaaaaaattgcagaagactaaataaggcaaaagcccatagttctgttaacatttattgtaatttatctcatcttattttgcataaaatattaatatataaaataactgtcacaattcacttaatattttctgtgtcattaaacagtctttgaaaatgtatcttttaatggctctatgatagtctataatggaaatgcattacatttcatttaatcacttttattatgtttttattatgaataaggattaatatctatttatagaaatctttgcctctattttgattttgtttgaatggaggtacctataagcaaaatcatatatattataaaattgcctttcagaggatttgtaccatctatacacccccagcattctctaagaataatattttaccatccttaccaacattaaatactgttattttttaaaaatctgtgttaatttggtaagttaaaactgctatcttataactgtttgcacttttcattaccagtgagtttaaacatttataaatactaatttgacactgatatttttccttctataatacatatcatacgaccattttctctcatggccttaatattttactcattgacttgggtgaactttgttaaggttattggatatcatgtttgtgacaaataattttcacagcttgctgtttaccttttaattgggttcatgatttttaatatgtaaatcttaacttctatttatacacaaatatggcttttttctttatttcttcttttgcttttgtgcttagaaaattatttccctttcagaagtcagatgaatattcactaaatttcctcgatgttttatggttttatttttaaaatccttttttaaaaaatatggtgtggtgcttactttttaaactgaataaaacgttatcttaatgactcaggatcacaatttcgaatagtgtttaaagttttgtagcattaaatagaatgctcccaggagccactgaagtggatagggatacttttccccattctctgtgatgtcagacttctgtgattcgttaactgggtggctcgtttttggttttgatcactgtttttgacgttaggcttccagctctcatttcccattgcagacaatcatctgccactcacagggcttcctactttcaacagctcaaacaccaactagccaaatttgtgctactgtgcacaaggtatatgtatagttgagcctgggtggggaaggcagaagaatagcccccccaccccccaccaaagatgttcatgtcccaatccccagactctctgaatgcgttttgttacatttcaaggggaaattaaggttacagatggaattgaggtcacagatgtaattaaagttgttcatcaactgccctagatgtggagattattccagatttctaggcaggcccaatataatcacaagggtccttacaagtgaaagagaaaaacaagagagtcaatgtcagagcgatttgacatgagaaagactcgggcagccattgctgtctttgaagatggaagccatccatctctgggaggggctgcagcccaggaatggggatagctgttagaagctggaaaaggtaaaacattagattctccacactaacacctccagaaagaaatgtagccttgctgataccttggagactcattttaaacttctattctccaaaacagtgagataataaatgtgtgttgttttaaactactgagttcatggtgatttgttacagcagcaaaaggaaactgacacactgggcctagaagtctgttcaatagagaaaactgcatggcttttgtgcatggccttggtaactgctattttgtctgctctgaggttttgtttcctccaccccccagttatttccatggttgctggaaatctaacttacatctagagcagagcctaagcaggacattattttacaggaattggcccctacaagtcaagttgcaaaccctgggtcaaagggtgaagtagaaggaagctggaaacacatagtattttagaagtttttcagagaaatcacaaggcaggaacttctgctcagtttggaagaaagagcattccatcatgacccttggactgggtgagagcatcatcctttaattaatgtctgcgctgggtcagataaccatcactgtctccaggtaaattcccttctgtctctaaatgaatgggtagttcaagggcatgagtcgcaaaggatcctctcagtggaaagagtcttctgagagtagggttgagggggttcaat

SEQ ID NO: 5158 - DNA, 2300 bp, Homo sapien
aactaatgaaagctggttcactatttacagctctaccagtggttctcaaactgagctaatgatcaagaatcgcttggacgagcgccgtggctcacgcctgtaatcccagcactttgggaggccgaggggggcggatcacgagctcaggagatcgagaccattctggctaacatggtgaaaccccgtctctactaaatatacagaaaaaaaaattaggcgggtgtgatggcgggcatctgtagtcccagctactccggaggctgaggcaggagaatggcgtgaacccgggaggcggagcttgcagtgagccgagatcgcaccagtgcactcccgcctgggcaacagacccagactccgtctcaaaaaaaaaaataataataataattgcttgaggaagcatcttaaatataaatcataggggcaacccgctgtggtccccttccaagctgtggaagctttgttatttcgctcttcacgataaaccttgttacccctcaaaacaaacaaacaaacaaacaaaaaaaaaccacacacaaaaaaataggcttcactccagttcttctgaatcaaaatctctgaggtgtgaccccaagatctttattttttaagctctccagggggttctgatgagtagggttcagaacttttgttcccttaacaccggcattctacaaatgaataaattgaggccctaaaagggtaggatttgcctaacgacacacagcttgtaagtacacacagtaggctggaacaacaatatcctgactctcgtttggtgcttttacaccaattcaagctgctgtttttggtaagactgtacttatttctgctctgctgctcatgctttgctgggtacttagtattcactatcctacaacttattccctcatctgcaatctgggaataataatagtgcctgcctcttaagagttgctgcaaggattaaatagtataacattcattatataatgcacttaacacagtgcctggcatattgtgagtactcattagccaggttatgtaatccactttaaaaagtatgcctattttaactggagaggattcactgaaccactccaattacaaaatgtacaagaaacccatgttcagctttggaatccaaaaagactttaaactcagggttaagtttaaagtcatagtatctaatgtcttgcttttctagtcatttacttatgccaaaagttagttcacgccaaggagaaggatgcctctgtgtagtgaaacaatttcacaattactgactgaactgactgttgcacaccactatttctcctaggatgcctcagaaccatctagtaactccatctctgggtgacgacagggaatctgcatttataaaagcccgctcccccttctcaggcaaaccaagatttgataaccactagtatgttcagaatccacgaccactgtaaatggcctctcaagtctctccagcaaaaagctatactgctctgtaaccagaagagcagcgtcatcaggtcctgatgcaaacaacagctgggcccagctgggcccagctgggccgagtaaccttgatgatcacagaggacggcctggaccccctcccctcctaggaaacacaaaattataaaagcgccctcctgcaattcccgtgggagacagtgctgcctaggccgctacgaggagctaaggctgactcaacagcctccttcccaggggcaaggccaaaggaaggcgaccctgcatggctaaccaggccccagcgcggcgccagaaggttaacgaccctccctgcccctttccttatgaaggccaagagcctccactactccgggggccagctgacggaagtgcgtcactccaccctgcggggagtgccgggagttgtagtcaagtggctactaatcttccaccccgattcatcttttctaaaacaagaaaaacacctctgcatcctgaaaaagatcgctttatgcccaacatgtgtaatagttcctctattttccaatcaacaaactgaactatctcagagctcaagcggaaggccggactacaagtcccggcatgctccgcagggtccccgggcgcccggccaccgtcgtaggtgcgggccgcatgaatggagcgccgggcgtaaggcaaagcctggcaccgtctgcgcggccgctatctgctcccggagcgtgagtgcggggtgtggggcgtgcgcgtgcgcgctcagagggggctcaaggcgagcgcgccgggcagttgcgggcgcgtggctgctgaggttggcggcggtgccgcgcgcccgacgggccggtggttgcggggcc

SEQ ID NO: 5159 - DNA, 2300 bp, Homo sapien
ttgctggggtggggtatctactagggtgctaaccttgctgcgatttctttccatgtccttttcatccccaattggaaaaaagcgcacagcgcgagcgagaaactttcccaaatgtgctctgggtgacttaagtcagagagatggccggccgctggataccggctgttttggagggagggggagaagcagcgcttcagtggaagagcagagggagagaccgctcccggcagcctcagggccctgaccgcggtgcgctgggcccggcgagagctggcgcacggctgcagcggtcgaggcaggtgagcggctgaagacccgcctgcagcgccgcgcttcctccacggcgtggcgccgtggctcccgcccgccccggcccacactaagctagggccgctccgggcccggggtgaaaaagggacaggacaggcctgcgaggctgaccctgcgcgttatccctggcctccgcggctttggagcgggaaagggctctggggcagttcgcaacctgcacaaacgaccatgaatgagtcatgcaggcggcggtgcgctggacttgggcacccgggaccagcctcctgtggggccccggacaggcccggctatccattgcgggctggggcgcactgggaggtagaagctttgcgcccagcaagccagaacctgctgctatttggactttggaaaagtttttaaaaattgctttgggaacgaaacagaagggtttctaccggggtctcgcaaagtaaaacgagtgggttgggggatggggatggcgtcttgaaagtgattagagatgctttcggccgtcactgaggaccgcgctgggctcaccgaggtgttttttggggagggagagaaaatatttattctagtacgtgtattctggctcgggtgcgggcagggcgcggtcctggatcctgggctatgggggtcagggggattctgtggctgcagggaccggtagtgaaggttaggccagtgtcttcatagaacctcctgtccagcgagcccggagcccgctctgccgccgggacactgctggcaacgacggcgcgcggacgcagtcaacagggaggtgtgtagtgtaaggtgtgtgagcgggtgtgtgaagagggcagcgggggcgggagtgtgtagcggaagtggagcgagtgtgagtgtgtgtgtatgtgtgtctggaggggcagggtgagtgtccaagcttccatctggacgcccccacgcagccgaccgcccagacgcgccgggaagggcgcccgctccgcgcagcagctgaaggggggcggggagcgcgcgggcagaggaaggagggtgtctccggctgaggatttctctcgaagctccccacagtaattctgctcctcctagggtttaccctcccagtcccaaggtgcccaaaatacttaaacaaacaaacaacccaaacctgttccgttttcgctcctgtataaatagaacagactttccaaaaaagcaatacgcattcactcttatcaccagccacttctttccaccaagtaattcagaaaaaagcagtcagcttccgtgaatgcatgtagctttttttttcttcgctgcctccttttgcttgcggttttgagctgccaagaaagtgagtaggggtttgactgtagtgtctcggctccgctcggtttctttccgaagtttaattttccggaatggctcccaaacaagggctagggaggcggagccgccggcaccggatcttcgccttttttggaaagtcccagagaaccggaattcctccccgccccgggaggctgagccgcagcctggagcagctcgctctcctgctgtggctgtgactgggtccatggcgcgccctctcccccgcgatccctgcgccccggacccaggctgcagctagggccgcgcgcccgggaccccagcgatccccgccgcctgcgagctggaagtcgcgagcccggcggagtccgcgcggccgagcccgtgtatgcaaatcagccatgtgacggcaaaagccgcctggcccagccctgttcctcagtccatatatgggcagcgacgtcacgggtattgaagacctgcccataaatacttagagcaacactttccgtctaactgagcgaggagcaattgattaatagctcggcgaggggactcactgactgttataataacactacaccagcaactcctggcttcccagcagccggaacacagacaggagagagtcagtggcaaatagacatttttcttatttcttaaaaaacagcaacttgtttgctacttttatttctgttgatttttttttcttg

SEQ ID NO: 5160 - DNA, 2300 bp, Homo sapien
atcattgtccctccccctgtgctctcaggcgatatatgatttgactatttctttaccttctgcttctagcctaatttgtattttagtgagccctctttactacctgattagtcgggtgtgaactgagttacaagccctgtgtttaaatgtgggtgtggtcaccttccccagctaggtttaggaattcttagttggcctaggaaatccagctagtcctgtctctcactatcttgtccacttggttgtttacttttttatttttttatttttagagacagagtctctctgtgtcacccaggctggaatgcagtggtgtgattggtctcagctcactgcaacctctgccttccaggttcaagcaattctcctgcctcagtctccccagtagctgggattacaggcacgcgccaccacacttggctacgttttagtgcttttagtagagatgaagtttcaccacgttggccagaccagtctcaaactcctggcctcaagtgatctgctctccttgacctcccaaagagctgggattacaggggtgagccagtgtgctaggccacttggttgtttaaatacgagatttgattcttccattttctgtatgctttactgccattccatcactaactcctctcaacctgatgcccaaaaatatatcttgaatatatctacttctcttccaaggtttccggcacatggtagaaacatgataactatgtaatgagtggatgcatgacccaatcttccctacttccattccagtctgagcgcccataattagtcaatcaactagcttgtcttggttctttttccttaggccttccacaatctattcttcacattacagggaaattaatcttttcaaaactgtaaattaaagcagattattctctagcttaatatcctttacttatttcccaatgcactttgagtaaaattcaaatgtttcattgtgcactgcaaggacacctatgttttggaagtttcctatctctctggtatcttcttttgcatctctctgaaatgctgcagctcccgccacccgacctccccgcctttagagttgaggcataagacatttcctttgtcgagaagggtctttgtttaactggcattttaaggtttaatcttaaagattacgcccttagccaggtgcggtagctcatgcctataatcccatcagtttgtgaggtccaggagggcggatcattgagctcacttgagctcagcagttcaagatcagcataggcaacatggcgaaaccccatctctacaaaaaatacaaaaattaacctggcctgagcacttgtagttcctagctacttaagagactgaggtgtgaggatcgcctggggcagggggcgggcagagggaggttgcagtgagtggagattgcgtcagcaagacactttctcaaaaaaaatcacgccccccatgaaaggctttcctttaccacccaactccaccttggttactctatcacagctccctatgtgttccctttccagcataaatcacaactatttgtcagtgaattccatgacagaacgaacctagcttttgtttggcacataattgttaaatgaatgcagtattatatttggctagaccaaaattgtttccctatcagtttgtgagcaacttgagggcagagccctaaatcattcgagtgtgctgacctctaggggggttagtccagtgcatggtctagaattgctcaaatcggccttttgaaaaaatgaatcatgtacaatgataaaggtgtggacaggaccacaagtaacggtgtaacgattagcagatttaaggaaaagtcagtctaaaaggaaacgtgagaagctaattgcagaagacagccatttcaagtcttcaacagcaaggctgtacctcctcacgtgacttcagtgtagactttaagaacctaaactaacgcttctcgcgagaggaaagattgaccgctcgcaagcgtacatcagctggtgccccgccttccctgggccccacccactgcctgtcctcattcccaccttgaaccagccttttgcgcgtgtgacgtcatggcgccgtgcgtggcctcggcggtggcgcagggggcgggcccgcggcgcggcgccggaggaggaagtggtgaggttgttgctccttcagcgcctatcgctggctcttggggcgcagagaggggccgcagtctccgcggctgcgtcgagctcccttgcagtcccctccatgttccccggcgccactactccccttcctaaggccgccgcttaccccggggtctatggaagtaatggaaggac

SEQ ID NO: 5161 - DNA, 2300 bp, Homo sapien
aagctggcaaagactgacagaatgaactttttcagaactctggaatctaattgaaaacttacaacagcaaccaagagactgcttaatgaagaaaagggcagctgatttttggcatttaaggaaatctctgttaggtaactggctgaccagtgagatagtggaacagagacttcagtgaccacacccaacaaggaatactgcctttgcaaaaacagtttggaaaagtcactaaacaaatggatgactggagccctcaggaatcaacaacagcaaaccctgaggcagggagagaatatgattacccattgtaatgttcagatgcccagttttcaacagaaaggtataaggcatacacagaaagaggaaagtatggcccattcaaagggagaaaataaattggcaaaaaccttccccgggaagcccagacattggacttactactagacaactgtcttaaatatgctcaaagagccagcagaaatcaggaaaacgatggatgaacaaagtgagaatatcaataaattatataaaaaaagaaccaagtatacattttggagctacaaatgattttaggacatgctagagctagatataccaaaagttctttcatgctaaaactttggaaagacttactctccttaagttcagataaatgaaagacataaggagagagggcatttggagactctgtatgctggtatgagagttaataagcaggactgtaaagcatctgttagacaagacaccgcaggagttgggctcctgttgacttgccatttattggctgatttgtcttgggacaggcgctgaacatctcatccatagtttcctgctctgtgaaatagagcatctgttctacagacacattatgaagagccagtgagactgtacagaaatgctgaaaatgtgaggcatccactatgttcatcctccagaggaaccaacagcctaatgattaaagaaagagaatgtttactttactatgctaccaagttatcaatagaggcacagtgcttgagttaaagaactctgcagacttcagcagctgttcaggtggtcattatgcccagaggaggaattctagcccctctggaattccatcaccctatcatcaattagattttttttccccacagtctccatttcccacttactatctctttcatctcactcctcccaattaaatttattttgcatacttagagtaactttaaatgcttagtttttcaattatttctcctttcccaggaatttttatgatgttttttaatatcactagaagacaatctagaaacaccacaaatcccagattggatcagcttgggccttcctctgttgttttactggcattaatagaaagcagctctaatagtcaagtgcaaagtcagtttgtaaatgctgaacaaataacagataagactattgactggcttcttgggaaaactgtttggtcaggagagagaaaactgttgaaaaactgttgtactgatgtcaccggtgattgaaggggtatctttaattggctaatttgaaagaaagtcacaaaagaaaggcatgaataaccaaaatcctgggatatttctgaaactcagtcgaggtcagtagatctgtctgggactacattttccatcccagttcctaacaaagtttcattttcttttctttattctctgatgtaagagttaacagtgaaatgaccaaaatcctgaaagccaatggagcaacaataaacatactcagatagattgcctcataaattctttcaagttagtttttaaaagtaacacattttttaaaagtccactttggcaaaattgataatttaatatctggttatcagcctctccaaaggattcctggaaaagttattttctttttatcatttaaaaatattccatttacaaagtcactttacatgaagcttttcagtgacataactttctcataaaatgtggtcttctgctttaaaatccatttgatgttttggagaaagtaaattctccagcagaattgtctcttgtgtttattggttttaaataacttggcttttctttgctccacctcctaaaacttgtatttcacggtttttcttttggggataggttcagaattttcacagctgtattcaggtaactgaagattttgtgtctccagaacatcttgtagagtcatttcatttaacacaggaactgagacttttgaaggaagaaatcaattatgatgataaactacaggtaagagttgggtgttctaggtcctgttcttcaggctttttatattcagaaatatgatacatgtat

SEQ ID NO: 5162 - DNA, 2300 bp, Homo sapien
cctatcaaaaaattttcaaccaagtgattctgcatgacaagggccagcagtgctagggaagaaacaacattctgttctttggcccgtcagcaatgaccattgccagagccaaactgagaagagtgggctgtctgttcaaggaagctgagatatataatcttagcaagctgagggaaagcagcatagccacagccctctttatatgctaagaactattctagaattggagacttacaaatcttaccttggtaactgggactcagtctgtgaaactcctgtacatccctccacagagcaatgaccctgacctccaggatttttgtctcagctgtagtattctgaggtttagagtggcctttacttaaaaacagcaacagttgttttttttttaagttaacacataatctttagtaaaatttgtcgaaaaatactaactttgattgtgtttggtcatttatcatgagtttagaaaattgtaaagttgtaattctctgtatttatatgaccaaaaggacttcttggcaaaatctttccacactaagttctcacaaataactgagtaaatagcaatcacagtgtcaatataataaccttcctactatgaatacaaattatattttcttaacattacctatttataattataactgatgcttttaggcaagtatgaataagacaatgtcaaggaagtgaaatataaatgagtcaaatgtggcaaagaaaagggataatcagaatgagaagctgagttgtgttctgctttaaaactgaaccttggctcttcaaagtaaccctcaagcctttatccaaaatatatcaggtaggggtcattaggaaacctaatagcatcttgtaagcactaataaaggttactgttctaaaagtcattttaaaacaaccataagctggcaaagactgacagaatgaactttttcagaactctggaatctaattgaaaacttacaacagcaaccaagagactgcttaatgaagaaaagggcagctgatttttggcatttaaggaaatctctgttaggtaactggctgaccagtgagatagtggaacagagacttcagtgaccacacccaacaaggaatactgcctttgcaaaaacagtttggaaaagtcactaaacaaatggatgactggagccctcaggaatcaacaacagcaaaccctgaggcagggagagaatatgattacccattgtaatgttcagatgcccagttttcaacagaaaggtataaggcatacacagaaagaggaaagtatggcccattcaaagggagaaaataaattggcaaaaaccttccccgggaagcccagacattggacttactactagacaactgtcttaaatatgctcaaagagccagcagaaatcaggaaaacgatggatgaacaaagtgagaatatcaataaattatataaaaaaagaaccaagtatacattttggagctacaaatgattttaggacatgctagagctagatataccaaaagttctttcatgctaaaactttggaaagacttactctccttaagttcagataaatgaaagacataaggagagagggcatttggagactctgtatgctggtatgagagttaataagcaggactgtaaagcatctgttagacaagacaccgcaggagttgggctcctgttgacttgccatttattggctgatttgtcttgggacaggcgctgaacatctcatccatagtttcctgctctgtgaaatagagcatctgttctacagacacattatgaagagccagtgagactgtacagaaatgctgaaaatgtgaggcatccactatgttcatcctccagaggaaccaacagcctaatgattaaagaaagagaatgtttactttactatgctaccaagttatcaatagaggcacagtgcttgagttaaagaactctgcagacttcagcagctgttcaggtggtcattatgcccagaggaggaattctagcccctctggaattccatcaccctatcatcaattagattttttttccccacagtctccatttcccacttactatctctttcatctcactcctcccaattaaatttattttgcatacttagagtaactttaaatgcttagtttttcaattatttctcctttcccaggaatttttatgatgttttttaatatcactagaagacaatctagaaacaccacaaatcccagattggatcagcttgggccttcctctgttgttttactggcattaatagaaagcagctctaatagtcaagtgcaaagtcagtttgtaaatg

SEQ ID NO: 5163 - DNA, 2300 bp, Homo sapien
atatgagagcacctcgaaattaatcagaatacattttgtcctgccgttcattagtcatggtaatgagtaaaacctttcacctcatggaacctttttactcaggtataaaatagaggttatcccttattcttaagtaagtataggggccaactaataaatagtgagcataaaagacctttgtaagttaggaaatgctatgagtacaagtcattgttaggaccacccccttggaacagggaaggaaggtggttaaattttacatagttgctcttaggttttctatctcctgcttcttggtttgcataaaacaaactgggaaaatcactattgctttgtatccacttatctattcttgtagtcctaaaagttatgaacatataactgtgtttgactcttttttaagagtactgatctggccagggacagtgtctcatgcctgtaatcctagcactttgggaggcccaagcaggtggattgcctgagctcaggagttcaagaccagcctgggcaacatggtgaaaccccacggctactaaaatacaaacaattagtcgggtgtgacagcttgcacctgtagtcccagctacttgagaggctgaggcaagagaattgcttgaacctgggaggcggaagctgcagtgagccaagatcatgccactgcactccagcctgggtgaccaaaaaagaaaaagtactgatcctagtcaggcactctgctgctctgatagatcaactttaggagacttggctttctggtattctttgccgacaatttgaaattatgttcctttgtttcaggaattctcaagaaatttgaggaagaagatttggatgacattttaaggaaaagattgaaggactcaagtgaaatacctggtgctctgtggcatatttatgctgggaaagatgttgacaagataagggaatttcttcaaaaggtataagttagtttgcaaataatatctcttcccctcaagcaaggacttattcattgttgccgtaccttcacttggcattcaacaatataagaccattacataatttttacttcaaagtagatgggagtttttgttgaaagtcaaaaccctgtttctcttgctcctctttgaaagtctgttaacattttgagggttttgaatggtgatttgttcccagttggtagtgtgcctccattccctgttaataaaagactgatctgttcttgagccagatattagttgggtggcgaaaagtagctatctggagtcgcgggatgtaaaaacaaatatttcatggaaacgtctaaagaaggtaggatctttattttctttgaatctgatagatatttttggctgctgacctagggaatgattctactctatcacatctgatactatgatacttactgagtagactcagattttgagtaatcataccttgactgtagttggcatatactctgaaagaaatttatatatcaacctgaaataattggttgaaaccctttgctcaggtactttttaaacttcgtaattatggaaatttgttttaagaaatgttcagtgctgatacatcatctttctgaaaggatgtaagttctgtctgtgatcaatgtgaagtaaaagagttacagccttttttgtaccattttatccctgaatacttacctgtattttaatctgaagtatgatcatttgtgccttctaaagcagattatttaactgattaaagagtcccttgaaattgatttttcaagtgttagaaggttagccatgtaaaggtatttatacttacctcaaaaaaggatcaataaatgtttatgaaatccatacatatgaatggtttggcttttggtaaaaaaaaaaaaaaaaaaaaaataccctgttcctcatccatgtgctatacttttgaaacagttataaggaaggaaaccagatagatggaaacttcatagtggaaggaggtggtgagaaggaagtagtaaactgttaagagcatttcagcattgctgtattgttttaatattctttggctttccaaattattgcagaatgttattttttaactgaagaagctcattcagttgttccattgattctgagaagaaaagatttgttattacaaataaaattgaaatttaactgaacaggatttaccatttccttacttaaattggagtgtctattttaattcatatttcagatttcaaaagaacaaggccttgaagttctaccagaacatgatccaatacgtgaccaaagttggtatgtgaacaaaaagctccgtcaaaggctgcttgaagaatatggagtcagaacctg

SEQ ID NO: 5164 - DNA, 2300 bp, Homo sapien
gatgtataaaattaactttattagacttctacacctccaagcttaatggtgcaaccttgtttatagcttagagtgaaatggggagtgcatttgggttttgaaatgtaattatctgccaattgtcagtaaattgttacattggaaaagttaaattttttgatgacaaaaattgacaaatgaatttggttataatttctatttctgatgaaatgtgttttaggaataatattctgtttttactgttagcaatatacttttgctgttagaatcaggaaatcatataaactaggttctgtatatggcatttatagtaaatttaaggcactgatttcaagatctgtttttagtaagatgacaataaattatttaatactgattatgatatggaaaaatctgtttaattatgttattatttgtctgaatatttctcataagatgtatttagaaaaagttacaagtttcccaaagaaactgctatttgaatgaactaataaaccaccaagatcatacccagttctactgtgacacggtgtttagctttttctagtaactgaaatctaggtgttttttttgttttgttttgttaatagaattctcccagtccttggctacatcagcccacccctgtgacctcagcagatggtattggattacttagtcacattcctgtcagaccttccagtgcagagcctcatcggcctcttaaaattacagcccattccagtccaccattgacaaaaactttagtagatcatcataaggagtaagttcaccagtgcttaaaaattataaataccttgttcataatttttcttaatttgccttttaaatagttaattttaagttaacacatatcttaagattaggctttgttctgttttgatatttcttcaaatttattatagtattagagtacatgcaaagatgtcttttactttcataatagaatgatattgcatagaagctgtctttgtattttgcaggaaaaagtggttacagaaatatttgtgtattttctttacagagaattagaaagaaaagcttttatggaaccattacggtctgttgcatccacatcagccaaaaatgacctggatctaaataggtcacagactggaaaagattgtcacttacataggcattttgtggatccagtattaaatcagttacagaggccaccccaggagactggagagaggttaaacaaatacaaagaggaacaccgtcgaattcttcaagaaagtattgatgttgctccctttacaactaaaatcaagggacttgagggtgagagagagaattattccagagtggcatcatcatcttccagtcctaaaagccatatcatcaaacaagatatggatgtagaacgctcagtatcagatctttataaaatgaagcactcagtgcctcagagtttaccccaaagtaactatttcactacattgtctaatagtgtggtcaatgaaccaccaagatcatacccatccaaagaagtttcaaatatttacggtgataaacagagtaatgcccttgcagcggcagcagctaatcctcaaactctgacttcatttataacatctctttcaaagcctccacctttgattaaacaccaaccagaaagtgaaggtttagtaggcaagataccagaacatcttccacatcagattgcatctcactcagtaacaaccttcagaaatgattgtaggagtcctacccatttgacagtttcttctacaaatacactccgcagtatgcctgcattacatagagcaccagtatttcacccaccaatccatcacagcctggaaagaaaggaaggcagctatagtagtctttcccctccaactttaactccggtgatgccagtaaatgctggtggtaaagttcaagaatcacagaagcctccaactctaatacccgaaccaaaagactcccaggcaaattttaagagttcttcagaacagagtttgacggagatgtggagacctaataataacctcagcaaagagaaaactgaatggcatgtggagaaaagcagcggaaagttacaggctgctatggcatctgtcattgtgcgtccatcttctagtacaaaaactgatagtatgccagcaatgcagttagcttctaaagatcgtgttagtgaaagatcttcagctggggcacataaaacagattgcctcaaactagcagaagccggagaaactggaagaatcattttgccaaatgtgaattcagacagtgttcacacaaaatctgaaaaaaactttcaggctgtctcacagggcagtgttccc

SEQ ID NO: 5165 - DNA, 2300 bp, Homo sapien
tgtgtttataagtacataaaatattttattaactggtcataaatgtgttaaactaaaaacaagtgtatcagatttttatttgttatataaaattacaacataaaggagtaaatttgaataacattttgaggaaaaataaaaatatcttaccccctactattgaccaaaagtgaagaaacaatacaagcataagacactattattgagaaataattttgaatggcattttatagagcaaaactttgttgtcattgccataattgattgctgtttaagatttctggatcttatagaactgaggccgtttgagacacatatttgatccttatgtgtatatttatgtatttttctcttatgtggggtttatggctatagtgtatgtttttaatttcatagcagtatatttttggtgtgacatactgcttttgcattattttgagaagtaaaacgtattccctttgttagagaaaatacaaaggaggttgtattttcctgctatttgactatcatcctattaacaaattcataaaacatgttctggaaggatgtcagtgagtcagaatatagaaaaatccttaagcatgtagtcagatagctgtatgtctcgatgaagaggttgctgtcaccttatattcagtcatgagacaggcagcatattgatgtataaaattaactttattagacttctacacctccaagcttaatggtgcaaccttgtttatagcttagagtgaaatggggagtgcatttgggttttgaaatgtaattatctgccaattgtcagtaaattgttacattggaaaagttaaattttttgatgacaaaaattgacaaatgaatttggttataatttctatttctgatgaaatgtgttttaggaataatattctgtttttactgttagcaatatacttttgctgttagaatcaggaaatcatataaactaggttctgtatatggcatttatagtaaatttaaggcactgatttcaagatctgtttttagtaagatgacaataaattatttaatactgattatgatatggaaaaatctgtttaattatgttattatttgtctgaatatttctcataagatgtatttagaaaaagttacaagtttcccaaagaaactgctatttgaatgaactaataaaccaccaagatcatacccagttctactgtgacacggtgtttagctttttctagtaactgaaatctaggtgttttttttgttttgttttgttaatagaattctcccagtccttggctacatcagcccacccctgtgacctcagcagatggtattggattacttagtcacattcctgtcagaccttccagtgcagagcctcatcggcctcttaaaattacagcccattccagtccaccattgacaaaaactttagtagatcatcataaggagtaagttcaccagtgcttaaaaattataaataccttgttcataatttttcttaatttgccttttaaatagttaattttaagttaacacatatcttaagattaggctttgttctgttttgatatttcttcaaatttattatagtattagagtacatgcaaagatgtcttttactttcataatagaatgatattgcatagaagctgtctttgtattttgcaggaaaaagtggttacagaaatatttgtgtattttctttacagagaattagaaagaaaagcttttatggaaccattacggtctgttgcatccacatcagccaaaaatgacctggatctaaataggtcacagactggaaaagattgtcacttacataggcattttgtggatccagtattaaatcagttacagaggccaccccaggagactggagagaggttaaacaaatacaaagaggaacaccgtcgaattcttcaagaaagtattgatgttgctccctttacaactaaaatcaagggacttgagggtgagagagagaattattccagagtggcatcatcatcttccagtcctaaaagccatatcatcaaacaagatatggatgtagaacgctcagtatcagatctttataaaatgaagcactcagtgcctcagagtttaccccaaagtaactatttcactacattgtctaatagtgtggtcaatgaaccaccaagatcatacccatccaaagaagtttcaaatatttacggtgataaacagagtaatgcccttgcagcggcagcagctaatcctcaaactctgacttcatttataacatctctttcaaagcctccacctttgattaaacaccaaccagaaagtgaaggtttagtaggcaa

SEQ ID NO: 5166 - DNA, 2300 bp, Homo sapien
tggcattacatcacgacgcaggtctcgtgccaatcaaaacgtcaacgctgttcacgtatgtatgttattagggatgaatttctgtaaaatatttttccttaggctagtagaaaccaggtagtaaacaattactgttaattggttatttttagagccattatacacgtgcccaagcaaatagtcccagaccagcaatgaactcccaagctgctgtaccaaaacagaatacacaccagcaacagcaacaaagaagtatccgtccaaataagaggaagggctcagatagcagtataccagatgaagagaagatgaaggaggaaaaatatgattatatatcacgaggaggtaggacccacttttttttttaagggaatgaaaacaaataaaacaaaaatacattttaaaatatgcttatttagtatgaaaaataagactcttctttctttaatcctacagaaaatcctaaaggtaaaaacaaacacttgatgaataaaagaaggaaacctgaggaggatgaaaagaaactaaatatgaaaagacttcgaactgacaatgtttcagacttttctgagagcagtgactcagaaaattcaaataagagaataatagataattcctcagaacagaagccagagaatgaattgaaaaataaaaatacttcaaaaataaatggagaagaaggaaaaccccataataatgagaaggcaggagaagagaccctaaaaaatagccagcctccctgggatcaaatacaggaagataaaaaacatgaagaagcagagaagcggaagtctgttgacactcagcttcaagaagatatgattattcattcgtcagaacagtccacagtttctgatcataattctaatgatttacttcctcaggaatgcaatatggataaaacacataccatggaattgctaccaaaggagaagtttgtatccagaccacccacaccaaaatgtgttattgatattacaaatgacactaatttagaaaaggtggctcaggaaaactcaagtacctttggccttcagacacttcagaaaatggatcctaatgttagtgattcaaaacactctattgcaaatgcaaaattcttggaaacagcaaaaaaagattctgaccagagctgggtcagtgatgtagttaaagtggatctaacccaatcaagtgttacaaatgcttcttcaggaaatgatcacttgaacatggaaaaagagaagtatgtctcttacatttctcctttaagtgcagtttctgtcatggaagataagctgcataagcgaagtccacctccagagactataaaatctaaacttaatacttcagtagatactcacaagataaaatccagcccatcacctgaagttgttaaacccaaaataactcattctcctgattctgtaaagtctaaggccacttatgtgaacagccaagctactggtgaaagaagattggcaaataagatagaacatgagctatcaagatgcagttttcatccaattcctactcgaagcagtacattagaaactacaaagagtcctcttatcattgataaaaatgagcattttacagtttacagagatcctgcacttattgggtcagaaacaggagctaatcatatttcacctttcctaagccagcatccttttcctcttcactcctcatctcatagaacctgtttaaatccaggtacccatcatcctgccttaactcctgcaccccatttactagccggatcatctagtcaaactccattacctaccattaacactcatcctctgactagtggtccacaccatgctgttcatcaccctcatttacttcccactgtgttacctggagtgcctactgcctccttacttggtggccacccacgactagagagtgctcatgccagcagcttgagccacttagcgctagcacaccagcaacaacaacagttgttacagcaccagtcacctcatcttcttggacaagcccatccttctgcttcatataatcagcttggactttatccaattatttggcagtatccaaatggaacacatgcatactcaggacttggtttgccttcttctaagtgggttcacccagaaaatgcagttaatgctgaagcttcattaaggagggtaagttacactgtagtttgccacatagcagtatatattaatgaacatgtacaggtgctttttcaatattccatctattttttaggtcatttcctattataaaatatgttagaatttttcggttgtttttccatacacttagtaacctcaagagtgggagctgaa

SEQ ID NO: 5167 - DNA, 2300 bp, Homo sapien
agctccaccacctgggttcacaccattctcctgcctcagcctcccgagtagctgtgactacaggcgcccgccaccacgcccggctatttttttgtatttttagtagatacggggtttcgccatgttagccaggatggtctcgatttcctgacctcgtgatctgcccacctcagcctcccaaagtgctgggattacagacgtgagccaccgcgcccggctcctatggagttttaagtaccagtctgaaagtcttgagatttcaaattttttttttaacttaatacaaaaaatactcatttttaaagctgttgtttatgtagaaaaaatagatatttataccttcctgcctgattgtattgtggagattatctgatagagcgcctttatacacaattcaaatactttggttaaaatgtagttaaaatgctaagtaagtgttactgtttcattgcatttgattttttccctaaaacagtgacaaacttttacctctcagaaaagcacaaaactgccttgaattgttaaaatagttttaaccacatttttaaaattattcatttgcacaatttttgtctttttctactccctaaagtctacctctgagttttattttacaactgctttttgaaaattactttctatttaaaaataaaaagtaatttaagaattgttggcatctgtattcttgattaatacccttgtttttcaagatgtacttgcagtaaatatatttgctttttaattcttggttagcagttgaaatggtgagtttcagaaggttaaaaaggtaattttgtcttaagtgaataaaacaaattattataacagcatcttataaattagggatcccaagctgatttctaaacatttctactgagtaaagaaattataccaaatatttgattagctcattctatttaatttttgtttttgttttgtatcatggattaggtactagaaccacagaatgtcgatccttctatggttcaaatgacctttctagatgatgttgttcactctttgttaaaaggtgaaaatattggcattacatcacgacgcaggtctcgtgccaatcaaaacgtcaacgctgttcacgtatgtatgttattagggatgaatttctgtaaaatatttttccttaggctagtagaaaccaggtagtaaacaattactgttaattggttatttttagagccattatacacgtgcccaagcaaatagtcccagaccagcaatgaactcccaagctgctgtaccaaaacagaatacacaccagcaacagcaacaaagaagtatccgtccaaataagaggaagggctcagatagcagtataccagatgaagagaagatgaaggaggaaaaatatgattatatatcacgaggaggtaggacccacttttttttttaagggaatgaaaacaaataaaacaaaaatacattttaaaatatgcttatttagtatgaaaaataagactcttctttctttaatcctacagaaaatcctaaaggtaaaaacaaacacttgatgaataaaagaaggaaacctgaggaggatgaaaagaaactaaatatgaaaagacttcgaactgacaatgtttcagacttttctgagagcagtgactcagaaaattcaaataagagaataatagataattcctcagaacagaagccagagaatgaattgaaaaataaaaatacttcaaaaataaatggagaagaaggaaaaccccataataatgagaaggcaggagaagagaccctaaaaaatagccagcctccctgggatcaaatacaggaagataaaaaacatgaagaagcagagaagcggaagtctgttgacactcagcttcaagaagatatgattattcattcgtcagaacagtccacagtttctgatcataattctaatgatttacttcctcaggaatgcaatatggataaaacacataccatggaattgctaccaaaggagaagtttgtatccagaccacccacaccaaaatgtgttattgatattacaaatgacactaatttagaaaaggtggctcaggaaaactcaagtacctttggccttcagacacttcagaaaatggatcctaatgttagtgattcaaaacactctattgcaaatgcaaaattcttggaaacagcaaaaaaagattctgaccagagctgggtcagtgatgtagttaaagtggatctaacccaatcaagtgttacaaatgcttcttcaggaaatgatcacttgaacatggaaaaagagaagtatgtctcttacatttctcctttaagtgcagttt

SEQ ID NO: 5168 - DNA, 2300 bp, Homo sapien
gatacccactaccagcactataaatgagcgttgaactgctgatttgtttttattagtcttgatcacttccaaggtatcttttcctcatcttgtcttgtctataaatatacgtacttatctgtatttatatttaaaaattcttttggcttggtgcagtggcttaagcctataatcctaccactttaagagccaaagcaggaggatcacttgaggccaagagttcaagactagcctgggcaacatagcaagaccctgtttctacaaaaaaataaaatcagccaggcatggctaattttggtgtgtggctgtagtctcagctacctggaaaactgaggcaggaggatcacttgtgccccaggagttgaaggggctgtagtgagctatgattatgcgattgcacaccagcctaggtaacagagggaaaccctgtctcttaaaaaaaaagaaaaattatcaatacataatagatgtacatgtattggggggtacatgtgataatttaatacatttatataatttctaaagatcaaatcattgtaattgggatgtccaacaccttaaatatttgtcttgtctttttcttttttctttttttttttttaagatggagtctcactctgtagcccaggctagaatgcagtggtgcaatcttggcccagtgcgaactctgcctcccggattaaagcgattctcctgcctcagcctcccgagtagttgggactacaggcgcacgccaccacgcctggctaatttttgtattttttagtagagacggggtttcaccttattggacaggctggtctggaactcctgaccttgtgatctgcctgccttggcctcccaaagtgctgggattacaggcatgatccactgtgcccggcccaatatttatcttttctttatgccataaacaaattattctcttccacctatttggaaatacacaatagattgttgtgctgtatagtcaccctactgatctataaaccataggtcttatttattctgttgaattgtatatttatatccattaatcaaactcttttcatcctccctcccccaaccctaacaggtctctggtaaccaccaatctactgtctatctttaagcatctgctttttgttgttgttgttttgttttttcttgagacggagtctcactgtgtcacccaggctgaagtgcaatggtgcaacctcacctgactgcaacctctgcctcccaggttcaaacgattctcctgcctcagccttctgagtagctgggattacaggcgcttaccaccatgtccagctaatttttgtatttttagtagagacagggttttatcatgctggtcagtctggtcttgaactcctgacctcaggtgatccacccgccttggcctcccaaagtgctgggattacaggcgtgagccaccactcctggccaagcatccacttgttaacctcccacatatcagtgacaacatgtgatcatttgtcttcctgtccttcgcttatttcatttaacgtaataacctccacttccatccatgttgtggcacataacaagttttcattctttttatggccaggacaatattcattatgtacgtataccacatttcctatatcattcgtccattgatgagcacttaggtggagtccatattttggctattgtgtatagtgctgcagtaaacatagaaatgcagctatctctttgatatattgattttatttcttttggatgtatatccagtagtggaactgctggatcatagttatatttttagttttctgagaagtttccatgttgtttttcacaataacgctactaatttacatttccaccaacagcgtacaggttccccttttcccacatattcaacagtgtccatcattattccctgtcatttatttatttatttatttatttatttatttatttatctatctattgagatgaggtctcattctgttgcccaggctggagtacagtggcacaatctgagctcactgcaacctctgcctcccggattcaagtgattctcctgcctcggcttccggggtagctgggtttacaggcacctgccaccacgcccagctaatttttgtatttttagtagagacagggtttcaccatgttggttgctttttctttggggtttgaaaaacttccctgtgttagcaacttgaccaccatgttggtcaggctggtctcgatctcctgaccttgtgatccacctgcctcggcctcccaaagtgctgggattacaggtgtgaaacaccgtgcctggccttctgctaaattttttaata

SEQ ID NO: 5169 - DNA, 2300 bp, Homo sapien
ggagaattgcttgaatccccacgggggcagaggttgcagcgagctgagatcatgccactgtactccagcctgggcaacagtgagattctgtctcagaaaaaaaaagaaaagaaaaaaaagactatttacatacatctttttaaaataaattaaatatttcttgcacctacaagtgtatttttaaagtttcagtgcatgttaccatatataattcctctttcatcatgtaatttctacaataaaactgaaaccatttcaattaaattgtaatacagaagcgtggttgacttaagtatatggccagctttcctgctctaagtcagaaacttacaaattttcgctggatgctctaaaggttaaaatttaattatactgacaaattaatagacataacctgatgttttacatagagccacaaatttatattccattccatctctgctctttgatttattgagtagccaaagtcagtctcatatcatcacgtaagtctccactatgaaacgagaaattactataaggcctgtcagggtgactcatgcctgaaatcccagcactttaggaaactgaagtgggtggatcgcttaagttcaggagttccagaccattctggacaacatggtgaaaccctgtctctacaaaaaatacaaagagttagctaggcatggtgatgcccacctgtagtcccttctacatggcaggctgaggtcggaggatcgctcgagcccaggagccagagattgcagtgagccaagatcgcgccactgcactctagcctgggcaacagagcaaaatcctgtctcaaaaaaaaaaagaagaggctggacacagtggctcacacctgtaatcccagtactttgggaggccgaggcgggtggatagcctgaggtcaggagtttttgagacaagcctggccaatgtggtgagaccctgtctctactaaaaatacaaaaattagctgggcttggtggtgcgtccctgtaatgccagctacttgggaggctgagggaggagaatcgcttgaacccaggaggcagaggttgcagtgagttgagatcatgccactgcgctccagcctgggtaacagagcaagactacgtcctccaaaaaatagagagagaacttactattagagcattcttgtccagtagaaataaaatgtgagctacatgtgtgattttaaattgtctttacatcaaaattttaacataggtgtattaattttacagtattttatttaacccaatatgtcaaaatattagcatatcaaaataaaattattcatgagatacctcttaattttttttatattcaatgtgtattttgtacatcacacatctcaattcagattaactacatttcaggtgctcagttgctacatatgattagtaactaccatattggacaacatcagacagcagaactctagaatttagatagatgttaagagactatattatataacacatctgagaaatgcattttatgctttcaaattgtatcttagaactatctaggttaagttgttttttgtaatgagtgaaaatggttgaggaatattttcaaatctaccaaaataaatattaccagtttttttttagtaaaatgcctatgagattgttgagatcattgtctaaaaatattttaaattgatttattttgaagtttttaatatttttaaggcaaaatggttatactaataaataaatcgtgcccaaaaacatacaaagtatatttgatgctttatttttaccaacttgagagatagtcacatgttatttcttttctgcactttctcaccttggtaaatctggaaagcaaaaacttagtatttgcatttgctttatgaaggagacagtaaacttgagctttcagtctcgccactagtctgtctttgtctgttgttaaaattatgagccagtctctatggccgcagccaaatgagtaatcactagtaatgtgactcgtgctggaagtgactccatcagcacctgtgacgggggattagttacagtttacagagcaccgcctcttcccttctctcagtgtgccctaagccaagtactcgttctcatttgggtgtctgcactgttggaagctactgcactgtgtttccacgcagacagagtacagtgggaaaggctttctccagctgatggatggctgttctctttatttggagtatcttactggttatgtaagcgacctcgagagaaattatcctgacccagatcggaggatgcagtagtgcttcagctgcaggatttcttagtcgttaacaccacagtgctgatgacaaa

SEQ ID NO: 5170 - DNA, 2300 bp, Homo sapien
tcagaggactgaaaaggatggaattcaacatgtagtgggagttcccaggggcccatttagagcagtttgcctacaaaattgaaaacagctggcagttttatataaggcaactagcaacctatactcttaagaatgtaatttggtgagtgggatttatgtaataactgatgaatttgcatgtttttctcaaatgactttatttgtatttttcgtttgctcctaggatatcactgaaaattaggattcaggcatttttgcatttttacaattgcatcatgcccatggtcacaaagcagatcattgatgacttggtatctggatgttgatctccctactcttttatccttacatatgttgaattattgtcaccaagtcactttactggttccttaatctacactgattttagaaatcttcatctgtaattcttaagataatttgctaagtattatacagtgtacactgaaaaagtggacttggaaataaaattgcccaagcaaaattttttctctcaacttgccgatatgcatttttgggtatgttttgctgttttaatttattacaggttttttgtttgtttgtttgttttcggggggactgagttttgctcttgttgaccaggttggagtgcagtggcacgatcccggctcactgcaacctccagctcccaggttcaagtgattctcctgctgcctcctgagtagctgggattacaggcatgctccaccatgcccagctaattttttgtatttttagtagagactaaaaatacatttagtttcatcatgttggccaggctggtctcgaactcccgacctcaggtgatctgcctcctaaagtgcagggattacaggcgtgaggcaccgtgcccagcctatttattacagttctatgtttggtctttggcaaaatttgaccatgattattaaaatccatcttccttataattttggtttctaacctattagcagtggttgtgtttctccacttcaaattgcccagcttgagtgttctagagaaaacagataaaagccttatagttattttaaacattcagattactactgtaaactctgttaactttttttttttaaatagaggttcaggaaaatctcaagaaactgaaatttagaatattggactacctataaaaaagcagtataaagggtgcctgaaatcgaactgctcactgacatttgtagggaggtttgatttataacaaataagttgatcaaagaagagtgattgttccaagttagagatctttgtgtgggttagggagtccgattgtaattggatgggaaataaatattttttttcttgaattgtgattggctaaaatccttttctttccatggtattttctaataactgaatctggggattttctctgcttttattatctgaccagtgtgtttgagctgtgtaccagtactaaaagtactaagactgtcgcagacacggtttgtgaaatttcaggacgttgacaagggcccgccacggagcatttgctgttcttataataaagcagtgacgaatttaaatctgtgaatagcttaaacatgtaattagtatcaccacaaatgagaagaatgaaaggatcacattttccccctcgttttcccttgaagtcatgaacggttggttctgctgtgactttggggcttagttttcagtagaagtgttgtcctgctctgctgctgttactgcgggactgctaattcaggctaactcaggcggcgggcgctgtgtgctctgaacatcaaaccgcgggtgaggcgtcaacccaggagtttattttgtgatcagagtggaaccactacacttcactttcccctcacctccacctctgagggagcaacgaatacaaaggtagacccccaaaagctttgaatagctgtcgcctactttcccgcggccctcttcattttttcgtctcccgctgccgccgccgccgccgcctctggatctggacggacccagtggccgctgccgcctccgcagggccgggcactactttccgtctgcggtggttccgccgaccctcccgcggctgctgccccgcccgcgccggcggaaggagacgcgctgcgcgccgccgctgcccggggagggagacggagcagtactggccgcggcgcggtggcggcggctgggctgcctcggggtcttcgacggccgcgttgggttttgtttcagttttcttgtgtggcgctgcagcacaaggctgcgaatctgggagtccaaaggagtgtttgcggggagggcccgaggtcgctgtgtccggggcagagcggccg

SEQ ID NO: 5171 - DNA, 2300 bp, Homo sapien
ggttgccttcagcaacccctgaaggcattaatgtactaggattagctgaaataattaatattcacaatgatgacctccaaagtaaaaaggcaagaaagacatttttaagagacttccaatgtacgtggctgaaattttttaaatctgatgcctaaagagtgactgtatttcacaaacattattcaaatttttattggacgtttaccctatctgaggctagatagttggaaaacacaaagaaatctaatacaccatgtctgttctcaaacattttaccattcagtacattagacatggtagaggcagaatgacacagataagaaatagaaattcaagtaataaattatgagagcacagacaaaattaggaataattgtccctgaggaaaaccaaggatgtcttcatggcacaggccactgaaaaatgagagttctgataggtacagaatggggagcaaagtgttaagggaaaaacgaaatctgggcaaaagcactgagcatgaaaatacaggttggctgaaagaagagaggtagggaacgggtacattaggagttgggggtgaaagtagtaaaagtaaaggctgtaaagctatttcaggacctttcatgaagggatctgaatgatattcaaattcatttgagttttattgaacaagagagttcgccaaaaaactggtgcttatgcagcacacctgatcctcaaataatgctgaataatggccaaaaataaaagattcagagttaaatgcaaattattactcaaattcctgaaataaaaagtcttgacatgaattaataagcgaaaagaacctaacccaagagtagaaagtagcttctgagcttgtttcttaaataatgaaatattacccaatttattgactgagaactgaaaataatttaggataatctgttgtgtcctttgattgtcttccatgcaagtcagagtatttcctaaacatattatttagcagtgcctcatatcacccttgaaaggcaagagacagactacagtattattaccccctttttatcacagggaaactgaggaacaagaagacaaaattacagtatggtcacaaaagccatcatattttctaggactttaattaaaggctccaagcctacatttcatcttttattcttcgcaccatctgaatactagaattatcttttactatcgtcttaactggaaaaaataaaaatatctaaactttaacatcattttctcaatttggtactgtcacaaaaaaaaaaaaaaaacagttttaaaagtctgcccttgaaatgatatttgcaagaacagcaaggtgtaagcagtaacccaacctccaaaaaatacagttgtaaatcttacagctgtaatatagttgtaaatcttaagacaggtcaggaatcctagacccagcctttactttgaacatctggcaggcctcagggaaataatggagattcgtgtctgtaaacagtctttgcagatgctctgatgaaaaggtgccctaagaggcccagaacagtggtatcactgcacccactactgcaaacatgaaatcctcctctgtccctccctgcattgcaccacgagactcgtggcacacacggaggcctgtgcaagaacctctcgacgattcctttaaaatgtggtaatataaggacgcctttggtgctgggcctccgtaaacactgaggataccggatgtggccaggcacacctcaaagtcttggctctccaaaaccagggcctggtcgagagttttattggacaccgagttcctgcgaatatctcacttttcacacaggcactgccaatccctaccctccagtacccttcctcagcctcctgccccactctcgccgcgagtgtgggcgtcccaaagagctaaggagggtaaggttggttagagcgcaggggccaaggccgcggcagcgaggccgtccagcgcgggctaggatcccgccagcccagccctggagcccggccgcctggccccagccctggcccgggccaacgcgccgccgccaccgcctatcagcggagcgcaggggcggggtgctgtccggactaggctgccgggccggcgggcgggggcgggcggggacgggcgggggaccgacctctgcgcagcccaggccgccgcgcgcacacaccgggcccggctcctgagggcgccagcgcggccccggggagcgcgaggagccggcgaagcgcgcggcctgccgttggcggcctggtccgcagcgccctgcgcccacccgccccggacgtggggcccaagcccccgtgaagatggtgtcctggatgat

SEQ ID NO: 5172 - DNA, 2300 bp, Homo sapien
gaagagctgggccagccatttcttaaagtgtacaagaagcaacaaagaaacccatgtggggtggagaagagaacaaagccaagagaagaaggagtctgagaaaaaaaaaatgtagtgatctccctaactctaggtttctcatcctcagcattatcaacacttggggctggatcattctttgttaagggaactgtgctgtgcactgtaggaggtttagcagcgtctgtggcctctgcccactagaagtctgtagctcacatctcccaccccagggtaaaaaacataactatctctatacattgccaaatgtcccctagacagcaaagtcgcctcaacttaagaaccactgccctgactaaacatttgtttatttatccctcaacaggcattatgcagggcaaaacccaagtcatcctcaactctcatcattcatatcctgcatccaatccataattaaaatcagccacctctgcctttgaaatatacccagaatccaatcatttctcatgacattcattttgacaactctggtccaagctaccctcatctctccctgaattatccccaaagcctcccacctggccaccctcactctaccctagcccgcaccagaacattttcatatagcagccaaagagagccttttaaaatgaaagtctcctcatgtcactctcctacttcaaacccaccaaggtcttctatcactataaggaccagtcagagtctttatattggcctataagatccttgaagattttgcccccacttgtccctctaattcacttcttactgctatcccccttactcattccactccagttccgttgacctccttgctgttcctcaaacatgttaagcacattcctgtctccaggcctttgcaaaggctgttccctctgccaagaatgcctttcccccagatatttggcttgcttcctcatgtcattcagatctctacccaaatgtttccatatcagaagggcttctgtgattaccctttttgagatagcaactcccattgcctctcttccctaccacccctaccctgctttaccccatgtattcattgtgtttgtttattatctgtctctccatctagaatataaactcacaagagcacagctttgccttgtttactgctgtgtccaccagcctctgacctaagcagtgatggcgctgctgaatgatgtgcggactactgtgagtgcaaagatgatcactctattgctttatcagagcaaaactggaaataatctaattctctaacaatgaggcaatggttaaataaactatgacttatatgtgcagcgatttaaaaacttatgtattcaaggtttcccaggttaaattgaaatcttgccagtaaaccctaacataacttccaccaactccacaaaatacttgtggaacccagacataaatgaaaactgatgtaactgaaaactagggttgtatatcaacctgttcccagaatctgggaggaattttcattaataacaaagaaaataaaaccagactctcttgtaacttccagaaacagagtctgtacacttgaaagtaggtagatgtacttgtcagtactccctacttccggctccctgaattaatcaactagtatttactgtgcaaataccaaatattgaaagctgtccaaaatgctttaaggttataaagatgtctcagaccttaataataatcaccagagcagtaactattatgccaccctacctttgaatgctctgcactgctgaagcacacacactccaacagggactatcttgcgtgatcttcatgattgcactgagacaggcagaggaaggtttgctttcctgtttgacctcttttcaagaaaaatttatcagactgggataaaaacagggtgttcatctgaaaagattgtcccagctggagtatgtactgagaggtgtgcagaggaaagaaaaccactacacgtggatgaagcatccagcgactgccatcagagggagccatcacaacacgcagaccggaaggtgcaaagggaggcaatagcgccacgggagcccagcgagggcccccagccgcagcagtgcggctgcgcagtgggagttgtagccatgggaacaacctagggacctggcaaggaaagactaggccagaccttagcaccccctgtcagggacttcctgctggttaatcctgcttcctctgccagcaggaagtcagctagcaaagaagccccaatgatatagtctacagcaggcagcctgccagggtgcagagcagggtagaaaatggatcggaagggcaaaggtgaggta

SEQ ID NO: 5173 - DNA, 2300 bp, Homo sapien
ctctttgtaggtcactcaggacttgctttatgaatctgggtgctcctgtattgggtgcatatatatttaggatagttagctcttcttgttgaattgatccctttaccattatgtaatggccttctttgtctcttttgatctttgttggtttaaagtctgttttatcagagactaggattgcaacccctgcctttttttgttttccatttgcttggtagatcttcctccatccttttattttgagcctatgtgtgtctctgcacatgagatgggtttcctgaatacagcacactgatgggtcttgattctttatccaatttgccagtctgtgtcttttaattggagcatttagtccatttacatttaaagttaatagtgttatgtgtgaatttgatcctgtcatgatgatgttagctggttattttgctcgttagttgatgcagtttcttcctagtcttgatgatctttacattttggcatgattttgcagcggctggtaccggtggttcctttccatgtttagtgcttccttcaggagctcttttagggcaggcctggtggtgacaaaatatctcagcatttgcttatctgtaaagtattttatttctccttcacttatgaagcttagtttggctggatatgaaattctgggttgaaaattcttttctttaagaatgttgaatattggcccccactctcttctggcttgtagggtttctgccgagagatccactgttagtctgatgggcttccctttgagggtaacccgacctttctctctggctgcccttaacattttttccttcatttcaactttggtgaatctgacaattatgtgtcttggagttgctcttctcgaggagtatctttgtggcgttctctgtatttcctgaatctgaacgttggcctgccttgctagattggggaagttctcctggataatatcctgcagagtgttttccaacttggttccattctccccatcactttcaggtacaccaatcagacgtagatttggtcttttcacatagtcccatatttcttggaggctttgctcgtttctttttattcttttttctctaaacttcccttctcacgtcatttcattcatttcatcttccattgctgataccctttcttccagttgatcgcatcggctcctgaggcttctgcattcttcacgtagttctcgagccttggttttcagctccatcagctcctttaagcacttctctgtattggttattctagttatacattcttcgaaatttttttcaaagttttaaacttctttgcctttggtttgaatgtcctcccgtagctcagagtaatttgatcgtctgaagccttcttctctcagctcgtcaaagtcattctccgcccagctttgtgccgttgctggtgaggagctgcgttcctttggaggaggagaggcgctctgctttttagagtttccagtttttctgttctgttttttccccatctttgtggttttatctacttttggtctttgatgatggtgatgtacagataggtttttggtgtggatgtcctttctgtttgttagttttccttctaacaggaccctcagctgcaggtctgttggagtaccctgcagtgtgaggtgtcagtgtgcccctgctggggggtgcctcccagttaggctgctcagggatcaggggtcagggacccacttgaggaggcagtctgcctgttctcagatctccagctgggtactgggagaaccactgctctcttcaaagctgtcagacagggacatttaagtctgcagaggttactactgtctttttgtttgtctgtgccctgcgcccagaggtggagcctacagaggcaggcaggcctccttgagctgtggtgggctccacccagttcgagcttctcggctgctttgtttacctaagcaagcctgggcaatggtgggcgcccctcccccagcttcgctgccgccttgcagtttgatctcagactgctgtgctagcaatcagcgagactccgtgcaggtaggaccctctgagccaggtgcgggatataatcttgttgtgcgcagttttttaagcccgtcggaaaagcgcagtattcgggtgggagtgaccaggtgccgtccatcacccctttctttgattaggacagggaactccctgaccccttgcgcttcccaagtgaggcaatgcctcgccctgcttcgggtcgtgcacggtgcgcgcacccactgacctgcacccactgtctggcactccctagtgagatgaacccggtacctcagatggaaatgcagaaat

SEQ ID NO: 5174 - DNA, 2300 bp, Homo sapien
attgtctttgtccttgtggaacttacatctcagtattataagtgtgcaaaccctctcttcctactaggagaaaatattatttttaatcattccttcacagtgagtttcttaaacttatttcatcagagactattgaaaagcacacactcttccatccccctagaatgagaatcctgggggagggattgggcagtctatctttttaagaaactcactggatgtttcatgtgcattcacagcttaggtaactctgggggaaagcactgccctattaagaacatactgcccaaggaattggtaatatccattgtactatatctgtaggaccccttttgattgtcattactagcctttatcaaacatctcatccttggagaatgtgaaagctctccacggttttccacagacagttcacctaacaaaaaacaacaaggcaaactttttcaagaataccattatttttaaataaaatgcctctacatggcagatgttattatgttctactttggagatgaaaagaatcgaacattattagtcatgatccacagaaccagaagatttattttaaagataaagttcagatgatgaacataaaggaagttatctcatcaaagaaggcaagactgagtaaatctcagaaatccaccatgtacaatatttaaaaatgctcactaaagttgttctttgtgagttaatgaaggtcagtatagtcaatattcagtacgtaatcctagcaagtacaaataaagttaatattattcaaatatcttacacaggcttattgcatgcaacacactgttctaagtaacatacagatattaaaatgacttaattctcaaaacatgaagtgagtttttgtttttatgcccgttttgcagatgagaaaactgaggcatagggaaggtaagtaacgcgcttaaggttacatagctggtaaattgtagccaggagttggaatctaggtgccaaaatctatgctgttaatcactaaactacgctgccttagtttttatacttctttaggaacctcagaccaaaagaaatttaggcaattctaatagaacaagcaagaatttgctaatcacagcttccttgccccaatcctttaatcggcttcattttcactgacttcttttttaaatgaagataacaatgttgttgaacaggatcatctagtggttagtggttcggcataagaatgactcgcttctgaagctcagctctagcactcgcttgctgtatgaccttgagaaagttacctccccaagtctgtttcctcatctttaaaagagaggttataataggacccacatcatactattgtttaaagagaaaacaacgtagcccatttaaagcacttagaaagtgctccataaatattattagtgtaataaatagcagcaacatcaataaagtatgaaccaaatgatctcttgattcgtatcctaacactaaaaatggtttatttcccttctaattaaaagagaattacaacaaccaaaacaacaaacgaaactatagccataaaatcaattatatcgtctgtgagaaaaccggaaaggctattggacacattaattcacttgtcatcagtcatcccctctattccaaaatgtttgtgttctaacatcctgagacaccttgcataatataatcactgtgactccaagaggtcaaatgggcaggcagttaatgcttctctgtgaaaagctcaataattcattttataaatttcagtttaaagcctgcgttgaggttaagaaaaattgacgttcggtctgtgaacttaatgtcaagctccagaaaaactctgggcagcacatgtttagcaattaagtggacacagacaataaagacgttgccaaattgtaaaacaagacttggaaatcacagaaaatgttgctagttattgatcacggtgaccattcagttcctactgagccacccaaaagaatcattcattttccagcagagagcctgctcatttgcaagataaaagagagacatttctgcacatgcccataatgttcttcaccactgggggcagctttacataagactgcattcactgaaaccaaagcaacagtccgagcagctttcagaatgacagtctgcagaagtgagctgagcgtgtgcgcggtacggggctctcctgccttctgggctccaacgcagctctgtggctgaactgggtgctcatcacgggaactgctggggtatggaatacagatgtggcagctcaggtagccccaaattgcctggaagaatacatcatgtttttcgataagaagaaattgtag

SEQ ID NO: 5175 - DNA, 2300 bp, Homo sapien
tatgtaagtctactgtggttataaatttaagaaaatcacttgtacacctgtgaagcactaaagcatgcatggtgaagaatggtaggaaaagaaatactttttctagtgaaatgattagtgcacaatagtgatcgacttctacaatgaaccaaaatacaaactaatgttgattctttgctttaaggggaaaaaaggttattttttacactcccccttttgtctctgtccttcatcacttgtttttagagacaaattctctggagtgtttataaaacagcagtcctgggaaaccctgatttagtgggtttttagaccttggggctctggggtaccttttcacaccccaaatggcacactgggaaggctagatatcagagatcaatctacatccttgtgagagtgggcctgtatcttttctgtattcaccagtaatgactttaaaattcatgcaaatcagaagtgcacatttggaaaaaaacttccaggatattacatcagagtaactgtcaacctctttaaaggaaaattttgattatactgagctgctttacctgcctattaccttccttcaaattaattattcctcagatttaactgtatggtattaatacttttaatacttttgtatcaagaaaaggaagtaatctgtactcatagccatcaacaagtataactgtgcttttaggagtactgtgtttgccgaggtcatggtatagttcagtataaagtgttttaatgtgactttttgcacagcacgtgaatggactttgaaatagcattgcatgtctgagaattctgtctctttaaattgtctgctttgcttattggaaatgataacaatgattgtttgaagttattattaatttttttagttttaacaaatcctaataaaggaaaacatatctattaaaaactgaaataactactcactgaaataaacagcaaacattatagatatacaactttaattttgaatggtagagaattttattaaatgaagagaggcaacttaatagagtattaaggacagacaccagatgcatttgacagatctgaatttgagtcaggttcttacacccattagcatttttgactttagtcttttcacctaacttctctgagccttaatttctccatgtagaaaatgaaagatgatgtctttcctatctcgtttaggattgctgtaatataataatatgtataacagtattgcttaaagaatattacctagtggccattgcagtgcataagaactggtaagatgccttacctggaaaatataagggaaaagtgttggtttttttaaaatcatgaaaagataagattgaaaatggcgtgtctttgctgctaattaatgattgctttatgttcatggagctgtaacatttttcccacctgcagaacatattatagtaagctctagttatattttctaggatcgcttttaataaaactttaacaaacactcgtgaattccaacaaaaatcttgatcattttacagaagtgtatatccaaaaccaccgtgaagctggaaatacatcaaagacgtgattacatttgtccaagttaagaggacaaccaatgagggcacaatggacagggttctttaggtatgttgggtataaattgtgataatttttatcttcgtagggttcctgaagacaagcaagtaggttttatgttttctaagatgaaaaagaacaatgatgctttttgaaataaagctttggagaaagtctgcagaataacaaaggttttcatcattctaaaatcataaaggcaaatatttataatttcctcacaattgtgagctataacaatttatattatatcaaataatttttaaatgaaaaatcaacctaaagggaaaaggggagaagatactatagagaggactgacctgtaggtgggcatctaggagatctggcaccgaggtggtggcatttctattttctctgggtttcagttctctacccatgaaatgaatgggttggactagatgatccctttcagctctgaaattccgtgaccttgtgacattcttcatactctgtgacataggaagtgcatcacacactgtagggttttccccttctgtcagtacagtgcactgcacagtggataagaatgtagactccagagccagagagagttgtgtttgacttgtatctacggagcttgtgatttttggcaagttaccataatttctttaagtttctgtttcctcatatattaaacctaaagataatgcctatagagttcttgaaatgacagaggaggtaatgttggtcaaaaccat

SEQ ID NO: 5176 - DNA, 2300 bp, Homo sapien
ttccaaatgtaaaatatgatatttacctggctattgttagttattacatgaggaaagaaactgccacatttgagtatgagagacgatcttatagagcagtttctttcaatgaagaacccaatgcttgtttttattattagaaatagaattcccctttaaaggaaaataacctataattttttattttgaatgacaattgaggaagagaattaacatttattttctctttggaaaatttagtactttagcatagaggatgtgccattagtggcaaatctgagagcaggaaaaagagattgctctttgaaattgctttttcacttttgccatagttaacttagttaacttgatgtttgtgatataattgcatcaaagaaacagaaaattttttatcttcagccaagataaatttgtggaagttaatgattttagctaattagatagtaaaatttttatttttagaataaatcaggcaaattgctgtccatgtctttccacactaagtgagtgttaagttgtgaaataaagaacctataaattgtaagggaactttgttagtcataataccgcatgtttatgagaaatatattaatgctgtaataacaggaagtatatctttaaaattagtctgtggcttctaatatataatgaaaatttagcaaatattaaacagggagttaaagaggttacaaatgtcatataattttgaagagagattttatcctgtaatttagttctgttttcttcaggatttgttttcgattttctaatggagcttagaatctttatgtaagattgttgttcatttgtttgtcccagaaaaatttaggattgtgggaagtctttctgatgattgaacccaattctgcttcttcttggtaattctgccacttcttggtcttctagtgctttttttcagaggatgcagctgttggagcagatagaggaggaaataatggtagtgtgatacagatgagaagcattaatctgggctctaaaagtcaaatttatatgggcaaaataaaatgggatatttctaagcacatttactaaggaaagttgagatgatgtgtcccagttcctagctgaagtataaaaatacatgtcattgggtgcaatatgtgggctttcagaatctaataataccctctgctggctaaatgaggaattgtgtttaaaaatgagtgacttggcttttttgtttgtttgtttttaaaatatggatgattgctctattataaaaggattgagcagtgcagagtattgtgaaataatataggaaaaaattgtaaatgtgaagaatgaagccaatatgttactaaaatgttttctaaagtgaaattaatgtagaaatatctataagtagaatttctgaatcttttggtctatattttaatcatgaagtaggtcatagggaaggaatgcagtagggggaaaatacgtgaatctctggcccctatcctcaataacaattcagattaattcaagatatttaaattaccttcattagttattcctaaattactgttgtaagagctattgacaaatatatgaaggtgagataagaactgcttttctcaccccaccactggacactacctgggtaacgggatcaattataccctaaatgtcagcatcatgtagtatacccatataacaaacctgtacaagtacttcctgaatctaaaataaaagttgatattataaggaaaagaaagaatggcttttctgtggatagcctgatttaatttctgttaaaaataacaggcatattcttaagtaacctgaaagcttgatcgcttcagggaagtatcatataacatgcctgttttatattttttctttctacttttacaaattctcaaaaattctactttgggatttacagtgttttgggtacataatgaccatgcaagttgtatttagaagttgatagtgggtaatgtattattatttcattgtaaatctgaaaaatagaatttcaggtctgattctgctgtttgatgttacccttcactggcatgttgctttaagagcacccatccccccttcttgcttgggccactgtgtcctgtcagtcatcctgaaatacactagggtgcttgtcaggctgtttgcttacagatgcatcataagccaaattgtgagccatgatagtggcactgaatttctaaatacaagaaattgcttagacaattggtttagtatctgtatatgggcaatactctgtcctgcagtaggtgagtggagtgtcaaacttttaaaaatcaaactttgctataaggcaaatcctagtaatt

SEQ ID NO: 5177 - DNA, 2300 bp, Homo sapien
tctctctcttttttctctcttttttttttccccagctcttctaccctcaatgtttgattgcttgcaagaggcatgtgagccaaaattttaaagtttgcaaagtataaagaaaggaaacaagtaaatagggaaggagaataaatactgaacaagactgggcaaggtgacaagaaagaactactgtgaaaatctggaagagggccaggatgcaaaatgcaggggctgtgtagtttacaggaactatttagcctccagcatgcctcagcgatcacacagagaaaggcagatttctctgcttttgtctcctaccctatagttagctatggaaatttgacataggtgatatatgttttctgtcagcaaactgatacaaatacagaggaccatggggcctgtgatcaacaaatccaacgtgatttgaattgctaggaggggacctcttgtggctatagtgggaaatacttcagctaaatactaccttggaggctgcagatatttttatgaaggaattaaaaaaaaacccactataaaagctctttaaaattacatttcagatatttataatatttaattgttttgataacaccaaattctgtaagaaggttttatctgtattgcatctctgaagagttcagtgtaatttaaagctcttcagcttttatccatttaattcacatatcctctgaaaagcaaatgaaaagaataagagttctcatctacattttgtaggtggaaaggagaggtacagggcaggtaagtaacttattgtggtttcacagcaggacaagctaggcttatgatagaatttggatatctcatcttgggctcaattcaacagtcctggtttggaaaacattcattattaaagctctaaaacaaaacctgctattttgcaagtgtcaagtgatttctttattcaagaaaagatggattgagagacataaaacttactctttgtttcactgtgaaaagatgctattcctagattctccagggggaaaaagctgctttaaaaaaatctggggaggatagcatgttagcaactaagaatctttagataaatatattgtcaattatgcccattttaaaggtagctacataaaaatacagttgttttgaaggctatcctgaaaatcatataaaatgaactcctttcatagttgattctctgacagttcccagaccctgcctttcctcttggctccctgaaatttgtgctaagagtatctggagagccaataaataaatgctttctttttattttgaattcagccttttaagaacaggactgccaaaactcaaacaagtagttcatattttagttagcacctcttgttttagaagctattagaagaaagtcggaaaaatggtaatgtccaaggaaatgccacagaagttcgagtgggatgtcaaggaattgatgaaatgataaagattgtttcagtggatgtgaagatattgagggagaagatatcaaaaaaaagggaaaaggaaatgtgaaaaagaatagtcatagagagaaaaaataaattttggtggagaagacttttttttttggtggcttaaatttaataatgggttaacctattgagtttttggtaaatcttcagtttagattctttactgataatgatgtggttcctcataaatactggaaggagagagtgtgatgcttggtacaagggatgagacaggtaatatttcagaagaagaaaaatacgatctcagatgtgacacatggccttgatgccatcatctctagggttctgaagacattgaattttacataattgatcttttgatgtgaggatttcctggactcttgttttccctgctttatcatttttcactttcaataattccagcctttggctttaattagatagaagaggttcttcttttggaaaggaactagagaaatgcaaatctaaacttattcagagctatgtttgtaggtctctaggcaaagtatgtgtctggcctttttcaacgaagtattttcagtaacaagttgtcagtgaggtcagtgactagcggttcaggattagataccacccaccctggcttgtaacctcccctttctttcttatcctgggtgaacaacgctcagcgaaattgactgccccactgtcatctgcctctcaatttggtactctgtaactctgtgaccaccaagaagcctttttccgtcccccacaaagctctttttggaaaattccctacgggagctgaattttaagcccatttactttataggaagaaacagaaaggtaagaatcaagtttgtaaagagaagagct

SEQ ID NO: 5178 - DNA, 2300 bp, Homo sapien
cctgcctcggcctcccaaagttctgggattacaggtgtgagccaccatgcccagccctaacattccatttgtttagtcatccgttgatggacacttgcattgcctccactttttggctattatgactaatgccttgatgaacatgagtatataaatatcttttcaagttcctgctttcaattcttttgtgtatttacccagaagtggaattgtggggtcacatggtagttctatgtttaattttttgaggaaccaccatactgctttccaccatggcaacttcacatcattaaaaggccatttatcagtgatttagatcaagatattgtgatctaatttttttttttttttttgagatggaccctggctctgtcacccaggctggagtccagtggcacgatctcggctcgctgcaacctccgcctcccagattcaagcaattctcctgcctcagcatcctgagtagctgggactacaggtgcgtgccaccatgcttggctaatttttgtatttttagtagagacaggatttcatcacattggtcaggctggtctcgaacccccgacctcgtgatccgcccgcctcggtctcccagtgctgggattatggcatgagccaccgtgcctggccttaaaattctatatagaacttttagcaagacagcatgtacaatgaaggattagtaaaaaatggtgtttcagtgctttttcttgcttctcttcagaaataaacctttaaaaagatgtatataggtgggctaaaagaaaaactattttttcccctcaggtgggggaatttaaagtgttaagggccaggcatgttggctcacatctgtaatcgcagcactttgggaggccaaagtgggaggatcacttgagtccaggggtttaagaccaatctgggcaatatggcgagaccctgtctctctgaaaaatgaaacaaaaaaagtgttaaggcagtcaaagtgttgtgtccctgaccactcaccttgttctctaaatcccagacctgaactgtgtttcttagggccaaaatgaactgaaacataaattgcctggacctacctcagactagagacactcctgagtctggagaaccaacccaggagaaatagcacagccatctgacccgagttatcatacagttcttctcattgtcctattttattttctctaaagcacaaatcactattttatttttttattttttgagatggagtcttgctctgtagcgcagtctggagtgcagtggcaccatctcggctcactacagcctctgcctcctgggtccaagtgattcttctgcctcagcctcccaagtagctggactacaggtgtgggccaccatgcctggcttacaaatcactattttaaatgatcgtgttttttttttttttttttttttttgcatgtttttcagctgtcttcctccatcagagcgtaagctccataaaaatcaagactgtgttattggctgggcgctgtggatcatgcctgtaatcccagcacgttgggaggccgaagcaggcagatcgctttgagctcacgagttcgagaccaggctgggcaacatggcaaaaccccctcctcttaaaacataacaaaacaaaaaccaaaaattagctggacatggtgctatgtgcctgtggtcccagctactagggaggctgaggtgggaggatcgcttgagctggggagacagaggttgcagtgagctgagactgcaccactgcactccagcctgggcaacagagtgagaccttgtctgaaaataaacaaataaaaaataaaattaagtattttaaacactaagaaaagctcccattatccttattaacacatcctaagattttaccacattgcttcacattttttttcttttttttttttaaaggatagagacaaaaatatataggagatggagaagtggctaatgtggcaagtttctgaaaatagacagtctttattaactcataagacaaatggttcacatgcatctcttatataaactcaaactacagatcccaggcagcactgcaataatagacacgtggactgttcttttcttctctgtaaacagccaatgagaggcagagtttacaaaggtctaggatgacatctggtgtattgactgtggccagtcttaaagctagtttttgctatgtggaacatgctgctctaattcagatttaaagagtttcttcctgttaattcgaagctcactgtgcctcttgtttccgagggaagaaggactgattaagtcatctaaatggatgcaatactgaattacaggtcagaaga

SEQ ID NO: 5179 - DNA, 2300 bp, Homo sapien
ttcatatattgcattccaccaacgtagctgagagtcaatttatgaaatattttgtagtgtaagacagaaagtggggaggaccaagtatgtcaaccactaggagtgtggtgcctagtcaggaattgggaggagtgtagcaagaaaggaaggacaacaggatttggtcattgattggtcagatggatttcagagggattggtatgaaggaacgcttcaaagattttttttttaatttaagttccaggatacaggtgcagaatgtgtaggtttgttacatacttataggtgagccatggtggtttgctgcaccaatcaacccctcatctaggttttatttatatttttttttgagacggagtttcgctcttgctgcccaggctggtgtgcaatggtgcgatctcggctcaccgcaacctctgcctgctgggttcaagcgattctcctgcctcagccttctgagtagctgggattacaggcatgtgccaccacgcccggctaattttgtatttttagtagagacggggtttctccatgttggtcaggctggtctcgaacttccgacttcaggtgatctgtccgcctcggcctcccaaagtgctgggattacaggcagcagccaccgcgcccagccaggttttaagtcccgcatgcattagctatttgtcctaatgctctccctccccttgacccccacgcaaccaaagatggttttaaggcttctaggactggagatgattactttcagaaatgaatagtggtgaccagatgaaataagacttttggatgtagataggaccttagcgatatatttccagctttttattttttattttaaggatgaagaaacagctttaagttggttgcctaaagtcacgcaggtaattgatgcagtatggccagaacccatactaggcttaagggacagtgtaccataaactcgtagaggtcctttaaacagatagaaacgctgtgctccaggcagatgccataacaaacactggctctagatctaccatgggttatatgggtccttagttaagattagatatggagtcacagtgtgccagaatttcagggagagaggaaagtggaagggctttccactaagccttttgaactactaggtacccctcgttttacatctggttatctcatttaaatctatgacgttttaaaatacttattaccatttaagacatgagaaaaattaagtttagaaacggctagatagctcacgctagaaaggaaggactccaaattttaaccaagggcagatgtgcatggaggccaagtcatttccttcccatgctctcatactgacccaacaaacccattctgcacgtgagaaaactgaggcccggaggagggaattcacacacgtttgaagccaagctggggccagaaagtagatcggctgatctccaaacctccacgtcaaaggtcttcccaggaggacatatgccttcaaggattttacaatgtataccaccctacaagtgatgggagagaggggaaaaaagcaaccgactaaggagaaaagcaaggagcagaaaaaggagcaaaagaggagctgtcagaacggtgtgaggagagtgggaaaggagccgcctccttttgcctctcttcctacttattaacaaaacagaacgactatccaacgtatttcagggagctaagtcttagccagcttcagctgtgttttaacccttagctaaatatagacaaggctaaggcaggccaggtgtacacttcaggaagacgtggaaattcccagggcggaccaaaacttgagctgttccggcggtagtgatttgaggtcagtttgaaagagaagttgagaaagcggccgaggggcgaatttggctgcactacacgctcgccacaaagaggaagggccgccggccgccggggccgagtgcgcttccagcccaggcggagcggtagacgcaacagcctccgcccgccacgtgacccgtagtgttgtggtctggcccgcgtgggtggcgggagcgccgagagggcgggggcggcgatggggcgggtcacgtgatggggtttaaatctcccgcagccggagccgcgggggcgccagtgccgcgcgtcgagcgggagcagaggaggcgagggaggagggccagagaggcagttggaagatggcggacgaggcggccctcgcccttcagcccggcggctccccctcggcggcgggggccgacagggaggccgcgtcgtcccccgccggggagccgctccgcaagaggccgcggagagatggtcccggcctcgagcggagcccgggc

SEQ ID NO: 5180 - DNA, 2300 bp, Homo sapien
tcatagctcctaaaggagatgcagggaattgaaactctgcttttgttaagggatgtcagtctgatggagaaattgggtatttgttagatctttatgagaaactggaaacctaattggtattcacaagtgaaaagcttagtgttgggaagagtaacagattcctaccttccctccatattaattaagatgatgtgattgtggcgacttgacattttctatttgatctaccttagggttgcagctaattagttacctaagactattgcatagtgtgtgttttatacagagtatattacatgttagcaaccagagcaactgctgtagtaaaattttgtcctgttttctgccatttcgagttgcgaaagggtgttacataatcttagatgatcatcaggagtatgttttgctcacagataacgatgtagacaagtttgtttaacttaaattgaccttgactccaggtcaaattggagtcaactctggtaagatgatgaaacaataacttctgaaatctctatttgaaatgtcaggatttttttgtacgattagtgggcacgtctcaaagaaatgaagaattgaaatattatacaccttttttttttttcttttttttggatacagggtcttgctgtgttgccctggctggagtgcagtggtgtcatcatggctcactgcagtctcagcctctcctggcctgagtcttgctctgttgcctaggctggagtgcagtggcaggatcttggctcactgcaacctctgcctcctgggttcaagcaattctcttgcctcagcctcctgagtagctgggattacaggcgcacaccaccacacctggctaatttttgtatttttagtagagatggggtttcaccatattggccaggctggtctgaaactcctgaccttgtgatccgcctgccttggcctcccaaagtgccaggattacaggcgtgatccaccgtgcctggctatacattgttttttttaatgaaaatagagaattgttgtagtattgaggtaatagaatcctaactaaaggagcaatttctttggaattacttctctgtaatagaaattcttggctggtggagtggctcatgcatgtaattccagcactttgggaggctaaagtgggaggatcacttgagccctggagtttgagatcaccctgagcaacatagaccctgactctacaaaaaattagcctggtgtgctggtgcgtacttgtagtcccagctgctaaggaggttgaggtgggaggattgcttgagccggaaaggttaaggccataatgagccatgatggcaccactgcactccagcctgggcgtcagagcgaaactgtctaaaaagaaaaaaaacaaaaagccgggcgcggtggctcacacctgtaatcccagcactttgggaggctgaggcctgcggatcacgaggttaggagatcgagaccatcttggctaacatggtgacaccccgtctctactaaaaatacaaaaaatcagccggtcgcggtggcaggcacctgcattcccagctaatcagtaggctaaggcaggagaatggtgtgaacccaggaggcggagcttacagtgagccgagatcgcaccactgcactccagactgggcgacagtgtgagactctgtctcaaaaaaaaaaaaaacaaaaaaaaaaagaaaaaattcttccctacttaaaataatttgttgaaatggtttattttcttctcaagttgcatttgctttaatttgttggctaaatgcttaaaaggcttaaaattggcctgacttaaaaattccttatctgtgttaaagatggaatatgaggtatgtttaattttactcagttatttgggagttttatttctgaaataagggtagggttgtatttttatttcttaaaagaagtttcagactaaaattttctttctcaactcttacctaattatatggtaagagagctagctagttcctataaaggtagaagatttaattttacaaattatgccatgcacattttaggtgtctgtttcatgtggaatacctgacttcaggtcaagggatggtatttatgctcgccttgctgtagacttcccagatcttccagatcctcaagcgatgtttgatattgaatatttcagaaaagatccaagaccattcttcaagtttgcaaaggtactatgaactcttctggttgtttctttggccttctctcatgaaaaagtattttgttcacatacagccaccttaaggttatcgttcattgtttagtaaagtgaatgctgctactgtggcggagtaaga

SEQ ID NO: 5181 - DNA, 2300 bp, Homo sapien
cagtgttaaaaatctccaaatataatcatggttctgttgatttctctttcatatattttcaagctctgctgtttttggattgttgtgacttcttggtgaattaatccttttattattatgaaatatgccccttttcctctggaaatgcttgttttgaactcttactgtaagagtagcctctctggccaggcgcggtggctcacacctgtaatcccagcactttgggaggccaaggtgggcagatcacgaggtcaggagattgagaccatcctggctaacatggtgaaaccccatctctactaaaaatacaaaaaaaaattagccagaggtggtggtgggcgcctgtagtcccagctactcaggaggctgtggcaggagaatggcatgaacctgagaggcggagcttgcagtgagccgagatcacaccactgtattccagcctgggcaagagagcgagactttgtctcaaaaaaaaaaaaaggagtagcctctcagctgtgctttctgttggtttattgggtttgagttttatttatttatttatttatttttagcaggtcttactttgtgccttgtgcattcatggtttagagttagccaaggatgtggggggaatttgcacatagattttggggcttcgtcctctggattcctttctttgatttttttattcctcactgtctggctgtgctggcagcttcagtctgtctattaagactgctgctttctgcttgagctctatcctctacttgtgtccattcctgtttctgcctacttttggtggatctccagtgtttttaagtacagtagttgttctttaatgtattgtctagagtttataattgttagtgccaggaagagtagtctgatacaaagtattctgccatatttagtaccagaattcctctagtctcttttaatttagaatagctcctttttttttcaatccctgctaccttgactttttgaagattcttggccagttttcttataaaagtttcataatcaggatttgtctgattgtttcctcattgtgatgtttatttaacttgttcctctatcccttgtatttcctataaactaaaatttagattaggagacttgattggatttgggttaaactatttttacttcatagatcatttgtatgcttcttgttgagctatatcaccaagaacataatatttcattgttccagtattggtgatgattagttagatcacttgatgaagatggtgctctccactgtaaagatttgtttttatctttgtaattaataggtaatctctagggtggtaatttgcatcctcttcatttttcacatcgtgtccagatatcaccttctaaagtttattctaatcagatgccagcacagagcaacacttaacaagcattagctgctattattattaaggtcccatttcccaaccataagtctttatagtatctagtttatatataccgtatacagtttaatcattacatatctcatactgtgttgtagttataaagacatgtcttttctagattttggggtactgaatgcagatatcacatcttacaaatctttgtgtctcccatagcacttaactagcattttgcatatagtaggcactcagtaattattttttgtaggaagaaaaaaatagctaagaaaatccccaaagcatttttttctttagatattttaaatttctctgtcttggccaggcgtggtggctcacgcctgtaatcccaacactttgggaggccaaggtggacagatcacaaggtcaggagatcgagaccatcctggctaacacgatgaaactccgtctctactaaaaatacaaaaaattagccggtcatgatggcgggtgcttgtagtcccagctactcaggaggctgaggcaggagaatggcgtgaacccgggaggcagagcttgcagtgagctgagattgtgccactgcactccagcctggttgacagagtgagactccgtctcaaaaaataaaaaaaatttgtctgtcttgagtactggttaaatttaatgtcaattacattttcttttgtaggtaaatgagaaaatgggacagattatacagtatgataaattttatatacatgaagtacaagaattgatagacataagaaatgattatatcaactgggtccaacagcaggcctatggaatggtaggttttctgtgcaatttgtgatttcatttttatgtatatgtatctaataaaaaaagaaacaattgcttggttttgaaatgagaaagttttttcagaacttttatccagaacttactttttaa

SEQ ID NO: 5182 - DNA, 2300 bp, Homo sapien
ttatagcctaatttactttgcagtttcacagactcttacgatgtgcttttaaaataagattttattttaaagcatttgtaatttagctgtcaaagatctataaatcttttcagatgtttgaagcagaccctgaattacttaacattaccacgttgcttaagtttgtgtatggttatagaggtagagagtttaaattgagacttgtacacgtgattttttaaattctccaagtaatgcttaggcattaattttcattgtgctccaaagtatattcattgtaagacattgtctttcttttttcttcttcaccatttcatatttgctgtagtgcaaaattttccttttctttcttttcttcctgccttccttttttttttttttctttgaaagtgtattcattttaaatgaagtaggttttactttttgtcaaaatataggtggcagctagtttggaaaagaatcttattcctaaactgactagctccttacctgatgttgaagcattgaggttttatcttactctaccagaatgtcccctgatgagtgattccaacaatttcacaacaatagcaattccctttggtacagctcttgtgaacctagaaaaggcaccactgaaagtacttggtaagaattctaatattttttcttttgaaaccttttctctttaaatgaaaatgcttcataagttcttttgccatttgcagttctgctgccctgcttatttgacactgtcttaggcaaaaatgaacctgtttttccttttcttgcttttgtctagtcttttgattctagttgttggagttgttgaaagaaaaacatgttagatatagaagttcaattaaacataacagcagagacagtattaggaaagttaaaaactgtcacccgtattcctttccctcatcgcctttagtataatcttgctattaaagaagtaaaggaggaggaacaattaaaactgaacaaacatgggctttaaatcttcttggaaccctgatataagccctttatcttgtgtttccttcacttgctaatttcatgatatttgattttatttttctgcctatagactagattttattgctcatctgatcttgcacttctatctcttactgttctggttttttggcataaagttttctcactttaatttttctaattgtctagattttatctctatttcctggcctttatactttttttgctacatttaacccagtgcttttctttctaatggtatttgttagatatgtggagctgagatatatagaagtaataatgtcagtacaagaactttaaggctgagggtaaatggaggaagcaacaagcaaggggtagaatatgggaatctgagggaaaaagagtcaagcagggactgaaaagagtattgctttcctgttgtcagaagtttttgtattctttctgcctgcttcataggattgaagtgtttgtacttagtaactacaaatagtgaatgtggggaaggacccatatgttacactttacattgttcagcttctgtatttgatcttcaggagtaccttgcattttaaaggtagtggttcacaatatttcaaccatatattaaattgaaagataaaagttagaaagatcctttagtattagagcaatacaatttaaaggatgttttgtttaaaaattgaaactgtaattttcaaaacattttttaaaaactggttttaatattaggtatagtggtgagttttttatataacttaggaaaccaagaatataaattcaacaagactttcacactttatttttgcttttgagagcttttcggacaatattgtttaacttggtcggggggaggtttataaaccttacaaatgttacataagatattgtgttatatgcatctttctggggttttctcaggtttaacaactactgtttcagaaaaaaagtcagtatgattttgaaaattgtgattttttaaaaaattcattttatttgcatgttcactttttaataacagaaaactggtggtcagtacttgaacctccactattcctcaagatagtagaactttttaaggaagttgtggtacatcttttgaaactctacaagatcggtattcccccttctgaaagaagaattttcaacagttttcttcatactgcattaaaggttttagaaatactacatagggtatgtccaatcattcctttattttcctctttccccattcctattaacagattgatactgttcattttaacattaatctattaaagatttagattggcaaaaacaatgcatattatagaaatttg

SEQ ID NO: 5183 - DNA, 2300 bp, Homo sapien
tcttatttgaaaatttagaactgtgggccaccagatgacttcagatgtcccaatccgacaaagcagatctggacagtgaatgaagctctaattcagaaatggctgagctatccttctggaaggtttcctgtggagatagccaagtaagaaaagcattttgggccaggcacagtggctcatgcctgtaatcccagcaccaggcagattgcctgagcccaggaattggagaccagcctgggcaacatggcaaaaccctgtctctacaaaaaaatacaattagctgggcgtggtggtgcacacctgtggtctcagctacttgggaggctgaggtgggaggatcagctgagcccaggaggtcgaggctgcagtgagctgagattaacaccattgcactgtagcctgggcaacaaagtgagaacttgtctccaaaaaaaaatatccatggatatttttaaagatcttaattaaatatgtataagttgtagttctttcatgtgcatagagatatgttaaatgataacataaaatatttaatgtagccattttaggattggccttgaaatgtgttccttctggttttataatggtcactatcttaacttttatactttgtggaagacttgagtattatttctttcttgaatattttgttaacttgcctagtagcacttaagatgttatttgttttttgttggtatttgggatgatgggttgtatttgaaaagctgttttgtttctctagcttgttttccaaaactataatttttctgaaaatcccaaaggcatcccagattaggctcactgccaatataaaatgtttaaaatttttttaaattaaaaaactttttacatgaacatacacacttaatttttaaaataccatgttttaaagcagataacattggataaatggatgaaagtaatatttaagaaagtctagaataaacagtaataccttcatcaagtattattttatcagtctttagcaatttatgtaattctgattcatctaattgggtgttagaggagtgctctgtagcattaaacattagattaattattcattttaattcttttttaagaaagggtaaacaattaaatttctgattctatgattaaaaaaacttttttaaattttttagtgagatagatggaacgttttcttcctctggttgcctaaatggaagttttttagctgttaggtaagtggcaattctttaatatgctgaaattttcaaatttattgtcttaaatagtatatcaaattaaaaaatgaaataattttaaatttttattctatttttttttttcttttctgttttttagcaatgatgatcactatagaacaggtaccagattttcaggggttgatatgaatgctgctaggcttttattccacaaacttatacaacctgatcatccgcagatatctcagcaggtctgtttttaaagtattatgtttacagtattatctgttgattttgttttcttttgttttatacgtttatagcctaatttactttgcagtttcacagactcttacgatgtgcttttaaaataagattttattttaaagcatttgtaatttagctgtcaaagatctataaatcttttcagatgtttgaagcagaccctgaattacttaacattaccacgttgcttaagtttgtgtatggttatagaggtagagagtttaaattgagacttgtacacgtgattttttaaattctccaagtaatgcttaggcattaattttcattgtgctccaaagtatattcattgtaagacattgtctttcttttttcttcttcaccatttcatatttgctgtagtgcaaaattttccttttctttcttttcttcctgccttccttttttttttttttctttgaaagtgtattcattttaaatgaagtaggttttactttttgtcaaaatataggtggcagctagtttggaaaagaatcttattcctaaactgactagctccttacctgatgttgaagcattgaggttttatcttactctaccagaatgtcccctgatgagtgattccaacaatttcacaacaatagcaattccctttggtacagctcttgtgaacctagaaaaggcaccactgaaagtacttggtaagaattctaatattttttcttttgaaaccttttctctttaaatgaaaatgcttcataagttcttttgccatttgcagttctgctgccctgcttatttgacactgtcttaggcaaaaatgaacctgtttttccttttcttgcttttgtctagtcttttgattctagt

SEQ ID NO: 5184 - DNA, 2300 bp, Homo sapien
ccaggtgcagtggctcacacctgtaattctgacactttgggaggctgaggtgggcggatcacctgaggttgggagttcgagaccagcctgaccaacatggagaaaccccgtctctactaaaaataaaaaattaatcaggagtggtggcccatgcctgtaatcccagctaattgggaggctgaggtgggacaatcgcttgaacttgggagatggaggttgcggtgaaccaagatcgcgccactgcactccagcctgggcaacaagagtgaaactccgtctcaaaaaagaaataaataaaaataaaaaaaggaaattaaggaaacttaacttttggtacctaactcatagcctccagaaacccattcatgtactgtagattagtcaaccatcttgtagggaattgtttatagagggcacaatcacattttaagagtaaataaataacatcctgctaaatcttttgaggaaatgagcaattccatatagatttgtgagaattatttagaaaaaagattttaggttgaataattggcttatttaataaagatttacccttttattctattcttaaaacttgtttttggccttagggtattcttgtgacttacggaaaatttgatagtaattatcaaattattgttctaaactctgaagctcatttttggtataacctagataacaattgcatatttgtatggacaggtatttactgatttcttttacaaataaaacattgtgcttgcttgtaaggaataatcaaggaaattaacatgtggtcatttccttgaaaagaatggataattctatagcagccatggtcacaaataatacaaggtgaagaattagtcaactaaggaatgggaataggataacagggatagactatggactagccaagcaatatttttggtaatagatactctttccagtttggggagcagaagaaaagaaaaaaaagaggcccggaatatctttttcaaaagaaactttgttgccctttctttattcctaataaatttgcttattaatgtattcactttggggcctaatttggcttttactgacaaatagctgccaacaaagagctgtatgtattatcttgtacacctatattgaaaaaaaaaattctgcattatgaaatatttactccagaagttttaatttttgtttgctgtttctttttaagaataattttttttttttttagagatgggtcttgctatgttgcttgctggagtgcagtggctagtcacagatgcagtcatagcatactgcagctttgaactgggctcacgccatcctcctgcctcactctcccaagtagctgggactacagacatgtgccactgtagcccagttcaattctttcttttttttttttttttgaggtggagtcttatgctctggcccaggctggagtgcagtggggtgatctcggctcactgcaacctccgcctcctgggttcaagcgattctcctgtctcagcctcccaagtagctgggattacaggcacacaccaccacgcctggctaatttttgtatttttagtagagatggggtttcactatattggccaggctggcgtcgaactcctaacatcaaatgatcctcccacctcagcctcccaaagtgctgggattacaggcatgagccactgtgcctcgccaagaataaatactcttgatttttatttccttctagctatcttttgtagcttttgttctattttttttaaatcatctttggtttaaactgaaatatactgagatgcagattagaaaaagctttttttcttggtgcagggcagaagaaaggcttgtaaacttcaccaaatgctgcttatgcttgtgggatcgtttaatgttcatcatttggtcagtctcatccccatagcagtcagaatatttcaagtcactttataccatgaagtccatgaatgggaggccttattaaataagatgattatgtgaaaatctaatggcatattgatgctctgaaatatgttatgtaaatcttggcttttaattttttacatttttattacagattctgaagaatatttctgtgtaaaaagaattttctcagggggagatcaaagcttttcacattactctagtccccaggtaataatatagtcatgtaaataattaaatagctccaataattttgacaaattttaaaaacccattattaatgttctttatatgttacaaagtaattgccttagtttttttccccttaagtctacagaataagttttttctgatctatttgataggtttttgtttcaggtgttcag

SEQ ID NO: 5185 - DNA, 2300 bp, Homo sapien
tccagcctaagcgacagagcgagactccatctcaaaaaataaaaaaaaagagtaatcagaaaagtgaagattcgcattaggttatacttttgtgacaacaaaacccatttttaatgccagtggatggataatattaaagaagaatgtgaaattaacaataggatataactgaaacagtttgataatgaattgtttcctacttctaattttgttttgttttgaagtcactactttgggaaagaccaagtattttaaatagtgtctgtagacctgcatttctggctagatgttaatatagaatatatattacaccattttatttaaaaaattgacccaaattttattatcgtagtttaatataagtggaaacacataactttgcacacagacttcagaaaaataattgttggcaataaagatgtagtttatcttttaaaagttctgcttcttggacatatacattaaaaaattatggcaagatagtataagattattatttttgtgagtacagcaatttctggactatacaaactaaacatatttgaattattagcttggtcaaaaatacaatttattttcttgttattcattttaagatatattacaattcctgcctaattttagcatctgaaaatttggaacattatagattaaaaagaaaaattaaagagtagtttttaatggtatagagtaggtcagtttttagtctaaatttttcatttttttaaaaatctactcccctattctgagataaatttttcaaaattgaaatgagttggtgttaagatttttcttaaattactaggaaagttgtggcttaactggaaaatagaaaattggtaattgtgtttaattgcaaaatatttaatactttagctcctcaaatgtttaattacataatataaactttttactaaacattagtggttggaattttgtcttcagaaacataactaacaatgcctgatttctgcctatattgccgctacacattaagttgggaaaacagaagaatacaacagtatacatattccataattgatatgctttagcagagtcccaaaggaagggtatataaatcttatctccaatgtgtgtgtgtgtatatatttttttaatttacaaaatttattctggcttctttttctttttttctttttctttcttttttttttttttgagacggaatttcactctgtcacccaggctggagtgcagtggcgcaatcttggctcactgcaacttccgcctcctgggttcaagccattctcctgcctcagcctcccaagtagctgggactacaggcgcctgtcaccatgcctagctaatttttgtatttttagtagagacggggtttcaccattttggccaggctggtcttgaactccttaccttatgatctgctcgccttggcctcccaaaatgctgggattgcaggcttgagccaccacgcccagcctttcttttgcttttctgttcagtgtatttgaatattcaaaaattagaaatgattaaacacattatcttttttatgtgacaaaggggattacttttgatgagttctaacaaatttatttaattattttctaatttatctctttagaaaaaatggaacatgggaagccttgttttaccattcacagtattttttaatttctaaaagctaaaacaaagaaaacaaagccaatatcccccattctttagggtattaatacatttatatgaagatgaaaggggatagttttttctttaacacagtaatgacgcagaagaatatacttctggtctctgtagcatataatggtaaaagatattagcatttaatgtgtgttacaagccttaggttagtattttggaaaggagagtaactgagtataaattgctatgcaaatttagaaaatttttggcaaattttatgactaatactaaagcctccaagaccttacaaatgtagttatcctttaacagtatattcattacgtactattaattaggcactatagtaggtgccaggcattatcatgggtataaaacacatagtctgccttcacagaacttactgtttagcagaggagacaaatattaaatgaataggtacctgtggttagtagcgataaatgctctgaaggaaaaaacatacagtactgtgagaatgtagtattttgaaatgtttcatttgcaaaattgtacttgatactcagaatagtgtttttttttcctaaaatacttaatatgctgaacaggtcaatgtatcatctgcctagtatgcataaacaataacagtaaatgtttagtaattt

SEQ ID NO: 5186 - DNA, 2300 bp, Homo sapien
agagcaagatgatgtctcaaaaaaaaaaaaaaaaaaaaaaaaagccaacaagagcaatgaaactctcaaaatatgagtattttttgtgaacattcctaccatttctcatgttgaaattatgctttccttgcttaagcatcttgtcattctacattcatttctgtaacatactgttgtgggttaaatttgatccctcaaaagataagctgaagtcctaacctccagtacctgtgaatgtgaacttttttttttttttgagatggagttttgctcttgttgcccaggctggagtgcaatggcgcgctctaggctcaccgcaaaacctccgtctcccaggttcaagcaattctcctgcctcagcctcctgaggagatgggattacaggaatgcaccaccacgcccggctaattttgtattttttcagtagagacagggtttctgcatgttggtcaggctggtctcgaactcccgacctcaggtgatccacccgcctcagcctcccaaagtgctgggattacaggcgtgagccaccgtgcccggccaaatgtgacctttaattggaaatgagttctttgcagatgtaataaggttaagatgaggtcataatggatcagggtaggctctaatccaatatctggtgtccttataaaagagggaaatttggacagacacacagggaaaacaaggtgaagagggatgcttctacaaggattgccaaggattgttggcaaccaccagaagctagcagagaagcctggaaaagattatctctcagagaccccaagagagaaccaagcttactttcaccttgattttgaactggtcttcagaactgtgagacaataaatttctgttgttttaagccaccgaatctgttttaatttatatggcaagcctaggacacgaatacacacacttgaacatattctagcacagacagttcttatctaaaacatgtttttcaacaagagataaagaaacaggccaggaccggtggctcacgcctgtaattccagcactttgggaggccgaggcgggtggatcgcctgaggtaacgagtttgagaccagcctggccaatatggcgaaaccttgtctctactaaaaatgcaaaaattagccgggcatggcggcgcatgcccgttgtcccagctactcaggaggctaaggcggaagttccagtgaactgagatcgcaccattgcactccagccttggggaacagagcgagactctgtctcaataaataaataaataaataaataaataaaaataagaaaagaaaaagaaagatggcctatttgtggaacttcttctaggtactgaatattcattctagcaatacccaacttacaatttcaaaagtgcattgtttcaagttctcctgctttttaagaagttaaggctggcctaggagatccagacttcgtttttatgaatcagggactgcagccaatgtgtaattttctctgatagaatgagaccctgcaattcaagcctatctttcagggagagtgtagaaagtgatggtagccaacactgtacaaggaaactgaactggtggtggtggtagtagagtagcttcagccattgccatcaacacatctcacatcctcagactggctccagttgaggccatgggataaaataactcttcaccagtctttatgttcataattgtgatgtttcatctgctactttaaaatctccttgggaaaagagagagtaaaataataaaaagactagctagcatccatgagcacaaagacaaccaaaccaaaaaacaaagtgattttcttcattaaaaggctttgtgcacgccgaagcattctcaaaaacagttgacatcttcttcgtttgtcttcgcaaactccaactttctgtatttggcttttccctcttaaagcaacgcaaagcggcacactgcgcaggcgcctgtggccagccacccccccccccccccccccggaagattcggcgcaggcgccggtgccggggccgggaagtgggcgggctcgcgcgcgtgctctgcggttcacttccggccagcccctcccccgcctccctcgcgtggccacctccccctctgccttctcctacccagtctcttccccaactctccccacccctggtgctctccgccccgcttgcctcccgttcttccccgcccgctccatccgggtcgctgacggctgtctctggactggacagcagtggcgtccgcttttctctaaggaacccggtaaagtttcccaggggccggggaggggagcagcggagcagcggcacagacgccggaggt

SEQ ID NO: 5187 - DNA, 2300 bp, Homo sapien
actttgggaaaactatgcttctttaaggcgtaatttcctcccagtaacatgcagataacaacactttgcagggttgctatgagaattaaatgagagtaacttagactactccccagcctagaatacacttgtaagaaatgttagttcccatttcctttcccgcacatcattaacattagtgtgattacctgggtcatgagtaagaacactgaactttgttttcagtttttggagatgtccaagcagaccaaaaatagaatctgtgtggaatcactcagatcctggcatattggcatattttgagctaaccttatgaagagagaatattcaagctgttattttcctacccctaacttgtaaaaactttattgacccatgttgctgtgctcagaaataacaccaaagcatttaaatttagttttaaaagaacaaacctcttgtattatttcagcacaataattataacaaatagaaatgaaaaaataggtctgtcatagcattctgactgcttccaatgccccacttttcagcaataatgcctaactccagtctacatatcaattcatgttcccagataaaacattgcatgtagagtttattgcaagcatttgcttttttctttctaaattatcacttctttttgtttgcttagtcatacaaaataatgtcagggtcggtttcagtcagaaaaattacaaacttaaaccctatatagtgttcccttagaatatttactaaaagaaagatatattttctattatttctttctttatttatttttttgagacagagtctcactctgtcgcccaggctggagtgtaggggcgtgatcttggctcactgtaacatctgcctcctgggttcaagtgattctcctgtctcagcctcccaagtagctgggattacaggcacgcaccaccacgcccagctaatttttgtatttttaatagagacagggtttcaccatgttggccaggctggctttgaactcctgacctcaggtgagccacccgcctcagcctgcaaagtgctgggattataggcatgagccaccatgcccggcctaatatgttttctattcatttttaccttgaatttttcacaaatatgttggaaatataatcatttgaatatttgcagtggttatgagcacagactcaggttcaattttggctcagtcacttacttgttgtgtgaccttgggcaagttttaaacttctttctaagcctcaagttttcatctgtaaaatgagaattataacagtacctacttcatagacgttaaaggaatctattaaataaaacacacacacaaagagcctagcatagtgcctcgcacatagctaaggaatgttaacttattactaccaagactatagtatatttatgtgtgttaatataatcattatattaatgtggtgagaagtaggatttaactgtataccttgaggagtacatacatggtaacaattgttccagatttcttcagtaacttagtctcagagtgctcttttaaaaagttctgaatagattttcttcttggaaataatactttttgaaaagtgtaaactttgatatgtactacataccaaaagaacaagtaaaggaagctttgttgtgttttaatgcaaaccacacagtaaagctttaatttaatcaccttaaaattaggggaacaaacaggaagtgttgtaataattgattgttttttcgtatttaccttaataaatgccttgaccatagtcccagtttggtaccagataaagatatttatacatgtaatatgcatcctgtgtatagatatcttatgtattccatatgctttattcttgagaatttcttcactcttattttcatttagactaaggagaaatcaagaaagcctatttccttagtcatcttagtcattatccacccccaccagccctgcaggctaagaacatcgtgcagactgagttattaaagttgatctgaaagagcaatctgttctaaatgactgtccctggatctgcaacggaaccctgtaaatacccttcattactctggcggggcagtatcacatttccttcatggcacttttgtgtctgacacaagttaggcagtgagatttggactttagatgatcctggttgattgatataggaatggtgcttctcctgagacaggtaaccacaaatttacttctcaggataatgttttaaagtgggtgttctgtttagtttttaaaaatgtttttagtttttaaaactaagtgggttttgaacttttagtttttttttttaatgtttttagttttccca

SEQ ID NO: 5188 - DNA, 2300 bp, Homo sapien
tttaaaaactaaaatctaaaatatgtttgatgtactataaccagagtgttcacaattactaaatattatttatttaaaacatttatattcagctttttttcaaagagctcaaaaattgtgtatggtatctgtatttgaaaatgttgcagtaaaaatgaaaagagaaagatgactgccattcagaatgtctttggcttctcttttctttttttttttttttttttgagacagtcttgctgtgtcacccagtctggagtgcaatggcaccatctcggctcactgcaacctctgcctcccaggttcaagagactctcctgcctcagcctcccaaggagctgggactacaggcatgcacctctacgccctgctaatttttttttttttttgtatttttagtagagatggggtttcgctacgttgcccaggctggtctcaaactcctgagctcaggcgatccgcctgcctcaacctcccaaagtgctaggattacaggcgtgatcccccgcgcccggccggcttcttttttctgtaactcttcttttgcattttaaacctactttaattcttcatatagattcctaatttcactgcccaaccagctttattctaccttttagtatgagtctccttcaaccttagtattctatacctgggtgaaaggtagaataccaggcttatcatggcagtttgcaggaaagtaaaaatgtgtttacttatagtgtgtttaaacattgcctttactagccacctgaaatagaggttctattctcccatgggagagacctacccaagacccagcagcacttaacattgattacggcttaagatctgagtgggatagtggaggaagatcctctttttaaataaaaagaaattgttggcatatccacataaatagaatatgcagaaggacaattaagtggtcttgacattagtatcagcacaagattaggtaagagaaaaaataaatctgtacattgaagctctgggttactgtggtaatgagaataacctgtacagataattcatttcctcctgtatcctcttctctcctcaataccagttatttcaatctgaattatttaaaagtgttcttcatctttttttgcctgtgtaagcataaaaccacataaaaaaggtgtaattaaacctccaatgtgatcacaataagcaaagaaattttatatctgttcaatgtactatcaatagtctcacgatgactgaagaggataaagatctcttcgtaaattccacgaggtcagaaatttttgtgtattttgtgcactgttttatactcagtacctggtacacagtaggcattacgaaaataattatcaaatgaatgaatgactaggaagaaaccctataagcagttgtatgacttaattaagaaagctagatttaaaccaatgtgtttcatgctatcagaatctaagaatgatctttttaaagaataataaccatcatttaagtctgaattttcaaagtcctgtcttctaccatgattgataatgttatagcatcatttaatctatactaagcaatcaggttaacttttttcaagtttatttatttatttatttttaattttattattttttttgagacagagtttcgctctgtcccccttgttggaatgcagtagcgtgatctcggctcaccgcaacctctacctccccggttcaagtgattctcctgccgcagcctcctgagtagctgatttataggcatgcgccaccaaacctggctaatttttgtatatttagtggagacggggtttcgccatgtaggccagcctggtcttgaactcctgacctcaggtgatctgcccacatcagcctcccaaagtgctgggattacaggagtgagccactgcgcccagccaaggaatttttaacgttagttaccttgtctgcttttgcttagcctttggacgaacaatccaaaaaagctctcagctttaaaacgttagaccttagcttcaggttggcttttcatagccaaatgtcctaaaatgtatcagtgatttaatgagagtaaatttcctattgattaaaattaaagatcttaaaaattaaaatgaagagttttcatacatttaaaaataatgccatttttttgaatgatgaactatggtataatgcatttagtgttcattccaaacgtcaatcaataaataacatgggcctctagctataagggaaattctataggtaaaagaactgattgacccccacccccataggtgctgtcctgctatggaatccctttgctcagttttctcctgtccaatcaggtgg

SEQ ID NO: 5189 - DNA, 2300 bp, Homo sapien
tctcagaaatgctggagtcaataggtttctttactccaggatttctcagaaactttactgtgccaattttgcttcatgactctccaagtggaagacagcagatactgtttcccaaatttatttgacaatggaaccctttcccccagaagcatctttgtcattctaataatgtctttcagaatacatttgggaaatgtgttatacatgccctctaagaccctttactgcagcaattctctctatccttggatcaacttcatatcataggtatctgctagtttatgttctaatataactgttgtgtgcacagtagtatttcctgtttctcttcaagttatgctttcattgcctttggacttgggctacagtctcatcaatcctgggtacatggcctgcaaaatcatacatctcattagcactttggacaataacatccagaacaaatgtacagtccattttgcagagaaacattccacagagcagcacagagggagctctttggaggaaagagatgaagcaaatgaatatgaagaacaacggcattaatagggcagatttccacagaaacacagaaaaatatatttgacattttgatgactatataacatagtcttttctgtcacaggactgctgttcccaaccaagactgttatgacccaaagtaacagagctgagtggctccatgcagaagtctgtgttcaacatctgtcatgctggagatcattaatgttcaattgcttcctattgtcttcatgtcattcaacttcatttcattgtcattgcttcagctgggggattaatcaactatttatgagaagacaggacttggagtcagggcggtcacaatggggttatagtctgagcaatggtggggaaagcaagtcacggttaaaagactactagtttgtgacagtttgttgacattttaataaacatatttgagaataatgctgacatatccatatttcaaaaggagaaagagcatacttggtcttcctaaaaaatccagtaaggattctggattgaacctatttggaggtagttttcttgctccttgattcctcttaagagtgagaaatgagcagagatgagagaatcaaattaatggtttttctgcatcaattagatcgtcattatcaatagcagaaatcatgctttgttattattcctgcgggcagttgacacaactgaaatgttcaaagatgtaaactattttcaaaaattgtgctttgggaactattttttaaaacctcagaagttacttagatgttctcattttgcacaaaaatgtgcattatgattagttttctttgatttaaatgttaaatgattaaatgattagttatcatctcagtgcatttcccacaaatatttatgaacctgtgtcagggggaatgaagtataaatactgaattgatttgcctaagtatctgaattcaagcaacccaattatataattagaataatataaagttttatatacacgttaatatcttttgatatgttataatacattatttcatagaaaacagccaaattatttgcacagtaaaattccaggtctgcaataatattggaacctgctaatttgttccaacttacttaataactaaaattaaaatgtcagtatattagattagcgttatgcaaaattgtcacacttctcaacaaagctacatcctcttatactacagtcccgatgtatctcataatgccgaaaccaacattttcacacagatgatgtctaataatttacaagtctcggttaagtttttgatacgtaagctgcccactgatacgggaaaagatagaccaagctctgccccaacccccaccttgttattcttttggggacagccaggccactccagatggtgtgttagttagtgttggacatagctttggagaaacttcaacagactaatgctgtaatgtcaggattttgctgtgcgtcgccccctcctccccgcagttcccagggtaggaaggtgctgagatagaagccgagggacgcccgcccacctgccaccacctgttccctccttcagctctttgctataaattctcctccctccaagattcattctgcactctccgacagctactgcgctaaaagcgctccttccctgagcttcgggaaagagttcatcttcctgcaaaggagtctcaggctttcccagaggacttgaaaggccttcctcgaaccagccacaccaaactctgctgcagaaggtttccttctctttttcaacttcatgttgagaaaatgactttctcttgagcatctcattttcccctaa

SEQ ID NO: 5190 - DNA, 2300 bp, Homo sapien
gctatttggacaaggaagctttctgattttcctacatttacgtggtaaatggaaccaagattaaaattcaagagaatggtctcaacacacacacacaaacacacacacacacacacacacacacacacacacaccatgcaggtcaggtgcagtggggcacgcctgcaatcccagctctttgggaggcctaggtgggaggatcacttaagtgaggagttccagaccagcctggccaacatggcgaaaccctgtctctacaaaaaataagccaggtgtggtggcacgtgcctgtaatcccagctacttgggaggctgaggcatgagaatcgcttgaacccaggaggcagaggttgcagtgagtggagattgtgccattgcaatccagcctgggtgacagagtaagactctgtctccaaaaagaaagaaagaaagaataatctaagaaatgcaaatgaaaacaagatattttaaaatctatcagattagcaatgatcagacactctcatatactgtctaaattggtatactttttctgcagataaatttaactgtttaagttaaaacatctgtactctttgacccagggatttcacttttaggaatatatataaaagaatcaggaacacagaagaaaatttacatttaacaggtttgatcactgcattatctttacaagtgaaaaattagaaacaacttaaatattcacccaaagggatatggttaaacaacttatagcatatccataaacgtattgtaaatctattaaaagggtgtttttgaagcatttggtgtgtttagaaaatattcatgctatacagtgttttccaattgtattggaatgtcccttgaattacgctattttatataagggacttgagcatctgtgggagtatggtgtcctcagggggtcctgggatctatcctctgtgaatacagagggccaatttactgttaagagggtaaaattctgataaaagctgtacatccagaacattaataatgttattgctaatttgtgcacttatgggtctttattttccaagttttttataatgagcatattttttaattagaaaaaatgcgttcttttaaaaaatagtaataatattcattgggagactgtaagcaacatacatgcctcttgtatgtttcatgcatttcattaaaagcagagcttaagcggccgggtgcggtggctcatgcctgtaatcccagcactttgggaggccgaggcgggtggatcacaaggtcaggagatcgagaccatcctggctaacatggtgaaactccatctctactaaaaatacaaaaaattagccgggcgcagtggcgggcgcctgtagtcccacctactcgggaggctgaggcaggagaattgcgtgaacctgggagggggagcttgcagtgagccaagatcatgccactgcactccagcctggacgacagagcgatgctccgtctcaaaaaaacaaaacaaaacaaaacaaaaaacagatcctaagctagttctggctactctaagaaagactatgattatgctgctaagttctatgtataatatgaaaagtcaatacagaatatggaaaaaatcaatttagccagtattttaaaatgaatttcattttagaggttttaaaaagttaggggattggccaggcacagtggctcatgcctataatctcagcactttttgaggctgaggagggcagatcacctgaggtcaggagttcgagaccagcctggcctacaccgtgaaaacctgacgctactaaaaacacagaaattagccaggcgtggtggcaggtgcctgtaattccagctactcaagaggctgaggcaggaaaatcgcttgaaccggggaggcggaggttacagtgagccgagatcggtgccactgcactcccgcctgggcaacagagcaagactccatctcaaaaaatgaaaaaagaagttaggggattatatatctttaaatgtagtatctttgaataattgcttgactttgtatctgggaactgttctttgcgtctggacaccaagtaaaacattaactttttgatttccttttccaagaagaagacgtaaagcaggctaccagcaattttgagaacttgcaaaaacagcttgcaaggaaaatgaagcttcctattttcatagcagatgcattcacagcaagagcatttcgtgggaatcctgctgctgtttgcctcctagaaaatgtaagtgcttggttttgaattacagtacctgaaattctagattcctgtagaaacaattacttattttaaaagactagtttc

SEQ ID NO: 5191 - DNA, 2300 bp, Homo sapien
tccctatgttggccaggttggtctcaaactcctgacctcacgtgatccacctgcctcggcctcccaaaacgctgggattacaggcgtgagccaccatacccagcctatatagtgtattttttaactcaaaacttcctactgtaataataaaaaggcaaaaggaatgtgtaaaccaatttcaagtccttcctgagtatgcacactggcagagtgcctgacccaaagaaattatggcaagcaagcaagcaagcaagcagcagtttggtagtgaaaagtcagtcatgtcattagaatgattttaagattgtggcccataaccacacaaaatatgcggaaggaatgccaaattcaattaggcagtaaaacaaattgtttgaattcaagcaaggagtgaaggagattacagaattccatctgccaaatcggttgaaagactgaaaggatagaagtagccatgtaacttgaacccaggaggaccaagggaagaactccatcagaattgtgggagcttagagtcttattaatacagcaattttttttttaaaaggagggagaggggttgggactcacagtgtcttgggactcacagtgtcagtgataatgggactataaagtttcaggcctgttcaaaaagtctccagccaataagctagtaaccacaggtctcctgaaatggtaactccagtgttaattaggcaacataacctcaattttccaaaaatgatgtctgtttccttaagttatagataagttatttgtaacctcacgaaggttcatagtgttttaagaccctggcccttgggtaaaaccctatgggctccaattctagctctaccactcaactgtgtgaccttgggcaactattttcacttctctaggacttaggcacttcatctgtaaaatgaagatacttatttttcagggttgtaagagtacagtgtgtagcttatgctacacactgtactccatttgctctttacaaccctgaaaaataaatatgagccattgttactacagcatccttgtttggttttccatctcttttaatgatgataacactgtcctttcttccttccactgagtatttttagggagtgggccattgggggtatgtgagcatcatgacttagggaattcttactgccccacactcgtcttaagcaggtttgaggatgaattaaagctttgaaatgaagtttccattaaatgaaggtaatggaaacttacctgtctccatcctacacactgcagatctcatgggagaaaaaattatacatcctcctacgttgctaacacctctcaccctacccccaacaggcttcccaatgtctgtaccacaaagttgaaagtcttttggccggacattgaagattgtctacaatctagcttcatccacatttctaacattaccccatcttcctgacaccccacgtatgttcctacctttgtacttgaacttgcactgatttttttgggggggaaagggaggtgggacggagtctcgctctgtcgcccaggctggagtgcggtggcgcgatctgggctcaatgcaagctctgcctcccgggtccacgccattctcctgcctcagcctcctgagtagctgagactacaggggcccgccaccacgcccggcgtgtgtgtgtgtgtgtgtgtgtgtgtgtgtgtgtgtgtgtgtgtgtgtatttttagtagagacagggtttcaccgtgttagccaggatgaacttgcactgatctctttaccaggcttccccttaaccctctgcgcagaaattcggggtttttctttgtgtttgagacaagagtctccctcggtctcccagactggagtgcactggcgcaatcacggctcactgcagcctcaacttccagggcacaagccatccttttgcccagcctcctgtgtagctgggactactcgggagtcccatctactcccgtgcgctgccatcacgcccagctaatctttgtattttttgtagagacagcacctcactatgttgcccaggctggtctccaactcttacgctcaagcgatcctccccctcggcctctcaaaggcgtaagccaccgcggccagccttttttggaacttaaaaaaaaagccataatgtgtcattaggaaccttggtgacatgacagcaaaaccaaaatgtacttatttattaggtgtcacttggaagcgcaattttcaacaacgcaaaactataaaaaaaacccaacgtcggcctccacaggctaatcagtctccgaggcactgacggcgggagagatgaaaacgcgaaggccagaggaga

SEQ ID NO: 5192 - DNA, 2300 bp, Homo sapien
gcacttcatctgtaaaatgaagatacttatttttcagggttgtaagagtacagtgtgtagcttatgctacacactgtactccatttgctctttacaaccctgaaaaataaatatgagccattgttactacagcatccttgtttggttttccatctcttttaatgatgataacactgtcctttcttccttccactgagtatttttagggagtgggccattgggggtatgtgagcatcatgacttagggaattcttactgccccacactcgtcttaagcaggtttgaggatgaattaaagctttgaaatgaagtttccattaaatgaaggtaatggaaacttacctgtctccatcctacacactgcagatctcatgggagaaaaaattatacatcctcctacgttgctaacacctctcaccctacccccaacaggcttcccaatgtctgtaccacaaagttgaaagtcttttggccggacattgaagattgtctacaatctagcttcatccacatttctaacattaccccatcttcctgacaccccacgtatgttcctacctttgtacttgaacttgcactgatttttttgggggggaaagggaggtgggacggagtctcgctctgtcgcccaggctggagtgcggtggcgcgatctgggctcaatgcaagctctgcctcccgggtccacgccattctcctgcctcagcctcctgagtagctgagactacaggggcccgccaccacgcccggcgtgtgtgtgtgtgtgtgtgtgtgtgtgtgtgtgtgtgtgtgtgtgtgtatttttagtagagacagggtttcaccgtgttagccaggatgaacttgcactgatctctttaccaggcttccccttaaccctctgcgcagaaattcggggtttttctttgtgtttgagacaagagtctccctcggtctcccagactggagtgcactggcgcaatcacggctcactgcagcctcaacttccagggcacaagccatccttttgcccagcctcctgtgtagctgggactactcgggagtcccatctactcccgtgcgctgccatcacgcccagctaatctttgtattttttgtagagacagcacctcactatgttgcccaggctggtctccaactcttacgctcaagcgatcctccccctcggcctctcaaaggcgtaagccaccgcggccagccttttttggaacttaaaaaaaaagccataatgtgtcattaggaaccttggtgacatgacagcaaaaccaaaatgtacttatttattaggtgtcacttggaagcgcaattttcaacaacgcaaaactataaaaaaaacccaacgtcggcctccacaggctaatcagtctccgaggcactgacggcgggagagatgaaaacgcgaaggccagaggagaaaaagaggaaggatttgcagagagaacggtaacgtggtggacatgaatacacccaagaaacccggatcccgcgcggcacattgggacgaagcgcgctggcgggcggccagcaactctgggccaggggaaggaggcggacacccagcccgagagccgaaatcggccccagtggacgctttcatcttcgcggcccagaaacactcctatttttcaccgcacaatgcaaacatggtggaccagaaaatccgccccgcgtttgccggtcgaaccacgtggggccctttccgcgccgtcgatgcctagccagggcggggccctcacagaatttgttcacggtgggggcagatcaccggagaacttctccagagcgctacggcacggttccttctacacactggcagaactgccattgccatcgccccgaggcggcagaatggtacgctctgaaaactggatggttctaacgtaagcaagaaaaacggtgcgcgctgcagctctttaactggaacagcctctgctcggtctacctcgcccccaacagctgcgcaacccaccaccgcgcaggcgcgctgcgtgccgccagcgccatgcgaaaccgactttcccgtctcgcgagagtggggccggccgccttcgcagttctcgctccgccccccacttcttgctcgttccctcccatccccccaagccagtagctgtgctgcgcagctccctaagcggttgtcaccgctggagacggttgggagaaccgttgtggcgagcgctacacgaggcaaacgacttctcccttctttgaactggaccccgcgagcaccagagtcggcgtaactatcgcctgacagggtatctgaagtaaaagggggtaggttgggctggtggtttcga

SEQ ID NO: 5193 - DNA, 2300 bp, Homo sapien
tgtgtatgcaaagcacatacaataaaaacagcctcactctaccaaccccttcaaaactaaaaatcctacctacaaaacaaaaacaagaaaaactctaagggcacaggaagaagcaatctgctctaataaagctgtcagaaactacttaaaacagtttactaattattcaggataatccacctcaacctttctttgcaacaatgtcatggctaatcactactctgctttaagaattctaggtgctagtaccaataaaagataccacagttaaaatatgaggatagctttggtcaagttttatgagactttaagtataattttctaaacattacaccaagtgaaacaagccagtcacaaaagactacatattgcatgattccatttctattcatgattgtctgaggcttgaggggagggaggatgccagcaatgggaatgaccagtaaagggtatggatatctttttggagtgacaaaaatgttctaaaattaaattgtagtgacggtcacacaacgctgtgaatgtactaaaatccactaaactgtacatttaaaattggtgaagtttacggtatgtgaattatataccaaagtcgttaaagaaaaaaaatccactaaagaacaaatgaaatagagaatcctcttaacacggaggcatagcctatcttctgaagtaatacataaaggattttacatcaataaataactttctaaatggtagcccagtggtcaagaaatgagaatgaattttattttttggaaaaagtgctgatgatttaagtttaacagaaaatttacatcattccttcccaatgggcttgctctttacaaaaacaaaaaactagacacacccctaatagcttaaggaggtaaggtctctaaaatgttagttcactagaaccaggtttttatctactgcagttcagtcagtttaccaaaacaaggaaatcaaagataacattattttaaaaaggcaattagatggatttccagataacggcacaaatgaaaagaggacagaaaaaagatgtgtagtccaatccaattagtaaagctatttgttatatcatatataactttacaggacagtctggactatctcttcaaagggtcactcaaacctactgtttcaaggtaagattttcgtaaacttttccttggcaatcttgagaaagcatcactgaacatcttcaataataataagtttttgtttttagagctggaaaagtaggtaacaatattcttataaagttttacatgaattatcagaaattcttactctcaggcctttctcctcccttttgtactgtcttcaatgaaaattacggatccagttctcaggaccctcatccgaatcacaccaccaccacgtgactgggtttacaatttgtttttatgtttagtaggcttattcccttgtttaaaatacgattacagtgtactatactcctacactaaagaaaaaacatgcctagctaccaaaagaaaataaaccataaccgtattttgaagtattttacttctagagccttaatgccatcggaaaaaaaaactgcacaaaatacaactcttggaagatttaacatcgaaagctcaatttcaatacacacacatctaccatcactgggttgttttaactgtttcccaaaagtaaaacttaaaaacaaattctaacatatatacgccaaactacgcaaaacaattgctacatcacccacccccaccccgaaagttcaaaaagcaacaattatagttcactgggcccagacgacctacttgaaacatgcccatttcacattcctatttgataaatcacccacttttctgctcacaaaatcatccccgaagtccttattaacgtttaaacatgaaaaaaaaaaaaccctttggaaaatcagtacgtactcttttcgaagttccaaatctggaatataagggccggctaagcgtcctttattcctcccaggagactttccgtttatctagctgccctagagaccagaaagctagggagagtacgccccttccccctcccgtcagcagccaagcctggcttaaaacccttcgccaccgggcggcagaattacaaaggaggccgtctgcctcctttgtcctggatttgggagttgagcaccttcgtcgccattggctttcctcccccagctccagcctctctcatcttgggaatctgcgtcagaagtcactcgcagtcccgtcagcccaggtagccctgccgagactgcggaggaagggaggccgcggtgggaggccaggcccatccggcgccatttccatcgggag

SEQ ID NO: 5194 - DNA, 2300 bp, Homo sapien
aatctgattaattcagtcattttataatcttgctcttggtgagtttaaactagatttggctaaaatagaggtgggagtgttggcccttcaaagacagtttgatgtgttcaaaattgtagtgcatttaaaagggttagacttctgtgatatttgtccaacgtcaatcagtactcattgcatttttttacttaggctcttgatgttagtggatactggtattatatgcaacttctgaataagttttaaagaatttgaataatcagttgaataaaaacctgaaaagtggtgaatgaaaatttgagagataaggaaaggctagagttggcattcaggggacacaaatagtttgaagactctggtagtagaattatgcaagttttcttaaaattaggcaatatataatattgatactacgaaattcagtacttttccgtaggagggggtcaggtctcattgccttttccgtaccccaaaatatgaaaggtggtctacaattttgttgtggcattgtcacagcagttggccccatgttacatttcctcttgtggcacctctgagaggtgtttcttcattacctcttgacaagagtatattttgattgactgctctatgtgcttgtttattttttatagcatttaaatcaaacggtattgagatggattgggttatgaaacataatggtccaaatgacgctagtgatgggacagtacgacttcgtggactaccatttggttgcagcaaagaggaaatagttcagttctttcaaggtacctctagtattagtcaaagtttagtagtattgtaattttatatttgtattgttttactgtttttaatttgtaaaacccatttgattttggaacttttaagtttaactatgatagtcttggttaatgtattaaaataatatgctccagttaatattcaatacagaatgtgtagaatatgtaaaacctagttaatgtgcagtaacatatttgagaattgtgatgaaatgaaccgtgaattagtatatggagcatatatttgattttgtagccttttttcatgtaatataggtgggcttttagagtgtgtaattacacagtgtttttacactggtcgcaaaaaatttatttaatccagtaatatttgaaaaaatctttcatttgtattatggggtgatgggaaactaagcttttttgttttgttttgttttgtttagacttgttttaaatatttgattcagatgggaatgtttcagcctttaacactgttccccttgatggggttatttgtccttgggttaaagggttggaaatcgtgccaaatgggataacattgacgatggactaccaggggagaagcacaggggaggccttcgtgcagtttgcttcaaaggagatagcagaaaatgctctggggaaacacaaggaaagaatagggcacaggtggggatggagagtttgggatggtgttaaatttttatttttgggggttgtgggtcactattgcttaaatgggggggtagccataacatttttctggggtagtttaaaagaattgataattatctaaatttaacttggaaactacagatttgggtggggaattaatgctaatagttaaattaaaattagattgtttccatttctctgtaggatgttgttgataaatgcttttgtataatcacctatttcctttaaaacacctattatgtactaaaagagacaaagtaaaaatatactttatgaattgttttccgtgactaatttctttgtaaaacttaaatatttaattaagtttgtaggtttaaactgttaacttacggtgtatttaggcaatttaaattgggttatgtatctagatatagaaaaacttactgcattttgcccagtatctaatttacactaatacatttatgctgaaacctgtaccttaaaacatttttaaataggtatattgagatcttcagaagtagcaggagtgaaatcaaaggattttatgatccaccaagaagattgctgggacagcgaccgggaccatatgatagaccaataggaggaagagggggttattatggagctgggcgtggaagtatgtatgacagaatgcgacgaggaggtgatggatatgatggtggtatgtgtatctaatgaacaaaggttctgttgtcattttcttaatgttcctgacactttgtcaagaaatacagaaatggcagtaatttcagtacctattaggttttaaaacctgttcatgaaaatacggattcccatggctagctgtgggacttgactgatgcacatattggcacctag

SEQ ID NO: 5195 - DNA, 2300 bp, Homo sapien
tgtaaactaaattataaaatttatctctggaaagtgtgtagtcatgtgtttctccttaaattacacaggttatggaggttttgatgactatggtggctataataattacggctatgggaatgatggctttgatgacagaatgagagatggaagaggtaaaataaatattaaagacatttttattcataggtaaattttagtatttgctttgcaagctcttagtggtaatataggaaacttgtataaagttaattcagacaaatttcagtgcattcctatatagagctttataccttgtatagtatgtatgtatacttccctacttgtatctgtaatagtttataatcttggcaaattgtgttttccaggtatgggaggacatggctatggtggagctggtgatgcaagttcaggttttcatggtggtcatttcgtacatatgagagggttgccttttcgtgcaactgaaaatgacattgctaatgtgagtaatttttaataactattagtggttttatacttatcctggtgtctaaatctttaagcattcttaatgttctcatgtttatagcttaataccaaaatcccttgaatataaaaatagatctacctttaattctttttttgagatggagtcttgctctgtcccccaggctgagtgcagtggtgtgatctcggctcactgcaagctctgcctcccaggttcacgccattgtcctgcctcagcctcccgagtagctggaactataggtgcccgccaccacgcctggctaattagatctacctttaattctaatcactgatggatatttttgtatccattgtgtgtcaacctacataggattcaaacaagtaaaaagctacattcgtgaagtccagttaagagtataatgaaagactgatcagcatagaatggtgatgactataccattttgtgctggtgtcttttgttgtaccgttttttgttttgttttcttttttgagacagagtcttgctctgtcgcccaggctagagtgcagtggcgcgatctcggctcactgcaacctccacctcccgggttcaagttattcttctgcctcagcctcctgaatagctgggattacaggggcacaccccaccactcctggctaactttttgtatttttagtagagatggggtttcaccatgttgatcgggctggtcctgacctcatgatccgcctgccctggcctcccaaagtgctgggattacaggcgtgagccactgcgcctgacctgtattagggtttgaaagagtgaatatataaatattagtgatttggtttggctttctaggctagatggtgattagaaactgaggagttggaaataacaggaatagatgctgctgttgtcactgatgtgaaactggttggtttcagatttgttaggaggtcagcaaacttcagtccatgggctaaatccggtcacaccattcctctacctgttgagtggttacattagagacccaatggccattcaggccaaaagtactgactctggctttaaaagcaatggtgtgctctagatcttactgggaatcagctggcctgagttccaactgcttttaatgatagtttaaaacctggctaacttgtgattagaaccaaatgatatcttttggggaacaatttcatatagtcttaaataggtggctttattcaaaccgcatagttccaaatcatgatatcccgtatttctctctgtgtgtttgtgtgctttttttttttgacagtctcccactctgtctctctgaggctggagtgcagtggcgtgatctctgcttactgcagctcccacctcctgcgttcaagcgattctctgtctcagccttctgagtagctgggattacaggcgtgagccactgcgccctgcctatctgcttattttaaaagcagtaaattctttacattatccctaagtgtatactctgatattcacagaacctctgtagttgactaagttattagtctgacagggcagtggaagggtttgttttaattgatgaggaaaaatcaaggtatgtggtaatttactttaatattctcaatagaaaagtaaataagtgtttccttttatttagttcttctcaccactaaatccaatacgagttcatattgatattggagctgatggcagagccacaggagaagcagatgtagagtttgtgacacatgaagatgcagtagctgccatgtctaaagataaaaataacatgcgtaagtggtgtctttggcacacaatcttatttcctaaacgtgaatttataaaataagaggct

SEQ ID NO: 5196 - DNA, 2300 bp, Homo sapien
cactgcactccagcctgggcgacagagtgagactgtctcaaaaaaaaaaaaaaatgactaatagcactgctttatatcacacaattattttaatgtataaagtaactctgttcatttcaaagtaacagtcccatagcaaaatggtgtaagaaacttataaatactcaggttaacagatcagaactctacttgggaggctgagaggtgggatagcttgagcccagaagttcaaatccaacctgggctgcatagtgataccctatctattaaaaacacgcacacacacacacacacaaacacacacacacaaatcaaaaccaccatagcttttgtttttataaatagggttctgaagatggcttgaaagaaaaaaatgaaataattgcccgactagaagaaaaaaccaataaaattactgcagccatgaggcagctggaacaaaggtacagcatttccagtcttagtttctttttttcttttcttcttccctttttctttattcagttcctacacctgccacaaaaaccattaggaagacatagattaggacatgttttttgtttaagcccagcaggattttgcgtttttgctttggttgttgcatggaatcaagttgctttatattacgctgattcatttgaagttgtcatattgtagatttttcttagaggcctaatatcagcagtttcatgtcgttcagttacataaaacaaatacacaaataaaaatgtcaaaaaaattaaaaatgaacaaacagagtgagattatccctgattgatttccatgcatattaattgtcatattctttgccattcaccatctgtttatctgaaatcaagcattccgaattggtggtttagttttgtttctttgagctaggaccctcaacccaaccgaggatataattttgtttaaattgaattgttttatattggcatttttcacttttattgttggaaaatgtaatgtatttccattgccctgtcatgttggtgtcaacatatgtcttttatcattgctttctttgaatctacttatgaaaaacataactattaatgctttattgacatgaatattcttttattgacatcctctttcttcttttttcttttttgttttctttatccccatttttacattttggacatttttattacctttttctgtctttgatttctttccattccattatgaagtgacaacgatttgttaactcaaactaggacaattgcaatgtcattggtgaaatgtgccagcagtgacacgcaggaccagtacaagctggttaaagatatatctttctgaagaccacttgtatttaaacagactaaatgaaaagagaatcaacaattttataatatattaaatagaaaggaatctaaatgctattaaatattctaaaaggatgttaggaaccctgtacatttcttggtcagctgctgtggtaatacactgccatcaagcagagtgggtgcacttggatttccagacatacgttcctcaaaccttgtgcacaaagggtgatttgagtattgaccctttggaggtcaggattttcaaatgcagttttatctttttagctactttttgatgaaaaatataaagattgtttaaaaataacttaaccttcagttttatactgtgttggcacagatatttttttctcattggcccactctttgcccaatggctcccttacagatttttacatatgctttaaaataatttataacccagactggccaacaccctgtgcttcagcttctcagttttccggttctcccttgccctcttctgtgatagcacaacttcaaggcctacctcactctgacttctattttcctttttgtaaccttagagaaaagcttgggtccaatcccagcacctgaatattttaatttaaacttggatttggagataacttaaatgttactctcccttccttggaagcagcatttatacccctgaaatatgtgagggttgctccattggtatggttttaaggaagaaaggaagaggaagagttttttagttagttgaaccgaaatttctcttgtgatttcctgcaaggagttaatatcctttgaatcttggtaaatattttcttataaaaatattgaagttaaatacaagaaatcctagatggccaaagaaggcagggagtggagctaagcacaggaaaatgcaacgacttacaaataaaaacaggaaagatgaaaatcacaatgttttagctaatttttaatattaaatggtgaggaacaaaaatgatctctagcaaatgatgccaactggcacca

SEQ ID NO: 5197 - DNA, 2300 bp, Homo sapien
tcgaggtgccacggcgtccaggagcgaggacagggccaggcagggtgtcactcccgggtcggggagcaggcggggaggggcgatgacttttcaggtttgggggtggcggagggaagacgcatctcaggttttggcctgggtgcctgacgccgagggcgggagacggggaatgctgacgcgcaggagcctgggtgagcccgccgcgatggtcctggggggcccccaggcctctgggcagccttgctggggggagggggcaggaagagaggcagggaaggggctctaggccccggcaaggtgcgggcactggccctggtactccttgcgcgcctgcggccgggtttgggggtcgcgtacgggccggagaagtcctgtagcgcagccggggcgtggccgcggtgtgaacgcccctcggcgtgggaactgccggtgcccagcaccgatctgcctcccagcagctgcaaaacaccctttgtgtggttgtcgcatcgcacgttaggaattatgatgggctgtgttaaaaatgagagttgccacggattatgaaacatgaagtggtttcactcccgaaaaatagtgggagtcagaccacgatgcagatttgaaggaattcgtgtgtggacatttttccaccaggcagtttggccatagcagttgtggctgtttgcattttaggttgcttaggattcagtgtcaggcttcatgcctagctatctagaaatcggagctggaatactagatcattggagactctgggttttttgttgttgttgttgttcagtgaaggaaaaacgggcacattgattacttgtaaatttgtcagagattatgaaatgttatactaagtgcttcgtttttccacaccttagttttgtcatctgtgtttgttgaaggtattcccaccagtcacaacagtgatgagatgatggggaagcgtctgaatttctaagtaaactgagaataaaatttgcgggaaggaggacaatatttttgtgaattgaaaatatcttacttgatgatactgtgtcttaaaaatatcaattaaaaatcaggccttttagaatttgcatctattaacttggtattcagactggcgctgtgggcatcctcaactgtgtggatgggtgaggaacattaatgtaaaactggtctctgcttttattttctctttgaaaataaaacagtcatgcaatacagaactacagtcagaatgaagaagccagacagaaagagggtagacgaaagaattggacggcttcttctgtgtccccttgtcagtgtattttacctgtcatgtttgttgtggatgacactggaatcctagaattttaactaccttttattttattgccagtttattctgaacatttttgccttggaattcatcctaagaccgtacctgctatctaccttttgcatgaggcccttaaacctgttgtctctcaccccaaatttatctccatagaagatcattttaaaaaactcattctctatgaagaggtaccaggaaagttaaatacaggagaatggcagatttgcaggatcttgagaataattcattaactttggctggagtggtcatggaaattttcttttttctttctttctttctttttcttttttttttttttgtgagacggagattcgctctgtcaccagattggagtgcagtggcgctatctcagctcactgcaatctccgcctcctgggttcaagtgactctcctgcttcagcctcccgagtagctgggactacagccgcgcaccaccatgcccagctaatttttgtatttttagtagagacggggtttcaccatgttggccaggatggtctcaatctcttgacctcatgatccacccgccttggcctcccaaagtgctgggattacaggcgtgagccaccgcgcctggccggaaattttttacagtatatgtgagagatgtaaagagaagttaatcaagggtgtggtttagctggggagaatttgtcaaccaaggaacagcaaactactgttggtttttataggggaagggaatggtttgtatatttttcattgtcatgtcttacaaatgatgttggattcctttcttgtgttttcagctacaaaagaccccacagctgtagagagagcaaacttgttaaacatggctaaactgagtatcaaaggactcattgaatctgctctgagctttggccgcactttggattctgactatccccccttgcagcaattctttgttgttatggaacattgcctgaaacacggtcttaaaggtatcatgagattttaaaaaattaat

SEQ ID NO: 5198 - DNA, 2300 bp, Homo sapien
agaccaggtgcagttgctcatgcctgtaatcccaacactttgggaggctgaggaagatagatcacttgagctgaggagttcgagaccatcctggccaacatggtgaaaccctgtcttaaaaaaagaaaaaaaaaaagaagggaacaacagacactggagtctacttgaaggtggaggatgggaggagggagaggagcagaaaagataaccatcggatactggacttaactgggtgatgaaataatctgtacaacaaacccccatgacatgagttcacctatgcaaccaaccttcacatgtaccctcaaacctaaaataaaagcctaaacaaacacacacacacacacacacacaatagtttagggaaaaaagtaatcacaatgcccccacccacacatcataactattaacattttcatgtactttactcagtctcttacctatgcatttatttttctaactatgtatatatatctatatatagatatatagatataccttcatattgctgtatttattgataaactaaaactgggatcataagtatatgtcatatatatgtaactttttttaaaaaattaagcacaaaaatacaaatgttagctgggtgtggcaatgagcgcctgtggtcccagctactagggaggctgaggtgggaggatcacttgagcctgggaggcagaggttgcagtgagctgagatcgcgccactgcactccagcatgagtgacagagtgagaccctgtctgaaaaaaataaaaaatctcttctagctaataggatatgcctatctaattccacttgagtcactactggcccttacgatgactagggctcataatcctgggaaatgtgaaccaagatggatccagggatgaagtctgacttttttttttttttttttgagacggaatcttgggattacaggcacgcgccaccacgcccggctaatttttgtatttttagtagatatgaggtttcaccatgttagccagactggtctcgaacttctgaccgggtgatccgcccgccttggcctcccgagtagctgggactacaggaacatgccactacgtctgcctaaattttgtatttttagtagagacggagtttcaccatgttggtcaggctggtctcgaactcctgacctcgtgatctatccagctcagcctctcaaagtgctgggattacaggcatgagccaccatacccagccgaggtctgaattttagtgcttgtgtggatattgctgtggcacataatgaaatatttttgaattgttttctctcttttttcactttagctttttgtaatgagctttaccaaattgttttagggcgggctgtgtggctcaggcgttatcctagcactttgggaggtcgagatgggcggatcaccaggtgaagagatcgagaccaccctggccaacatggtgaaaccccgtctttactaaaaatacaaaaattagccgggcggggtggcgcgcgcctgtcatcccagctactcaggaggctgaggcaggagaatcccttgaacccgggaggcagagtttgcagtgagccaagatcacgccactgcactccagcctggtgacagagcgagactccatctcaaaaaaaaaaaaaaaaaaacaacccaaaaaacaaaaaaaagtcgtaatttgggactaactagttttattaggtttctgcctactgttaattgcttcagattttctaaattcttttggtcccctttgtgtttgtgaaggtgaatgggcagtagtcaggcgtgttagatcaggccccaccagcccggtggaagcaacgtttgcgtgtggccggccgccccttgaaatccggccttcgcgctccagcgaagcccccgggacacgggaccgagggcccagcactctggctcctcacacatgtggtctccttcacgttcctttccttctcctcgcggtcccagcggatgcgaggaggcttagagacggcgggcttctctcccgcccgccgcagggtccgcgggtccccgccccgcccggggcgccgctccccctggggccgcccgggcgccctcccgccgccgggggcgctgtgggctgcagcgggcctggctgcagatgcggtggtggccgccgagcgcctggaaggagctgctggacaggccgagggagcctccgcccgagaccgcgcagccgccgccgccatgggtaaggcgagcgggccgaaaccgaacgctaggccctcagtcccgggctgagggccgcggccaggcggggtggactgggagctgggggagacgccgaggccgccagtcg

SEQ ID NO: 5199 - DNA, 2300 bp, Homo sapien
ttctcaataagttcctccttatatttgcctttctcttttctgacttgtcgagacttggctttgtgttcaataatttttttccgatccttgttgagatttagcctggtgataaccaccttgtttgggtgagtacccacgtggacggttgtgctgttggcctactcacgctgcacctgctcagtgtagatgacatctttctttctgtacacctggactaccttgccaatttgctgacctttgtagtgtccttgaactacctggacctcgtcgtccttgcggatgggtgtggagcggacattgtacttctgccgcagctccttggagagcggggatgacatgatcttccggtgcacgtgcaagggggcatggaagtgacgtttgcggtttttgctgcggtccaagttcacgaagggattgaacttcatggtgatgctccggctagcggcggcctcaggcctgttttgtttttttttttttttttgagacagtgactcactttgtcacccaggctggagttcagtggcatgatcaaggctcactgcagcctcgacctccttggctcaagtgatcctcctgcctcagccctccaagtaggtgggactataggtatatgccagcatactcagcttatttttgtattttttgtagagaccggttttcgctgtgttgctcgggctggtctcaaactcctgagctccagcaatctgcccaccttggcctcccaaagtgttgggattacaggcgtgagccactgtacctggcccagttatcatatttttagttctaaaatttccattttattctttctatcttctatttcttggctgagactttgttttttggttcatattcaagcgtgttcataattactcattaaatgttgttaccgtggctgctttaaaatcttggtcagatagttctgacctctctgtcattctggtgttggcatttatagattgtcatctgttttcattgagtttgagattttcctggttcgtctttaattattgatttttttattgaaacatgagcatattttgttgttactgaaaacttctgttttagctggcttcctctcacactgccatggtaggggaagaggggtaccacctcattcctgccaggtgggagtcgaagtgtgggttccccactcagccttctttgaccaaagtgggaggttcctcgttaccgctgggcccacttggttggggtggaagtctaggcttctgatgtggtctctactaacatgtggggttggtgccagttaccagtcatcggggatgaaagacctgactccctacttggctttctctgacacccgcctggtggggtgtggggcaccttgttacagccttgagaagggcagagatctaccctcctccctgtttgctggtgtctgtggttgtggggctgtactttttttccagtgatatttggctagagtagttattgtgtgaaagttttctgtctagctaggctttccttttcctgttccttcagctggagagagcagactttggttgcagctgtttttagcacccactggtgtgccgtggctccttcagttccaaatctgggatctatgaggcaaaaagaaagcccagggaatcaactactgtgttgtttctttggtcctgagctccctagctggtctgccttctctccacctttcagagtcttcttttgttttttttttttatatataatgcctagggattttagttgtcgtttgtggaaagaataaggaaaagtactccatcttcccagaagcaaagtcctggttgacattaaacaaacaaacaaacaaacaaaaaaagaactaacttattacctcttgaatgttccagatttccactgggaaatatccaaatgtgagcattgttcaatagtgtctggaaagtttacttgattatttttaatttgtagaaaaaaattaaaatttgcatgctataaatatttcagaattaaataatatcgaaggattcctgatgccatagaacaaaaaccttttgatcttttcatttcaaaaatgagagaaacaaaactacatttcttttacatgttaaataactgatctgttttccttgtttttagcttatagttgcaacaacatgtatgggaataaaccatccaatattttcccgtaaaatttttgatttttgtattgtggatgaagcctctcaaattagccaaccaatttgtctgggccccctttttttttcacggagatttgtgttagtgggggaccatcagcagcttcctcccctggtgctaaaccgtgaagcaaggtaggcagacac

SEQ ID NO: 5200 - DNA, 2300 bp, Homo sapien
ggaccttccccttccctctgccttttcccaccaatccagggcctcatgctgtccttgattggcaagtgtgactgagggctggtagctattttaatagctattctggcccattcattcttttagcagatagcagcatatttcttatacagactatgcgaaatggcgagcattcatgtatatttgttttgttgttttagaaacttgtcggtccttccagaatcaactttgttcagattagaccaagaagaaaaaaattgtgatatagataccccattaggaaatctttccaaattgatggaaaacacgtttgtcaggtttgtaacaatgagcaaatttgaatttcactccacttttctaaggaatattactaaaagtgctttttcacttttcagcaaaaaacttcgagatttaattattgactttcgtgaacctcagtttatatcctaccttagttctgttcttccacatgatgcaaaggatacagttgcctgcattctaaagggtatgctaaaatcaccatgtctgctttgattaatttttcttgtttctatttgatttatactgtagtctaatatcttgattagacttgcaactacaatgtttagaccaagactctttggaaatggttttgtattgaagaatagacttggatagagactgcttttcttatgaaataattaacttttcctttgaaattcaacactctttttcctgttatttttgaatttaaatgtaggtttgaataagcctcagaggcaagcgatgaaaaaggtacttctttcaaaagactacacactcatcgtgggtatgcctgggacaggaaaaacaactacgatatgtactctcgtaaggttattattcttctgcttagagacaaaatatttgtatcagcttctcctcagttcagaggatgtaatattgaatatcaaaagggctgaattttaattcagtgtctttgtttcaaatgaactttttagaatgatgagaaatagtaaagctgaagcacaaacagttgtaatcatgtagatttctcgcatttagaattttctaagatcgctttccgttagtggtatgtgatatttatcactatatgttttcctttccctttaaagatgatgttagaggccgggcgttgtggcttacgcctgtaatcccagcactttaggaggccaaggcgggcggatcacttgaggtcaggagttcaagaccagcctggccaacatggtgaaaccccctctctactaaaaatacaaaaattagccgggcgtagtggcatgcgcctataatcctagctttactcgggaggctgaggcaggagaatcacttgaacccaggaggcagaggttgtagtgagctgagatcacgccattgcattccaatctggacaacaagagcaaaactccatcctaaaaaaaaaagatgttagagatttttcttggattttttttttcatgtcagtaaatttctttttttcttttctttttcttttttttttttgagatggagtcttgttaacgtgagccaggcgaggtggatcatgcctgtaatcctagcactttgggagtccaagtcagggggattggtatttgagaccaggttggaatgcagtggcatgatcacagttcatgcagtctcaatctcctgggctgaaacagtcctcgttcctaagcctcccaagtagctgggaccacaggggcgcaccacctcatttggctaattaaaaaaagaattttttaaaaagagatggcatctcactttgttgcccaggcaagtcttgaatttctgggttcaagtgatccacttgcctcagcctcccaaagtgctgggattacaagtgtgagccaccatgcctggcctatgatgtattattgacatattattaataacgtataataatgtcatgtaatttttgtaaaatgttttggcttcataatttttacttggctcagctcttagatatggttcttgttaagtttataaacatgttaaaaattatctggaattaaaagtaaggctgttttttcttttttctcttacccattattaggtaagaattctctacgcctgtggttttagcgttttgttgaccagctatacacactctgctgttgacaatattcttttgaagttagccaagtttaaaataggatttttgcgtttgggtcagattcagaaggttcatccagctatccagcaatttacagagcaagaaatttgcagatcaaagtccattaaatccttagctcttctagaagaactctacaatagtcaagtaagcacaattattgtataataatact

SEQ ID NO: 5201 - DNA, 2300 bp, Homo sapien
ctacctcagcctcttgcatagctgggaccacaggtgcatgccaccacacctggctaattttttaattttttgtagagatggggggggtctcactacgttgcccagcctggtcttgaactcatgggctcaagtgatcctcctgcttcagccttctgaagtgctagcattataggcatgagctactacacccagcttattttcaatctgatatgtgttcaaattgataggaacacagaggagaggtatttaattcaattttaggaggttcagggaaggcttttttttttttgagaccgtctcactgttgcccaggctggagtgcagtagcacgatctcagttcactgcagcctctgcctcccaggctcaagcgattctcctgcctcagcctcccgagtagctgggattataggcgtgtgccaccatgcccgactaatttttatatttttagtagacgcagggttttactatgttgtccaggctggtcccaaattcccgatctcaagtgatcctcctgcctcagcttcccaaagtgttgggattacaggcgtgagccaccatgccagcccaagggaagccttttcgaagagctaattctgaatcttcatcctgtggattaataaattagtctggtgaaacagtgtgagaagagaatactatactgggcaaacctgttgcacaaacgtgtgatgtagtgtgacatggagcattcaggataatgcaggtaattacgttatttctagaatataaaatataaggaagagagtaattagatcaggtcatagaatgtcttacgtatcattttaaaaagttttccatcctgggccacatagtgagacccccatctctccaaaaaattaaaaaattagccaggtgtggtggtgtacacgtgtagtcccacctactcagggggctgcggtgagataacagcttgagctcaggagttcaaggctacagtgagccatgatcatgccactgcactctagcctaggcaacagaacaaggccctctctcaaaagaaaaaaagtttagattttatttattctattgaataaatagaattgtattgaaaggttttaaacagaagagtgggtaatcattggatttgcattttcctctggctacattgtagagaattgagttcattaatggaagaaaaactaaaagcaaacctggaagctgttgcagtgacccaggctagaggaaattgaggcagggtagtgttggcagagagaatggaatgactttgagaagtatttagaaagtaaaagtggctggcatttggatactgattgggtgtgtgggttggggagaggatgagggagagggaaggatcaagatggcagtgcaaatgcaaatgccaatgccattaactgtgatcaggaccagagaaggagcatcaggttcagcagggatgaggaggagttctgctttgaaagtactgtgctttcacagcctgggtttagctaagtggagagatctcactgcctactaaatatccaaacccaaagcttgggtgaggaaccaggtaggagaggagtgtgaggtcaggcctaaagatggaatttggaatttggaggcacgtgagggcctgggaccctggagcaaacaatgagaaagagtagtacaatgaaccagggaagggactctagggaataccagagcttaagggacagatagaagacagggagaaggtggcagaaaagaagcctgcactccaggttagaggaaggaagagccatgcattcaggatccctctggggatggtgaacccgtgttcgactgcaagggtaaatgaattttcagcaaatgttgcaggttcccaattattaattgctttgaccttggtgccttggaccttccccttccctctgccttttcccaccaatccagggcctcatgctgtccttgattggcaagtgtgactgagggctggtagctattttaatagctattctggcccattcattcttttagcagatagcagcatatttcttatacagactatgcgaaatggcgagcattcatgtatatttgttttgttgttttagaaacttgtcggtccttccagaatcaactttgttcagattagaccaagaagaaaaaaattgtgatatagataccccattaggaaatctttccaaattgatggaaaacacgtttgtcaggtttgtaacaatgagcaaatttgaatttcactccacttttctaaggaatattactaaaagtgctttttcacttttcagcaaaaaacttcgagatttaattattgactttcgtgaacctcagtttatatcctacc

SEQ ID NO: 5202 - DNA, 2300 bp, Homo sapien
taaaggacattttggcagagtatacctttatactttccaacaatgaccagaacacatcccaattcatatggttttatttttttttttagatggattctcgctgttgcccaggctggagtgcggtggcacaatcttgctcactgtaacccctgcctcccaggtccaagcgattctcctgtctcagcctcccaagtagctgagatcacaggcatgcgccaccatgtctggctaatttttgtatttttagtagagatggggttttgccatgttggccaggctggtctcaaactcctaacctcagatgatccttccgcctcagcctcccaaagtgatgagattacaggcgtgagccaccaggccccatatgcttttcttatgtgtcgttgacactcatcccatcaagaggtaggaactgtgttccccttcccttgaatctggctgagtgggcctgtgactaccgtgatgttatatcacttgcaaaggtaggtcataaagctgttgatatcagggacaaatactaatagaataactcccattccagtgtgtacatatttgaaagcccatgtacatgataaatatattaactttttgccaattttttttttcttttagactgagtcactctttcacctaggctggagtacagtggtgtgatctcagctcactgcaacctctgccttccaggctcaagtgattctcctgcctcggtcttctgagtagctgagattacaggagtgcaccaccacacccggctaatttttatatttttagtagagactgggtttcaccatgttggccaggctggtcttgacctcctgacctcaagtgattcacccgcctcggcctcccaaggtgttgggattacaggcctgagccaccgggcacccggcgcattttatctatttaaaaaatgaataacaaaaatcaggataacagttataccactgatatttaacatggctctggatgttcttgtcagtgcctccagatgagagaagtatataaatatcaaaaatcggtgcacaccactgtgcccagcaaggaaacatcttttaaaaatgggagacaccaggccatattagaggctcaatccaatagtgagggcgaggctgatgatacaagagaataattgaagaagcgatgcccttgagaatgcttgaagccctgggatgccaagtgcaagtggagcgattgccctttaaccagaagaacactttgtctgctattgaaaaaaggtggaaagaggttatgaagaatggtgcagatattagaagttttgtagaatttttttttttggagacggagtctcgctctacccaggctggagtgccgttgcaggatctgcaatctccacctcccgtgttcaatttattctacctcagcctcctcccgagtagctgggattacagacgcatgccaccacgcccggctaatttttgtatttttagtagagatggcgtttcaccatgttggccaggctggtctcaactgctgacctcgtgatcctcccgcctcagccttccgaagtgctgggattacaggcgtgagcctccatgcctggccagaagttttgtagatttagccgtggcatgatcaaggagttcctatccgacagtttctattttctcaataagttttctgaaaaaaaggggagaggctgtttcccagggagtgcacaattctgaaggctaaccaggggcgcctggttttgggcaactacaaatgtggttgtgttcaaactaagcgtgtaaaggttgtgttcaaactaagctgggcgcctgtagtcccagctacttgggaggctgaagcaggagaatggtgtgaacccgggaggtttcggacacgggttggagtgtcaagagagaaggcaggagcgtttagtctgcttcagatatgaagactccctgtattcccagtcctaagcaagggagcaaaggcaggggacagagccctgctgctcaggtgaggggccccacgtggaacgcgccggcgcgggaggggcggcctggcgcaggtcatttgggacatctgcgggttggcgcatgcgcgcgaggtgcgcaggctcgcgcctttttcccttttctaagctttctgtgttacccccggttccgctgtcttttctgtctacagtttgcgatccccgcgtccaggatggagcagctgaacgaactggagctgctgatggagaagagtttttgggaggaggcggagctgccggcggagctgtgagcggagaggggggagggtgtgggaacaaagcgggagatttgaaagaaggagcgggagaggctgcgtccgca

SEQ ID NO: 5203 - DNA, 2300 bp, Homo sapien
atgtagagacacaaaaataaatgaagaagctggacatggtgggatgggcatgtggtcccagctactctggaagctgaggtgagaggatcacttgagccctggaattccatgccagcctatgcaacatcatgaaaccccacttaataaatgaatgaacgactaagtcttgctcaaatgttattatgaggtactatgagtgacttacatgtgttttaaaatgtcagtgtgtttcccagaggcagaaataaaaatactgaatatctttgctcttaaaaaaaaagtaacactatagatttgtttttgttagatgatttgctctatagtagaatatttaagtagactgtgaaatatttattaatatagatgtgaatatcaaaaaatgtttctaaggtattatgatgcatcaactagttcttccatgtaaaataattttagtgcaatatgaagacgtagaaatgtaaaatatgatttgaattgttatcctttatattaagaaaatgttttaaaatgtaagaattccatttattctgtttagagtactttttatgatttattataagcgtgtcataaatgggaagggaatatttaaagttctgtgttcagaaagagtaatttgtagaactgatgtgactttttttttttttttgagatggagtctcgctctatcgcccaggctggagtgcagtggcgcgatctcagctcactgcaacctctgcctcccgggttcaagtgattctcctgcctcagtctcccgagtagctgggactacaggtgcccaccaccaaaaattcgcctggctaatttttgtatttttagtagagacgggatttcaccgtgttagccaggatggcctcgatctcctgaacctcatgatctgcccaccttggtctcccaaagtgctgagattactggcgtgagccacggcgcccggccctttgatgtgactttaaagacattagaaggccaggtgtggtggctcacgcctttattcccagcactttgggaggccgagttgggtggatcacctgaagtcaggagtttaagatcagcatggtgaaaccccacctctactaaaaatacaaaaagtagcaggtgtggtggctcgtgcctgtagtcccagttactcgcgaggctgagacatgagaattgcttgagctcgggaagcggaggttgcagtgagctgagatcacaccactgcactccagcctgggtgacagaatgagcctccatctcaaaaaaaaggagacattagaaaactaagttgagtccaggcgtggtggctcttgcctgtaaccctagcactttgggaggctgaggcgggaggatatcttgaccccaggagttcgagaccagcctgggcaacatagtgagaccccgtttctttcaaacaaaagaaggaaaactaagttgaaagtgttatttttgcttcaatttttatttctttacataaaaggtttcttgtcataccttggtaaaaatttgatgagctggtttcattttgaaagcctttattttaaaaataagtatgtatctttgtatgatttataagtgtaccagtaggtagaaatacatgtgttcttggccagatgtggtggctcacgcctgtaatcccagcattttgggaggctaaggcgagtggatcacctgaggtcaggagttcaagaccagactggccaacgtggagaaaccctgtctctactaaaaatacaaaaatcagccgggcatggtggcgggcgcctgtaatcccagctacttgggaggctaaggcagggagaattgcttgaacccaggaggcacaggttgcagtgagccaagattgcgccattgcactccagcctgggtggctgtataaaagcctgtataaaaatttcttttatacagagtgagactgtataaaagaaaaaaaaaggctgtacaaaaatttcttttatacagagactgtataaaagaaaaaaaaaagaaatacatgtgttcttaaaaccatttgtatattttcatttctagaccacactgtagctaattattgttattaaatgttaagataatttaagtatataaaataagtattgagccgggcatggtggctcacccctgtaatctcagcactttgggaggctgaggcggggggatcacgaggtcaggaaatcgagaccattgtggctaacacggtgaaaacctatctctactaaaaatacaaaaaattagctgggcgtggtggcacgcacctgtagtcccagttactcaggaggctgagacaggagaatcacttgaacctgggaggcggagcttgcagtgagccg

SEQ ID NO: 5204 - DNA, 2300 bp, Homo sapien
gtgaaattgcagataaggggggactatcgtagtgtgaaagcaagttaagatactattaaataggctgggtgcggtggctcatgcctgtaatcccagtactttgggaggtagaggcgggtggatgacgagatcaggagttcaagaacagtctggccaacatggtgaaaccctctctctactaaagactaaaaaaagaaaaaattagctgggcgaggtggtgggttcctgtaatcccacctactcgggaggctggggcaggagaatcgcttgaacctgggaggtgaaggttgtagtgagccgagatcgcaccattgcactccagccctggaaaaaaaaaaaaaaagatactattatataaaagtacttattgaatacattctaaacaatttctctctttttttttgagacggagtttcgttcttgtcgcccaggctggagtgcagtgacatgatctcggctcactgccacctatgcctcccgggttcaagcgattctcctgccccagctttccaagtatctgggattataagcatgtgccaccacacctggctaatttttgtatttttagaagagatggggtttcaccatgttggctaggctggtctcgaactcctgacctcagatgatctgcccacctcggcctcccaaagtgctgggaatacaggcgagagccactgcacctggcctaaataattcattatacagttaattcatacacaactgagaagataatataaaatattctgaaaccaaatgtatccaaatgcatattatttttagtttacccataattttggatagctatgattatgatttactttttttttttttttgagatggagtctcactctgtcacccaggctggagtgcagtggcacaatctcagctcactgagacctctgcctcccgggttcaggcaattctctgcctcagcctcccgagtagctgggattacaggtgtccgctaccacacctggctaatttttgtatttttagtagagacaaggtttcaccatcttggccaggctggtcttgaactcctgacctcgtgatccacccacctcggcctcccaaagtgctgggattacaggcatgagccactgcgcccagcctttttttgttttttgagacggagtttcattcttgttgcccaggctagagtgcaatggtgtgatctcggctcaccacaacctctgcctcccaagttcaagtgattctcctgcctcagcctcccaagtagctgggattacaggcacacgtcatcacacccagctaattttgtatttttagtagagacagggtttctccatgttggtcgggctggtctcaaactcccgacctcaggtgatccgcccacctcggcctcccaaagcgctgggattacaggtatgagtcaccatacctggccaactattattttcattagttcggataagagagctttgatatggaaacatagtggatataatatctgagtaaaaaatacattttatttatttatttatttaatttatttatttatttatttattttatttgtttttttgagaccgagacctgctctgttgctcgggctggagtgcagtggtgcgatctcggctcactattacctctgcctcctgggttcatgcaattcttctgcctcagcctcccaagcagctgggattacatgcacgcaccaccatgcccagctaatttttgtgtttttagtagagatgggattttaccatgttggccaggctggtcttgaattcctgacctcgtgatctgcccgcctcggcctcccaaagtgctgcgattacaggcatgagccacggctcccagccacaatttatttttggatatctcagaatatggatttttaaaattaaaattttatttgtgttttctttttttttctttttttaagacatagtctctgtaacccaggctggagtgcaatggtgtgatctcagctcactgcaacctccaccttttgggttcaagagattcttcttcctcggcctccccagtagttgggattacaggcagccgccaccatgcccggctaatttttttatttttagtagaaatggggtttcaccatattggccaggctggtttcaaactcctgacctcaagtgatctgcctgcctcggcctcccaaattgctgggattacaggcgtgagccaccgtgcccggacttgttgttttttaaagaccaggtgttgctgtgttatctaggctggagcgaagccgcacaattatagctctccgtgacctccaactgttggctcacgtcatcctccagccttagtctc

SEQ ID NO: 5205 - DNA, 2300 bp, Homo sapien
aaagtaaaaatggccttactaaataaattaaatttatgttcaagtgctatttatttacggcaccaaaaaacaaatatttcaaacaaattggagaactgagtggaagacagattcaggattgcctggaaaggcagaactatttgtgaaatgtgtagggccgaaaagaaagaatcacctgctttagcaaatactatatatatgtgcatattatatatgcatatatgtatatataatatatacatatatgtatatataatatatacatatatgcatatataatatatacatatatacacacatatatacatatatatacacatatatatacacgtgtgtgtgtgtgtatatatatatatatatatatattttttttttttttttttgagacggagttttgctcttgtcgcccaggctggagtgcaacggtgcaatctcagctcactgcaacctccgcctcccaggttcaaccgattctcctgcctcggcctcccgagtagctgggattactggcacccacaggcacccacaaccacgcctggctaatttttgtatttttagtagagacaaggtttcaccatgttggccaggctggtctcgaactcctgacctttggtggtccgccagtcgtggcatcccaaaatcctgggattactgcatgagccaccgccccaggcctggttgtgtgtgtttttttttttttttttttttttttttgcagaggtggtaggggaggaatggaagcttagtgggggatttagggagggcagaaattggtgttcagtgaggagctctgacaaggcagagctgatttggtgggagatggaagcaagtcaaaacatgcctgaaaaagcgagaagccgcaggttagaaaggctgcatcttggccgggcgccgtggctcatgcctgtaatcccagcactttgggaggccgaggcaggcggatcgcgaggtcaggagatggagaccatcctggctaacacggtgaaaccccgtctctactaaaaatacaaaaaattagccgggcgtggtggtgggcgcctgtagtcccagccactcaggaggctgaggcaggagaatggcgtgaacccgggaggcagagcttgcagtgagccgagatcaggccagtgcactccagcctgggcgacacagcgagactccgtctcaaaaaaaaaaaaaaaaaaaaaaaagaaaggctgcatcttagggaggtcagaatacagctccgagagcagggcgcagaggctcacgcctgcaattccagcactttgggaggccgaggagggcggatccgatgaggtcagcagttcggaccagccttgaccaatacgttggaaaccccgtctctactaaaaatacaaaaagtaaccaggggtagtattgcacgcctataatcccacctactagggaggctgaggcaggagaattgcttgaacccagggggtggaggttgcagtgagcagagatctcgccactgcactccagcctgggcaacagaacgagactccgtctcaaaaaaaaaaaaaaaaaaagcgcgataggcgattactggtcagtggtcaatataggtcaagggacgagacaggagagagctttctaaggttgtgggcctttttattttttatttttttgaggcgtagtctcgctgtgtcgcccaggctggagtgcaatggtgcgatctaggctcactgcaatctccgcctcctgggttcaaccaattctcctgcctcagcctccccagtagctgggattacaggcgcccgccctcacgcctggctaattttttgtatttttagtagagacggggtttcaccatgttcgcctggctagtcttttttttttttagacggagtctcactctgtcacccaggctagagtgcagtggcgctatctcagctcactgcaacctctgcctcctggattcaagtgattctcctacttcagcctctcgagtagctgggactacaggtgcccgccaccccgcccggctaatttctgtatttttagtagagacggggtttcaccatattggccaggctggtctcgaactcctgactttgtgatccgcccgcctcagcctcccaaagggctgggattataggcgtgagccacggcgcccggcatccaggctagtcttgaactcctgacctcaagtgatccgtccgcctgggcctcccaaagtgctgggattacaggcgtgagccaccgcgcccggccaggttgtgggttttaatgggaccatctcactgcctaccgtttcctttttccgtccgaacagaaggggcctgagcagtgaactgaca
